United States Patent Application Publication US 2024/0327476 A1 - sequence listing, part 117

SEQ ID NO: 222855 - DNA, 1125 bp, synthetic construct
  misc_feature 1..1125: note = Description of Artificial Sequence: Synthetic coding sequence
  source 1..1125: mol_type = other DNA
atggagttcgtgaaatgtctgggccaccctgaggaattctacaacctcgtacggttcaggattggaggaaagcgtaaggtgatgccaaagatggatcaggacagccttagttcatcactgaagacgtgctataagtatctcaaccaaacctcgaggagcttcgctgcggtgatccaggcattggacggcgagatgaggaatgcggtgtgcatcttctacctggtgctcagggcactcgacacactcgaagatgacatgaccatcagcgttgagaagaaagtgccactccttcacaactttcattcattcctctatcagccagattggcgcttcatggagtcaaaggagaaagaccgccaagtgctggaggacttccccacatattgtcactatgtggcaggcttagttgggatcggcctgagccgtctgtttagtgccagcgaattcgaagaccccctcgtaggcgaggatactgaacgagccaattcaatgggactttttctgcaaaaaactaacattattcgagactatctggaggaccagcagggtggtcgagaattctggccgcaagaagtctggtcacgttatgtgaaaaaactgggtgacttcgcgaagcccgagaatatcgatctggctgtacagtgcctaaacgaactgattacgaacgccttgcatcacattcccgacgttatcacctatcttagcaggttacgcaatcagtcggtgtttaatttctgcgcgattcctcaggttatggccattgccaccttagccgcttgttataacaatcagcaggtgttcaaaggcgctgtgaagatacgaaaagggcaggctgtgaccttgatgatggacgccaccaacatgcccgcagtcaaagctatcatctaccagtatatggaagaaatttaccatcggattcctgacagtgatccaagctctagtaaaactcggcagattatctccaccatccgtactcagaaccttcctaactgtcaactcatctctaggagccactattcaccaatctacctctcttttgtcatgctgctcgcagcgctgagctggcagtatctgactactcttagccaggtgactgaagattacgtgcagaccggtgagcactag

SEQ ID NO: 222856 - DNA, 999 bp, synthetic construct
  misc_feature 1..999: note = Description of Artificial Sequence: Synthetic coding sequence
  source 1..999: mol_type = other DNA
atgaccatatcggtcgagaagaaggtccctctgttgcacaacttccattcatttctataccaacccgattggcgatttatggaatctaaggagaaagaccgccaagtcctggaggactttccgacaataagcttggagttcaggaatttggcagaaaaataccagaccgtcatcgccgatatctgtcgtcgaatgggaatcgggatggctgagtttttggacaagcatgtcacatctgaacaggaatgggacaagtattgtcattacgtggccggactggtgggaattggtctgtcgcggctattcagtgcaagcgagtttgaagaccccctggttggagaagatacggagagagcaaattcaatgggactgttcctccagaagaccaatatcattagggactacctcgaagatcagcaggggggtagggagttttggccacaagaggtctggtcccgttacgtcaagaaactgggtgatttcgccaaacctgaaaacatagacctcgccgtgcagtgccttaacgagcttatcacgaacgccttgcatcatattcccgatgtaatcacctacctgtctaggttgaggaaccagagcgtttttaacttttgcgcaatccctcaagtgatggcaatagcaacactagctgcctgctacaataaccaacaggttttcaagggcgcagtgaaaattaggaaagggcaggcagttaccctgatgatggatgctacaaatatgcccgcagttaaagccataatttatcagtacatggaagagatctaccaccgcattcccgactctgatccctccagttccaagactcgacagataattagcacaattcggacacagaatctccccaactgtcaactcatttctagaagccattactcgccaatctacctgtcctttgtaatgttgcttgccgctctgagctggcaatacttaaccaccctgtcacaggttacggaggactatgtgcaaactggcgagcattag

SEQ ID NO: 222857 - DNA, 1233 bp, synthetic construct
  misc_feature 1..1233: note = Description of Artificial Sequence: Synthetic coding sequence
  source 1..1233: mol_type = other DNA
atggaattcgtgaaatgcctcggacaccctgaagagttctataacttagtacgattccggataggcggtaaacgcaaagacagcttgtcttcctcgcttaagacctgttataagtatctgaaccagaccagtcgctcattcgccgcagtaattcaggccctcgacggagaaatgcggaacgcagtgtgcatattttacttggtccttcgcgcactcgatactctggaggacgacatgacaattagcgtggaaaaaaaggtcccactcttgcataattttcactcgtttctgtatcagccagattggcggttcatggagtccaaagagaaggacagacaggtcctggaggacttcccgacaatttctttggaattcaggaacctagctgaaaaataccagaccgtgattgctgacatctgcagacgtatggggatcgggatggccgagtttctggacaagcatgtaacctcggagcaggaatgggacaagtactgccactacgtagccggtttagtcgggatcggcctctctcggttgttttcagccagtgagtttgaggaccccctggtcggtgaggataccgagcgggcaaactccatgggtctcttcctgcagaagacaaacatcatccgcgactatttggaggaccaacagggtgggagagagttttggccacaggaggtgtggtcaagatatgtgaagaagctgggagatttcgcaaagccggagaacattgacctcgccgttcagtgtttgaatgaattgataactaacgctctgcaccacatacctgacgtgatcacatacctgagtcgtctcaggaatcaatccgtcttcaatttttgtgccataccgcaagtcatggctatagctacactggccgcatgctataataaccaacaagtattcaaaggcgctgtaaaaattaggaagggccaagccgtgaccttgatgatggacgcaaccaatatgcctgctgtcaaggctatcatataccaatacatggaagaaatttatcaccgaataccggacagtgacccctcaagttctaaaacaaggcagatcatctccactattaggacccagaacctgcccaactgtcagttgatcagccgttcccactactcaccaatttacttatcctttgtcatgctgctcgcggcattgagctggcagtacctgacaaccctgtcccaggtaactgaagactatgtgcaaactggagagcactag

SEQ ID NO: 222858 - DNA, 999 bp, synthetic construct
  misc_feature 1..999: note = Description of Artificial Sequence: Synthetic coding sequence
  source 1..999: mol_type = other DNA
atgaccatcagtgtggagaagaaagtgcctttgctgcacaatttccactcttttttgtatcaaccagattggcgcttcatggaaagcaaagaaaaggacaggcaggtcctggaagattttccgaccatttccttggagtttcgaaacttggccgagaaatatcagactgtgatagcagatatttgcagaagaatgggtattgggatggcggaattcctggacaagcacgtcacctctgagcaagagtgggacaagtactgccattacgtcgccggtctggtggggataggtctctccaggctcttcagtgcatctgagtttgaggaccccttggtcggggaagatacagagagagctaactccatgggcctattcctacagaaaaccaatattattcgcgattacctggaagaccagcagggcggtagagagttctggccacaggaggtctggagtaggtacgtcaagaagctgggtgatttcgccaagcccgagaatatagatctcgccgtacaatgtttaaatgagctcataacaaatgcgctgcatcacatcccagacgtgatcacctacctgtccaggctgcggaatcagtccgttttcaacttttgtgctattccacaggtgatggccattgctacacttgccgcatgttataataatcagcaagtattcaagggcgctgtgaagatccgaaaagggcaggctgttacgcttatgatggacgcgactaacatgcctgcagtcaaagccataatctaccagtacatggaggaaatataccaccgtattccagacagcgatccatctagcagtaaaacgcggcagattattagcactattaggactcaaaacctcccaaactgccagctgatcagccgttcccattacagccccatctatctttcattcgtgatgctgctggccgctttgtcctggcaatatctcacaacactctctcaagtgacagaggattacgtgcagacaggcgaacactag

SEQ ID NO: 222859 - DNA, 1062 bp, synthetic construct
  misc_feature 1..1062: note = Description of Artificial Sequence: Synthetic coding sequence
  source 1..1062: mol_type = other DNA
atgagaaacgccgtgtgcattttctacctggtgctcagggccctggataccctcgaggacgatatgaccatatccgttgagaagaaggtgcccttgcttcacaatttccattctttcctttaccagcccgattggcgctttatggagagcaaagagaaagaccgacaggtgctagaagacttccctacaatctcgctcgagttcagaaatctcgccgaaaaataccagactgtgattgccgatatctgtcgccgtatgggcatagggatggccgagttcctggataagcatgtaacttctgaacaggaatgggataagtactgtcattacgtggccggactggtgggcattggcctgtcacgcctcttctccgctagcgaattcgaagatcctctggtgggagaagatactgagcgagctaattctatgggcctgttcttacaaaagaccaatatcatacgcgactatctggaggaccagcaaggcggtagagagttctggcctcaggaagtgtggtccaggtacgtgaagaaacttggagactttgccaaacccgagaacatcgacctggccgtccagtgcctgaatgagcttatcacaaacgcactgcaccatataccagatgtgatcacttacctgtcgaggttaaggaatcagtcggtgtttaacttttgcgccatcccacaggtaatggcaattgcaacattggcagcctgttataataaccagcaggtgttcaaaggcgctgtgaaaattaggaagggacaggctgtaacgctcatgatggatgccacaaacatgcctgccgtgaaggcaatcatctatcaatacatggaagagatctaccaccgaattcccgactctgacccctcatcatctaagacaaggcagatcatcagtaccataaggactcagaatctccctaactgtcagctgatctctcggtcacactacagccctatttatcttagtttcgtgatgctgcttgctgcactgtcctggcaatacctaactaccctctcgcaggtcactgaggactacgtgcagaccggggagcactag

SEQ ID NO: 222860 - DNA, 1062 bp, synthetic construct
  misc_feature 1..1062: note = Description of Artificial Sequence: Synthetic coding sequence
  source 1..1062: mol_type = other DNA
atgcgcaacgctgtgtgcatcttttacctggtgttgcgggcattagatacgctcgaggacgatatgactatttcggtcgagaaaaaggtacccctcctacacaactttcattctttcctctatcaaccggactggcggttcatggagtctaaggagaaggatagacaggtccttgaagattttcctaccatttctttggaattccgcaatctcgccgaaaaatatcagaccgtgattgcagacatctgccgcagaatggggattggtatggctgaatttctggacaagcacgtgactagcgagcaagagtgggataaatactgtcattacgtggcgggacttgtgggcataggcctgagccggctcttctccgctagcgaattcgaagaccctctcgtgggtgaggatacggagagagctaattcaatgggcctattcctacagaagactaacataattcgggattatttagaagaccagcagggtggtcgagaattttggccccaggaggtttggtcccgctacgtgaagaaactgggggacttcgcaaagccagagaatattgatctggctgttcaatgccttaacgagttgatcacaaacgccctgcaccatataccagacgtgattacctacctgagtaggcttagaaatcagtcagtgttcaacttctgtgccatcccgcaggtaatggcaattgccaccctggctgcatgttacaataaccagcaggtgttcaagggagcagtcaaaatcaggaagggccaggctgtaacacttatgatggacgccactaacatgccagcggtaaaagctatcatctaccagtacatggaagagatatatcatcgaattcctgactcagatccctcatcttcgaagacacgccagatcatcagtacaattcgtactcaaaaccttcctaactgtcagctgattagccgctcccattacagccctatttatctgtcttttgtgatgctgctcgctgcgctgtcctggcaatatctgacaactctcagtcaggtgacagaggattacgtgcaaacaggtgagcattag

SEQ ID NO: 222861 - DNA, 921 bp, synthetic construct
  misc_feature 1..921: note = Description of Artificial Sequence: Synthetic coding sequence
  source 1..921: mol_type = other DNA
atggaatctaaggaaaaagacaggcaagtgctggaggatttccccaccatctctctggaatttcgcaatctggccgagaagtatcagacagttatcgcagatatctgcaggcgaatgggcataggcatggcagagttcctggacaagcacgtaacatctgaacaggagtgggataagtactgtcactatgtggccggactggttggtatcgggttaagccgtctttttagtgcttccgagttcgaggaccctcttgtcggagaagataccgagagagccaactcaatgggcctcttcctgcagaaaactaacatcatccgggattatctggaggaccagcagggcggaagagaattttggccgcaggaggtctggagccgttacgtcaaaaagctgggcgacttcgctaagccagagaatattgacttggctgtgcagtgtttgaatgagctgatcaccaacgcgctccaccatatacctgacgtgatcacctacctgagtcgcctgcggaaccagtccgtctttaatttctgcgctattcctcaggttatggccatcgctacactagcagcctgttacaacaaccagcaggtttttaaaggtgctgtaaaaatcagaaagggacaagcggtcacattgatgatggacgccactaatatgccagcagtgaaagccataatttaccaatatatggaagaaatttaccatcgcatccctgattctgatcccagttcgtctaagacaaggcaaatcataagcaccatccggacacagaacctgcctaactgccaactaatcagtaggtcgcactattctcccatttacctcagttttgtcatgctgctggctgctcttagttggcagtaccttaccaccctctctcaagtgaccgaagactacgtccagactggtgaacattag

SEQ ID NO: 222862 - DNA, 1140 bp, synthetic construct
  misc_feature 1..1140: note = Description of Artificial Sequence: Synthetic coding sequence
  source 1..1140: mol_type = other DNA
atggcagcaaccgaaggcgtgggcgaagcagcccagggcggagagccaggacaaccagctcagccccctccacaaccacaccctcctcctccccaacagcagcataaagaagaaatggccgcagaggctggagaggccgtggcttcaccaatggacgatggttttgtttccctcgactctcctagctatgtcctatatcgggacagagccgagtgggcggacatagatcctgtaccacagaatgatggccctaatcccgtggtgcaaattatttacagcgataaatttcgggatgtttatgattacttccgggcagtcctccagagagacgaaaggtccgagagagcctttaaactgaccagggacgccatcgagctcaacgcagccaattacaccgtttggcactttcggcgtgtgctactgaagtccctccagaaggacctgcacgaagaaatgaattacatcacagctatcattgaagagcaaccaaagaactaccaggtgtggcatcaccggagagtgctcgtcgagtggctgagggacccctctcaagagttggagttcattgcggacatcttaaaccaggatgcaaagaattaccatgcatggcaacaccgtcagtgggtgattcaagagttcaaactgtgggacaacgaactacagtacgtcgatcaattactgaaggaggacgtccggaataacagtgtttggaatcagcgttatttcgtgatatcaaacacaaccggttacaacgaccgtgccgtgctggagcgggaagtacaatatacgctggagatgatcaaattagtcccgcacaacgagagcgcatggaattatctgaagggaatcttacaggataggggcctgagcaaatatcccaacctcctgaatcagttattggacttgcagccatcccactctagcccttacctcatcgcatttctcgtggacatctatgaggacatgctggagaaccaatgcgacaacaaggaggacattctcaacaaggctctcgaactctgcgaaatcttggccaaagagaaggacaccatccggaaggagtattggcggtacataggtcgttccctgcagagcaaacattccacagagaacgactcccctaccaatgttcagcaatag

SEQ ID NO: 222863 - DNA, 939 bp, synthetic construct
  misc_feature 1..939: note = Description of Artificial Sequence: Synthetic coding sequence
  source 1..939: mol_type = other DNA
atggcagctacagaaggggtgggcgaagccgcacaaggcggagagcctgggcagccagcccagccccctccacaaccccatcctcctccgcctcaacagcagcataaagaagagatggcagccgaagccggtgaagcagttgccagccctatggatgacggatttgtgtccctcgatagcccatcatatgttctctaccgccactttcgtagggtgctcctcaagtcgctccagaaagacctgcacgaggagatgaattacattacggccatcatcgaagagcaacccaaaaactatcaggtttggcaccatagaagagtgctggtggagtggctgcgagatccttcacaggaactcgagtttattgctgacattcttaaccaggacgctaaaaactaccatgcttggcaacaccggcaatgggtgatccaggagttcaaactatgggataacgagctacagtacgtggatcaactgcttaaagaagatgtccgcaataacagcgtatggaaccagcgctactttgtcattagcaacacgaccggatataatgatcgagcagtcctggaaagagaggtacagtatactttagagatgattaagttggttcctcacaacgagtctgcttggaattacttgaaggggatactccaagatagaggcttgagtaagtaccccaatctcctgaaccaactactggacctgcagcctagtcactcttcaccctatctcattgctttcctggtggatatctatgaagatatgttagaaaaccagtgtgacaacaaagaagatatcctcaataaggcacttgaactatgtgagatcttggcgaaggaaaaggacactatacgaaaagaatactggaggtatatcgggcgtagtctgcagtcaaagcacagcacggaaaatgatagtccgacgaacgtgcaacagtag

SEQ ID NO: 222864 - DNA, 1314 bp, synthetic construct
  misc_feature 1..1314: note = Description of Artificial Sequence: Synthetic coding sequence
  source 1..1314: mol_type = other DNA
atggcttcaccctcctctttcacttactattgcccgccttcatcatcccctgtatggagtgaacccctgtactctctcagacccgaacatgcacgcgagagactgcaggacgacagcgttgaaacagtgacgtccatcgaacaggcaaaggtcgaggagaaaattcaggaagtcttttcgagctataaattcaatcacctggttcctcgtctggtactacagagagagaagcatttccattatctgaagaggggcttgagacagctgactgatgcttacgaatgtcttgatgcttctcgtccctggttgtgttactggatccttcactcgctcgagttactggacgagcccataccccaaattgtcgcaaccgacgtgtgccagtttctggaactctgccagtctccggaaggcggtttcggtggcggaccagggcagtaccctcacctcgctcctacctatgccgctgtgaacgccttgtgcatcatcggcacggaggaggcatatgacattatcaaccgcgagaaactgctccagtacttgtattctctgaaacagccagacgggagctttctgatgcacgtgggcggtgaggtggacgtgagatccgcttattgcgcagcaagtgttgccagtcttacaaacatcattacccctgatctcttcgagggcactgcggagtggattgctagatgccagaactgggaggggggaatcgggggagtccctggcatggaggcccatggaggatatacgttttgtggcttagctgccctggttattctcaagagggaaaggtctctcaacctcaaatctctcctgcagtgggtgaccagtaggcagatgagatttgaaggcggtttccagggacgctgtaataaactggtggacgggtgctactccttctggcaggctggactattacctctgctgcaccgcgctctgcacgcccagggtgatccagccctgtccatgagccattggatgtttcaccagcaggccctgcaggagtatattctgatgtgttgccagtgccccgcaggtggactcctggacaagcctggcaaaagccgggacttttatcacacatgttactgtctatcagggctgagcatcgcccagcacttcggctccggagctatgcttcatgatgtagtactgggtgtccccgagaacgcgcttcaaccaacgcaccctgtgtacaacattggccctgataaggtaattcaggccaccacctatttcttacagaagccagtgcctggatttgaggagctgaaagacgagacttctgctgaacccgctaccgattag

SEQ ID NO: 222865 - DNA, 1953 bp, synthetic construct
  misc_feature 1..1953: note = Description of Artificial Sequence: Synthetic coding sequence
  source 1..1953: mol_type = other DNA
atggcatctaatatggaccgggaaatgatcctggccgactttcaggcatgcacaggtattgagaacatcgacgaggcaatcaccctcttagaacagaacaattgggatttggtcgcagctattaatggggtgatcccccaggaaaacggaatcctgcagagtgagtatgggggtgaaactatacctgggccagcatttaatcccgctagccaccccgcaagcgctcccacctccagttctagtagcgcattcagaccagttatgcctagtcgccaaatcgtagagaggcagccccgtatgcttgactttagagtggagtacagagaccggaatgtggatgtcgttctcgaagacacttgcactgtcggtgaaattaaacaaatcctggagaatgaactgcagattcctgtgtccaagatgctgcttaaggggtggaagactggcgacgtggaagatagcacagtgctaaaatccctacatctgccaaagaacaactccttatacgtccttactcccgacttaccccctccatccagcagctcccacgctggagcactgcaagagtctctgaatcaaaactttatgctgattatcacgcaccgcgaagtgcagcgagagtacaatctcaacttctctggcagtagcaccatacaggaggtaaagcggaatgtgtatgatctcacttctatcccagtgcgccaccagctgtgggagggttggcctacttccgccaccgatgattcaatgtgcctggcagagagcggattgtcttatccatgtcaccggctgaccgtgggtagacgctccagccccgcacaaacacgcgagcagagtgaggagcagatcaccgatgtgcacatggtaagcgacagtgacggagacgattttgaggatgcgaccgagttcggcgttgacgatggggaagtcttcggtatggcctctagtgcactgcggaaaagcccaatgatgcccgaaaatgctgagaacgagggcgacgcgctcctgcagtttactgctgagttttcaagccgatatggagattgccatcctgtgttctttatcggctcccttgaagccgcattccaggaggccttttacgtgaaagcaagagatagaaagcttctggcaatatatctccatcatgatgagagcgtacttaccaacgtgttttgctcccagatgctctgtgcggaatctatagtatcatacctaagtcagaatttcatcacgtgggcctgggacctgactaaggattccaatagagcccgattcctgacaatgtgcaacaggcactttggctcagtggtggctcagaccattagaactcagaagaccgatcaattccctctcttcctgatcataatgggtaagcgttcaagtaatgaggtgctcaacgtcattcaggggaacacaaccgtcgacgagctgatgatgaggcttatggccgcaatggagatctttaccgcccagcagcaggaggatatcaaggacgaggatgagagagaagcacgagaaaacgtcaagagagaacaggatgaagcatatcggctctccttagaggcagaccgggcaaaacgcgaggcccacgagagagagatggctgagcagttcagattggaacagattagaaaggagcaggaagaggaacgcgaggccatacgtttatcgcttgagcaggcactccccccagagccaaaggaagagaatgccgagccggtatccaagcttcgaatccgcacaccgtctggcgaattcctggaacgtcggttcctcgcatctaataagctgcagatcgtatttgactttgtggccagtaaaggattcccctgggatgaatacaaattactctcgacatttcctcggagggacgtgacccagctggatcctaataaaagtctgctggaggtcaagttgttcccacaagaaaccctgttcttggaagctaaggagtag

SEQ ID NO: 222866 - DNA, 1473 bp, synthetic construct
  misc_feature 1..1473: note = Description of Artificial Sequence: Synthetic coding sequence
  source 1..1473: mol_type = other DNA
atgatcctggctgacttccaggcgtgcaccgggatcgaaaacatagacgaggccatcacactgctggaacagaacaattgggatcttgttgccgctatcaatggggtgatcccacaggaaaatggtattctgcagtccgagtatggtggtgaaaccatcccagggcctgcttttaaccccgcaagtcacccggcttcggcacctacatcgtcatcgagctccgctttccggcctgtcatgccctcccggcagattgtagagcggcagccccgaatgttagactttagagttgaatacagggatagaaacgtagatgtggtcctggaggacacgtgtaccgtcggcgaaataaaacagattcttgagaatgagctccagatccctgtttcgaagatgttactcaaggggtggaaaactggtgacgtcgaagacagcaccgtgctgaagtccctgcatttacccaagaataattctctttacgtgctaactcccgacctgccaccgcctagcagttccagtcatgctggggcactgcaagaattcagtagcagatatggggattgtcaccccgtattttttatcggttctctcgaagctgcctttcaggaggccttttatgttaaagctagagaccgcaaactgctggcaatctatcttcaccatgacgaatccgtgctgaccaatgtcttttgctcccagatgctgtgcgcggagtctatcgtgagttacttgagccaaaatttcattacttgggcttgggaccttacaaaagactccaaccgagccaggtttctcacaatgtgcaatcgacactttggctccgtcgtggctcaaacaatcagaacacaaaagacggaccagtttccactgtttctcatcatcatgggtaagcgatcatccaacgaagtccttaacgtgattcaggggaatacgacagtggatgagctgatgatgcgtctcatggcggctatggagattttcaccgcccaacagcaagaagacattaaagatgaggatgagagagaggcccgagaaaacgttaaacgagagcaggatgaggcctaccgcctgagtcttgaagccgacagggccaaacgggaggcacacgagagagaaatggcagagcagtttaggcttgagcagattcgaaaagagcaagaagaggagagagaggccatccgactgtccctggagcaagccctgccacccgagcccaaggaggagaatgccgagccagtatcgaaacttcgcattaggactccgagcggcgaatttctggagaggaggtttctagcctccaataagctgcagatcgttttcgactttgtagcctcaaagggcttcccatgggacgagtataaacttctgtctacttttcctcggcgagatgtgacccagctggacccgaataaaagcctcctggaagtcaagctctttcctcaggagacgctcttcctcgaggctaaagaatag

SEQ ID NO: 222867 - DNA, 1953 bp, synthetic construct
  misc_feature 1..1953: note = Description of Artificial Sequence: Synthetic coding sequence
  source 1..1953: mol_type = other DNA
atggcctcaaacatggatagagaaatgattttagccgactttcaggcctgtaccggaatcgaaaacatcgacgaggcaatcaccctcctggaacagaacaactgggatctggttgccgcaattaacggcgtgattcctcaagaaaatggcattctgcagtccgaatacggcggagagactatccccggaccggcttttaaccccgcttcacaccctgcatccgcccctacaagctcctcttcttcagcctttcggcctgtgatgccgagtagacagatcgtggaaaggcagccaaggatgcttgacttcagagtggaatacagagaccgcaatgtcgatgttgtgcttgaagacacatgcacagtaggagagattaagcaaattttagagaatgagttacagattcctgtgagtaaaatgctgctcaaaggctggaagactggcgacgtagaggattccaccgttctcaagtctctccacttacctaagaataattctctatacgtgctaaccccagatctacccccaccctcctcctctagccacgctggggcactgcaggagagcctgaatcaaaatttcatgctcattatcactcaccgcgaagtgcagagagagtataacctcaacttctctggcagtagcacgattcaggaggttaagaggaacgtatacgaccttacatctatcccagtgagacaccagctctgggagggctggccaacatccgcaactgacgacagcatgtgcttagcggaatccggcctctcatacccctgccacaggctgacagtcggtagaaggtcaagtcctgcacagacgagagagcagtccgaggaacagatcactgatgttcatatggtgagcgattctgatggtgatgactttgaggacgcaaccgaatttggggtggacgacggagaagtgtttggaatggcctcctccgcactgcgcaagagccctatgatgcctgagaatgcagaaaacgagggtgacgccctgctgcagtttacagcggagttttcaagccgctatggtgattgtcatcccgttttcttcatcgggagcctggaggccgctttccaggaggctttctatgtaaaggcccgagaccgtaaactgcttgctatatatctgcaccacgacgagagcgtgctgactaacgtgttttgttcacaaatgctctgcgctgagtcgatcgtgagctacttgagccaaaacttcatcacatgggcgtgggacctgacgaaggacagcaatagagccaggtttttaaccatgtgcaatagacatttcggaagcgtcgttgcccaaacaattagaacccaaaaaactgaccaatttccgctatttttaatcataatgggtaagcggtcatctaacgaagtcttaaacgtaattcagggcaacactactgtcgacgagttgatgatgcgactgatggccgctatggagatttttaccgcccagcaacaagaggatattaaggacgaggacgaaagggaagctagggaaaacgtcaaacgtgagcaggacgaagcctatcggctgagtctggaggccgaccgagcgaaacgcgaggcccatgagagagagatggccgaacaattcaggctggaacaaataaggaaagaacaggaagaggagagggaggcaataaggctgagcctcgaacaggccctgccgcctgagcctaaggaggagaatgcagagcccgtcagcaagctgcggatcaggactccatccggagaattcctcgaaaggaggttcctggcctctaataaactgcagatcgtgttcgattttgtcgcctccaaggggtttccatgggatgagtataaactgttgtctacgttcccccgaagagatgtgactcagttagatcctaacaaatctcttctggaggtgaaactcttccctcaggaaacgctctttcttgaggcgaaggaatag

SEQ ID NO: 222868 - DNA, 1497 bp, synthetic construct
  misc_feature 1..1497: note = Description of Artificial Sequence: Synthetic coding sequence
  source 1..1497: mol_type = other DNA
atggccagcaatatggatcgggaaatgattttagcagacttccaagcctgcacaggtattgagaacatagatgaagctattaccctccttgagcaaaataattgggacctggtggccgctatcaatggggtgattcctcaagagaacggcatcctgcagagcgagtatggtggagagaccatacctgggccagcctttaaccctgcgtcccaccctgcgagtgcacccacgagttccagctcatcagcattccgaccggttatgccctcacgacaaatcgtagagcgccaaccccgtatgctggacttccgcgtggaataccgagatcgaaacgttgatgtcgtgctggaggatacttgtaccgtaggtgagattaagcaaatcctcgagaatgaattacagataccggtgtctaaaatgttgcttaaaggttggaagaccggggacgtagaggactccactgtgcttaaatcccttcacctgccaaagaataattccttgtacgttctcactcctgacctgccgcctcctagcagttcctcgcacgctggcactcttcagcagttcagttatcggtacggagattgccacccagtcttttttattggttctctggaggccgcatttcaggaagccttctacgtgaaagccagagatcggaagctgctcgccatttacctgcatcacgatgagtctgtgcttacgaacgttttctgctctcaaatgctatgcgcagaaagtattgtcagttacttgagtcagaacttcataacctgggcatgggacctgaccaaggatagtaatcgcgcaagattcctgacaatgtgcaataggcacttcggcagcgtagtggctcagactatccgcactcaaaagacagatcagttccccctcttcctaatcataatgggaaagcgatcctcgaatgaggtcctgaacgttattcagggcaatacaacagtagacgagctgatgatgcgcctgatggccgctatggagatatttaccgcacaacaacaagaagatatcaaggatgaggacgagcgagaggcgcgtgagaacgtgaagagggaacaggatgaggcttacagactgtccctggaggctgaccgagcaaaaagggaagctcatgagcgggaaatggctgagcagttccgcctggagcagatccgcaaggaacaggaagaggaacgggaagccatccggctgtcccttgaacaggccctgcccccagaacctaaagaggagaacgcagagccggtatcaaaactcaggatccgtaccccgtccggggagtttctcgaaagacgtttcttagcgtctaacaaactgcaaatcgtatttgactttgtggcgagtaaaggtttcccgtgggacgagtacaaattattatctacttttcccaggcgcgacgtaacgcagctggaccccaacaagtctcttctggaagtgaagttgttccctcaagaaactctgttcttagaggctaaagaatag

SEQ ID NO: 222869 - DNA, 1227 bp, synthetic construct
  misc_feature 1..1227: note = Description of Artificial Sequence: Synthetic coding sequence
  source 1..1227: mol_type = other DNA
atgagaaatctgttggagatgtgcctggcagaatcaggcctgagctacccttgtcaccgactgactgtaggccgacgatcctcacccgctcagacaagagagcaatctgaggagcaaatcacagacgtgcacatggtcagcgatagtgacggcgatgactttgaagatgccactgaattcggcgtggacgacggcgaggtattcggaatggcctctagcgccttgagaaaatcccccatgatgccggagaacgctgagaatgagggcgatgctctcctgcaattcaccgccgagttcagcagtagatacggtgattgccacccagtgttcttcattggctccctagaagccgcattccaggaagcgttttatgttaaagcgcgagaccggaaacttctggccatttatttgcatcatgatgagagcgtgttaaccaatgtgttctgttctcaaatgttgtgcgcggaatctattgtctcatacctgagccagaacttcatcacatgggcctgggatttaacgaaggacagtaatcgagccagatttttgactatgtgcaaccgccattttggctcagtcgtcgcacagacgatccgaacccagaagacagaccaattcccattgtttctcattattatgggaaagcggtcttcaaatgaggtgctcaacgtcatccagggaaacactactgtcgatgaactgatgatgcggctgatggccgctatggaaatcttcacagctcagcagcaggaggatatcaaggacgaggacgaaagagaagctagggaaaacgtgaagagagaacaggacgaagcttatcgtctgtctctcgaagctgatcgggcaaaacgcgaggctcatgagagggagatggccgagcaatttagactcgaacagattcgaaaagagcaggaggaggagcgcgaggccatccgactctcactggagcaggccctgcctcccgaacccaaagaagagaacgctgaacctgtgagtaagctgcggattcggactccttccggagagtttctggaacgtagattcctagcgtctaataagctgcagatagtgttcgattttgtcgcgagtaaaggctttccatgggacgaatacaaactcctgtcaaccttccccaggcgagatgtgacacagctggaccccaacaagagtctgctggaggtcaagctgttccctcaggaaacactgttcttagaagctaaagaatag

SEQ ID NO: 222870 - DNA, 951 bp, synthetic construct
  misc_feature 1..951: note = Description of Artificial Sequence: Synthetic coding sequence
  source 1..951: mol_type = other DNA
atgactcagggaaagctgtctgttgctaacaaagcccctggcaccgagggccaacagcaggttcacggggaaaaaaaggaggcgcctgcagtccctagcgcacccccatcatatgaagaggccacttccggtgaaggcatgaaagccggagcgtttccacccgctcccactgcagttcccctgcatccaagctgggcctacgtggatccttcctcatcctcttcctacgacaatggattcccgaccggggatcacgagctcttcaccacgttttcctgggacgatcaaaaggtacggagggttttcgtgagaaaagtgtacacaatccttctgatacagttgctggtgacactggcggtagttgcattgttcaccttttgtgaccccgtcaaagattacgtgcaggctaatccagggtggtattgggcttcttacgctgtgttctttgctacatatctcactctggcttgttgttcagggccacgacgacactttccatggaatctcattctgctaactgtcttcaccctttcaatggcgtatttaactgggatgctctcctcttattataacaccacgtccgtgttgctgtgccttggcatcaccgctttggtgtgcctttccgttacagtgttttcgtttcaaacaaaattcgattttacttcctgccaaggcgtcttatttgtgttactgatgacactttttttctccgggctgatcctcgccattcttttgccgttccagtatgtcccttggctgcacgctgtgtatgcggctttgggagccggagtcttcacactattcttggctttagacactcagctgttgatgggcaatagaagacactccctttccccggaggagtacatctttggcgctcttaatatctacctcgatattatctatatttttaccttctttttgcagctgttcgggacgaaccgtgagtag

SEQ ID NO: 222871 - DNA, 951 bp, synthetic construct
  misc_feature 1..951: note = Description of Artificial Sequence: Synthetic coding sequence
  source 1..951: mol_type = other DNA
atgacccagggcaaactctcagtggctaacaaagccccaggcaccgagggccagcagcaggtgcatggagagaagaaggaggctccagccgtgccctcagctcctccatcttatgaagaagctacttcgggcgaaggtatgaaggccggtgcgtttcccccagctcctacggccgtgcccctacacccctcctgggcctacgtagacccaagctccagctccagttacgacaacggtttccctaccggcgaccacgagctcttcaccacattttcctgggatgatcagaaagtaaggcgcgtgttcgtgagaaaggtctacacaatactactgattcaactcctcgtgacattggcagttgtcgccctgttcactttttgcgatcccgtcaaggattacgtccaagccaaccctggctggtactgggcttcttacgctgtcttctttgcgacatacttgaccctggcctgctgcagtggcccaagacggcactttccgtggaatcttattctgctaaccgtgtttacgctgtccatggcctaccttaccggtatgcttagcagctattacaataccacatccgtgctcctgtgcttggggatcacagctttagtctgcctgtcagtaaccgtcttctcttttcagactaagttcgatttcacctcctgtcagggagtgctgtttgtgctactgatgactctgttttttagcgggttaatactagctattcttctcccttttcagtacgtgccctggttacacgccgtgtacgccgctctgggtgctggcgtctttaccctgtttctggccttagatacccagctgctcatggggaaccgtaggcactccttatcgcccgaggagtatatctttggggcactgaacatctatctggatataatctacatcttcactttctttctacagctctttggcacaaaccgagagtag

SEQ ID NO: 222872 - DNA, 813 bp, synthetic construct
  misc_feature 1..813: note = Description of Artificial Sequence: Synthetic coding sequence
  source 1..813: mol_type = other DNA
atgaaagccggtgcatttccgcctgcgcctactgctgttcctttgcacccatcttgggcctacgtcgatccaagctcttcttcgtcctacgacaacgggtttcccactggagaccacgagcttttcaccacgttctcttgggatgatcagaaagtgcggagggtgtttgttcgaaaagtgtacactatcctcctgatacagcttctcgtgacgctggcggtcgtcgcattattcaccttctgcgaccctgtgaaagactatgtgcaggctaatcccggttggtactgggcctcatatgccgttttctttgctacatatctgacactggcatgttgtagcgggccacgcagacattttccctggaatctaatacttctaactgtcttcaccctttcgatggcctacctgactggcatgctcagcagctattataataccaccagcgtcctcctttgtctgggaattactgccctggtctgtctctctgtcaccgtttttagcttccagacaaagtttgatttcacctcttgtcagggcgtgctgtttgtgctgctgatgaccctttttttcagtgggcttatccttgccattctgctgccatttcaatacgttccctggcttcatgccgtctatgccgctcttggagcgggtgtgtttacgctatttttggcccttgatacacagctcctaatggggaaccgcagacacagtctgtcacccgaggagtatatcttcggcgctctgaatatttatctggatattatttatatttttaccttttttctccagctgttcggtacaaaccgcgagtag

SEQ ID NO: 222873 - DNA, 1173 bp, synthetic construct
  misc_feature 1..1173: note = Description of Artificial Sequence: Synthetic coding sequence
  source 1..1173: mol_type = other DNA
atggacttctggttgtggcctctatacttcctgcccgtgagcggagcgctcaggattctgccggaggttaaagtggaaggcgagctggggggtagcgttactattaagtgtcccctgcctgagatgcatgtgagaatctacctctgccgtgagatggctgggagtggcacatgtgggactgtggttagcacaacaaattttatcaaagcagagtacaaagggagggtaaccttgaagcagtacccgcgaaagaatttgtttctggtggaggtcacccaactgacggaaagcgacagcggggtctatgcatgcggggcagggatgaacacagacagaggtaagacacagaaggtcacactgaacgtccacagcgaatacgaaccctcctgggaggaacagccgatgccggaaacgccgaaatggttccatctcccttacctgttccaaatgcctgcgtacgcctcttcatcaaaatttgtaacccgcgtcactactcctgctcagagaggaaaagtaccccctgtgcatcattctagcccaaccactcagataactcacaggccccgagtaagccgcgcttctagcgtggctggcgataagccgaggacattcctcccctccacaaccgcgtccaaaatatcagcgcttgagggtttactcaaaccccagactcccagctataaccaccacactaggcttcacagacagagagcacttgattacggaagccagagcggccgtgagggccaaggatttcatattctaatcccgaccatactcgggttatttctcctcgcactgttgggcttggttgtcaaacgcgcagtggaacgccgtaaagctctgtcacggagggccagacggctggccgtaaggatgcgtgccctggaaagcagtcagcgacccaggggcagccccaggccaagatcgcaaaataacatctatagtgcgtgcccacggcgagccaggggcgcagacgccgcagggaccggggaggcgcctgtgcctgggccaggagcccctcttccacctgccccactacaagtctcagagtctccctggctccatgcaccttcccttaaaacgtcatgtgaatacgtcagcttataccaccaaccagcagctatgatggaagactccgactctgatgactatatcaacgtgcccgcatag

SEQ ID NO: 222874 - DNA, 921 bp, synthetic construct
  misc_feature 1..921: note = Description of Artificial Sequence: Synthetic coding sequence
  source 1..921: mol_type = other DNA
atggatttttggctgtggcccctttattttctgcccgtgtctggtgctctcaggatcctccccgaggttaaggtcgaaggagagctagggggaagtgttaccatcaagtgcccactgcccgagatgcacgtacggatctatctttgtagagaaatggccggttcgggcacctgtgggaccgtcgtgagcactaccaactttatcaaggccgagtacaagggtagagtcaccctgaagcaatatcctaggaaaaacctctttcttgtggaggtgacacaactgacggagtctgactctggtgtgtatgcatgcggagcaggtatgaatacagataggggtaagactcagaaagtcaccctgaacgtgcactctgaatatgagccatcttgggaagaacaaccaatgccagagacaccaaagtggttccatttaccatatttgtttcagatgcccgcttacgccagcagcagcaagttcgtgaccagggtgaccaccccagctcaaaggggaaaagtgcccccagtccatcactcgagccctactactcagattacgcatcgccctagggtcagcagagcaagttcagtagccggagacaaacctcgaacattcctcccaagcacaactgcaagcaaaatctcagccctcgaaggccttttaaagccccagaccccatcctacaatcaccatacacggttacaccggcagtctccacttcaggccggaccccctaccggcagagaagatgctaggcctggcgaactacccgaggctccaagagtcgccgctaccgcacttccgaaacagcatcttcagagactccctgcggcacggagttggtccggtcgttgtcggcacaggggcggtccccgaagcaggcccaggagcgcagttgctccgagacccgcagcaggtgtttag

SEQ ID NO: 222875 - DNA, 837 bp, synthetic construct
  misc_feature 1..837: note = Description of Artificial Sequence: Synthetic coding sequence
  source 1..837: mol_type = other DNA
atggacttctggttgtggccactatactttctccccgagtacgagccgagctgggaggaacagcctatgcccgagacgcctaaatggtttcacttgccctatttgtttcagatgccagcctacgcctcctcttcaaagtttgtgacgcgggtgacaacgccagctcagcggggtaaggtcccacctgtacatcactcttcacccacaacccaaatcacccatcggcctcgcgtaagccgggcaagttccgtcgcgggtgataagcccaggacatttctgccgtcaaccacagccagtaagattagtgcactcgaaggactgttgaagcctcaaactccgtcatacaaccatcacactagactccatcggcaacgggcattggactacgggtcgcagtctggtcgcgaaggacaggggtttcacatcctgatccctactattctggggctgttcctgttggccctactggggcttgtggtgaagagagcagtggagcgtaggaaggctctttcccgtagagctcggaggttggcggtgaggatgcgcgcattggagtctagtcaaaggcccagagggtcccctcggccaaggtcacagaataacatttactctgcctgcccaaggagggccaggggagcggacgccgcaggcacaggggaagctcctgtcccaggccctggcgcacctttacccccagcccctctgcaagtctctgagagcccctggttgcacgcgccaagtttaaaaaccagttgcgagtacgtctctttgtaccaccaacctgccgcaatgatggaagattcggattccgacgactacatcaatgtgcctgcgtag

SEQ ID NO: 222876 - DNA, 456 bp, synthetic construct
  misc_feature 1..456: note = Description of Artificial Sequence: Synthetic coding sequence
  source 1..456: mol_type = other DNA
atggacttctggctgtggcctctgtacttcctgcccgtgagcggtgcactgagaatccttcctgaggtcaaagttgagggcgagctcgggggatccgtaacaattaagtgcccgctcccagagatgcacgttcggatatacctgtgtcgggagatggccggttcaggaacatgcggaacagttgtgtcaaccactaattttattaaggcagagtacaagggaagggtaaccctgaagcaatacccacgaaagaatctgttcctggtggaagtgactcagctgactgaatctgattctggagtttacgcctgtggtgcaggaatgaatacagacagaggaaagacgcagaaggtgacccttaacgtgcactcagagtacgagccttcttgggaagaacagcctatgcctgagacaccgaagtggttccatctcccatacctgttccaaatgccctag

SEQ ID NO: 222877 - DNA, 444 bp, synthetic construct
  misc_feature 1..444: note = Description of Artificial Sequence: Synthetic coding sequence
  source 1..444: mol_type = other DNA
atggacttctggctgtggccattgtattttcttccggtgagcggagccctgagaatcctaccagaggttaaggtagagggagaactaggaggctcagtgacaatcaaatgcccattgccggaaatgcacgtgcgaatatacctgtgccgagagatggcaggttcagggacctgcggcactgtggtgagcacaactaatttcataaaggctgagtacaagggcagagtaaccctgaagcagtacccgaggaagaatttgttcctggtagaggtgactcagctgacggagtctgattcaggagtgtacgcttgcggagccggaatgaatacggaccgtggcaagacgcagaaggtgacactgaatgtgcacagtgagtacgagccgtcctgggaggagcagcccatgcccgagacaccaaaatggttccacctgccctacttgtag

SEQ ID NO: 222878 - DNA, 426 bp, synthetic construct
  misc_feature 1..426: note = Description of Artificial Sequence: Synthetic coding sequence
  source 1..426: mol_type = other DNA
atggacttttggctgtggcccttatatttcctgccggaaatggaaagttgttgtgtggcccaagacggcctggagctggttgccctctctgacccacctggcagcgccagccagtccgcagggatcactgtgagtggcgctctgcgaatacttcctgaggtgaaggttgaaggggaactgggcggatccgtgaccatcaagtgccccctcccagagatgcacgtaaggatttacttatgtagggagatggctgggtctggaacttgtgggaccgttgtgtccaccaccaactttatcaaagccgaatataaaggccgagtgacacttaaacagtatcctaggaaaaatctgtttctggtagaggttacacaactgacggagagtgattcaggagtttatgcctgtggagcgggtatgaatacatag

SEQ ID NO: 222879 - DNA, 1398 bp, synthetic construct
  misc_feature 1..1398: note = Description of Artificial Sequence: Synthetic coding sequence
  source 1..1398: mol_type = other DNA
atgaggaggcctcgcggtgagcctgggcctagggcacccagaccaaccgagggagccacctgcgctggtccaggggaatcgtggagcccttcgcctaacagcatgctcagagtactactgtcagcccagaccagcccagctcgtctgtccggactcttactcattccaccagttcaaccttgctgtctgggccctagtaagtggggggaccggcctgttgggggtggcccttcagcgggtcccgtgcaaggtctgcagaggctgttggagcaagctaagtcaccgggtgagctgctccgatggctggggcagaacccaagcaaggtgagggcacaccactacagcgttgctctgcggaggctgggccaattactgggaagtcgcccacggccaccacctgtggagcaagtcaccctgcaggatctcagccagctgattattcggaactgcccctcctttgacatccacaccattcatgtgtgcctccatttggcagtcctgctcggctttccgagtgacggtcctcttgtgtgcgccttggaacaggagcgaagactgaggctgccacccaaaccccctccccctctgcaaccactgctccgtgggggacagggcctagaagctgctctgtcatgtccgaggttcctgagatacccacgccagcatcttatctcttcactggcggaagcaaggccagaagagttgacaccccacgtgatggtcttactcgcacagcacctcgcacgacacaggttgcgggagcctcagctgctggaggcaatcgctcacttcctggtggtgcaggagacacagctcagctccaaggtggtccagaaactcgttttaccgtttggcagactgaactacctgcctctcgagcaacaattcatgccctgccttgagcgcatcctcgcacgagaggcaggagtcgcccctttggccaccgtgaacattctcatgagtctgtgtcagctgaggtgccttcccttccgggctctccactttgtattctctcccggatttatcaactacatttcgggtacaccacacgcacttattgtgcggcgttatctgtcactgctggatacagctgtcgagttggagctgcccggatataggggtccgcgtcttcccaggcggcagcaggtaccaatatttcctcagcccttgatcacagacagagcccgatgcaaatactcacataaggatattgtcgcagaggggctgaggcagcttttgggagaggagaagtacaggcaggacctcactgtcccgccaggttattgtaccgactttctattgtgcgcgagttcgtctggagccgtgttgcctgttcgaactcaagaccccttcctgccatacccgccaagagcatgcccaagttcgagggctacctag

SEQ ID NO: 222880 - DNA, 1650 bp, synthetic construct
  misc_feature 1..1650: note = Description of Artificial Sequence: Synthetic coding sequence
  source 1..1650: mol_type = other DNA
atgcgtcgacccaggggtgagcccggtccccgtgctccaaggccaacagaaggagccacatgcgctggaccaggggaatcatggagcccttcccctaactctatgttgagggtgcttctttctgcgcagactagtccagctaggctgtccggccttttgctgatcccgcctgtgcagccttgctgcctcggacccagcaagtggggagacaggccagtgggagggggtccaagcgccggtcctgtccaaggcctccagcggctgttagagcaggccaagtccccaggagagctgttgcgatggttgggtcagaatcccagtaaggtgcgggctcaccactacagcgtggcccttcggagactgggacaactgcttgggtcccgaccccgacctccgcctgtggaacaagtgactctacaagatttgagccaactcattattagaaactgccccagtttcgatatccacactattcatgtgtgtctgcatctggctgtgctcctggggttcccgagcgacggtcctttagtatgtgcgctcgaacaagagcgcagactgaggcttccccctaagccgcctccgccacttcaaccactacttcggggaggccagggcctggaggccgctctgtcctgtccccgattcctgcggtatccaagacagcacttgatctccagcctggccgaggctcgcccagaagagctgactcctcatgttatggtcctgcttgctcagcaccttgctcggcatcggctgagagagcctcagttgctggaggccatagctcacttccttgtggtgcaggaaactcagcttagcagtaaagtcgttcagaagctcgtgctgccatttggacgcctcaattatctgcccttagaacagcagtttatgccatgtctcgagcgcatcctggctcgggaggccggtgtggcacccctggctaccgttaatattctgatgagtctatgtcagttgcgttgtcttccttttagggccttgcacttcgtattcagtcctggcttcattaactacatctccggcacaccacacgcactcattgttcggcgttatctctctctgctcgataccgctgtcgagctggagctcccgggataccgaggcccacgactaccacggaggcagcaggtgccaatttttccccagcctctgattacggaccgagccaggtgcaagtactctcataaggatatcgtcgcggaagggttgcgacaactgttgggagaagagaagtaccgacaggacctgaccgtccccccaggatattgcacggattttctgttgtgtgctagttcctctggagctgtgctgcccgtcagaacgcaagatccctttctcccctatcctcctagaagttgcccccagggccaagccgcaagcagcgcaaccactagagaccccgctcagcgcgtcgtgctcgtgctgcgggaacgctggcacttttgccgcgacggacgcgtactcctggggtctcgtgccctgcgagagcggcacctcggcctgatgggctatcagctgctgcctctgccttttgaagagcttgaatcccagagggggctgcctcaacttaagagctatcttcggcagaagctgcaggccttgggcctccggtggggtcccgaggggggttag

SEQ ID NO: 222881 - DNA, 1227 bp, synthetic construct
  misc_feature 1..1227: note = Description of Artificial Sequence: Synthetic coding sequence
  source 1..1227: mol_type = other DNA
atgcgaaggccccgtggagaacctggacccagagccccacgaccaactgaaggcgcaacatgtgcgggacccggtgagtcctgtttcccaagcgatggtcccctggtctgcgccctcgaacaggaacggcgactccgactgccccctaagccccctcccccactgcaacctcttctgaggggaggccaggggcttgaggctgcattgtcctgcccccgatttctgcggtatcccaggcaacatctcatctcatcccttgccgaagcgcgtcctgaagaacttactccacacgtgatggtcctgcttgcccaacacttagcaagacacagactgagagagcctcagctgctggaagccatcgcccactttcttgtggtccaggaaacccaactgagctccaaggtggtccaaaagctcgtccttccctttggtcggctaaactacctgcctcttgagcagcagtttatgccctgcctcgagcgaatcctggctcgcgaggcaggtgtggccccactcgcaactgtgaacatccttatgagtctctgccagttgagatgtcttcctttcagggcgttacactttgtgttctcacccggtttcattaactatataagcggcacgccgcatgctttaatcgtgcgacgctatctgtccctactcgataccgctgttgagctggaactacccggatacagaggtcctagattaccccgacgccagcaggtgcccatcttcccacaacctttgattacagacagagccagatgtaagtactcacacaaggatatcgtggcagaaggcctgaggcagctgttgggagaagagaagtatcggcaggacctgacggtgcctccgggatactgtaccgatttcctcctctgtgcgtcgtccagcggggctgtgctaccagtgaggacccaagatccctttttgccatacccacccaggtcgtgcccccagggccaggcggcaagcagtgccaccaccagggacccagcacagagagtagtgctggtgcttcgggaacggtggcatttttgtagagatgggagggtgcttctgggcagccgtgccctccgcgagcggcatctgggcctgatggggtatcagctgctgcctctgccattcgaagagctcgaaagccagagagggctgccacaactgaaatcctacttgcggcagaagctgcaggctctgggactgaggtgggggccagaaggaggttag

SEQ ID NO: 222882 - DNA, 480 bp, synthetic construct
  misc_feature 1..480: note = Description of Artificial Sequence: Synthetic coding sequence
  source 1..480: mol_type = other DNA
atgctgagggtgctgctcagcgcacagacaagtcctgcgagactctccggtttattgctgattccgcctgtgcagccctgctgtttggggcctagcaaatggggcgaccgtcctgtggggggagggccaagcgcagggcctgtacagggcctgcagaggctcctggaacaagccaaaagccccggagaactgcttaggtggctcggacagaacccgtccaaggtgagagcccaccactactcagtcgcacttagacgcctgggacagctgctcggatcaaggcctcgcccaccaccagtcgagcaggtgactcttcaggacttatcccagctgataattcgcaactgtccgagtttcgacatccatacaattcatgtctgcctgcacctcgccgtactgcttggtgggacagaagtgggtcccgcactttgggcaaccgagctgcccgcacccggtactgctgtgtacgcactgccttag

SEQ ID NO: 222883 - DNA, 1569 bp, synthetic construct
  misc_feature 1..1569: note = Description of Artificial Sequence: Synthetic coding sequence
  source 1..1569: mol_type = other DNA
atgaggcggcctaggggcgagcccggacctcgggctccgcgtcccaccgaaggagctacatgcgcgggacccggagagagctggagccctagccccaactccatgctgagggtgctgttgagtgcccagacctcgcctgcaagactcagtggactgctgcttattccgcctgtccaaccatgctgtctgggccctagcaaatggggagataggcctgttgggggagggcctagcgccggtcccgtgcaaggacttcagaggcttctggagcaagcaaaatcacccggagagttgttgagatggcttgggcagaatccttcaaaagttcgtgcacaccactattcagtggccttgcggaggctgggccagctgctgggctctcgtcccaggcctcctcccgtggagcaggtaacccttcaggatctatcccagctgatcatccggaattgtcccagttttgatatccatacaatccacgtgtgcctgcatctggctgtcttgctgggctttccttccgatggtcctttggtttgtgccctcgagcaggagagaaggctgcggctgcctccaaagccaccacccccattgcagcctctgctcagagaagcccgaccagaggagctgaccccgcacgtaatggtcctgcttgctcagcaccttgcccgtcaccggctgagggaaccacagctgctggaagccatcgcacactttcttgtcgttcaggagactcagctgtcttcaaaagtcgtgcagaagctggttctcccattcggcagactcaactacttgccacttgagcagcagttcatgccctgcctggaaaggatcctggccagagaggcaggcgtggccccactagccactgtcaatatcctgatgtctctgtgtcagctgcggtgcttgccgtttcgcgctctacatttcgtgttctctcccggattcatcaactatatttctggtactccacacgcactgattgtccgacgatacctgagcctcctggacacagctgtcgagttggagctcccaggctacagaggtcctagacttccacggaggcagcaggttcctatcttcccccagccacttatcacagacagggccagatgtaaatacagccacaaagatatcgtggctgagggtctccggcagttgttaggagaagagaaatatcgtcaggatctaactgtgccacccggatactgtactgatttcctactatgcgctagctccagcggcgctgtcctgcctgtgaggacacaagatccatttttaccctatcccccaagatcatgcccacagggccaggctgcgtcatctgccaccaccagggacccagcccaacgagtggtgctggtgctgagagaaagatggcacttctgtagagacggacgtgtattattaggttcaagagcactccgcgagaggcacctgggtcttatgggctaccagcttctcccattacctttcgaggagctcgagagccagagggggctcccacagttaaaatcgtaccttagacagaaattacaagcattgggtttgcggtggggcccagagggcggatag

SEQ ID NO: 222884 - DNA, 1179 bp, synthetic construct
  misc_feature 1..1179: note = Description of Artificial Sequence: Synthetic coding sequence
  source 1..1179: mol_type = other DNA
atggaagcccctctcgtgagcctggatgaagaattcgaggatctgaggccatcatgctcagaagatcccgaggaaaaaccacaatgcttctacggaagtagtccccaccacttggaggatccgtcactgtcggaattggaaaatttcagcagcgagattatatcatttaaatctatggaggatctggtgaatgaattcgatgagaagttaaatgtttgtttccgaaactataacgccaaaacggagaacctggccccagtgaaaaatcagctgcagatccaggaggaggaggaaactctgcaggacgaagaagtgtgggatgctctgaccgacaactacatcccttctctgtcagaggactggagggacccgaacatcgaggccctgaatggcaactgtagcgataccgaaatccatgagaaggaggaggaggaattcaatgagaaaagcgaaaacgattctgggataaacgaagagcctctgttaacagctgaccaggtgatagaagagatagaagaaatgatgcagaactccccagatcccgaggaggaagaagaggtactcgaggaggaagatggaggcgaaacaagtagccaagcggatagtgtgctcttgcaagaaatgcaggccctgactcaaaccttcaacaacaattggtcctatgagggccttcggcatatgagcggtagcgagctgactgaattgctcgaccaagttgaaggcgctatcagagattttagcgaagagctagttcagcaactcgcgaggagagatgagctggagtttgaaaaggaggttaagaacagctttatcaccgttttgatcgaggtgcagaacaagcagaaggagcagcgggaactgatgaaaaagcggcgaaaagaaaaaggcctctctctccaaagcagccggatcgagaaaggaaatcagatgcctttgaaaaggttttccatggagggcatcagcaatattcttcaaagcggcataaggcagaccttcggctcttctggaacagataagcaatacctcaataccgttattccatatgagaagaaggcttcccccccttctgtagaggatcttcagatgttaaccaacattcttttcgccatgaaggaggacaacgaaaaggtgccaactcttctgacagattacatcctgaaagtcctgtgccctacgtag

SEQ ID NO: 222885 - DNA, 315 bp, synthetic construct
  misc_feature 1..315: note = Description of Artificial Sequence: Synthetic coding sequence
  source 1..315: mol_type = other DNA
atggaggcgcctttggtgtcactcgatgaagagtttgaggatctgcgtccgagctgtagcgaagaccccgaagaaaaaccccagtgcttttatgggtcttccccccaccacctggaggacccaagtctgtcagaattggagaacttttcatctgaaattatcagctttaaatcaatggaggatctagtcaatgagtttgatgaaaagcttaacgtctgctttcgcaactacaatgctaaaaccgaaaatctggcccctgtgaagaaccagcttcagatccaggaagaagaggagaccctccaggacgaagagtag

SEQ ID NO: 222886 - DNA, 315 bp, synthetic construct
  misc_feature 1..315: note = Description of Artificial Sequence: Synthetic coding sequence
  source 1..315: mol_type = other DNA
atggaggcgccactcgtcagcttagatgaggaatttgaggatctgaggcccagctgctctgaggatccagaggagaagccgcaatgtttttatggctcatcgccacaccacctggaagacccctcactgagcgaattagagaatttctcctcagaaattatatcatttaagagtatggaagatcttgtgaacgagtttgacgaaaaactgaacgtgtgtttccgcaattacaatgctaaaacagagaatctggcacccgtcaagaaccagctgcagatccaggaagaggaggaaacattgcaggatgaggagtag

SEQ ID NO: 222887 - DNA, 1419 bp, synthetic construct
  misc_feature 1..1419: note = Description of Artificial Sequence: Synthetic coding sequence
  source 1..1419: mol_type = other DNA
atgacagcgaacggcactgccgaagcagttcaaatccaatttggactgattaattgtggcaataagtatctcaccgccgaagcgttcggctttaaagtgaacgcaagtgcctcctccctgaagaagaatcatttaggaagatacctggccgcagacaaagatggcaatgttacttgcgagcgggaagttcctggacccgactgcagattcctcatcgtggctcatgacgatggtagatggtccctacagagtgaggcccaccggagatatttcggcggaacagaagacaggctgtcgtgtttcgcccagactgtgagcccagcagaaaagtggtcggtccacatcgcaatgcatcctcaggtcaacatctattccgtgacacgcaaaaggtacgcccatcttagtgcaagacccgcagatgagatcgcagtcgaccgtgacgtgccatggggtgttgattcgttaatcacccttgcattccaagaccagcgctacagtgtgcagactgcagatcaccgattcttgcggcatgatggtcgcttggtggcacgaccagaacctgccacagggtatacactagaatttcgttccggcaaggtggcatttcgcgattgtgaggggcgttatctggcaccatccggacccagtgggaccctaaaagccggaaaagcgacaaaggttggtaaagatgagctgttcgccttagaacagtcgtgtgcacaggttgtgctacaggctgctaatgagcgcaacgtgtcaacgcgtcaagggatggatctaagcgccaatcaggacgaggagacagatcaagagacattccagctcgaaatcgatcgcgacacaaaaaaatgtgccttcagaactcacaccgggaaatattggactttgaccgctaccggaggggtccaatccaccgcatccagcaagaacgcttcatgttactttgacattgaatggagagatcgaagaatcacgcttagggccagcaacggaaaattcgtgacgtctaagaagaacggtcagctggctgcctccgtcgaaacggccggtgactcggagctgtttcttatgaagctcatcaaccgtcccattatcgttttccgcggtgaacacggatttataggatgcaggaaggtcactggcaccctggacgcaaaccggtccagctatgatgtatttcagttggagttcaatgatggggcttataacatcaaagattccacaggcaaatattggacggttggttctgactccgctgttacgagcagtggggatacaccagttgacttcttttttgaattctgcgactacaataaggtcgcaattaaggtgggcggaaggtatctcaaaggtgaccacgctggcgtcctcaaagcatctgctgagacagtcgatcccgcttctctgtgggagtactag

SEQ ID NO: 222888 - DNA, 1482 bp, synthetic construct
  misc_feature 1..1482: note = Description of Artificial Sequence: Synthetic coding sequence
  source 1..1482: mol_type = other DNA
atgactgccaatggtacagcggaggccgtacaaattcagttcggactcatcaattgtgggaacaagtacctgactgctgaggcattcgggttcaaagtgaatgcctccgcaagtagcctgaaaaagaagcagatatggacgttagagcagccgcctgacgaagctggcagcgcagccgtctgcttaagatcgcatctcggcaggtatttggctgccgataaggatggtaacgtcacatgtgaacgcgaggtgccgggtcccgattgtaggttcctaatcgtggcccatgatgatggaagatggagcttgcaatccgaagcccaccggcgttacttcggcggaactgaggatagactgtcctgttttgcacagactgtgtcccctgccgagaagtggtccgtccatattgctatgcaccctcaggtcaacatttacagtgttactcggaagcgctatgcccacctgtctgctcggccagcagatgagatcgccgttgatagggacgttccctggggcgtggactctctaataacgttggccttccaagaccagaggtacagcgttcagacagctgaccatcggttcctgcgccatgacggcaggcttgtcgcacgccctgaacccgcaactggatacaccctagagttcaggagcggaaaagttgccttcagagattgtgaggggaggtacctggctccttctggccctagtggaacactcaaagctgggaaagccactaaggtcggaaaggacgaactcttcgcacttgagcagagctgtgctcaggtcgtgctccaagcagctaacgagcggaatgtgagtacccggcagggtatggatctgtcggctaaccaagacgaggaaacagatcaagagacctttcaattggagatcgatagggacaccaagaagtgcgccttccggacacacaccggaaaatactggaccctgaccgccacgggcggagtgcagtcaaccgcttcttcaaagaatgcatcctgctatttcgacattgaatggcgggaccggcgaatcaccctgagggccagcaacgggaagttcgtgacttctaaaaagaacggacaattggcagcaagtgtagagactgctggggattctgaactgtttctgatgaaattgattaacagacccattatcgtattccgaggagagcacggcttcatagggtgtagaaaggttaccggcactctcgacgccaacagaagctcttatgatgtgtttcagctggagtttaacgacggggcttacaatataaaggactccacgggcaagtactggactgtaggatcagattcagcagtaacaagtagcggcgacacacctgtggatttcttctttgaattctgcgattacaacaaagtggctatcaaggtaggcggaagatatctcaaaggagatcacgcgggagtgctcaaggccagcgctgaaacagtggatccggctagcctgtgggaatattag

SEQ ID NO: 222889 - DNA, 648 bp, synthetic construct
  misc_feature 1..648: note = Description of Artificial Sequence: Synthetic coding sequence
  source 1..648: mol_type = other DNA
atggacttgagcgcaaatcaggatgaagagaccgaccaagaaacctttcagctagaaattgatagagacaccaaaaaatgtgccttccgcacacatacaggcaagtactggaccctcacggcaactgggggagttcagtcaacggccagctctaaaaacgcctcctgttactttgacatcgagtggagagatcgacggatcacactaagggcttctaacgggaaattcgtgacatcgaaaaaaaacggtcagcttgccgcttccgtggaaactgccggagacagcgagctctttctgatgaaactgattaatcggccaatcattgtgttccggggagaacatggattcattggatgtaggaaggtcaccgggacactggatgctaaccgctcctcttacgacgtatttcagttagagtttaacgatggcgcatataacataaaggacagtactggaaaatattggaccgttggttctgatagtgccgttacaagctctggggacacacctgtagacttcttctttgagttttgtgattacaacaaagtcgccatcaaggttggaggcagatatctaaagggtgatcacgctggcgttttaaaggcttccgctgaaaccgtggaccccgcaagtctctgggaatactag

SEQ ID NO: 222890 - DNA, 1551 bp, synthetic construct
  misc_feature 1..1551: note = Description of Artificial Sequence: Synthetic coding sequence
  source 1..1551: mol_type = other DNA
atgcccactaatggccttcaccaggttctgaaaatacagttcggtctggtgaacgatacggatagatacctgacagcagaatcgttcgggtttaaggtcaacgcttccgccccatccctgaagcgaaaacagacttgggtcttagaaccggatcctggccagggcaccgcagtacttttgcggagtagtcatctgggtaggtacctatcggcggaggaggacggacgagtcgcgtgcgaggcggaacagccaggtagagattgcagatttctggtcttgccccagccggacgggcgttgggtattaagatccgagccacatgggcgattcttcggcggtaccgaggatcagttgtcatgcttcgcaacagccgtcagtccagctgaattatggacagtgcatctcgcaatacacccacaagctcatctcctcagcgtctctcgcagacgctacgtacacctctgtcccagggaggacgagatggccgctgacggagataaaccatggggggtggatgcattgctgaccctgatcttccggagccgccgatattgcttaaaaagttgcgatagcaggtacctccgatctgacgggcgactcgtatgggaacccgaaccaagagcctgttacaccctggagtttaaggctggcaaattagctttcaaagactgcgacggccattacctggctcctgtgggcccagcaggtaccctgaaagccggtaggaacactagacccggtaaggacgaactcttcgatctggaagagagccacccacaggtagtgttggtcgctgcaaaccatagatatgtcagcgtgcggcagggcgtgaatgtgagtgcgaaccaagatgacgagctcgaccatgagacttttcttatgcaaatcgatcaggagactaagaagtgcaccttctatagcagcactggcggttactggactctggtaactcacggcggaattcacgcaaccgccacacaggtgagcgccaacaccatgttcgaaatggaatggagaggtcgaagagtcgctctaaaggctagcaatggcaggtacgtatgcatgaaaaagaatgggcagttggctgccatctctgacttcgtgggccctccccctcgcccagcgtggacaggaaaggttgccggtggcgctgcccagcagactctctccccaccagggaaggacgaggagtttacactgaagctgatcaacagaccgattttggttctccgcggactagacggatttgtctgtcaccaccggggaagcaatcagctggatacgaaccgttcagtgtacgacgtctttcacttatccttctctgacggcgcatacaggatccggggtagggatgggggtttttggtacaccggctcgcacggctccgtttgtagtgacggagaaagagccgaggacttcgtcttcgagtttcgggagaggggcagactagcgatccgcgctcggagcggaaagtatctcaggggaggcgcttccggcctgctcagagccgatgcggacgccccagcaggtacagccctatgggaatattag

SEQ ID NO: 222891 - DNA, 1479 bp, synthetic construct
  misc_feature 1..1479: note = Description of Artificial Sequence: Synthetic coding sequence
  source 1..1479: mol_type = other DNA
atgcctaccaatgggctccaccaggtactaaagattcaatttgggctggtcaatgataccgacaggtacctgaccgccgagtcgttcgggtttaaggtgaatgcaagtgccccttcactcaaacggaagcagacatgggttctcgaacccgatcccggacagggaacagccgtgctgctcaggtcaagccaccttggaagatacctgtctgcagaagaggatgggagagtggcatgcgaagccgaacagccgggtcgagattgcagatttttggtattgcctcagcccgatggacggtgggtccttcgtagtgagccgcacggcagatttttcgggggtaccgaagatcaactgtcttgcttcgctactgccgtgtcccccgctgaactgtggaccgtgcatctggctattcatccacaggctcacctgctgtctgtgtcacggagaagatatgtgcacctgtgtcccagagaggacgaaatggcagccgacggggataagccatggggagttgacgctttattaaccttgatcttccggtccaggcggtactgcctaaaaagttgtgattcccgatatttaaggtctgatggccgattagtctgggaacctgagcctagggcctgctacactcttgaatttaaggctggaaagctggcattcaaagactgtgacgggcactacctggcaccagtgggacctgccggaacactcaaagcagggaggaacacgcggccaggtaaagatgagctctttgacctcgaggagtctcacccacaagtggtgctagtggctgccaatcaccggtacgtgtcggtgcgccagggtgtaaacgtgagtgccaaccaggatgacgagctggatcacgagacctttctgatgcaaatcgaccaggagactaaaaaatgtactttttatagctccacagggggatactggacccttgttacccacggcggtatccacgctaccgccactcaggtaagcgccaacaccatgtttgagatggaatggcggggtcgaagagtggccctgaaggctagcaatggacggtatgtgtgcatgaagaagaatggccagctggcggcaatcagcgatttcgttggaaaagacgaggagttcacattaaaactcattaacaggcctatcctggtactccgcggtctggacgggtttgtctgtcatcataggggttccaatcaactggacacaaatagatcagtgtatgacgtgttccacctgtcctttagcgacggcgcataccgcattaggggacgagatggaggattctggtataccggcagccacggaagcgtatgctccgacggcgaaagagcagaggacttcgtttttgagttccgagagagaggacggcttgccattagagctaggtctggcaaatatctgagagggggagcgagcggtttgttgcgggctgatgccgacgcccctgccggtactgcactgtgggaatattag

SEQ ID NO: 222892 - DNA, 2133 bp, synthetic construct
  misc_feature 1..2133: note = Description of Artificial Sequence: Synthetic coding sequence
  source 1..2133: mol_type = other DNA
atgttaacaacgctgaaaccgtttggatccgtctctgtggagtccaagatgaacaacaaagccggtagtttcttctggaacttgagacaatttagcacactggtgtccacaagcagaaccatgaggctgtgctgtctggggctttgcaaaccgaaaatcgtgcactcaaattggaatatcctgaacaatttccataacaggatgcagtctacagacattataagatacctgttccaggacgcatttatttttaaatccgacgtcggctttcagaccaaagggatctctacccttaccgccctgagaatcgagaggttgctgtatgcaaagcgtctatttttcgactccaaacaatcactggttcctgtcgacaagagcgatgacgagctgaaaaaggtcaacctgaatcacgaggtgagcaacgaggatgttctcaccaaggagacgaaaccgaaccgaatctccagcagaaagctgagtgaggagtgcaattcactgtccgacgtgcttgatgcctttagcaaagccccaacattccctagctccaactacttcaccgcaatgtggactatcgcaaagagactatccgatgatcaaaagcgctttgagaagagactgatgttcagtcatcccgcttttaatcagctgtgtgagcacatgatgagggaggccaagatcatgcagtacaaatacctcctgtttagtctccacgcgatcgtcaagcttggcatcccccagaataccattcttgttcaaaccttactgagagtaacacaggagcgtatcaacgaatgtgacgagatctgcctatctgtcttgtcaaccgtgctggaagcaatggaaccttgtaagaatgtccatgtgctgagaaccggatttcgcatcctcgtggatcagcaggtttggaagattgaggatgtgttcaccctccaggtcgttatgaagtgcataggtaaagacgcacccattgcactgaagcggaagttggagatgaaggctttgcgtgagctcgacagatttagcgtgctgaacagccagcacatgtttgaagtgctcgcagccatgaatcatagaagcctaatcttactggatgaatgtagcaaggtagtacttgataatatccatgggtgtcccctgcggattatgattaatatcctacagagctgcaaggaccttcagtaccataaccttgaccttttcaaaggtcttgcagattatgtcgccgcaacttttgatatttggaagtttagaaaggtgctgttcatcctgattttgttcgagaacctcggctttcggcctgtgggattgatggacttatttatgaaaaggatcgtggaagatcccgagagcctaaacatgaaaaacattctctccatcctacatacatattcatccctgaatcacgtgtacaagtgccagaacaaggaacaatttgtggaggttatggcatctgcattaaccggctatttacataccatctcttctgaaaatctgcttgacgccgtgtattctttttgcctgatgaattattttcctctggcaccattcaaccagttacttcagaaggacatcatcagcgagctgctgacgagcgatgacatgaaaaacgcctacaaattgcatacgctggatacgtgtctgaagctggatgatactgtttacttaagggatattgccctgagtttaccacaattacctcgagagctcccatcaagccacacaaacgccaaggtggctgaagtgctgtccagcctactgggtggtgagggacacttctccaaggatgttcatctcccacacaattatcatattgacttcgagatcagaatggatactaataggaatcaggtgttacccctttctgacgtggatacaaccagtgctaccgatatccaaagggtggctgtgctttgtgtgtcccgctcagcatactgcttggggtcctcacacccgagaggtttcctggcgatgaaaatgcgccacctcaatgcgatgggatttcacgtgatattagtgaataattgggagatggacaagctggaaatggaagacgcggtcacttttctaaagacaaaaatctactctgttgaagcactgccagtcgcggcagtgaacgtccagtctacgcagtag

SEQ ID NO: 222893 - DNA, 2133 bp, synthetic construct
  misc_feature 1..2133: note = Description of Artificial Sequence: Synthetic coding sequence
  source 1..2133: mol_type = other DNA
atgctgaccaccctgaaaccctttggctcggtgtcagtagaatccaaaatgaacaacaaggccggttcatttttctggaacctccgccaattcagtacactcgtctccacgagccgcacaatgcgcctgtgctgtctgggtctgtgtaagcctaaaatagtccactctaattggaacatattgaacaactttcataaccggatgcaatccacggacatcattcgatatctctttcaagatgccttcatcttcaaatccgatgtggggttccagactaagggaatttcaacactgaccgcgcttcggattgagcgacttctgtatgcaaagagactgttttttgactcaaagcagtctttggtccccgtcgacaaatcagacgacgagcttaaaaaagtcaatctaaatcacgaggtctctaacgaagatgtgcttactaaggagactaaaccgaaccgcattagttcacgtaagctgtccgaagaatgtaattcgctgtccgacgtgctggacgcctttagcaaggctccaacgtttcctagcagtaattattttacagcgatgtggaccatcgctaagcgactgtcagacgaccagaaaagatttgagaaaagattaatgttctcacacccagctttcaaccagctgtgcgagcacatgatgcgtgaggctaagattatgcaatacaagtatctgttgttcagtctgcacgcgatagtgaagttgggtataccccagaacaccatcctcgtgcagacccttttgagggttacacaggagcgcatcaacgaatgtgatgagatatgcctgtctgtgctgtccactgtgctcgaagcaatggaaccctgcaagaacgtgcatgttctcagaacgggattccgcatactggtagatcagcaagtctggaaaatagaggatgtgtttaccctgcaggttgtgatgaaatgtattgggaaggatgcgccaatcgccctgaaacggaagctggaaatgaaagcccttagagagctggaccggttttcggtgctcaattcccagcatatgttcgaagttctggccgctatgaatcaccggagtctgattttgctggatgagtgcagtaaagtggtgcttgataatattcacggctgtcctctacgtatcatgatcaacattctgcagagctgtaaggatttacagtatcacaacctcgatctgttcaaaggccttgctgactatgtggccgcaactttcgatatatggaaatttagaaaggtgttatttattcttattctcttcgagaacctaggatttagaccggttggtctgatggacctgtttatgaagcgcattgtggaagatccagagtcactcaatatgaaaaacatactgtctatcctgcatacctactcctccttaaatcatgtgtacaagtgtcagaacaaggagcaattcgtcgaagtcatggcctcagctctcacaggatatctgcacacgatctcctcggagaacctgcttgacgccgtctattctttctgtttgatgaactactttcccctcgctcccttcaatcagttgctccagaaggatatcatctcagagctcctaacatctgatgacatgaaaaatgcctataaacttcatacacttgacacatgtctgaagctggatgatacggtttacctgagggatatcgctctctccctgccacagctccctcgggaattgccttcttctcatactaacgccaaggtggcggaggtgctgtcttccctgcttgggggtgaagggcactttagcaaggacgtacacttaccccacaattaccacatcgacttcgagattcggatggacaccaataggaaccaagttctgccccttagcgatgtcgatactaccagcgcgaccgacatccagagggtcgctgtgctatgcgtcagccgctcagcttactgtttagggagttcacacccaaggggatttcttgccatgaagatgcgtcacctgaatgccatgggctttcatgtgatcctggtgaacaactgggagatggataaactggagatggaagacgctgtgaccttcctgaaaactaagatttactctgtggaagccctgccagtagcggctgttaacgtgcagtcaacccagtag

SEQ ID NO: 222894 - DNA, 2133 bp, synthetic construct
  misc_feature 1..2133: note = Description of Artificial Sequence: Synthetic coding sequence
  source 1..2133: mol_type = other DNA
atgctcacaaccctgaaaccctttgggtcagtttccgtggagtccaaaatgaacaataaggccggttccttcttttggaacctgcggcagttctccacgctggtgtcaacctcccggacgatgcggctctgttgcttgggcttgtgcaagccaaagatcgtgcatagtaactggaatatccttaataacttccacaaccgcatgcagtcaaccgacatcatcagatacctgttccaggacgcgttcatttttaaaagtgatgtcggattccagactaagggcatatccacgcttacagctctgcggatagaacgcctgttatatgcaaaacgcctcttttttgactccaaacaatcccttgtgccagttgacaagtcagacgatgaattgaagaaagttaatctcaatcatgaagtttcaaatgaggatgtactcacgaaagagacaaaacccaatcgaatatcaagcagaaaacttagtgaggaatgcaattcgctgagcgatgtactcgatgccttttcaaaagcacccacatttccttcctctaactacttcaccgctatgtggacgatcgctaaacggctttcagacgatcagaaaaggttcgagaaacgccttatgttctcacacccagcatttaaccagctgtgcgagcatatgatgcgggaggctaagatcatgcagtataagtacctcttattttctctacacgcgatagtgaagctgggcatcccccaaaataccatcctggtccagactctgctgcgggttactcaggaaaggattaatgagtgtgatgagatatgcctaagcgtactgtccactgtactggaagcaatggagccctgcaagaacgttcacgtccttcggaccggcttccggattctggtagatcagcaggtgtggaaaattgaagacgtgttcactctccaggtggtgatgaaatgcatcggcaaggatgccccaatagccctcaaacgcaaactggagatgaaagcactacgggaactggaccgcttttcagtactgaactctcagcacatgttcgaggttctggctgcgatgaatcatcgatctctgatcctcctggacgaatgctccaaagtcgtcctggataacatacacgggtgcccacttaggataatgatcaacatcttgcagtcgtgcaaagacctgcaatatcataacctggacttattcaagggtctggctgactatgtcgctgctacttttgatatctggaagttccggaaagtgctatttattttgatcttgttcgagaatctcgggtttaggccagtaggccttatggacctcttcatgaagcgaatcgtcgaggaccctgagtctctgaacatgaagaacatcctgtctattcttcacacgtattcgtcactcaatcacgtgtacaagtgtcaaaacaaagagcagttcgtggaggtgatggcttccgctctgactgggtatttgcacactatttctagtgaaaacttattagatgctgtttacagcttctgcctgatgaattacttccccctcgcacctttcaaccagttgctgcaaaaggacatcatcagcgaactgctgacatccgacgatatgaagaacgcatacaagctgcataccttagatacgtgcctgaaactggacgacaccgtttatctgcgtgatatcgccctaagtctgccccagctgcccagagaactcccctcttctcacacgaacgcaaaagtggcggaggtgctcagttctttgttaggaggggaaggccatttttccaaggacgttcacttgccccataactatcacattgatttcgagatcaggatggacacgaaccggaaccaggtgctcccactgtcagacgttgatacgacaagtgctacagacatacagcgcgtcgcagtgctttgtgtaagccgcagcgcctactgcctgggcagctcccatcctcgaggtttcctcgctatgaagatgcgccatcttaacgccatgggcttccacgttattttggtcaataactgggagatggacaagctagaaatggaagacgcagttactttcctcaaaaccaaaatttattccgtggaggccctgccggtggcagccgtcaatgtgcagtcaactcagtag

SEQ ID NO: 222895 - DNA, 375 bp, synthetic construct
  misc_feature 1..375: note = Description of Artificial Sequence: Synthetic coding sequence
  source 1..375: mol_type = other DNA
atgctcaccacactgaagccattcggaagcgtgtccgtggaatctaaaatgaataataaagcagggtctttcttctggaatctgcgtcagttctccacgttggtctccactagccggaccatgcggctgtgttgtctaggattgtgcaagcccaaaatcgttcattcgaactggaacatccttaataatttccacaaccgcatgcagtctacagacatcatccggtacctgttccaggatgcgtttatcttcaaatccgatgtcggatttcaaacaaaaggaatatcaactcttaccgccttgcggatcgagagattgctctacgcgaaacggttattcttcgattctaaacagagcttagtgccggtggactag

SEQ ID NO: 222896 - DNA, 2295 bp, synthetic construct
  misc_feature 1..2295: note = Description of Artificial Sequence: Synthetic coding sequence
  source 1..2295: mol_type = other DNA
atggcggcaacactgaaatctctcaagttggtcagataccgggcattctgttctccctccgccttcggggctgttcgctccgtttcttactggaatgtttcatccacccaacacggcggacaggaccccccagagcacatatcactctgtcattcagccaagaaggtgaagaatatttgttccaccttttccagccgccgaatactgaccacaagttccgcacatcctggtttggagttttcaaaaacttctagctctaaggcttctaccctccagttgggcagccctagggccactggagtggacgaagaagacgttgaagtctttgatagctttgagaacatgcgtgtcttcctgcagctgagacctgaataccgggtgcactcttacaacgcctcggaaacatctcaactattaagtgtgagcgaaggagagttgatcttacacaaagtcagggtgaaccaaaacaaccttcaggcgcaggtcatcgttgattatctgtgtaaattatctagtctgccagcggagcagcatcccgtgctgttaggatctacctcatttgctctcctgtgtcaactttctgtcaagaagatccagctcttcgacacccaggatctgataaacgtcctgaaagccttcgtgatccttggcattccccactctcacagcatgttggacgtgtatgaaactaagtgctgtcatcaggtttgggagatgaacatggaccagctgttattggttgcagacctgtggcggtacctcgggagaaaggtgcctagatttctcaatatcttctcctcttatttaaatcttcattggaaagatttatctctctctcagttggtgcacctgatatacgtgattggcgaaaaccgccaggtgagccaagacctgatgcaaaaactggaatccttaatacttaaatacattgacctgattaacttggaggaagtgggaactatctgcctgggttttttcaaaagttctactaacctgagcgaattcgtgatgaggaagatcggcgatcttgcctgtgcaaacatccaacacctgtcatctcgaagtctggtgaatattgtgaagatgttcagatttacacacgtcgatcacatcaactttatgaagcaaattggcgaaatcgctccacaacggatcccaagcctcggagtccagggtgtgatgcatctaaccttgtactgctctgcacttcgcttcctgaacgaaggagtcatgaatgctgtagccgcttctctgccccctcgtgtggcgcattgccgaagcaaagacgtcgctaaaatcctttggagctttgggactcttaactacaaaccgcctaatgccgaggagttctacagctccctgatttcggaaatccacagaaagatgcctgagtttaaccagtatccagagcacctccccacatgcttgttaggattggctttcctggaatactttccagttgagctgatagatttcgcgttgtctcccggtttcgtgcggctggcccaggagcgtaccaagttcgacctgctgaaggaactgtacacactcgacgggaccgtcgggatagagtgcccagactaccgcggaaacagactctctacccacctgcaacaggagggctccgagttgttatggtacctggctgagaaagacatgaactccaagccagaatttctggaaactgtttttctgctagaaacaatgctgggcggtcctcagtatgtgaagcaccacatgattctccctcacaccaggtcctcggacctggaggtacaactcgacgtcaacttgaagccactacccttcaaccgggaggctaccccagccgaaaacgtggctaagctgcgtctcgaacacgtgggtgtgtcgctcactgacgacctgatgaataagttgctgaagggaaaggccagggggcattttcagggaaagacagagtcagagcccggacagcagccgatggaactggagaacaaggccgctgtccccttagggggatttctgtgcaatgtggctgataagtcaggggctatggaaatggctggtctctgcccagccgcttgcatgcagacacctagaatgaaactggctgtgcagttcaccaaccggaatcagtattgttacgggtcccgggaccttttgggacttcacaatatgaaacgaagacagctggccaggctggggtaccgcgtggtggagctcagctactgggagtggcttccactgctcaaacgcacaaggctggagaagctggcattcttgcatgagaaagttttcaccagtgctctctag

SEQ ID NO: 222897 - DNA, 183 bp, synthetic construct
  misc_feature 1..183: note = Description of Artificial Sequence: Synthetic coding sequence
  source 1..183: mol_type = other DNA
atggcctgccaaggccgtgaggaatgctggtgccagtctcgaattgcaagaactcttcccgcagatcagaagccagaatgtcgcccttattgggaaaaggacgacgcatctatgcctctgccctttgaccttaccgacatagtttcggagcttcgcggacagctgctggaggccaagccctag

SEQ ID NO: 222898 - DNA, 630 bp, synthetic construct
  misc_feature 1..630: note = Description of Artificial Sequence: Synthetic coding sequence
  source 1..630: mol_type = other DNA
atgctagacgacttgaatgctacccaccaacactgtgtcctggcaggctcgcaaccacgctttagttctacccacagggtagcagagtgttcgacgggcaccctggattatattttgcaacgctgtcaattggccttacagaacgtttgcgatgatgtcgacaacgatgacgtctccctgaagtcgtttgagccagcggtgctgaagcagggcgaggagatccacaacgaggttgagtttgagtggctgaggcagttttggttccagggcaaccgctatcgaaagtgtactgactggtggtgtcaaccaatggctcagctggaggccctgtggaaaaaaatggaaggagtgacgaacgccgtccttcacgaggtgaaaagagaagggctccccgttgaacagcggaacgagatcctgaccgccatattagcctcgctcaccgcccgtcagaacctacggagagagtggcacgcccgatgtcagagtaggattgcgaggacactgcccgctgatcaaaagcccgagtgtcggccttattgggaaaaagatgacgccagtatgcccctgccttttgacttgactgacatcgtgagcgagcttcgtgggcaacttctcgaggccaagccatag

SEQ ID NO: 222899 - DNA, 321 bp, synthetic construct
  misc_feature 1..321: note = Description of Artificial Sequence: Synthetic coding sequence
  source 1..321: mol_type = other DNA
atggctcagttagaggcactctggaagaaaatggagggggtcacaaatgcagtcctgcacgaggtcaaacgagaaggactgcccgtcgaacaaaggaacgaaatccttaccgcgatcctagctagcctcactgcacgacagaacctgcgcagagagtggcatgctcgatgtcagtctagaattgctcgcactctcccagcggatcagaagcctgagtgcaggccttattgggagaaagacgacgcctctatgcctctgccctttgacctgaccgacatcgtaagtgaactgcgcggacagctgctggaagccaagccatag

SEQ ID NO: 222900 - DNA, 321 bp, synthetic construct
  misc_feature 1..321: note = Description of Artificial Sequence: Synthetic coding sequence
  source 1..321: mol_type = other DNA
atggcccagctggaagcgctatggaagaaaatggagggtgttactaacgcagtgttacacgaggtgaaacgggaggggttgccagtggaacaacgcaacgagatcctgaccgctattctggcctcccttacagcccgacagaatctcaggcgggagtggcacgccagatgccaatcacgcatcgcacggacgttacctgccgaccagaaaccagaatgcaggccttactgggagaaggatgacgcctccatgccactccctttcgatctgacagacattgtgtccgagttgcgtggtcagctgctggaagcaaaaccttag

SEQ ID NO: 222901 - DNA, 384 bp, synthetic construct
  misc_feature 1..384: note = Description of Artificial Sequence: Synthetic coding sequence
  source 1..384: mol_type = other DNA
atggaatggcgaaaagtttccgaatgtaacagcgtcgaaccatgcagggaggtgaagaagtggccctacaggtgcatccaccatgggaagaacttctcacgaatgacaaacgccgtgctgcacgaagtaaagcgcgagggccttcctgtcgagcagaggaatgagatcctaaccgccattctcgcctctctgactgcacgccaaaatttgcgccgtgaatggcatgccagatgccagtcccggatcgcaagaacattgccagccgatcaaaagcccgaatgtcgtccttattgggaaaaggacgacgcctctatgcctctgccgtttgatttgaccgatattgtctcagaattgcggggacagttactcgaggccaagccttag

SEQ ID NO: 222902 - DNA, 1518 bp, synthetic construct
  misc_feature 1..1518: note = Description of Artificial Sequence: Synthetic coding sequence
  source 1..1518: mol_type = other DNA
atgaagagaacacccacagcggaggagcgtgagagagaggcgaaaaagctgagactgttagaggagttggaagatacctggctcccttatttgaccccaaaagatgatgagttttatcaacagtggcagctcaaataccctaaactgattctgcgggaagcttcgtccgtgtctgaagagctacataaagaggtgcaagaggcatttttaacactgcataaacatggttgcctgttccgagatctcgtgcgcatccaaggaaaggatctactcactcctgtgtctagaatcctgataggcaatcccggttgcacgtataaatatctgaatacccgcctatttacggtcccctggcccgtgaagggatccaatatcaaacacacagaggccgagatagccgcagcatgcgaaacttttctcaaactcaacgattacctacagattgaaacaatccaggctttagaagaactagctgcaaaggaaaaagctaacgaagatgccgtgcccttgtgcatgtccgccgacttcccaagagtcggaatgggcagctcttataatggtcaggatgaggtggacattaaatctcgcgctgcctacaacgttacccttctgaactttatggatccgcagaagatgccttacttaaaggaagaaccctacttcgggatgggcaaaatggctgtaagctggcatcatgacgagaatctcgttgatcgatctgccgtggctgtgtatagctacagctgcgaagggccagaggaagaaagcgaggatgattcccacctcgaagggagagaccccgatatttggcacgtgggttttaaaatctcatgggatatcgagacacctggactggctatcccgctccaccagggtgattgctacttcatgctggacgatctgaatgcaactcatcagcattgtgtcctcgccggaagccagccaagattttcatctacccaccgagtcgcagagtgttcaacgggcacactggattatattttgcaaaggtgtcagctggcactgcagaatgtgtgcgacgatgtggataatgatgacgtgtcgttaaaatccttcgagcctgctgtgctgaaacagggggaggaaatccacaatgaagtagaatttgagtggcttcggcagttctggttccaaggtaacagatacaggaaatgtactgactggtggtgccaacctatggcccagcttgaggccctgtggaagaagatggagggagtaactaacgcggtgcttcatgaggtaaagcgcgaagggttgcccgtagaacagcgtaacgagattctgactgcgattctagccagcctgaccgcccgacagaaccttcggagagagtggcacgccaggtgccagtctagaatagcgcgaacactgcctgccgaccagaagcccgagtgccggccttattgggagaaagacgatgcctccatgcctttgccatttgacttgactgatatagtgtctgagctccgtgggcagctgctggaggcaaagccttag

SEQ ID NO: 222903 - DNA, 321 bp, synthetic construct
  misc_feature 1..321: note = Description of Artificial Sequence: Synthetic coding sequence
  source 1..321: mol_type = other DNA
atggcacagttggaggccctgtggaaaaaaatggaaggcgtcactaacgccgttctacatgaggtcaaaagggagggactgcccgtagagcagcgaaatgaaattttgacagcaatccttgcctccctgacagcaaggcagaacctgcggcgagagtggcacgccaggtgtcaatccagaatcgctcgcacactccccgctgaccagaagccagagtgccgaccttattgggaaaaagatgacgcaagcatgccactgccttttgatctcacagacattgtgtccgaattaagaggccagctgctggaggccaaaccctag

SEQ ID NO: 222904 - DNA, 13050 bp, synthetic construct
  misc_feature 1..13050: note = Description of Artificial Sequence: Synthetic coding sequence
  source 1..13050: mol_type = other DNA
atgacaatcgctctactgggttttgctatttttctgctgcactgtgcgacctgtgaaaaacccctggaaggcatcttgagcagctctgcatggcacttcacacatagccactacaacgcaacaatctatgagaactcttcccccaaaacatatgtggagagctttgagaagatgggaatttacctcgccgagccacagtgggcggtgcgttaccgtatcatttccggagatgtggcaaacgtctttaagaccgaggagtatgtagtaggtaatttctgtttccttagaatccggacgaaatcatccaacacagcgctgctgaatcgcgaggtacgcgattcttacactctcatcatccaggccactgagaaaactctcgagttggaagcactgactcgagtcgtcgtgcatatcttagatcaaaatgacttgaagccactcttcagtcctccctcataccgggtgacaattagcgaagacatgcctctgaaatcgccgatttgtaaagtcaccgccacagacgccgacctcggccagaacgccgagttctactacgcatttaatacgagatccgaaatgttcgccatccatcctacctcgggcgtcgtcacagttgcaggcaaactgaacgtcacatggaggggtaagcacgagcttcaggtacttgccgtggacaggatgcggaagatatccgagggcaatgggtttggcagtctagccgctctggtcgtccacgtcgagcccgcactccgaaaacctcctgcaattgcgtctgtggttgtgaccccacccgattctaacgacggcaccacctatgccactgtcctcgtggacgcgaactcgtctggtgcagaggtggagtcggttgaagtcgtcggcggagaccctggaaaacacttcaaggccattaagtcctatgccagatccaacgaattttctctggtatctgtcaaagatatcaattggatggaatacctccatgggtttaacttgagcctgcaggcgaggagcgggtcagggccttacttctacagccagattagaggattccatctcccaccgtctaagttgagcagcctgaaattcgagaaagctgtatacagagttcagctcagtgagttcagcccacccggatctcgcgtagtgatggtgcgtgtgactccagcctttccaaacttacaatacgtactcaagcctagttcggaaaacgttggattcaagctcaacgcgagaaccggtcttattactactaccaagctcatggatttccacgacagagcccattaccagcttcatattaggacctctccaggacaggctagcacggtggtcgtgattgacatcgtggattgcaacaaccatgctcccctgtttaatcggtctagctacgatgggactctcgacgagaacatcccgccagggacatcagtgttggctgtgaccgccactgatcgagaccatggggagaacggctatgttacatactcaattgcgggacccaaggccctgcctttcagcatcgatccatacctggggatcatttctactagtaaacccatggactacgaactgatgaagcgaatatatacatttagagtgagagcaagcgattgggggtcaccattccgtcgagaaaaagaggtatcaatcttcttacagttgaggaatctgaatgataatcagccgatgttcgaagaggtgaactgcacaggttcaattagacaggattggcccgttggaaaatcaattatgacaatgtccgccatcgacgttgacgagctccagaacctaaagtacgaaattgtctcagggaacgaactggagtattttgatttgaaccacttctctggcgttatctctctgaagagacccttcatcaatctgaccgcaggtcaacctacgtcgtactctctcaagattaccgcttcagatgggaagaactacgcttccccaaccacgctgaatattacagtggtgaaagacccccatttcgaagtgccggtaacctgcgataagactggcgtattgactcagttcacaaaaaccatcttgcattttatcgggttacaaaatcaggaatccagcgacgaagaatttacttccctttctacctaccagatcaaccactacactccccagttcgaagaccacttcccccaatctatagatgtgctcgagtctgtgccaatcaacactccgttagcccgactggccgcaaccgatccagacgctggctttaacggcaagctggtgtacgtgatcgctgacggtaatgaagaggggtgtttcgacatcgagctggagactggcctcctgaccgtggccgcacctctggattatgaagcaactaatttttatatcctgaatgtgacggtgtacgatttgggaaccccacagaaaagttcctggaagcttctcaccgtaaatgtaaaagattggaatgacaacgcccctcgcttcccccctggtggctaccaactcaccatcagcgaggacaccgaagtgggcactaccatagctgaactgactactaaggacgccgatagcgaagacaatgggagggtcagatatacgttgctcagccccaccgagaaattctcccttcatcccctgacgggagaactcgtggtgacggggcatctcgaccgagaatccgagccccgttacatcctgaaagtcgaggctcgcgaccaaccaagtaaaggccaccaactgttcagtgtcaccgatctgattattacactggaagatgtcaacgataacagcccacagtgtatcacggagcataatagattaaaagtccccgaggatctgccccctgggactgttcttaccttcttggatgcatcagatccagacttgggaccagcgggagaggtgaggtatgttttaatggatggggctcatgggacctttcgcgttgatctgatgactggcgctctcatcctggaaagggaactcgattttgaacgacgggctggatataacctgtcactttgggcaagtgacggtggcaggcccctcgcgaggcgaaccctgtgccacgtagaggtgatcgtcctggacgtgaatgaaaacctccaccccccacattttgcctccttcgttcatcagggccaggtccaggagaatagcccctctggaacccaggtaatagttgtggcagcacaggatgatgactcggggcttgatggcgaattgcagtacttcctacgggcagggactggtctggccgctttctcaatcaatcaagatacagggatgattcaaaccctagcgccactcgatagagaatttgcgtcctattactggcttaccgtgttggctgtagataggggtagtgtaccgctttctagtgtcaccgaagtctatatcgaggttactgacgccaatgataatccacctcagatgtctcaggctgtgttctaccccagcatccaagaagatgccccagtaggtactagcgtcctgcagttggacgcatgggacccggatagcagctccaaaggcaagttgacttttaacatcaccagcggtaactacatgggcttctttatgattcatcccgtcacgggactcttgtccactgctcagcaactggatagggaaaataaagacgaacatatactggaagttaccgtgctggacaatggcgaacctagtctgaagagtacttctcgtgtcgtggtgggcattctggacgtcaatgataatccccctattttctctcataagttgtttaatgttcgactacccgaacgtctctccccggtgagcccaggcccagtgtatagactggtcgcatctgatctggacgagggccttaacggtagggtgacatactccatcgaggattctgacgaagaagcgttcagcatcgatttggtgactggggtcgttagctcaagtagcacctttactgcgggagaatacaatatccttaccatcaaggccactgactccggacagcccccattgagtgctagcgttagattacacatagagtggataccctggcctcgccctagcagtataccgctggccttcgacgaaacttactactctttcacagtcatggaaacggatcctgtcaaccacatggtgggcgtaatctcagtagaaggtcgccctgggttgttctggttcaatatatcaggcggtgacaaagatatggatttcgatatcgagaagaccaccggaagtatagtcatcgccagacctctggatactaggcgcagatccaattacaatcttactgtggaagtaacggacgggtccaggactatcgccacccaagtgcacatttttatgattgccaatataaatcaccatcgacctcagtttcttgaaacgagatatgaggtacgcgtgcctcaggataccgtaccgggagtagaactcttaagagtgcaggctatcgatcaggacaaaggcaaatctctgatctatacgattcatggctctcaagatcctggcagcgcgtccttgtttcagctggacccgtctagcggagtccttgttacagtcggcaagttggatctcgggagtggcccatcccagcacactctgactgttatggtgcgggaccaagaaattcctattaaacgaaattttgtgtgggtgactatccacgtcgaagacggcaacctgcatccccctcggttcacccagctacactatgaggcctccgtgcccgatactatagcacccggtaccgaattgctgcaggtcagagcgatggatgccgacagaggcgtgaatgccgaagttcattatagcctgttgaagggtaactcagagggctttttcaatataaatgcgcttctcgggattatcactttggctcagaagttagaccaggcaaaccacgccccacatacattgaccgtcaaggccgaggatcagggctcaccgcaatggcatgatctggcaactgttattattcacgtctacccctccgatcgctcagctcctatcttctccaagtcagaatattttgtcgagattcccgaatccattccggtcggctcaccaattttgctggtgagcgcgatgagcccctctgaagtaacatacgagcttcgggagggaaacaaagacggcgtcttttctatgaattcatacagcggcctaatttcaactcagaagaaactggatcacgagaagataagttcctatcagcttaagattcggggaagcaacatggctggagccttcacagatgttatggtcgttgtcgatatcatcgacgagaacgataatgcgcctatgttcttgaagtcaacttttgttggccagatctccgaagctgcaccactctacagtatgataatggataaaaacaataatcctttcgtcatccatgcttctgactcagacaaggaggccaattcgttactggtgtacaaaattcttgagcctgaagcactcaaattttttaaaattgaccctagtatgggtaccctgacaattgtcagcgaaatggattatgagtcaatgccctcttttcagttctgtgtatacgttcacgatcagggatcacctgtgctgtttgcaccgcgaccggcacaggtgatcatccatgtacgagacgtcaatgactcccccccacgtttcagcgagcagatttacgaggtggccattgtcgggcctattcaccccggaatggaactgctcatggtgagggcctccgacgaggactccgaggtgaactattctatcaagacaggcaatgcggacgaagccgtgactattcatccagtcacaggctccattagtgtacttaacccggcttttctcggcctctcgcgcaaactgaccatccgcgcaagcgacggactctatcaggacactgctctggtgaagatatcactgactcaggttttagataagtctctccagttcgaccaggatgtttactgggcagctgtgaaggagaacctgcaggataggaaagccctagtaatcctgggcgcacagggaaaccatctgaatgacacactgtcttacttccttcttaatgggactgacatgttccacatggtacagagtgctggagtgctccagaccagaggagtggcctttgacagagagcagcaagacacccatgaactggcagttgaagtgcgggacaatcgcactccgcagcgggtcgcccagggcctggtgagagtaagcatcgaggacgtaaacgacaacccacctaaattcaaacatctcccatactacactattattcaagatggtaccgagcctggtgatgtattattccaggttagcgcgactgacgaagacttgggcaccaacggtgccgtcacttacgaattcgcagaagattacacctactttaggatcgacccttacctgggagacatatccctgaagaagcccttcgattaccaggccctgaataagtaccacttgaaagtcattgcacgcgatggagggaccccgtcccttcagagtgaggaagaggtcctggtgacagtgcggaacaaaagcaatcctctgttccagtccccttattacaaagtacgagtgccagaaaacattacactgtacaccccaatactacatactcaggcgagatctcctgagggtttgcgtttgatttacaatatcgtggaagaagaacccctcatgctgttcacgaccgacttcaagaccggcgtgctaaccgtgactggtccgctggactacgagtccaagacgaaacacgtgttcactgtacgcgcaactgataccgctctgggcagcttcagcgaagccacggtggaagttttagtcgaggacgttaatgacaaccctcccaccttctctcagctggtttacaccacctccatcagtgagggtctacccgctcagacacctgtgattcaacttctagccagcgatcaggattcggggcgaaaccgcgacgtgagctaccagatcgttgaagatggcagcgatgtctctaaattctttcagattaacggctcaacgggcgaaatgagcaccgttcaagagctagactatgaagcccaacagcactttcatgtgaaagtcagggccatggataagggagacccccctttaaccggcgaaactctagtagtggttaacgtctcggacatcaatgataaccctcctgagttcaggcagcctcaatacgaggcgaacgtgagtgagttggctacatgcgggcacctggtactgaaggtgcaggccatcgatccagattccagagataccagccgcctggaatatctgatcctttccggcaaccaagataggcacttttttatcaacagcagcagtggaattatcagcatgttcaatctgtgcaaaaagcacctagactcttcatacaatctccgagtcggggcttccgacggggtgttcagagccaccgtccctgtctacatcaatactactaacgcaaacaagtacagccccgaatttcagcaacatctttacgaagcggagttggcggagaacgcgatggtagggaccaaagtgatagacctactcgccattgacaaggactctggcccatatggaacaatagactatacgatcatcaataaacttgcttccgagaagttttccatcaatccaaatggccagatagctactctccaaaaactagaccgcgagaacagtaccgagcgtgtgattgccattaaagtcatggcccgagacggcggtgggcgtgtggcattctgtacggtcaagattatcctgactgacgaaaacgacaatccaccccagtttaaagcctcagaatatacagtatccatacagtccaacgtcagcaaggattcacccgttatccaggtactggcctatgatgccgacgagggacagaatgctgatgtcacatacagcgtgaatcctgaggacctcgtgaaagacgtcattgaaatcaatccagtaaccggagttgtgaaagtgaaggactctctggtcggcctggaaaatcagaccttggactttttcatcaaagcccaggacgggggaccgcctcactggaactcactggtccccgtgcggctgcaggttgttcccaaaaaagtctctctgcccaagttcagcgaacctctctataccttctcagctccagaagatctccccgagggatccgagattggtattgtgaaagctgtcgcagcccaggaccctgtgatatactctctggtgcggggtacaaccccagagagcaataaggatggggtcttttctttggatccagataccggcgtgataaaggtgcggaagcccatggatcacgaatctaccaaactctaccagatagatgtgatggcccactgtctgcagaatactgatgtcgtgtctctcgtgagtgtgaatatccaagttggcgacgtgaatgataatagacccgtcttcgaggctgacccctataaagccgtcttaaccgagaatatgcctgttgggacctccgtgatccaggttactgccattgataaggacaccggtagggatggccaggtgtcctatcgccttagcgccgacccagggtccaacgtgcatgaattatttgctatcgatagtgaatccgggtggatcacaaccctgcaggagttggattgtgagacctgccagacataccatttccacgtagttgcatacgatcatggtcagaccatacagctttcttcacaggctcttgttcaggtgtccattaccgacgagaacgacaatgctcccaggtttgctagcgaagagtatcgagggagtgtggtagagaattccgaaccaggggaactggtcgccaccctcaaaacactcgacgcagatatttccgaacaaaatcggcaggtgacatgctatataaccgaaggcgacccacttggtcagttcggtatatctcaggtcggggatgagtggcgcatctcttcccgaaagacattggacagagaacacactgcaaagtacctgttgcgagtgacagcttccgacggaaaatttcaggcaagcgtgacagtagaaattttcgttctggacgtgaacgacaactctccccagtgtagccagctcctctacaccggtaaggtccacgaagacgtttttcctgggcattttattctcaaagtctctgcaacagaccttgacactgataccaacgctcagatcacatactcgctgcacggtcccggagcgcatgaattcaagctcgatccgcacacaggggagctcactacattgaccgcgctggatagggagcggaaggatgtgtttaatcttgtggctaaggccacggacgggggagggcgatcttgccaagcagacatcaccctccatgtcgaagatgtgaatgataatgcccctaggttcttcccttctcattgtgccgtcgccgtttttgataatacaaccgtgaagacgcctgtggcagtagtgttcgcaagagacccggatcagggagccaatgcacaggttgtgtactccctccccgatagcgccgagggacactttagtatcgacgccaccaccggcgtcatccgcctcgagaagcctttgcaggtgcgaccacaggccccactagagctcacagtgcgggcttctgacctcggcaccccaattcccctctcaaccttgggcacagtcactgtgtccgtagttggattagaagactacttacctgtgtttcttaatacagaacattccgtgcaggtccccgaggacgcacccccagggaccgaggtcttacagcttgccactcttaccaggcccggtgccgagaagacagggtaccgcgtggtgagcggcaatgaacaaggcagattccgacttgatgcccgaactggcatcctctatgtcaacgcctccctcgatttcgagaccagccccaaatatttcctgtcaattgagtgttcacgcaaatctagttccagcctctccgatgtgactacagtgatggttaacatcacggacgtcaatgagcacagaccacagttcccccaagacccatatagcactcgtgttttagaaaacgctctggtgggtgatgtgattctgactgtgagcgcaacggatgaggacggacccctcaattccgacatcacctacagcttgattggaggtaatcaactcggtcacttcacaatccaccctaagaaaggagagcttcaggtcgctaaggcgctggacagagagcaggcaagcagctacagcctgaagttgagagccacggatagcggccagcccccactgcacgaagataccgacattgccattcaggtggccgatgtcaatgataatccacctcggtttttccagttaaactacagcaccacagtccaggagaattccccaatcggaagcaaggtgcttcagcttatactctctgaccccgattccccggaaaacggacctccctactcctttcgaattacaaaagggaacaacggttctgcttttcgggtaacccctgacgggtggctggtgacagccgaaggcctgtctcggagggcacaagagtggtaccagctacagatccaggccagcgacagcggaatccctccactcagctcattaactagcgtgcgcgtacatgtcaccgagcagagtcactatgccccaagtgctctgcccttggaaatattcattacagtaggggaagatgagttccaaggcggaatggtcggaaagatccatgcaaccgaccgagaccctcaagatacgctgacctatagcttagctgaggaagagactctcggacgccatttctctgttggcgctcccgacggcaaaataatcgccgctcagggcctgcctcgcggacactattcatttaatgtgaccgtgagcgatgggaccttcacgacaaccgcaggcgtgcacgtctacgtttggcatgtgggccaggaggccctgcagcaggccatgtggatgggattctaccagctaacgcctgaagaactggtttcagatcattggaggaacctgcagcgctttttatctcacaagttagacattaaacgcgctaacatccacctcgcgagtctgcagccagccgaagccgtggccggagttgatgtcctgcttgtatttgaaggtcactccgggactttctatgagttccaagagcttgcttcaattattacacattcagccaaggagatggaacacagtgtgggggtgcagatgcggtctgccatgccgatggtcccttgtcagggacctacatgccaggggcaaatatgccacaacactgtgcatttagaccctaaagttggaccaacctacagtactgcacgcctcagcatcctgacacctaggcaccacctgcaaaggtcatgctcctgtaacgggaccgctaccagattctccggccagtcttatgtgaggtatcgggctcccgctgccaggaattggcacattcacttttacctgaagaccttgcagccacaagctatcctcttgttcaccaatgagaccgcctctgtttcgctgaagctagcctccggggtgcctcagctcgaatatcactgcctcggcggattttatgggaatttatcctcccagaggcatgtaaacgatcacgagtggcacagcatcctggtcgaagagatggacgctagcattcggcttatggtagatagcatgggaaacacgagtttggtcgttcctgagaattgtaggggcctgcgaccggaaaggcacctgctgctgggaggactgattctgctgcacagttccagcaatgtgagccagggctttgaaggctgtttagatgcagttgtagtgaatgaggaagctttggacctgctagcaccgggtaaaacagttgccggactgttggagacacaagctttaactcaatgctgtctccatagtgactactgcagccagaacacctgtctcaatgggggaaaatgttcctggacgcacggcgctgggtacgtatgtaaatgcccccctcagttttcaggcaagcactgtgagcagggacgtgaaaactgcaccttcgcaccctgcttagagggcggaacctgcattctgtctcccaagggcgcttcctgcaactgtccccacccatacaccggagacagatgcgaaatggaggccaggggatgctccgaggggcactgcctggttaccccagaaatccaacgcggagactgggggcagcaagaattgttaataataaccgtggccgtggccttcataatcataagcactgtcggactcttattctattgccgccgatgtaagagccataagcccgttgcgatggaggatccagacctcctggctcgatctgtcggcgtcgacacccaggcaatgcccgctatcgaactcaacccgctgtccgcctcttcgtgcaacaatctcaatcagccagagcctagtaaggctagcgtacctaacgagctagtcacatttggtcctaattccaaacaaaggccagtcgtgtgttccgtgcctccacgactaccaccagccgcagtcccttctcatagtgataatgaacctgtcataaaaaggacctggagctccgaggaaatggtgtacccgggaggagctatggtctggccacctacctacagtcgcaatgaacgctgggaatatcctcacagcgaggtcacacaaggccctttaccaccatcagctcatcgccatagcacgcctgtcgtgatgcccgagccaaacggcctctacgggggattccctttccccctagagatggagaataagagggctcctctgcccccaagatacagcaaccagaacctcgaggacctcatgccctcacggccaccttctccacgtgagcgtttagtggccccatgtctcaatgagtatacagcaatttcctattaccattctcagttccgccagggaggaggaggcccatgtcttgccgacggcggatacaagggggtaggcatgagactgtccagagcaggccctagttacgcggtttgcgaggtggaaggcgctccactcgccggtcagggacagcccagggtgccacccaactatgaggggagtgacatggttgaaagcgactacggatcttgcgaggaagtgatgttctaa

SEQ ID NO: 222905 - DNA, 13770 bp, synthetic construct
  misc_feature 1..13770: note = Description of Artificial Sequence: Synthetic coding sequence
  source 1..13770: mol_type = other DNA
atggatatcatcatgggccactgtgtgggcactcgacccccagcctgttgtttaatccttctgctatttaagctgctggctaccgttagccagggcctcccaggcactgggcctctggggttccactttactcactccatttacaacgcaacagtgtacgaaaattcagctgcacgcacttatgtcaactctcagagtcgcatgggcatcaccttaattgatctatcctgggacattaaatacagaattgtttcaggagatgaagaggggttcttcaaagccgaggaagtgattatagccgacttttgtttcctgcgcatccgaacaaaggggggaaattcagccatcttgaacagagaaatccaggataactacctgctgatcgttaaggggtctgtaagaggcgaggacctcgaggcatggaccaaggttaacatccaggtgcttgacatgaatgaccttcgccctctgttctcaccaacaacctacagcgtgaccatcgccgagtctaccccactgagaacctccgtcgctcaagtgacagccactgacgcggatattggatccaacggagagttctattactatttcaaaaacaaggtggacctcttctccgtacatccgaccagcggtgtgatctctctgtctggtaggctgaactatgacgagaagaacaggtacgacctggaaatactggccgtcgatagggggatgaaactgtatgggaacaacggagtctcctcaacagcaaagctgtatgtgcacattgagcggattaacgagcacgctcctacaatacatgtggttacacatgttccttttagcctcgagaaggagcccacctacgcagtagtcactgtggatgacctcgacgacggagctaacggcgagattgaatcggtgtcaattgtggcaggagaccccctggaccagttctttctggctaaagaaggaaagtggctcaacgagtataagattaaggagagaaagcagatcgattgggaatcgtttccctatggttacaatctaacactacaagcgaaggacaagggctcacctcaaaaatgttctgccctgaaagcagtgtacattggcaatccgaccagagacaccgtgcctatccggtttgagaaggaggtctacgacgtgagcattagtgaattttcgcccccaggtgtagtcgtagctatcgtcaaactaagtccagaaccaatcgacgtagagtacaagctaagtcccggagaggacgcagtatatttcaagattaacccaagaagtggactcatcgtcacggcacggccactgaataccgtcaagaaagaagtgtacaaactagaggttaccaataaggaaggcgatctcaaggcgcaagttaccatctcaatcgaggatgccaacgaccacacacctgaattccagcagccattatatgacgcctatgtcaatgaatcagtacctgttggcacaagtgtgttgacggtaagtgcttcggacaaagacaagggtgaaaacggctatatcacttacagtattgcaagtcttaacttacttccattcgtaattaaccagtttaccggtgttatctcaactaccgaagaattggacttcgaatcctcacccgagatttaccgctttattgtgagggcctccgactggggaagcccataccgacatgagtctgaggtgaacgtcaccatccgaattggaaacgtgaacgataactcacctttgttcgagaaagttgcttgccaaggtgtgatctcatacgatttccccgtgggaggccacatcacggccgtctccgccatcgacatcgacgaactggagctggtgaagtacaagattatttccggcaacgaattagggttcttttacttaaatccggacagtggcgttctgcagctaaagaagtcgctaacgaatagcggcatcaagaacggaaactttgcgctgaggatcactgcaactgatggtgaaaacctggccgacccaatgagtattaacatcagtgtgcttcacggcaaagtgagcagcaagtccttttcctgcagggaaacccgggtggcacagaagctggctgaaaaacttctgatcaaggccaaagctaatggcaaactgaacctggaggacggcttcctggatttctattctatcaataggcaaggcccatactttgataaaagtttcccgtcagacgtggccgtgaaggaggacctcccagttggggcaaacattctgaaaataaaagcctacgacgcagacagcggctttaatggcaaagtgcttttcaccatttccgatgggaacacagatagctgctttaatatagacatggaaacagggcaactgaaggtcctcatgcccatggaccgagagcacacagacctatatctcctcaatattaccatctacgatctggggaacccacagaagagtagctggagactgctcaccatcaatgtggaagatgccaatgacaactcaccggtgttcatccaagattcctactcagtcaatatactggaaagtagcgggatcggcaccgagattattcaggttgaggccagagataaagacctaggctccaacggtgaggtcacatactcagttctaaccgatacccagcaatttgccattaatagtagcactggaatcgtctatgtggccgatcagctggaccgtgaatcaaaggctaattatagtctgaagatcgaagccagagataaagccgagtccggccagcagctgtttagtgttgtcacgctgaaggtgtttctcgacgacgtgaatgattgtagcccagccttcattccttctagctacagcgtgaaagtcctggaggacttacccgtcggcactgtgattgcatggctcgaaacacacgaccccgacctgggattaggcggacaggtgagatactccctcgttaatgattacaatgggcgattcgaaatcgacaaagcttctggagcaattcggctctcaaaggagctggactacgaaaagcagcagttttataacttgaccgtacgtgccaaagacaaggggcgtccagtgtccttgtctagcgtctccttcgtggaggtcgaggtggtcgacgtcaacgagaacctgcacaccccttactttccggattttgccgttgtgggcagtgtgaaagagaactctcgtatagggacctcagtccttcaagtgacagctagggatgaggactccggcagggatggtgagatccagtatagtattcgcgatgggagtggtctgggtcgtttttccatcgacgatgagagtggggtcatcacggccgcagacattcttgatcgggagacaatggggtcctattggctgaccgtttatgcgaccgatagaggagtagtgccgctttacagcaccatagaagtgtacatcgaggtcgaggatgtcaacgataacgcccctttgactagcgagcccatctactatccagtagtcatggagaactcccccaaggatgttagtgtgatccagatccaagctgaggatcccgattcctctagcaacgagaagctgacataccgaatcacatcaggcaatccgcagaatttcttcgcgatcaacatcaagaccggtctgatcaccacaacctcaaggaaacttgatcgggagcagcaggccgagcatttcttagaggtaactgtgacagatggagggccatcccccaagcagtcgacaatatgggtggtcgtccaggtactggacgagaatgacaataagccccaatttccggaaaaagtatatcaaataaagcttcctgagagagaccggaaaaagcgaggagaacccatctacagagcttttgctttcgaccgcgatgaaggcccaaacgccgagatctcctacagcattgtggacggcaatgacgatggtaagttcttcatcgaccccaaaacgggtatggtctcatcaaggaagcagtttactgctggctcttacgatatcctgaccatcaaggccgtggacaacggcaggccacagaagtcatctacggcccgattgcacatcgaatggatcaaaaagcctcctcctagccctataccgcttaccttcgatgagcctttctataattttactgtcatggaatctgatcgcgttaccgagatagtcggcgtggtgtccgtccagcccgcaaatactcccctgtggttcgacatagtcggcggaaattttgatagcgctttcgatgccgaaaagggggtggggacaattgtgatcgctaaaccactcgatgcggagcagagaagtatttataacatgagtgttgaagtgacagacggtaccaacgtggccgtcactcaggtgtttattaaggtcctcgataacaacgacaacgggcctgagtttagccagccgaactatgacgtcaccatctccgaggatgtgttacccgatacagaaattctacagatagaggccactgaccgggatgagaagcataagttatcatacacagtacattcctccatagatagtatctcaatgcgaaaattccgaatcgacccaagcaccggggtactgtataccgctgaacgactggaccacgaggctcaggacaaacacatccttaacatcatggttagggatcaagagttcccatatcggcgaaatctggcgcgtgtgattgtaaacgtggaagacgctaacgatcattcaccctacttcacaaatccgctatacgaggcctccgtgtttgagagcgccgctctcggctccgcagtcttacaggtcaccgccttagataaggataagggcgaaaacgctgaattgatatataccatcgaggcaggcaatactgggaacatgtttaaaatcgaacctgtcctggggattatcactatctgtaaagaacccgacatgacaactatgggacaatttgttctgtccatcaaagtcacagaccagggatcaccccctatgtctgccacagcgatcgtgagaatctctgttacgatgtctgataattcacaccctaagttcatccacaaggattaccaagctgaagtgaatgagaatgtcgacattggaacgagcgtgatattgatcagcgccatcagtcagtcgaccctgatctacgaagtaaaagatggcgacatcaacggaatttttacgataaacccatactcaggggttattacaacacagaaggccctggactacgaacgcacttcttcttatcagctgattattcaagccacaaatatggcaggaatggcatccaacgctactgtgaacatccagatcgtcgatgaaaatgacaatgccccagtctttctctttagccagtactccggttctctgagcgaggccgctccaatcaactcaatcgtcagatctctggataactccccactggtcatccgcgcaaccgacgcagactccaataggaacgctttgttagtgtaccaaattgtggagtctacagccaagaagttcttcactgtggattcctctactggcgcaatacggaccattgcaaacctggatcatgagacaattgcccactttcatttccacgttcatgtacgggacagcggcagtccacaactgactgctgagagccctgtagaggtgaatatcgaagtcacagatgtcaatgataaccctccagtgtttactcaggcagtgttcgagaccattcttcttttaccgacatatgttggagttgaggttctgaaagtaagtgcgactgacccggatagcgaagtacctcctgagttgacctattcattgatggaaggatctctggaccactttctgatcgactcaaattcaggcgtcctaactatcaaaaacaataacctttctaaagaccattacatgctgatcgtgaaggtcagtgatggaaagttctacagtaccagcatggttacaatcatggtcaaggaggctatggactccggactccactttacacagtctttttactccacctcgatttccgagaataatactaacatcactaaggtggccatcgtgaacgctgtgggcaatcggctgaatgagccgctgaaatattctatcctcaatccaggcaacaaatttaaaatcaaaagcacttcaggagtcatccaaaccactggagttcccttcgatagggaggagcaagaactatatgaacttgtggtggaagctagcagggagctggaccacctgcgtgtcgcacgtgttgtggtgcgagtgaacattgaagatataaacgacaactcccccgtctttgtgggcctgccttactatgctgcagtgcaggttgatgccgaacccggaacgttaatctaccaggtgacggcgatagacaaggataaggggccaaatggtgaagtaacatatgtcttgcaagatgactacggacactttgaaattaatcccaactccggcaatgtcatcctgaaggaggcttttaacagcgatttgagtaatatagagtatggggtgaccattcttgctaaggatggaggcaagccttctttaagcacgagcgtggagctgccaatcacgatcgtgaataaggccatgcctgtgttcgacaaaccattctacactgcatccgttaatgaggacattcgaatgaacaccccaatcctgtccatcaacgctactagccccgagggacaggggataatttatataatcatcgatggtgaccctttcaagcagttcaacatcgatttcgacacaggagtgctgaaggtagtgtctcccttggactatgaagtaacaagtgcgtataagcttactattcgtgccagtgacgccctgacaggcgcacgtgcggaggtgaccgtggacctgttggtcaatgatgtgaatgacaatccgcctattttcgaccagccaacgtataataccaccctctctgaggcaagcctaatcgggactccagtgctgcaagttgtgtctatcgacgccgatagcgaaaacaataagatggtgcattatcaaatcgtccaggacacctacaattctacagattacttccacatcgattcctcttcgggcctcatcttaacagccagaatgctcgatcacgagttagtgcagcactgcacactgaaggtgagaagcatcgattctgggttcccctccctgagcagtgaggtcctcgtccacatttatatttctgatgtgaatgacaatcccccagttttcaatcagctgatctatgagtcgtacgtaagtgagctcgctcctaggggccatttcgttacctgcgtgcaggcttctgacgctgatagctccgactttgaccggctggagtacagcatactgagcggaaacgaccggacttctttcttgatggactcaaaatcgggcgtcatcacactaagcaatcacaggaaacagcggatggaaccgctgtatagcttaaatgttagcgtctccgacggcctctttactagtaccgctcaggttcacatccgagtcctaggcgctaatttgtacagtcctgcattttctcagtcaacatatgttgcagaggtaagggagaacgtggcagctggtacaaaagttatacacgtacgcgctaccgacggcgatcccggaacatacggtcagatcagctacgctattatcaacgacttcgccaaggaccgatttcttatcgactccaacggacaagttatcactacagagaggctcgatagggaaaacccactggagggggatgtgtcaatatttgtgagagctctggatggcggtgggaggactaccttttgcaccgtcagggtgatcgtagttgatgaaaatgataatgcccctcagtttatgacagtggagtaccgggcttcagtccgcgctgacgttgggcgtggccatctggtcacccaggtgcaagccatcgaccccgatgacggcgctaactcacgcattacatactctctttattctgaggcctcggtcagcgtcgcggatctgctcgaaattgatccggataatgggtggatggtcactaaggggaacttcaatcagctcaaaaacactgtcctgtccttcttcgtgaaagccgtcgatggaggcatccctgtgaagcattctctcatccctgtctacatacatgtacttcccccagagaccttcttaccgagctttactcagtcacagtactcttttacaatcgcggaagataccgccattggcagtacagttgatactctaagaattttaccttcccagaacgtgtggttttcgaccgttaacggggagcgccctgagaataacaagggcggaatcttcgtcattgagcaggaaactgggacgataaaactggataaacgcctggaccgtgagacctccccagccttccatttcaaggttgctgcgacaatccctctcgataaggtggatattgtttttacggtggatgttgacataaaggtgctcgacctgaatgataacaaaccggtgtttgaaactagctcttatgataccatcatcatggaaggcatgcccgtcggtacaaagctgacccaagtccgcgcaatagacatggactggggggctaatggccaggtcacctattcgctccattcagattcacagcccgaaaaggttatggaggcttttaacatcgattccaacaccgggtggatttccactttgaaggacctggaccacgagacagatccaaccttcacgttttctgtagttgcctctgacttaggcgaggcattttctctcagcagtaccgccctcgtgagcgtcagagtgactgatataaatgataatgccccagtttttgcacaggaggtctatcgcggaaacgtcaaggagagcgaccctcctggagaggtggtcgcagtgctctcaacctgggaccgagacacgtctgacgtaaaccggcaagtctcctatcatattactggtggtaatccgagaggcaggtttgcgcttgggctggtgcagagcgaatggaaggtctacgttaagaggccgttggatcgtgaggaacaggacatatacttcctgaatattaccgcaacagatggtttatttgttacgcaggccatggtagaagtgagcgtctccgatgtgaacgacaattctcccgtctgtgatcaggtggcatacacggctcttttacctgaagacattccctccaacaagatcattctcaaggtgagtgcaaaggatgcagacattggttcaaacggctatatccgctattccctgtacgggagcggcaactcggaattttttctagatccagagtcaggggagctaaaaactcttgctctgctggacagagaacgaatccccgtctactctttgatggcaaaggcaacagatggcggaggacgattctgccagagcaatatccacctaatcctggaggatgtaaatgacaaccctcccgtcttctcatctgatcattacaacacatgcgtgtatgaaaataccgcgaccaaagcgctactcactagggtccaggcagtcgaccctgatatcggtattaatcggaaggtagtctatagcctcgccgactcggcaggtggtgtattttcaatcgacagcagctccggtatcattattcttgagcagccgctcgacagggagcaacagagcagttacaatatctccgtgagggccactgaccagagtccgggacagagcctgtcttccctaacaactgtgacaattacagttttagacattaacgacaatccccctgtatttgagcgaagggactatctcgtgaccgtccctgaggacacatcaccagggacacaggtgctcgctgtctttgccacctcaaaggacatcggcacaaatgccgaaattacatacctcatccgatccgggaatgaacaaggaaaatttaaaatcaaccccaaaacggggggtatcagcgtctccgaggtcttagattatgagttgtgtaaaagattttacttggtcgttgaggcaaaggatggaggcacacccgctctttctgcagtagctaccgtgaatatcaatcttaccgacgttaacgataatcctccaaagtttagtcaggatgtatattctgcagtaatcagcgaggacgcactcgtgggcgatagcgtgattctgttaatagccgaagatgttgacagtcaacctaacggacagatccacttctccattgtgaatggtgatcgagacaacgaatttactgtcgacccggtgctgggcctcgtgaaggtcaagaagaagctggatcgcgaacgtgtcagcggctattctctcctggttcaggccgtcgattccgggatccccgctatgtcatcaacagctaccgtgaatatagatatatccgacgtgaacgacaattccccagtgttcactccggctaattacaccgccgtgattcaagagaacaaaccagtgggaacaagcatcctacagctcgtggtgacagatcgtgattcgttccataatggaccaccgtttagcttcagtattctctctggtaacgaggaagaggagtttgtcttggatccacacggtatcttgaggagtgcggtggtctttcagcacacagagagcttagaatatgtactgtgcgttcaagccaaggactctggaaaaccacaacaggtgtctcatacatacatcagagtgcgagtgatcgaagaatcaactcataagccaactgccatccctcttgagatcttcattgtcaccatggaagacgatttccccggtggtgtgattggaaaaattcatgctacagaccaggatatgtacgacgtgcttacattcgctttgaagagtgaacagaagagcctgtttaaagtcaactcacatgacgggaaaatcattgcgctcggcggactggactcaggcaagtatgtcctgaacgtaagcgtgtccgatggtcgctttcaggttccgattgatgtggtggtgcacgtggagcagctggtccacgagatgctgcaaaatacggtcaccatcagattcgaaaacgtcagtccagaggactttgtgggactacacatgcacggttttagacgaactttgagaaacgctgtgttgactcaaaaacaggactccctacgaatcatttcgatccagccagtcgcagggacgaatcagctcgacatgttgtttgccgtggagatgcattcctccgaattttataaaccagcctatcttatccagaagctttccaatgctcgcaggcacttggagaacataatgcgcatatccgctatactcgaaaagaactgctccggcctggattgccaggaacaacattgtgagcaaggactgtctctggactctcatgcactgatgacatactcaaccgctcgaatctctttcgtctgtcctcgattctataggaatgttcgctgcacctgcaacggaggactgtgtcccggatcaaatgacccatgtgtggagaaaccatgtccaggcgatatgcaatgcgtttcttatgaagcaagtcggagaccattcctatgccagtgtccccctggtaagctgggtgaatgctctggtcacactagcctgagcttcgccggtaattcctacatcaaatatcggctttcagagaacagcaaagaagaggattttaaactggccctgcggctgaggaccttgcagtcaaatggcattatcatgtacacacgggcaaatccctgcatcatcctgaagattgtggacgggaagctttggttccagctcgattgcggttcgggccctggaattcttggaatcagcggtcgagctgtgaacgacggctcctggcatagcgtgttcttggaattaaataggaacttcacaagtttgagtcttgacgactcatatgttgaacgacgcagagcccctttgtatttccagaccctttcgacagagtcttccatatatttcggcgctttggtccaggcggacaatatccgcagtctgacagatactcgcgtcacccaggtgctatccggatttcagggatgtctggacagtgtgatacttaataataatgagttgccactgcagaataaaagaagcagtttcgctgaagtggtggggctgactgagttgaaactagggtgcgtgttgtacccagatgcatgtaaacgctctccttgccagcatggtggctcatgtactgggctcccatccggaggttaccagtgcacttgcctatcccagtttaccggaagaaattgcgagagtgagattactgcctgctttcccaacccctgccgaaacgggggaagttgtgatccaattggtaatacttttatctgcaactgcaaagccggtctcactggagtgacctgcgaagaagacatcaacgagtgtgagcgggaggaatgtgaaaacggcggaagttgtgtcaacgtgtttggatccttcctctgtaattgtacacccggatacgtgggccagtattgtggcttgcgcccagtagtggtccctaatatccaagctgggcatagctatgtagggaaggaggagttaatagggatagccgtggtgttattcgtgatttttatcctggtggtcctcttcattgtgttcaggaagaaagtgtttagaaagaattactctcgcaataacatcactcttgttcaggatccagccacagctgctctcttgaacaaaagcaatggcatccccttccgtaacctcagagggtcgggcgatggacgaaatgtttatcaagaggtcggcccaccccaggttcctgttagacccatggcttatactccctgtttccaatccgactctagaagcaacttagacaaaatcgtggacggattagggggagagcatcaggaaatgaccaccttccatcccgagtcaccgaggatcctaaccgctcggaggggggttgtcgtctgctccgttgcccctaatcttcccgcagtgagtccttgccgctccgactgcgatagtatacggaagaacgggtgggacgccggaactgaaaacaaaggggtcgatgacccaggggaagttacctgctttgccggatctaacaagggtagcaattcagaggtgcaaagcctcagcagcttccagtcggatagcggagatgataatgcatccattgttaccgtcatacagctggtgaataatgtggtggatacaattgagaacgaagttagcgtgatggatcaggggcagaactacaatagggcctaccattgggacaccagtgactggatgccgggtgcccgactctctgacatcgaggaggtgcctaactacgaaaaccaggatggtggctctgcccatcagggcagtactcgggaactagaaagtgactattatcttggcggatacgatatcgactctgagtacccaccaccgcatgaggaggagttcctatcacaggaccagttaccgcctccattgcctgaggacttccccgaccagtacgaggcgctgcccccttcccaaccagtcagcttggcttcgactctaagcccggattgtcggaggcggcctcaattccatccttcccagtacctcccgcctcacccatttcccaacgagacggaccttgtcggaccaccggcttcctgtgagttctccacatttgctgtgtctatgaatcaaggtacagagccgacaggcccagcagactctgtttccctgagtttgcacaattctcggggaaccagctccagcgacgtgagtgcaaactgcgggttcgacgactctgaagtggctatgagcgattacgagtcagtgggcgagctgagcctcgcttctttgcacattccctttgtcgagactcaacaccagactcaggtctat

SEQ ID NO: 222906 - DNA, 13674 bp, synthetic construct
  misc_feature 1..13674: note = Description of Artificial Sequence: Synthetic coding sequence
  source 1..13674: mol_type = other DNA
atggatattataatggggcactgcgttggcactagaccacccgcatgttgcctgatcttgctgcttttcaagctgctcgcaactgtgtcccagggactccctggtactggtcccttgggattccactttacacactctatatataacgcaaccgtgtacgaaaactccgcagccaggacctacgttaattcacaatcacgaatgggcattacattaatcgacctcagctgggatatcaaatataggattgtgtccggggacgaagaagggtttttcaaagccgaggaagtgataatcgccgacttctgcttcttgcggatccgcacaaaaggtggaaatagcgctattttgaatcgggagattcaagacaattacctgcttatcgtcaaaggctccgtgaggggcgaagatttggaggcttggactaaggtcaatatccaagtgctcgatatgaatgacctccgacctctattcagccctacgacttattcagtgacaatcgcagagtccaccccgttgcgcacctcagttgcccaggtgacagctaccgacgctgacatcgggagcaacggggagttctattactacttcaagaacaaggtggatttattttcagttcaccctaccagcggtgtgatatcactgtccggtcggttaaattacgatgagaagaaccggtacgatctagagattttggccgtagaccggggaatgaagctatatggaaacaacggcgtatcaagcaccgccaagctctacgtgcacatcgaacggataaatgagcacgcacctacaatccatgtggtgacccatgtgcctttctccctggagaaggaaccaacctacgccgttgtgaccgtggacgatttagacgacggagccaatggggaaatcgaatcagtgtctattgtggctggagaccccctagaccaattctttctcgctaaggaaggcaagtggcttaatgaatataaaatcaaagaacgtaaacagatcgactgggaatcttttccctacgggtataacctcactctgcaggctaaggacaaagggtccccccagaaatgcagtgctctgaaagctgtttacattggcaatcctacacgagacaccgtaccaatccgttttgagaaggaagtatacgatgtgagtatctctgagttcagtccgccaggagtggtggtggcaatcgtgaaattgtctcccgaacctatcgatgttgaatacaagctaagtcctggagaagacgctgtgtattttaagatcaaccctcgaagtggcctgattgtgaccgccaggcctctcaacacggtcaaaaaggaggtttataagctggaagtcacgaataaggaaggcgatctgaaagcacaggttactatttccatcgaggatgcaaatgaccatacacccgagtttcaacaaccgctgtatgatgcctacgtgaacgaatctgtgccagttggcacctcagtgctgactgtgagcgcgtctgataaggataagggggagaacggctacatcacctattctatagcttcccttaatctgctgccttttgtcattaaccaatttaccggcgtcatttctaccactgaagaacttgattttgaatcctcgcccgagatttaccgtttcatcgtccgggctagcgattggggctctccataccgccatgaatccgaggtgaacgtaaccatacgtattgggaacgtcaacgacaactccccgctgttcgagaaagtcgcatgtcagggtgtgatatcgtacgatttccctgtgggagggcatataacggccgtctctgccatcgacatcgatgaacttgagctcgtgaagtataaaatcatttcaggtaacgaactcggatttttttacttgaacccagatagtggcgtcttacagctcaaaaagagcctcaccaactccggcatcaagaacgggaatttcgccctgcggatcacagctaccgacggggaaaacctggctgatccgatgtctattaacatcagcgtgcttcatggaaaggtttcctctaagtccttctcatgtcgagaaacaagagttgcgcagaaactggctgaaaagctcctgatcaaagcaaaggctaacggaaagctgaatctcgaagacgggttcttggacttctattcgatcaatcggcaaggcccatacttcgataagtcgtttccttctgacgtcgcagtaaaggaggacctgccagtcggggctaacatcctgaaaatcaaagcctacgacgccgattctggctttaacgggaaggttctgtttaccatttctgacgggaataccgattcctgcttcaacattgacatggagaccggccagttgaaagtgcttatgcctatggatagggaacacaccgacctgtacctgctgaatattaccatttacgatctgggaaacccccagaagagttcatggcgcctgttgacgatcaatgtagaggacgccaatgacaattcaccagtgttcatccaagactcttactccgtaaatattttagaatcatctggcattggaacggagattattcaggtagaagctcgagataaggacctcggcagcaatggcgaggtgacgtactcagtacttaccgacacccagcagtttgccattaacagcagcaccgggattgtgtacgtggctgaccagctggacagggagagcaaagctaactatagcttaaagattgaggctagagataaagctgagagtggacagcagttattcagtgtggtgactctgaaggtgttcctggacgacgtgaacgattgcagcccagcattcattccttcctcttattctgtgaaggtgcttgaggatctcccggtgggaacggtgatcgcatggctcgaaactcacgacccagacctggggcttggtggacaggtgcggtactctctggtcaatgactacaacggaaggttcgagatcgacaaggcctccggagctatccgtctgtctaaagagctggactatgaaaagcagcagttctataacctcactgtgcgggctaaggacaaaggcagaccagtctccctttcgtctgtgtcattcgtggaggtggaagtggtagacgtcaacgaaaatctacataccccttactttccagattttgccgtagtcggctcggtgaaggagaattccaggatagggacctcggtcctacaggtaaccgctagggatgaagatagtggaagggacggggagatccagtattcgatacgggacggatccggcctcggacgcttttcaattgatgacgaaagtggtgtgattacggcagcagatatcttggatagggagaccatggggtcatactggctgaccgtatatgctacggaccgtggggttgtgcctttatattctaccatcgaggtatatatcgaagtagaggacgttaacgataatgccccattaacgtctgaaccgatttattacccagtcgtaatggaaaattcccccaaggatgtgtccgttatccagattcaagcagaggatccagacagctccagcaatgaaaaacttacttatcgcatcacctctggaaacccacagaacttctttgctattaacataaagacgggcctaatcacaaccacaagtcggaaactcgatcgggaacagcaggccgagcacttcctcgaggtgaccgtgacggacggcggtcccagccccaagcagagtacaatatgggtggtagtacaagtactggatgagaatgataataaacctcagtttcctgagaaggtctatcagatcaaattaccggaacgcgaccggaaaaaacgcggtgagcctatttaccgcgctttcgcatttgatcgggatgaggggccaaatgctgaaatctcctatagcattgtggacggcaacgacgacgggaaattcttcattgaccccaaaactggcatggtcagttcccggaaacagttcaccgcaggctcctacgacatcctaacaattaaggctgtcgacaatgggcgtccacagaagtcttctactgctcgtctccatatagaatggatcaaaaagccccctcctagccctattcccctgaccttcgatgagccattctataattttaccgtgatggaatccgaccgcgttacggaaatagtgggagtagtgtctgtccagcctgccaacactcccctgtggttcgatatagtggggggtaactttgactcagccttcgacgcagagaagggagtaggcactattgttatcgccaaaccacttgacgctgagcagagaagcatttataatatgagcgtagaggtaactgatggaacaaacgttgccgtgacgcaggtcttcataaaggttttagataataacgacaatggaccggagttttctcaaccaaattacgacgtgacaatttctgaggacgttctgcccgataccgaaatccttcaaattgaggctaccgacagagatgagaagcataaactcagctacaccgttcattcctcgatcgactcaatctctatgagaaaattcagaattgacccctctacgggcgtactttacacagcagagcgactcgaccacgaggcccaggataaacacatcttgaacattatggtcagagaccaggagttcccgtacagacggaacttggccagggtcatcgtgaatgtagaagacgccaatgatcatagcccctattttactaatcccctttacgaggcatctgtttttgaaagcgctgcacttggaagtgccgtgctgcaggttacggctctggataaggataaaggagaaaatgccgaacttatctacaccatcgaggccggaaacacgggcaacatgtttaaaatcgagccagtgctgggcatcattaccatctgtaaggagccagacatgactacaatgggtcaattcgtcctctctatcaaagtcacggatcagggatctccccctatgtcagctaccgcaattgttcgtatttccgtaacaatgtccgacaactcccacccaaagtttatccataaagactaccaggccgaggtaaacgaaaacgtagatattggcacctcagtcatccttatctctgccatttcccagtccaccctaatttacgaggttaaagatggcgacataaatggcattttcactattaatccctatagcggagttattaccacccagaaagctctagactatgagcgaactagctcatatcagctgattatacaagctacgaacatggccggaatggcatctaatgccacggtgaatattcagattgtggatgagaatgacaatgctcccgtttttcttttctcccagtactcgggaagtctaagtgaagcagccccaataaactcaatcgtcaggagcctggataattctccactggtcattagagccactgacgccgattcaaatagaaacgccctgttagtgtatcagatcgtggagagtacagcaaaaaagttctttaccgtggattccagcaccggtgcgatccgtaccattgccaaccttgaccacgaaacgatcgctcattttcatttccacgttcatgtcagggacagcgggtcaccacagctgacggccgaatcccctgtggaggtgaatatcgaggttacggatgtgaacgataatcccccagtgttcacccaggctgtgttcgaaaccattcttctgctgcccacttacgtgggggtagaggtactgaaagtctccgctacagatccagactcagaagtgccccctgagctgacctactccttgatggaagggtctctggatcactttctcatcgatagcaattcaggcgtcctgacaataaagaacaataacctgtcgaaggaccactatatgctgattgtgaaggtctccgacggcaaattttactcgaccagcatggtgactattatggtgaaggaggccatggactccggactgcattttacacagtctttctactcaacgtcaatcagcgagaataatactaatattaccaaagtagccatcgttaacgcagtggggaaccggcttaacgagcctctaaagtacagcatcctgaaccctgggaataaatttaaaattaagtcaacatcaggagtcattcagacaaccggtgtcccattcgaccgcgaggagcaagaactgtatgagttagtggtcgaggcctcccgcgagctggaccacctgcgcgtcgccagagtggtggtgagagtaaacatagaggacattaatgataacagtccagtcttcgtcggtctcccatattacgctgccgttcaggtagacgctgagccaggcactttgatctaccaggtgaccgctattgacaaagacaaggggccaaatggagaagtgacgtatgttttacaggatgattatggccattttgagatcaatcctaactccggcaacgtgatcctcaaagaagctttcaatagcgacttatccaacattgaatacggggtgaccatactggccaaggacgggggaaagccctctctctccactagtgtcgagcttcccattacaattgtcaataaggcaatgcccgtgttcgacaaaccgttctacactgcgtctgttaatgaggatatcagaatgaatacccccattttgtcaatcaatgcgacatctccggaggggcaaggaatcatctacattatcatcgacggagaccccttcaaacagtttaacattgacttcgataccggggtcctgaaagtggtgtcaccactcgactatgaagtgacgagtgcgtataagctgaccatccgagcttcagatgcattaaccggggcacgcgcagaagttacagtggatctccttgtaaatgatgtgaacgataacccccctatttttgatcagcccacttacaacactaccctttccgaggcctctttgatcggcactccagtgttacaggtggtgtctattgacgcagacagtgaaaacaataagatggtccattaccaaattgtacaggacacctacaattccaccgattattttcatatagactcaagcagtggcctgattctcactgcaaggatgctcgaccacgaactggtacagcactgcaccctgaaagtaaggtctattgatagtggtttcccttccttgtccagcgaagttctagtccacatctatatcagcgatgtgaacgacaatcctcctgtcttcaatcaactaatctatgagagctacgtgagcgaactggccccaaggggccactttgttacctgcgtgcaggcttctgacgctgatagctccgactttgatcgcctggaatactccattctgagcggaaatgaccggacaagttttcttatggacagcaagtcaggcgtgattaccctgtccaaccacaggaagcagcggatggagcccttgtattccttaaatgtgtccgtgtctgacgggttattcacctctacagctcaggttcacattcgggtccttggtgctaacctgtattcccctgcctttagccagtccacatacgttgctgaggtgcgggagaacgtggccgctggcacgaaagtgatccacgtgagggcaacggacggcgaccccggtacttacggacagattagctacgcgataattaatgactttgccaaggatcgttttcttatagacagcaacgggcaggtgataactaccgagcgcctcgatcgcgaaaacccactggagggagacgtgagcattttcgtaagggcattggatggcggaggcaggaccaccttctgcaccgtgagagtgatcgttgtggatgagaatgacaatgctcctcagtttatgacagtggaatatcgagctagcgtgcgggctgacgtaggtcggggacacttggtgactcaggtgcaggctatcgacccagatgatggagcaaactcaaggattacttatagcctatattccgaggcgtctgtgagtgttgccgacctcctggagatagatccggacaatggatggatggtcaccaaagggaatttcaaccagttaaagaatacagtcctgtccttctttgtcaaggcagtggatggtgggataccagtcaagcacagtctgatccccgtgtatattcacgtacttccccctgagactttcctgccgtcgtttacacagagtcagtactcattcactattgccgaagacacagccatcggtagcaccgtagacacgctcaggatactcccatcccaaaatgtgtggttttcgaccgtgaacggcgaaaggcctgagaacaacaaaggcggtatctttgtgatcgaacaagaaacaggcacaatcaagctggataagcgactggacagggagacctcgccagcctttcacttcaaagtggcagcaaccatcccacttgataaggttgacattgtcttcaccgtagatgtggatatcaaagtgctagacctcaatgataataagccagtgtttgagacctcctcttatgataccattattatggaagggatgcctgtgggcactaagttgactcaagtccgggcaattgatatggactggggggctaatggccaggtgacctactctctccactccgactcccagcccgagaaagttatggaagcctttaacatcgattctaatactggctggattagcactctcaaggacctggaccacgagacagacccgacgttcaccttctccgtcgtagctagcgacctaggcgaagcattttctcttagctctacagctttggttagcgttcgggtcaccgacataaatgacaacgcccctgtattcgcacaggaggtatacaggggtaatgtgaaagagtcagatcctcctggggaggtggttgcagtactgagtacctgggaccgagatacgtccgacgtcaacagacaggtgtcttatcacatcaccggcggaaatcctagagggcgtttcgcccttgggctggttcagtccgaatggaaagtgtacgtgaagcgaccgctagatcgtgaagagcaggatatctacttcttgaacataacagcaacagacggactgtttgtaacccaggctatggttgaggtctctgtgtccgacgttaatgataattcccccgtgtgtgaccaggtcgcttacacagccttgctgcctgaggatatacctagcaataagataattcttaaggttagcgccaaggacgcagatatcggcagtaatgggtatattcgttactctctgtatgggagcggtaactccgaattttttttagacccggagagcggagagctgaaaacactagcacttctggatagagagagaattcctgtttatagcctgatggccaaagccactgacggcggaggtagattttgccagagcaatatccaccttattctcgaggatgtgaatgacaaccccccagtgttctcctcagaccactacaatacatgcgtttatgagaatactgccaccaaggcactcctgacaagggttcaagctgtcgacccagatattggcattaatcgaaaagtggtgtacagcctggcggacagtgcgggtggcgtattttccattgactcctctagcggcataatcatccttgagcagcctttggatcgagaacagcagtccagctacaacatttcagtccgcgctaccgatcagagccccggacagtcacttagttcactgacaactgtgacaattacagttttggacataaacgacaacccaccagtgttcgagcgcagagattacctagtgactgtgcctgaggacacgagcccagggacccaagttctcgctgtctttgcaacttctaaggatatagggacgaatgctgaaattacctatctaatccggtctggtaacgagcaggggaaatttaaaattaaccctaaaacagggggaatctccgtgtccgaggttctggattatgagctttgtaaaaggttctacctagtggtagaggctaaggacgggggaacgcctgccctaagtgccgtcgctactgtgaatatcaatttgacggatgttaacgataaccctcccaagttctcccaggatgtctattcggccgtcattagcgaagatgcccttgtcggagacagtgtaatcttgctaattgccgaggacgtagattcccagcccaatgggcagatacacttcagcatagtgaacggggaccgggataatgagttcacggtggaccctgtgcttggactggtgaaagtgaaaaaaaagctcgatcgggaaagagtttctggttacagcctcctggtacaggccgtggacagcgggatccccgcaatgagtagcaccgcgacggtaaacatagatatctcggatgtgaacgacaattcccccgtgtttacgcccgcaaactacacagctgttattcaggagaataaaccagtgggaaccagcattctccaacttgtggtgactgacagagactctttccataatggcccacccttctccttctctatcctgtccggcaacgaagaggaagagttcgtactggatcctcacggtatcctgaggtcagcggtggtgtttcagcataccgagagccttgagtatgttctctgtgtgcaggccaaggacagtggcaaacctcagcaggtgtcccacacatacattcgggtgagagttattgaggaatccacccataagccaacagccatacccctcgaaatcttcattgttacaatggaggacgatttccccggaggtgtgatcggaaagattcacgccacagaccaggatatgtatgatgtgcttaccttcgctttaaagagcgaacagaagtccctgtttaaggttaacagtcacgatggaaaaattatagccttgggcggtctggatagcgggaagtacgtgctcaacgttagcgtttctgacgggaggttccaggttcccattgacgtggttgtccacgtggagcagctggttcacgaaatgctccagaataccgttacaatcagatttgagaatgtctcacccgaagatttcgtcggactgcatatgcatgggtttcggagaacgctgcggaatgccgtcctgacccagaaacaagacagcctgaggatcatcagtattcagcccgtggccggtaccaaccagttggatatgcttttcgccgtcgagatgcacagtagcgagttctataagcccgcatacctgatccagaagctgtccaatgcaagaagacatctcgaaaacattatgcgtattagcgccattctggaaaagaactgttccggtctagactgccaggaacagcactgcgaacaaggacttagtctcgattcccacgcgctgatgacctattctacagcgaggatcagcttcgtttgcccacggttttaccggaacgtgagatgcacatgtaacggaggcctctgtcctggatctaatgatccatgtgtagagaaaccatgcccaggtgacatgcagtgtgtgagttacgaagctagcaggcggcctttcctgtgtcagtgtccacccggaaagctgggagagtgtagcggtcatacgtccctcagttttgccggtaactcttacatcaagtacaggctgtcagagaactccaaggaggaagacttcaagttggccctccgacttcgcacactgcagagtaacggaataataatgtacacccgagctaacccgtgcatcattttaaagattgtagatggcaagctttggttccaattggactgtggcagtggtccaggcatattgggcataagtggccgtgcagtgaacgacggtagctggcattcagtcttcctagaactgaatcgtaatttcacctccctgtccttggacgactcctacgttgaacgcagacgtgctccgctgtactttcagacactgtccacggagagctccatatactttggcgctctggtccaggctgacaatatcaggtcactaactgatactcgggtgacccaggtcctgtctggctttcagggttgcctcgattcagtaattctcaacaacaacgagcttccactgcagaataagcggagcagttttgctgaggtagtgggccttaccgagctgaaactcgggtgtgtcttgtaccctgacgcttgtaagaggtccccatgtcagcacgggggttcatgtactgggcttccttcaggtggttatcagtgtacgtgcttaagccaattcacaggaaggaactgcgaatccgaaatcacagcctgtttcccaaacccgtgtcgcaacgggggatcctgcgacccaatcggcaacacgtttatctgtaattgcaaggccggactgaccggcgtcacgtgcgaagaggatatcaacgaatgcgagagagaggagtgcgaaaacggcggatcttgcgtgaacgtgttcggttcctttctgtgtaattgtacacccggatatgtgggccaatattgcggtctgcggccagtggttgtgccgaatattcaggccggtcattcatatgtgggaaaggaggagctaattgggattgctgttgtgctctttgtaattttcatcctggtggtgttatttatcgtctttagaaagaaagtttttagaaaaaattatagtcggaataacatcacccttgtgcaggatccagcgacggcagccctgctcaacaagtccaacggaataccgtttagaaatttgcgtggctccggtgacggtcggaacgtttaccaggaggttggtcccccacaggtcccagtccgccctatggcttacacaccctgtttccaatccgacagccggagcaatctggataagattgtggatggcctcggaggggagcatcaagaaatgacaacttttcacccagagagtccacgaatcctgactgcccgtcgtggagttgttgtgtgttccgttgcacctaaccttcccgcagtaagcccctgtcgaagcgattgcgactccatcaggaagaacgggtgggatgctggaaccgagaataaaggcgtggacgatcctggagaagtgacctgttttgccggtagcaataaaggctcaaacagcgaagtgcagtcactgagttccttccaatcagactctggggatgacaatgcctaccattgggatacatccgactggatgcccggagcccgtctgagcgatatcgaggaagtgccaaattacgaaaaccaggatggtggtagtgcccatcaggggtcaacacgggaactggaaagtgactactatctgggcggatatgatatagattcggagtaccctccacctcacgaggaggaatttctcagccaggatcagttaccaccccctctcccggaggatttccctgaccagtacgaggccctccctccatcacagccagtttctttggcctctacattgtctcccgactgtcgccgacgccctcaattccatccttcacagtacttgccaccacacccttttcccaacgagactgacctcgtgggccctcccgcttcctgtgagttcagcacgttcgccgttagcatgaaccagggtaccgagcctactggaccggctgacagtgtgagcctttcactacacaattcacgcggaacatcaagtagtgatgtctccgcgaattgcggtttcgacgacagcgaggtggctatgagtgactacgagagtgtcggggaattaagcttagcctctctgcatattcctttcgtcgagacacagcaccaaacccaggtctaa

SEQ ID NO: 222907 - DNA, 3765 bp, synthetic construct
  misc_feature 1..3765: note = Description of Artificial Sequence: Synthetic coding sequence
  source 1..3765: mol_type = other DNA
atggacatcataatggggcattgcgtaggtacaagacccccagcctgttgtctgattctcctgttattcaaacttttagccactgttagtcaggggctacccggaacgggacccctgggattccactttactcactctatatacaatgcaacagtgtacgagaactctgcagcacgcacatatgtgaacagccagtcaagaatggggatcactctgattgatctgtcatgggacattaagtaccggattgtgagcggagatgaggagggcttcttcaaggcagaggaagtgatcatagcagatttctgcttccttagaatcagaactaagggagggaacagtgctatacttaacagagaaatccaggataattatctgctaatcgtgaagggaagcgtcaggggagaggacttagaggcttggaccaaggtgaacatccaggtgctggatatgaatgatctgcggcctctattcagccccacaacctacagtgtgacaattgctgaatctacccctctgaggacttccgtcgctcaggtgacagccacggatgctgacatcgggtccaatggtgagttttactattactttaagaataaagtggatctattctcagtccatccaacatcaggcgtgatttctttatccgggagattgaattacgatgagaaaaatagatacgacctggagattttggcagtggacaggggaatgaagttatatggcaataacggggtgtcttctacagccaagttgtacgtgcatattgagaggataaatgaacatgcccctaccatccacgttgtgactcacgtgccattttcccttgagaaagaacccacttacgccgtcgtaacagtcgatgatctcgacgacggggctaatggagagatagagagtgtgtctatcgtggccggagacccactggaccagttttttcttgcaaaggagggtaaatggttgaacgagtacaagataaaagagagaaagcagatagactgggaaagcttcccatacgggtataaccttacgctgcaggccaaagataagggttcaccccagaagtgttccgctttgaaagcggtctatatcggcaatcccaccagggacacggtgccgattaggtttgagaaagaggtttacgatgtctcgatcagcgagttttctcctcccggagtggtggtggcaattgtgaaactgagtcccgaacctatagatgtagagtacaaattgagcccaggcgaggacgccgtgtatttcaaaatcaacccgagatctggactgatcgtgacagcgcgaccactcaacacggttaaaaaagaggtatataagcttgaggttactaacaaggaaggggatctgaaagcccaggtcaccatctccatagaggatgctaacgatcatactcccgagtttcagcaaccgctgtacgacgcttacgttaacgagtctgttcctgttggcacttccgtgctgaccgtaagcgcttccgacaaggataaaggagagaacggctatatcacatactctatagcttctctgaacttgctccccttcgtgattaatcaatttaccggtgttatcagcaccactgaagagctggattttgagtccagcccggaaatctatcgcttcatcgtgcgagcttccgattgggggtccccataccgccatgagagtgaggtcaacgttacgattagaatcgggaatgttaatgataactctccattgtttgagaaggtggcctgtcagggcgtcatttcctatgattttcccgtgggcggtcacatcacagctgtgtctgctattgacatcgatgaactggaactggtgaaatataagattatttcaggcaatgaactcgggtttttctaccttaaccctgattccggggtccttcagttgaaaaaatctctgacaaatagcgggattaaaaatggcaacttcgccctgcgtatcacagccaccgatggggaaaacctggctgatccgatgagtataaacatttccgtgttgcatggcaaggtgtcctcaaagtccttctcatgcagagagacaagggtggcccaaaagcttgccgaaaaactcctgataaaggcaaaagccaatggcaaactgaatctggaggatggctttttggatttctattctatcaatcgccagggcccttacttcgataagagtttcccctcggacgttgctgtaaaagaggacctgcctgtaggggctaatattctcaaaattaaggcctatgacgcagattccgggtttaacggcaaggttctgtttactattagtgatggcaatactgacagctgctttaatatcgatatggagacgggtcagctgaaggtacttatgcccatggaccgggaacacaccgacctgtaccttttaaatataaccatctacgacttggggaatccacagaagtcctcatggcgcctcctgaccattaacgtcgaggatgcaaacgacaattcccccgtgtttatccaggattcatactctgtcaacatcctggagtcatccggcatcggtactgagattatccaggtggaggccagagataaggaccttggctccaacggggaggttacatatagcgttcttacggacacacagcagtttgctatcaacagcagcacaggaatagtgtatgtagccgaccagctggatagagaatccaaagctaattactcactgaaaattgaagctagagacaaggccgaatcggggcagcagctcttcagtgtagtcaccctgaaggtattcttggacgatgttaatgactgctctccagctttcataccctcatcgtatagcgtcaaggtgctggaggacctccccgtagggacggtgatcgcatggctggaaacccacgaccccgatctcggtctgggcggacaggtgaggtatagtctggtgaacgattataacggtcgcttcgagatagataaggccagcggcgctatcaggctgagcaaggagctggattatgaaaagcagcagttctacaatctcacagtgagggcaaaggataagggaagacccgtctcgctaagcagtgtgagtttcgtggaggtggaggttgtggacgtcaatgaaaacctccacaccccctatttcccagactttgctgtcgtcggtagcgtcaaagagaatagccgcatcggcacatcagtcctgcaagtgaccgctcgtgatgaggactccgggcgtgatggagaaatccagtactccatcagggacgggtctggcctgggtagatttagcatcgacgacgagtccggggtgatcacggcggcagacatactggaccgagaaacgatgggaagttactggctgacagtctacgccaccgaccgcggtgtcgtccctctgtattccaccatcgaggtgtacatcgaggttgaagacgtcaacgacaacgcccctcttacttctgagcccatttactatcccgtggttatggagaattctccaaaagatgtgagcgtgattcaaatccaagccgaagatccagattcctcatctaacgagaaacttacgtaccggataacaagcggcaatcctcagaacttctttgccataaacatcaagacagggagctgctccgtcgctcaggctggaatgcagtggcacgaccactcaagcctgcaaagtaggactccagggtttaagggctatccctgtctgtctctgctcagttcttgggactaccggcatgctcccccatgccccgcaacatttctcaactcttag

SEQ ID NO: 222908 - DNA, 9668 bp, synthetic construct
  misc_feature 1..9668: note = Description of Artificial Sequence: Synthetic coding sequence
  source 1..9668: mol_type = other DNA
atggtcaccacagtagttgccgtgggcgacacgttggctcagccgctggctgctgcagaggtttttatcgtcgagatcaccttgcaagatattaatgacaaccctcccgtgtttcccaccgatatgctggaccttacagtggaagaaaatattggcgatggctccaagatcatgcagctcaccgccatggatgccgacgaaggggctaatgcccttgtgacctataccataatttcgggcgcagatgacagtttcagaatcgaccctgaatccggagatctgattgccaccagaaggcttgacagagagagacggagcaagtacagtttattggtgcgagccgatgatggactgcaatcaagcgacatgcgtataaatatcacagtttccgatgtaaacgatcacacaccaaagttttcacgacctgtgtactcttttgatatccccgaggacaccatacccggtagtctggtggccgctattctggctacagatgatgactctggggtaaatggtgagatcacatatattgtcaatgaggatgacgaagacggaatcttctttctcaaccccatcaccggcgtcttcaatttgacccgattgctggactatgaggtccagcaatattacatcctcacagtaagagctgaggatggaggtggccagttcaccaccattagagtctattttaatattctagatgttaacgacaacccccctatcttcagcctgaattcttactccacgtctctgatggagaatcttcctgtggggagcactgtgttggtcttcaacgtcactgacgccgatgacggtatcaacagccagctgacatacagtatagcctccggcgatagtctggggcagttcaccgtggataagaacggcgtactaaaagttctcaaagcacttgatagagagtcacagagcttttacaacttggtggttcaggtccatgacttgccacagatccccgcttcccggttcacatcaactgcccaggtgtcaatcatccttctggacgtgaacgacaaccctccaactttcctgagccccaagctgacctacattccagaaaacacacccattgacaccgtcgtgttcaaggcccaggctaccgatcccgatagtggacctaatagctacatcgaatatactctcctgaatcctcttggaaataagttcagcataggtacaatcgacggagaggtcaggctcaccggtgaactagatcgggaggaggtgtctaattacaccctgaccgttgtcgcaacggacaaaggtcagcccagcttgagctcatccacggaagttgtagtcatggtgttggacatcaatgacaacaacccaatattcgcgcaggccttatataaagtcgagatcaatgaaaacactcttaccggaaccgatatcatccaggtctttgctgctgatggtgacgagggcaccaatgggcaagtacgctatggcatcgtgaacggaaatacaaaccaggaattccgtatcgattccgtgacgggtgccataaccgtggccaagcccctggaccgagaaaagacgccaacataccaccttaccgtgcaggccactgataggggaagcacacccagaaccgatacttccactgtgagcattgtacttcttgatattaacgatttcgtaccagtgtttgaactgagtccatactccgtcaatgtccccgagaatttgggaactcttccacggacaatcctgcaggttgtggctcgcgatgatgaccgaggaagcaatagcaagctttcctacgtgctctttggtggcaatgaggacaacgcttttacgttgagtgccagcggagagcttggtgtgacccagtcgttggatagagagactaaggagagattcgtgctcatgatcaccgccactgattccgggagccctgccctaactgggacaggaaccatcaacgtgattgttgacgacgttaacgataacgtgccgacattcgcttccaaagcatatttcactactattccagaagacgccccaaccggaaccgatgtcctgttggtgaatgctagtgacgccgatgccagcaagaacgctgtcattcgtatcatcggcggaaatagtcagttcaccattaacccgtctaccggacagatcattaccagcgccttactggaccgcgaaacaaaggacaactatacactggttgttgtgtgctctgacgccggaagccccgagcctttaagtagttccacatctgtgctagtgaccgtcactgacgtcaatgacaatcctcccaggttccagcaccatccatacgtcacccacatcccatctccaactcttcctgggtcatttgtgttcgcagtcaccgtcactgatgcagacatcggccctaactctgagctgcattattccttgagcggacggaacagcgaaaagtttcacattgacccacttagaggcgctatcatggccgcaggacccctcaacggggcaagcgaagtcactttctcggtgcacgtgaaagacgggggttcttttccgaaaacagactctaccacagttaccgtgcggttcgtaaacaaagccgactttcctaaggtgagggctaaagaacagactttcatgttccccgaaaaccagccagtctccagcttggtcactacaattacgggcagctctcttcgcggagagcccatgtcctactatatcgctagcgggaatttaggaaataccttccaaatagaccaacttaccggacaggtgagtatttcacaacccctggactttgaaaaaattcagaagtacgtggtgtggatagaggcacgagatggaggattccctcctttcagctcatatgaaaagcttgacattacagtcctggacgtgaacgacaatgctccaatttttaaagaggacccttttatctctgagatcttggagaacctaagtcccagaaagattttgacagttagtgcgatggacaaagattccggacccaacggtcagctagattacgagatagtcaatgggaacatggaaaattccttcagcatcaatcacgctacaggtgaaattaggtcagtacggccactcgaccgagaaaaggtgagccactatgtcctaactatcaagagctcagataaaggttctcctagccagtctacatctgtgaaagtgatgatcaacatactcgacgagaacgacaatgcaccccgattctcgcagatcttttccgcgcatgtacctgagaactcaccgttggggtatactgttacccgagtgacaacctcagacgaggatatcgggattaatgccatctcgcgctactccattatggacgcaagtctgccgtttacgattaacccgtccaccggggacatcgttatctcacggcctctcaaccgcgaagatacagataggtataggattagagtctcagcccacgacagtggttggacagtctcaacagacgtcacaatctttgtaacagacatcaacgataacgctcctagattttcccgcacaagctactacctggattgccctgaactaacagaaataggaagcaaagtgacccaggtctttgcgacagaccctgacgaaggttccaatggccaggtattctattttatcaagtcacaaagtgaatatttcagaattaatgctactacgggagaaattttcaataagcagatcctcaaataccagaacgttaccggtttttcaaacgttaatataaatcgtcatagctttatcgtcaccagctcagatcggggtaaacccagcctcatttcagagaccactgtcacaatcaacatcgttgactctaatgataacgccccacagttcctaaagtctaaatacttcacacctgtaaccaagaacgtgaaggtggggactaaactgattagggtgacggctattgatgataaagactttggtctcaactccgaagtggagtatttcatatcaaatgacaaccacctggggaagtttaagctggacaacgacactggttggataagcgtcgcttcttccctcatctccgatctgaatcagaacttttttatcacagtgaccgccaaagacaaaggcaatcccccactgtcttctcaggctacagtgcatatcacagtcaccgaagaaaactaccacacacccgagttctcacagtcacatatgtcagctacaattccagagtctcattcaatcggcagtattgtccgaaccgtgagtgcccgagatagagacgcagccatgaatggccttatcaagtactcaatctcctctgggaatgaagaggggatattcgcgattaacagctccaccggaatcctgactctggcaaaagcattagattatgaactctgccaaaagcacgagatgacaatctcagcaattgatggagggtgggttgccagaacaggctactgctcggtgactgtgaatgttatagacgtaaatgataattcgcctgtttttctctctgacgactacttccccactgtgctcgagaacgccccatctggcacgactgttatccatctgaacgcaaccgatgctgacagcggcactaatgctgtgatcgcatacacagtgcagtctagcgatagcgacctgttcgttatcgacccgaatactggggtcataacaacccaggggtttctggacttcgaaactaagcaatcataccacctgaccgtgaaagccttcaacgttcccgatgaggagcggtgtagcttcgctaccgttaatatccaacttaaaggcacaaacgagtacgtccccaggtttgtgagtaaattgtactatttcgagattagcgaagcagctccaaagggaactattgtaggtgaggtgttcgcatcagacagagacttgggaactgacggggaagtgcactaccttatcttcggtaactccaggaaaaaaggattccagattaacaagaaaactggacagatttacgtctccggtattctcgatagggaaaaggaagagcgagtgtcactgaaagttttggctaaaaatttcggaagtatccgaggcgcagacatcgacgaagtgactgtaaatgtcacagtgctggacgcaaacgatcctcctatctttacattgaatatctatagcgtacagattagtgagggcgttccgatcggcacgcacgttacgttcgtgtcagccttcgactctgatagtatccccagttggtcaaggttttcgtactttattggctctggtaacgaaaacggagccttcagcattaatcctcagactggccagataacagttaccgctgagctcgacagggagacactgcctatttataacttatcagtgttggctgtcgactctggaactccctccgcgaccggctccgcctccttattagttacccttgaagacattaacgacaacggaccaatgctgaccgttagcgagggcgaagtgatggagaacaagcgcccaggcacactggtcatgactctgcagtctactgatcctgatctccctccgaatcaggggccattcacctactatttgctttctacgggccctgctacatcttatttctctctgtcaacggcaggtgtgttaagcaccactcgggagatcgatagggaacagatcgctgacttttacctttcggtggttaccaaggattcgggtgtcccccagatgtcttccactggcactgtacacataactgtaatcgaccagaacgataatccaagccagagcagaactgtagaaatatttgtgaattactatggcaatcttttcccaggaggcatcctgggcagcgtcaaacctcaggatcctgacgtcttggacagtttccactgcagcttgaccagcggagttacgtctctcttttcaattccgggaggaacttgtgacctgaactctcaacccagaagcaccgatggcacttttgatctgacagtgctgtcaaacgacggagtccatagcacggtgacttccaatatccgggtgtttttcgccggattcagcaatgcgacagtggacaattccatcctcctacgcctgggcgtccctactgtcaaagattttttgacgaatcattatctgcatttcctaaggatcgcttcctctcaactgacaggccttggcaccgccgtgcagctctattcagcctacgaagaaaataacagaacattcctgcttgcagccgtaaagcgcaatcataatcagtatgttaatccttctggtgtggcaacattcttcgaatctattaaagagatcctcttgcgacagagcggcgtcaaggtagagagcgttgaccacgactcctgcgtgcatggaccctgtcagaacggagggagctgcctcaggagactggcagtttcttccgtactgaagtcaagagagagcctgcccgtcattatcgtcgctaacgaacctctccagccctttctctgcaaatgtctacctggctatgccggatcttggtgcgagatcgacattgacgaatgcctgccgtctccatgtcattcagggggtacttgccataatcttgttggcggtttttcttgctcctgcccagacggctttactggtcgagcttgcgaacgcgatatcaacgagtgtctgcagtctccttgcaagaacggtgccatctgtcagaatttccccggaagcttcaattgcgtgtgcaaaacaggttacaccggggtgttcggcaagcattgcgagctcaattcttacggtttcgaggaactgtcgtatatggagttcccatctcttgatcctaacaacaattacatctacgttaagtttgccaccattaaatcacatgcgctactgctgtacaactatgacaaccagactggtgaccgggctgagttcctcgcactcgagatcgcggaggagaggctgcgcttttcctataaccttgggtcaggtacttataagctgaccaccatgaagaaagtgagcgatggacacttccacaccgtaattgctcggagggctggaatggcagccagtttgacagtggatagctgcagcgaaaatcaggaaccaggctactgcactgtcagtaacgtggctgtcagcgatgattggaccttggatgtgcagcccaacagggtgaccgtggggggaatcagaagcctagaacccatactgcaacgccgaggccacgttgaaagtcacgatttcgtcggctgtattatggaatttgctgtgaacgggagacctttggagccaagccaggcacttgcagcccaggggatactggaccagtatggggatttcattagttattgctttaaagaaaagaaatgtaagaaggtctgcttcactgtcacaccagatacagccctgtcactggaaggcaagggacggctggattaccacatgtcccagaatgagaagcgagagtaccttctgcgacagagcctccgcggtgccatgctcgagccattcggggtgaactctctagaagtcaagttccgaacaaggagtgaaaatggcgtcttgatccatatccaggagtcttcaaattacacaacagtgaaaatcaaaaacggtaaggtgtactttacgtccgacgccggaattgctggcaaagtggagagaaatatccccgaggtctacgtggccgacggtcactggcatacatttttgatcggcaagaacgggaccgctactgtcttgagcgttgaccggatatacaaccgtgatattatccatcccacgcaggattttggagggcttgatgtccttaccatttctctggggggtatcccacccaatcaggctcaccgcgatgcccagaccgcaggcttcgatggctgcatcgcatcaatgtggtacggtggtgagagcttgcccttctcaggcaagcattccctggcatccataagcaagacggacccatccgtcaagattggctgtcggggtccgaacatctgtgcttccaatccatgctggggtgatctcctttgtatcaatcagtggtatgcctaccggtgcgtgccacccggtgactgtgcctcccacccgtgtcagaacggaggatcctgcgagcccggtctgcattcgggatttacatgcagctgtccagactcccacactggtcgaacctgtgaaatggtggtagcctgtctgggggtcctgtgtccccaggggaaggtgtgcaaggcaggatcacccgctggccatgtctgcgtcttgtcccagggacctgaagagatctctcttcccctgtgggccgtgccggcaattgttggaagctgcgcaactgttctcgccctcctcgtactgtctctgattctctgcaaccagtgccgaggtaagaaggccaaaaaccctaaggaagagaagaagccaaaggaaaaaaagaaaaagggcagcgaaaatgttgcatttgatgatcccgataacatcccgccatatggcgacgatatgaccgtccgtaagcaaccagagggcaatcctaagcccgatatcatagagagagagaatccatatttaatttacgatgagaccgacattcctcacaactcagagaccataccgagcgctcctcttgcctcccctgagcaagaaatcgaacattatgatatcgataatgcctccagcatagccccttcggacgccgatattattcaacactacaaacagtttcgaagccacacacctaaattcagcatccaacggcacagccccctcggattcgcccgtcagtcgccgatgccgcttggcgctagttcactcacataccaaccctcgtacgggcagggcctgcgcactagtagcttgagtcatagcgcctgtcccaccccaaatccacttagcagacacagtcctgcgccatttagtaagagttcaaccttctaccgtaattcacccgctagggagttgcacctgcctatccgagacggaaacacgttggaaatgcatggagatacatgtcagcctgggatcttcaactatgccacacggctgggcagaagaagcaaaagtccacaggccatggcgagtcacggaagccgcccaggctctaggctgaaacagccaattggccaaattcctctggaatcaagtcctccagttggactgtctattgaagaggtggaacgactcaacactccacggcctcgaaatcctagcatctgcagcgcagatcatgggagatcatcttctgaggaggactgtcggagaccactgtcccggacacgcaacccagccgatggcatcccagcgcctgaaagtagcagtgacagtgattcacatgaatccttcacttgctcagagatggagtatgatcgagaaaagccaatggtctacacctccagaatgcccaaactgtcccaggtaaatgagagtgacgcggacgacgaagacaattatggcgctcgccttaagcctcgacgttatcacggcagacgggctgagggagggcctgtaggcacacaggccgctgccccaggtactgcagacaatactctacctatgaaattgggccagcaggccggtacctttaactgggataatttactgaactggggccctggctttggacattatgtggacgttttcaaggatctcgcgtctctgccagaaaaagccgcagccaatgaggaggggaaggcaggaaccactaagcccgtccctaaagatggggaagcagagcagtacgtcta

SEQ ID NO: 222909 - DNA, 14946 bp, synthetic construct
  misc_feature 1..14946: note = Description of Artificial Sequence: Synthetic coding sequence
  source 1..14946: mol_type = other DNA
atggacttagcccctgatagggccacgggacggccttggcttccactccatacgctaagcgtctcccagttgctgcgggtgttttggcttctcagtctgttacctggccaagcttgggttcacggcgctgaaccaagacaggtgttccaggttttggaggagcaacctccgggtacacttgttggcactatccagaccaggccaggcttcacgtacaggctctccgaaagtcacgcactgtttgctatcaactcgtccactggggctctgtacaccactagcacgatagacagggagagcctcccttcagacgtgatcaatctggtcgttttgagctctgctccaacataccccaccgaggtgcgggtgcttgtgagggatctgaacgacaatgcccctgtctttccagaccccagtattgtggtaacattcaaggaggatagttcgtccggacggcaggtgattcttgataccgctacagattctgacattggctccaacggggtggaccaccgaagctaccgcatcatacgaggaaacgaggctggaagatttaggctggatattacactgaacccctctggtgaaggcgcttttcttcatctggtgtctaagggcggactggaccgcgaggtcacgccccagtatcagctgcttgttgaagtcgaggataagggggagccgaagcggagggggtatctgcaggttaacgtaaccgtgcaggacattaacgacaacccgcctgtgtttggatcttcccactatcaggctggcgtgccggaagatgctgtcgtggggagctctgtactgcaagtggctgctgccgatgctgacgagggaacaaacgccgacattagataccggctgcaggatgagggaactccattccaaatggatcctgaaaccggcctgatcacggtgcgagagccccttgactttgaagcccgtagacagtattccctgactgtgcaggctatggatcgtggcgtgccctcccttactggccgagcagaggccctgattcagcttctggatgtgaatgacaatgatccagtcgtaaagttcaggtactttcccgctaccagccgatatgcaagtgtggacgaaaacgcgcaggtaggcacagtagtggctcttttgacagtaacggatgcggactcgcctgccgctaatggaaacatatctgtgcagatcctaggcggtaatgaacagcgtcatttcgaggtacaatcaagcaaagtgccaaatctctcccttatcaaggttgccagcgcactggaccgggaaagaatccctagttataacttgactgtgagcgtcagcgataattacggcgcaccccctggcgctgctgtccaggccagaagctcggttgcaagtctcgtgatattcgtgaacgatataaacgaccacccaccggtattctcacaacaggtgtacagggtcaatttgagcgaggaagcgccaccagggtcctatgtgtccggcatctcagccacggatggggactctggactgaacgctaacttgaggtattccatcgtctcgggtaatggtctcggatggtttcacataagtgagcactcagggttagtgactactggcagctcggggggactagaccgggaattggcatcccaaatcgtcttaaacattagcgccagagatcagggagtgcatccaaaagtgagctacgcacagcttgtagtaacattattggacgtgaatgatgagaaacccgtattttctcagccggagggctatgatgttagcgtcgttgaaaacgcccctaccggcactgagttacttatgctgcgcgctacagatggagacttgggcgacaacggcacggtgcggtttagtctgcaggaagccgagactgaccggaggtcatttagactggaccccgtgagcggtcgactttctaccatttccagtctggaccgcgaagaacaggcgttctatagcctcctcgtgcttgcaaccgacctggggtctccaccacagtcatctatggccagaattaatgtgagcctgctggatattaacgacaatagccctgtcttctaccccgtgcagtactttgctcacataaaagaaaatgaacctggcggtagctacatcactactgttagtgccacagacccggacctggggacaaatggtacagtgaaatactccatctcagccggtgatcgatcgagattccaggtcaatgcccagagtggcgtgattagcacacgcatggccctcgatagggaagaaaaaacagcctaccagctgcagatcgtcgcaaccgatggtggaaaccttcagtcccccaaccaggccattgtcactatcaccgtccttgacacacaggacaacccacctgtattttcgcaggtagcctattcattcgttgtgttcgagaacgtagctctggggtaccacgtagggagtgtaagtgcaagcacgatggacctgaacagcaacatcagctacttgattaccacgggagaccagaaaggcatgttcgcgattaaccaggtgactggccagctcactaccgccaacgtgattgaccgggaggaacagagcttctaccaactcaaagtggtggcttccgggggaacagtcactggggatacaatggtcaatatcacagttaaggacctgaatgacaattctcctcatttcctgcaggccattgagtccgtgaacgtagtggagaactggcaggccggacatagcatcttccaggcgaaggcagtggatcccgacgagggggtgaacggaatggtgctctattctctcaaacagaatccaaagaatctcttcgctatcaacgagaagaacggaacaatatccctgctgggtccactcgacgtgcacgcaggctcatatcagatcgaaatccttgctagcgacatgggggtgcctcagttaagtagcagtgtgatactgactgtgtacgtccatgatgtaaacgacaactccccagtgtttgatcagctgtcatatgaggtcaccttatccgagagcgaaccagtgaattcaaggttcttcaaagtccaagcgtccgacaaggactctggtgcgaatggcgagatcgcttacaccatagccgaggggaacaccggcgatgcattcggcatctttcctgatggacaactgtatattaagagtgagcttgatcgtgaacttcaggacagatatgttctcatggtcgtagcttccgaccgtgctgtagaaccactgagcgccactgtaaatgtgaccgtcatcctcgaggatgtgaacgacaaccggccactcttcaacagcacaaactatactttctactttgaagaggaacaacgcgcagggtccttcgtcgggaaggtatcagccgttgataaggactttggacccaacggcgaagtgagatattcttttgagatggttcaaccagacttcgagctgcatgcaatttccggcgaaatcactaatacgcatcaatttgacagagaatctctcatgcggagaagagggacagcggtgttctcctttaccgtgatcgcaactgaccagggcatcccacagcctctgaaggaccaggccaccgtgcacgtttatatgaaagatattaacgataacgcccctaagttccttaaggatttctaccaggctaccatcagcgagagtgcagcaaatctgactcaggtactgcgggtctctgccagtgatgtggacgaaggtaacaacggcctcatacactattccatcataaaagggaacgaggaacgacagtttgcaatcgactctacgtctggtcaggttaccctgataggaaagttggattacgaggcgactcctgcttactccctcgtaatacaagccgtagattcaggaactatccctctgaatagtacatgcactctcaacatcgacattctagatgagaatgataacacgcccagctttcctaagtctacgctcttcgtggatgtgcttgagaacatgcggatcggcgaactggtttctagcgtgactgctactgactccgattctggagataacgctgacctctactactcaattaccggaactaataaccacgggacattctccatcagcccgaatactgggtctatctttctggctaaaaagttagatttcgagactcagagcctgtataaacttaatatcaccgcaaaggatcaaggcaggcctcctagaagttcaacaatgtcagtagtgattcatgttcgggacttcaacgacaaccccccatcctttccgccaggtgacatttttaagtctattgtggagaatatccccatcggcacctctgttatctcagttaccgctcatgacccggatgcagacattaatggccagctgtcctacactattatccagcagatgccccgtggcaaccactttaccatcgatgaggtcaaggggacaatctatacaaacgcggaaattgacagagaattcgctaacctgtttgagttaacagtcaaggcgaatgaccaggccgtccccattgagacccggaggtacgccctaaagaacgtaactattctggtaactgatttgaacgacaatgtcccaatgtttattagtcagaacgctctggcagctgatccctctgccgtcatcgggagcgtactcactacgatcatggcggcagaccctgatgagggtgcaaacggtgagatagaatatgaaatcatcaacggagatacagatacatttattgttgataggtacagcggcgatctccgcgtggcttctgccctcgtcccaagtcaactcatttacaatctcattgtgtccgccaccgatttgggtcctgaaagacgtaagagcaccacagagctaacgatcatcctccaaggactcgacgggcctgtcttcacccagcccaagtatatcactatcctaaaagaaggagagcctattggaacgaacgttatcagtatcgaggctgcttctcccagaggcagcgaagctcctgtggagtattacatcgtcagtgtgaggtgtgaagagaaaactgtgggccgtctgttcacaatcggtaggcatactggcattattcagactgccgcaattctcgaccgagaacaaggagcatgcctctacctcgtcgacgtgtatgcgatagagaagagtactgccttcccacggacccagcgagccgaggtggagatcaccttgcaagacattaatgataatcctcccgttttcccaacggacatgctcgacctgacagtggaggagaatattggcgatggaagtaagattatgcaacttacagcgatggacgctgatgagggcgctaacgctttggtgacatatactatcatatcaggggctgacgatagcttccgcatagatcctgagtctggagacctcatcgccacccggcgactggaccgggagcggcgatctaaatatagcttgctcgtgcgtgcggatgacggtctgcagtcctctgacatgaggatcaacattacagtctccgacgttaatgatcacacccccaagttttcacggccagtgtacagcttcgacattcccgaagacacgataccgggttccctggtcgcagccattctggccacggatgatgattctggtgtcaacggcgagattacctatatcgtgaacgaagatgacgaggatggaatatttttccttaaccctatcactggagtttttaacctgacccgccttcttgattatgaggtgcaacaatactatatcctgactgtgcgcgctgaagatggcggaggccagttcactacaatcagggtttactttaacatactcgacgtcaatgacaatcccccaattttttctctgaactcctactccacatcactgatggagaaccttcctgttggatcgaccgtgctggtgtttaacgtgactgatgctgacgacgggatcaatagccagttaacatatagcatcgcatccggcgacagcttgggccagtttaccgtggataagaatggcgtgctaaaggtgttaaaggctctggacagggagtcacagagcttctataatctggtcgtgcaagttcatgacctcccccagatccccgctagccggttcacatctacggcccaggtcagtattatcttgctcgacgtgaacgacaaccccccaacattcctatcccctaaactgacctacatccccgagaatactcctattgatacagtcgtgtttaaggctcaggctactgatccagactcagggcctaacagttacatagagtataccttattaaatccgctgggcaataaattctccatcggcacaatagacggcgaagtcagactgactggagaattggacagggaagaagtctccaattatacactcaccgtggtcgctacagacaagggccagccaagcctgtcatcatcaaccgaggtggtcgttatggttcttgatatcaacgataacaaccctatattcgcccaggcgttatacaaggtggaaattaatgagaacaccttaaccggaaccgatatcattcaggtctttgcagctgacggtgacgaaggaaccaatggacaagtgcgttatggaatagttaacgggaatactaaccaagagttcagaatcgatagtgtcactggggctatcacagttgcaaagcctttagatcgcgaaaaaaccccaacctaccatctgacggtgcaggccactgacaggggaagtacaccaaggaccgacacctccacagtgtcgatagttctcctggacattaacgactttgtgcctgtcttcgaactttccccatacagcgtaaatgtgcctgagaatttgggcacgctgcctagaactattctgcaggtggtggcaagggacgatgatcggggatccaactctaaattgtcctacgttcttttcggcggtaatgaggataatgccttcacgctctccgcctcaggcgagctcggcgtgacgcaatctctggacagagaaactaaagaacgatttgtattgatgatcacagccactgacagtgggagcccggcattgacaggtaccggcacgatcaacgtgattgtggatgatgtgaacgataatgtgcccacctttgccagcaaggcttacttcacgaccattcccgaagatgcaccaacggggaccgacgtcctcctcgtcaacgctagcgatgctgacgcaagtaagaacgccgtgattcggattatcggcggtaacagtcaattcactattaatccatctaccgggcagattatcacctcagcactgctcgaccgcgaaaccaaagacaactacaccctcgttgtcgtgtgcagtgacgccggtagccccgagcccctatcatccagcactagtgtgttggtgacagtcactgatgtcaatgacaacccaccacggttccaacaccatccttacgtgacccacatcccttcgccaacattaccgggttcattcgtctttgcggtcaccgtgaccgacgccgatattggtccaaactctgaattgcactactcactctctgggcgaaattcagagaagttccatatcgatcccctgcgtggtgcgattatggcagcgggtcccctcaacggggcatctgaggtgactttctccgtccacgtcaaagatgggggtagtttccctaaaacagactctacaacggtgaccgttcgctttgtcaataaggctgattttccaaaagtgcgggctaaggaacagactttcatgttccctgaaaaccagccggtgagctccctcgtgacaacaatcactgggtcgagccttagaggagagcccatgagctactacatcgcttcagggaacctaggaaacactttccagatcgaccagcttaccggacaggtttcaatatcccagccgcttgatttcgagaaaatccagaagtacgtagtgtggattgaggctcgcgacgggggattccccccattctcgagctatgaaaaactcgatattactgtgctagatgtgaatgataatgctcctatattcaaagaggacccctttatcagcgagatactggaaaatctgagtccaaggaagatcctcaccgtgtcagccatggataaagacagcggtcccaatgggcagctcgactacgagattgtgaacggaaacatggaaaacagctttagcattaaccatgctactggggagattcggagcgtgcggcctttggatcgggaaaaagtatctcactatgtgcttacaataaagagctcagataaagggtctcccagtcagtccactagtgtgaaggtcatgatcaacatcctcgacgagaatgataatgcgcctaggttttcccagattttttccgctcatgtgcccgagaatagcccgctgggttacactgtgacgcgggtgactacctccgacgaggacataggaatcaacgcgatttcccggtactctattatggacgctagccttccattcaccatcaatccatcgaccggggatatcgtaatcagcagacctctgaaccgtgaagatactgacagatatcggattagggtttcagctcatgacagcggctggaccgtgtctacggacgtgacaatcttcgtgacagatatcaacgataatgcccctcggttctctaggacatcctactatttggactgccccgaactgacggagatcggatccaaagtgacacaggtgtttgccaccgaccccgacgaggggtcgaacggccaggtgttttactttatcaagtcccagtcagagtacttcaggatcaatgctaccactggagagatttttaacaaacagattctaaagtaccagaacgtaaccggtttttctaatgtgaacatcaataggcactcttttatcgtgacttcctcggatagggggaagcctagcctgataagcgaaaccacagtgacaataaatatcgtggattctaatgataatgccccacagtttctcaagagcaagtactttactccagtgaccaaaaacgtgaaggtcggaaccaaacttattcgcgttaccgcaatcgacgataaagacttcgggttgaatagcgaggtggagtacttcatctcaaacgataaccatctaggaaagtttaagctggataatgacaccggatggataagcgtcgcctccagcctgatttcggatctaaaccaaaacttttttatcaccgtgacagcaaaggacaaggggaaccccccactctctagtcaggcaacggtgcacattaccgtcaccgaagaaaactatcacacccctgagttttcgcagagccacatgtccgctactatacccgaatcccattccatcggctctattgtcaggacggtgagcgccagagacagggacgcagctatgaacggcttaataaaatattcgatatccagtggcaatgaggagggaatattcgctatcaattcctccaccgggatcttaactttggccaaggcactggactacgagctgtgtcagaaacatgagatgactatctctgcgattgacggaggctgggtcgcacgaactgggtactgttcagtgaccgtcaatgtgattgacgttaacgacaattcccccgtgtttctgagcgatgattacttccctacagttctcgaaaatgctccatccgggaccacggtcatccatctgaatgccaccgatgccgacagcggaaccaacgctgtcattgcatacaccgtccagagttctgattctgatctgttcgtaattgatcccaacaccggcgtgatcactacccagggctttctggatttcgagaccaaacagagctatcaccttaccgttaaagccttcaacgtgccagacgaggaacgttgctcattcgcaacagtgaacattcagcttaagggtaccaacgaatacgtcccccgtttcgttagtaaactgtactattttgaaatctctgaagccgcaccgaagggcaccattgtcggcgaagttttcgctagcgaccgagaccttggtaccgacggcgaggttcactatctaatattcggcaactcacgtaaaaaggggtttcagatcaataagaaaacgggccagatctatgtttctggaatactcgatcgcgaaaaagaggaacgggtgtccttgaaggtcctggcaaagaactttgggtccatcagaggggcagatattgatgaggttactgttaacgttactgtgttggacgctaacgatccacctattttcacccttaacatttacagcgtgcagatttccgagggggttcccatcggaacccatgtgaccttcgtgagtgccttcgattccgattctatccccagctggagccgtttctcttacttcatcgggagtggcaatgaaaacggggcattttcaattaacccacaaaccggccagatcacggtgactgcggaactcgacagagaaacactgcccatctataatctgtctgtactcgccgtggactccggcaccccttcggcgaccggaagtgctagcctccttgtcacattggaggacattaatgataatggtccaatgctcaccgtctcagaaggcgaggtcatggagaataagcgacctggtacgctggtaatgactctccaaagtaccgaccccgacctaccacctaatcagggcccattcacatattacctgttatctacgggccctgcgacaagttacttttctttatctaccgcaggtgtccttagtacaactcgcgaaatagacagagagcagatcgcggacttctatctgagcgtggtaaccaaagattcaggggtgcctcagatgtcaagtacaggaacggtgcatatcaccgtaatagaccaaaatgacaatccttcacaaagcaggacagtggagatattcgtcaactactacggcaatctgtttcctgggggtattctcggaagtgttaaaccacaagatccggatgtactggactcctttcactgttccctgacatctggggttacaagcctgttctccatccctggtggtacctgcgatctgaacagccagccacggagcactgacggaacctttgacctcacagtcctgtccaacgatggggtgcacagcacggtaacttctaacattcgagtattcttcgccggattttcgaacgctacagtggataattccattctcctaagattgggcgtgccaaccgtgaaggattttctgactaaccactatctacatttccttcggatcgcttcctcacagctaacggggctggggacggcggtgcagctctacagcgcttatgaggagaataatagaacgtttcttctagcagccgtgaaaaggaatcataaccagtatgtcaatccttctggtgtcgcaaccttttttgaatccatcaaggagattctcctgcgacaatccggagtcaaagtcgaatcagtcgaccacgactcctgtgtgcacggaccctgccagaacggcggttcatgcctgaggcggcttgcagtgagcagtgtgctaaagagccgggagtccctccccgtgatcatcgtcgccaacgaacctctgcaaccttttctgtgcaagtgtctcccagggtacgccggatcatggtgcgaaatcgatatcgatgagtgcctgccctccccctgccatagtggagggacgtgccataacctggtcggaggctttagctgcagctgtccagatggtttcacaggacgcgcatgtgaacgcgacataaacgaatgtctacaatcaccctgtaagaacggcgctatttgtcagaactttcctgggtcatttaactgcgtctgcaagaccggctataccggaaagatgtgtgaatcctcagtcaattactgtgaatgtaacccatgtttcaatgggggatcatgtcagtcgggggtggattcctactattgtcattgccccttcggcgtttttggtaaacattgtgaactcaatagctatggctttgaggaactttcttatatggaatttccttcactcgatcccaataacaactatatctatgtcaagttcgctaccatcaaatcacacgccctcctgctctataattacgataaccagactggtgatcgggcagaatttcttgcgctggaaatagccgaagagcgattgagattctcgtacaacctgggcagtggaacatataaacttactacgatgaaaaaagtctcagatggccacttccacaccgtgatcgctaggcgtgctgggatggctgccagccttactgtggactcctgctccgagaaccaggagccaggttattgtaccgtctccaatgtcgcagtatccgacgactggactctggatgtgcagcccaaccgtgtgacagtcggaggaattcggagtctagagcctatactgcaacgcaggggtcacgtcgaaagccacgatttcgtgggatgtatcatggagtttgccgttaacggccgaccactggagccgtcacaagcgctagccgcacaggggatcctcgatcagtgccccaggctggaaggtgcctgtactcggagtccgtgtcagcatggtgggacctgcatggactactggagttggcagcagtgtcactgcaaggaaggactcactggcaaatattgcgagaaatctgttacccctgatacagctctctcgctggaggggaaggggagattggattatcatatgtcacaaaacgagaagcgagaatatctcttgcgtcagtctctgagaggcgctatgttggaaccttttggggtcaattctctggaagtcaagtttagaacacgcagcgagaatggggttctgattcacatacaggaaagttcaaattacacgaccgtgaaaattaagaacggaaaagtgtactttacatccgacgctgggatagctggtaaagtagagcgtaatattcctgaggtgtatgttgctgacgggcattggcataccttcctcatcggaaaaaacggcaccgccacggtgctttccgtcgaccggatctataatcgagatattattcaccctactcaggattttggaggtctggacgtactaacaattagcctgggcggtatacctcctaaccaggcccacagggacgcgcagaccgccggtttcgatgggtgtatcgccagcatgtggtacggcggtgaaagcctcccttttagcgggaagcacagccttgcttccatctcgaagactgatccttctgtgaagattgggtgtcgagggccaaatatttgcgctagtaacccctgttggggcgaccttctctgcatcaatcagtggtatgcctaccggtgtgtcccccctggggactgtgctagtcacccatgccagaatgggggatcctgcgaacccggtctgcattctggattcacctgctcatgccccgattcccacacagggaggacctgtgaaatggtggtggcttgcctgggtgttctctgccctcagggaaaagtctgtaaagcagggtctccggctgggcacgtgtgcgtgttgtcacaggggcctgaggagatctccttgcctttatgggcagttcccgcaatagtgggttcctgcgctactgtgttagctctgcttgtattgagcctcattctatgcaatcagtgccgagggaaaaaggccaagaatccaaaagaggagaagaagccaaaagaaaaaaagaagaagggatctgagaatgtggcgttcgacgaccccgacaacattcctccttacggtgacgatatgaccgtgagaaaacaaccggagggaaacccgaaacccgatatcatcgagcgtgagaatccatatctgatttatgacgagacagacataccgcataattctgaaacaatcccatccgctccattggccagtcctgagcaggagatagagcattatgacatcgataacgcaagttctatcgcgccatccgatgcagatatcattcagcattacaagcagttccgcagccatactcccaaattttcaattcagcgacattcccccctggggttcgcgagacagagtccgatgcctctcggggcatcatccttgacataccagcccagctatggccagggccttaggactagctcactgtcccactctgcctgtccgacacccaatcccctttcgcgccactcgccagctccgttctccaaaagctcaactttttaccgaaattctcccgctagagagttgcatctaccaattagagacggcaatactctcgaaatgcacggcgatacctgccagcctgggatctttaattatgccacaagactcgggaggcgttctaaatcccctcaggctatggcgagccatggatcccgacccggtagtcgactcaagcagcccatcggacagatcccccttgagtcctcgcctccggtggggctgtccattgaggaggttgagcggcttaacacaccacgaccacgcaacccgtctatctgttcagctgatcatgggagaagtagcagcgaagaggattgccgcaggccactgtcacgcacccgcaacccagctgatggcatcccagccccagagagtagtagcgactccgactctcacgagagctttacctgtagtgagatggagtatgacagagagaagcccatggtgtacacatccaggatgccaaagcttagtcaggtgaatgagagcgatgctgatgatgaagacaactatggcgctcgattgaaacccaggcgatatcacgggagaagggctgagggcggtccagtgggtacccaggccgcagcacctgggacagcagacaacaccttacccatgaagctgggacagcaggcgggaaccttcaactgggacaatcttttgaactggggccctggttttgggcactacgtggatgtgttcaaggatctggccagcctgcctgagaaggccgctgcaaatgaagagggtaaagctggcacaacaaagcctgttccaaaggacggagaggctgagcagtacgtttag

SEQ ID NO: 222910 - DNA, 1239 bp, synthetic construct
  misc_feature 1..1239: note = Description of Artificial Sequence: Synthetic coding sequence
  source 1..1239: mol_type = other DNA
atgggcctgcatcttagaccatatagggttggcttgctgcccgatggactcctctttttactgttgcttctcatgctgctcgcggacccagccttgccagccggtagacaccctcctgtagttttagtgccaggcgatctcggaaaccaattggaagctaaactcgacaagcctacggttgtgcactacttatgtagtaaaaaaacagagtcatactttaccatatggctcaatctcgaactattgctgccggtcattatcgattgctggattgataacatccgactggtgtataacaaaactagtcgcgctacacagttcccagacggggtggacgtgagggtgcccggttttggaaaaacgttctccctcgaatttctggatccttctaaaagcagcgttggttcctacttccatactatggtggagtccctagtaggatggggttacactcgcggagaggatgtcaggggggcaccttacgactggcggagagctccaaatgagaacggcccatattttcttgcattacgagagatgatcgaggagatgtatcaactgtatggcggacccgtggtcttggttgctcacagcatgggtaacatgtatacactatatttcctgcaaaggcagcctcaggcttggaaagacaaatatatcagggcctttgtgtcactgggagcaccgtggggaggggtagctaaaacattgcgagtcctggcgagcggcgataacaaccgaatcccggttattgggcctttgaagatccgggagcagcagagaagcgctgtgtctacctcgtggctgttgccatacaattatacatggtcccccgagaaggtgttcgtacagactcccacaattaactacactcttcgggattatcggaaattctttcaggatatcggattcgaggacggatggctcatgaggcaagatacagagggacttgttgaggcgaccatgccacccggagtgcaacttcattgcctgtacggaaccggcgtcccaacacccgactcattctattatgaatcttttcctgatcgcgacccgaaaatctgcttcggcgatggagacggaaccgtgaacttaaagtctgccctgcagtgccaggcatggcaatcgcgacaggaacaccaagtactacttcaggaactgcccggatccgagcacattgaaatgctggcgaacgccacaactttggcatatctgaagcgggtgctcctgggcccatag

SEQ ID NO: 222911 - DNA, 480 bp, synthetic construct
  misc_feature 1..480: note = Description of Artificial Sequence: Synthetic coding sequence
  source 1..480: mol_type = other DNA
atgttccctgggctgtttatgttgggaaccttcctgtggtcgctcatcgaatatctgatacataggttcttgttccatatgaagcctccatccgattcttattacctgattatgctccattttgtgatgcacgggcagcaccacaaagcccctttcgatggtagcagattggtctttcccccagtcccggcttccttggtgatcggcgttttttatttatgcatgcagttaatactccctgaagcagtgggtggtaccgtgtttgcgggaggactgcttgggtatgttctgtatgatatgacccactactatcttcacttcggctctcctcacaagggcagctacctgtacagcctgaaagctcaccacgtgaagcatcactttgcgcaccaaaagagcggcttcggcatttctaccaagctgtgggattattgttttcacacattgacaccagaaaagccacaccttaaaactcagtag

SEQ ID NO: 222912 - DNA, 1740 bp, synthetic construct
  misc_feature 1..1740: note = Description of Artificial Sequence: Synthetic coding sequence
  source 1..1740: mol_type = other DNA
atggtgcagtacgagttgtgggccgctttaccaggcgcatccggcgtcgccttagcctgctgcttcgtggctgccgctgtcgccctgcgctggtcaggaaggcgaacagcccgtggtgcagtggtgcgcgctcgccagaggcaaagagccggacttgagaacatggacagggctgcccaaaggtttagactccaaaatccagacttggactccgaagctctgctggccttgcctctcccacaattagttcagaagttacactctcgtgagttagctcccgaggcagtgctttttacttacgtgggtaaggcctgggaagttaacaaaggtacaaactgtgttaccagctatttagctgattgcgagactcaactgtcccaagcgccaagacaggggctactgtatggcgttcccgtgtctctgaaggaatgctttacgtataaaggacaggacagtaccctcggtctgtcgttgaatgagggcgtacccgctgaatgtgattctgtcgtggtacatgtgctgaaattgcagggcgcagtgccctttgtgcacaccaatgtcccccagagcatgttcagctatgactgcagtaaccccctctttggacagacggtgaacccctggaagagtagcaaatcccccggaggtagctctggtggtgagggtgctctgatcggatcagggggtagcccgctgggactgggaactgacatcggtggctccattcgatttcccagtagcttttgtggcatttgcggtctgaagcctaccgggaataggctatctaaatccggactgaaagggtgcgtgtatggacaagaagccgtgcgactgtcggtgggcccaatggccagggacgtggaatcactcgcactatgtctgagggcactgctttgtgaggatatgttccgactcgatcctactgtacctcctctgccctttcgcgaagaggtgtacaccagctcccagcccctgcgtgtaggctattatgagacagacaactacaccatgccttccccagcgatgaggagagccgtacttgagactaaacagtcgctggaggctgccggacatacactggtgcctttcttaccctctaacattccgcacgcgctcgagaccctctcaaccgggggacttttcagcgatgggggacacacatttctccaaaactttaaaggcgatttcgtcgacccatgcttgggcgacctggtttcaatcctaaaactgcctcaatggttgaagggactcttggctttcttagtgaagccacttctgcctcggttgagcgcctttctatccaatatgaagtctcgaagtgctggaaaactgtgggaattacagcacgagatcgaagtgtatcgtaaaacggttatcgcacaatggcgagcgctcgacctcgacgtggtgttaacacccatgctagcccctgctctcgacctcaacgcacccggtcgagcgaccggcgctgtctcatatactatgctgtacaactgtctggactttcctgctggggttgtgcccgttactacagtcacagccgaggacgaggcgcagatggaacactatcgaggatactttggcgatatttgggacaagatgctccagaagggaatgaaaaagtccgttggccttcctgtcgctgtgcagtgcgtggctttgccatggcaagaagaattgtgtttgcgctttatgagggaagtcgagagactgatgactcctgagaagcagtcctcctag

SEQ ID NO: 222913 - DNA, 456 bp, synthetic construct
  misc_feature 1..456: note = Description of Artificial Sequence: Synthetic coding sequence
  source 1..456: mol_type = other DNA
cggcgtcagcaccccctgcccctgctcctgctgaggcatctccgccctcaggctcatagagagcctcctcaagtttatacctccagtcagcccctgcgtgtggggtattacgagacagataattataccatgccatctcctgcaatgcggagagccgtgttggagacaaagcaaagtcttgaggctgccggacacacccttgttcctttcctcccaagcaatatccctcatgctttggaaaccttgtccacgggcggactgttctcggatggtggtcacacctttctccagaacttcaagggcgactttgtagatccctgtttaggagatctggtatcaattctgaaattgccccaatggctaaaagggcttctcgcctttctcgtaaaacctctactgccgcgtctcagcgcatttcttagtaacatgaaatctcgatgtcggccattaccttag

SEQ ID NO: 222914 - DNA, 1599 bp, synthetic construct
  misc_feature 1..1599: note = Description of Artificial Sequence: Synthetic coding sequence
  source 1..1599: mol_type = other DNA
atggcgccttccttcactgcccgtatacagcttttcttgttacgcgctctgggattcctgatcgggcttgttgggagagccgctttagttttgggcggacccaaattcgcatcgaaaacccctagacccgtcaccgagccattgttacttctcagtgggatgcaactggcaaaattgatcagacaacgtaaagtcaagtgtattgatgtggtgcaagcatatattaaccgcatcaaagatgtgaatcccatgattaatgggatcgtgaaataccgcttcgaggaggcaatgaaagaggcacacgcagttgaccagaaactggccgagaagcaggaggacgaggcaactctggaaaacaagtggcctttcctgggcgtgcccctcactgtgaaagaggctttccagttgcagggaatgccaaattccagtggactgatgaaccgcagagacgccatcgcaaaaactgatgctactgttgtcgcccttctgaagggggcaggagccatacctctgggcataacaaactgttccgagttgtgtatgtggtacgaaagctctaacaagatctacggccgttcgaacaacccatacgacttacagcatattgtggggggtagttccggtggcgagggctgtacactggccgctgcatgttctgtgataggcgttggatccgatattgggggatcaattaggatgccggcattcttcaatggcatttttggccacaaaccgagtcctggcgtggtgccaaacaagggccagttccccctggccgtaggcgcacaagagctctttctgtgtactggacccatgtgtcgctacgccgaggacttggcacccatgttgaaagtgatggcgggaccagggattaagcgccttaaactggacaccaaagttcacttgaaggatttgaaattctactggatggagcacgatggtgggtctttcctcatgagtaaggtggatcaggacttgatcatgactcaaaagaaagtggttgtccatttagaaactatcctgggcgcatctgtacagcacgtgaaactgaagaaaatgaagtacagtttccagctttggattgctatgatgagtgcaaagggacacgatggaaaggagccagtgaaattcgtggacctgttgggcgaccatgggaagcacgtgtcgccgctatgggagttaatcaaatggtgcctcgggctgtccgtttacactatccctagtatcgggctggctcttcttgaggaaaagttgcgctattccaacgaaaagtaccagaaatttaaagctgtggaggaaagtctcagaaaagaactcgtagatatgttgggggacgacggagtatttttatatccctctcaccctacagtcgccccaaagcaccacgtaccactgactaggccgtttaattttgcctacacgggtgtgttcagcgccctggggctgcctgttacccaatgcccactgggactgaacgccaaaggcctaccactgggaattcaggtggtggctgggccattcaacgaccacctgactttagctgtagcccagtatctggagaagaccttcggcggatgggtgtgtccgggtaagttttag

SEQ ID NO: 222915 - DNA, 384 bp, synthetic construct
  misc_feature 1..384: note = Description of Artificial Sequence: Synthetic coding sequence
  source 1..384: mol_type = other DNA
atgagcttttctggcaaatatcaattgcaatcgcaagagaatttcgaagcatttatgaaggccattggcctgcctgaggagctgatccagaaggggaaagatattaagggtgtcagtgagatcgtgcagaacggaaagcactttaaattcactattaccgccggaagcaaggtgatccagaatgagttcaccgtgggcgaagagtgcgaactggaaactatgaccggggaaaaggttaaaaccgtcgttcagttagaaggtgacaacaaacttgtgacaaccttcaagaacattaaatctgtgacggagttgaacggagacatcatcaccaacactatgacactgggagacattgtcttcaaaaggatctcgaaacgtatctag

SEQ ID NO: 222916 - DNA, 399 bp, synthetic construct
  misc_feature 1..399: note = Description of Artificial Sequence: Synthetic coding sequence
  source 1..399: mol_type = other DNA
atggcatttgattccacctggaaagtggaccggagcgagaattatgacaagttcatggagaagatgggcgtcaacatcgtgaaacggaaattggcagcccacgacaatctgaaactgactattactcaagaagggaataagtttaccgttaaggagtccagtacatttcggaacatcgaggttgtcttcgaattgggcgtgacatttaattacaacttggccgacgggactgaacttaggggcacatggtcattagagggcaataagttaatcgggaaattcaagcgcactgacaacggaaatgaattgaacacggtgagagagatcattggcgacgaactggtacagacctacgtgtatgagggggtggaagccaaaagaatctttaaaaaggactag

SEQ ID NO: 222917 - DNA, 402 bp, synthetic construct
  misc_feature 1..402: note = Description of Artificial Sequence: Synthetic coding sequence
  source 1..402: mol_type = other DNA
atggtggacgccttccttgggacttggaaactggtcgattcaaaaaactttgatgactatatgaagagcctgggggttggcttcgccacaagacaggtggccagcatgacaaaaccaaccacaattatagaaaagaatggcgacattctgaccctgaagacacattcgacttttaaaaacacagagatttcatttaaattgggggtcgaatttgatgagaccaccgctgatgatcgaaaagtgaagtctattgtgactcttgacggaggtaaactggtgcatctgcagaaatgggatgggcaggaaacgactctggttagggagctgatcgacggaaaactcattctgacactcacccacggcaccgcagtctgcacaagaacatacgaaaaagaggcctag

SEQ ID NO: 222918 - DNA, 408 bp, synthetic construct
  misc_feature 1..408: note = Description of Artificial Sequence: Synthetic coding sequence
  source 1..408: mol_type = other DNA
atggcaaccgtgcaacagttggaggggaggtggaggcttgtcgatagcaaggggtttgatgaatacatgaaagagcttggcgtaggcatcgctctccgtaagatgggagcgatggccaagccagattgcatcatcacctgtgacgggaagaacctcacaataaaaaccgaatccaccctgaagacaacacaattcagctgtactctgggagaaaaattcgaagagaccacagccgacgggaggaaaactcagacggtatgcaatttcactgatggagctttggtgcagcaccaggagtgggatggcaaagaatctacgattactcgcaaactcaaagacggaaagctcgtggttgagtgcgtcatgaataacgtgacctgcactcgcatctacgaaaaggtcgagtag

SEQ ID NO: 222919 - DNA, 534 bp, synthetic construct
  misc_feature 1..534: note = Description of Artificial Sequence: Synthetic coding sequence
  source 1..534: mol_type = other DNA
atgaaaactgtaacaatgatgatggtagttgagatgcaggctttaacccaggtgctccgggctgttcttagtgcatgcacctgggtcagtagaaaaggtgacctgcagaggatgaagcagacacacaaagggaagccccctagtagcatggcatttaccggcaaattcgaaatggagtccgagaaaaactacgatgagtttatgaagctgctaggcatctcatccgatgtaatagagaaagcacgcaacttcaagattgtcacagaagtccaacaggacggacaggacttcacatggtcacaacattattctggcggtcataccatgaccaacaagttcactgtgggaaaggagtcgaacatccaaacaatgggcggtaaaacctttaaagcaactgtccaaatggaaggagggaaattggtggtgaacttcccaaattaccatcagacatcagaaatagttggtgacaagctcgtggaggtgagtacaataggtggggtgacatatgaaagagtgtcgaagagactggcctag

SEQ ID NO: 222920 - DNA, 534 bp, synthetic construct
  misc_feature 1..534: note = Description of Artificial Sequence: Synthetic coding sequence
  source 1..534: mol_type = other DNA
atgaaaaccgttacgatgatgatggttgtggagatgcaggcgctgacacaggtgctcagagccgtgttgtctgcctgtacttgggtctcccgcaaaggagatctgcaaaggatgaaacaaacacacaaaggtaaacctccttcaagcatggcttttacaggaaaattcgagatggaatctgagaagaactacgacgagttcatgaaactgttgggcatcagctccgacgtgatcgaaaaggcaaggaattttaaaattgtcaccgaggtgcagcaagatggacaggacttcacttggagtcagcattatagcggtggtcataccatgacaaataagtttaccgttggaaaggaaagcaacattcaaacgatgggaggaaaaactttcaaagctaccgtgcaaatggaagggggtaagctggtcgtcaattttcctaattaccaccaaacaagcgaaatagtgggagataagctagtggaagtgtctaccatcggcggtgtcacatacgagcgcgtttcaaagagacttgcgtag

SEQ ID NO: 222921 - DNA, 387 bp, synthetic construct
  misc_feature 1..387: note = Description of Artificial Sequence: Synthetic coding sequence
  source 1..387: mol_type = other DNA
atggcatttacaggcaaattcgagatggagagcgaaaaaaattatgacgagtttatgaagttactagggatttccagcgacgtgattgaaaaagcacgtaactttaaaatcgtcactgaggtgcagcaggatgggcaggacttcacctggtcccagcattactccggcggtcatactatgaccaacaaatttacggtgggaaaggagtccaacatccagactatgggcggaaaaacttttaaggccacagtgcagatggaggggggaaagttagttgtgaatttcccaaactatcatcagacgtccgaaattgttggagataaactggtcgaagtttccacaattggaggggtgacatatgaacgggtctcaaagagattagcctag

SEQ ID NO: 222922 - DNA, 501 bp, synthetic construct
  misc_feature 1..501: note = Description of Artificial Sequence: Synthetic coding sequence
  source 1..501: mol_type = other DNA
atggtggaggccttttgcgctacttggaagctcaccaacagtcagaactttgatgagtacatgaaagccctgggggtgggtttcgccacccgccaggtgggtaacgtgacaaagcccacggtgataattagccaagaaggagacaaagtggttattcggaccctgtctacattcaaaaataccgagatttcgttccagctgggggaggagtttgacgagactactgccgacgacagaaactgtaaatctgtggtctctcttgatggcgataagctcgtccatattcagaagtgggatggcaaagagacaaactttgtcagagaaatcaaagacggaaaaatggtgatggtgtcgaacgacaatagtccattctttcttgtttttttctcttccccccataccagtcacttactaccgagttcatccttgttgctgccattcttcctccttccaagctttttcaacaataccagcttggccagatttttcaattacatgtag

SEQ ID NO: 222923 - DNA, 399 bp, synthetic construct
  misc_feature 1..399: note = Description of Artificial Sequence: Synthetic coding sequence
  source 1..399: mol_type = other DNA
atggtggaagctttttgcgctacgtggaagctgaccaactcacagaacttcgacgaatacatgaaagccctgggggttggcttcgcaacacgacaggtaggcaacgtcactaaaccaacagtcatcatatcccaggagggggacaaggtcgtaatccgtacactgtcgacctttaaaaacacagagattagtttccagctgggagaagagttcgacgaaactacggctgacgacagaaattgtaaaagtgtggtaagtctggatggggataagcttgtgcatattcagaagtgggacggaaaagaaacaaactttgtgcgggagattaaggacggcaaaatggtgatgacactgacgtttggtgatgtagtggccgtgagacactacgaaaaggcctag

SEQ ID NO: 222924 - DNA, 1506 bp, synthetic construct
  misc_feature 1..1506: note = Description of Artificial Sequence: Synthetic coding sequence
  source 1..1506: mol_type = other DNA
atggggacgcgggcagcgcgaccagccggtctgccatgtggcgctgaaaacccagctagacgcaggctggcacttggggctagacagcagatacacagctggtcccctagaacgccctccaccagattgaccgccccagctggcccagcaagaggtgtagcccgacctgcgatggccccagacccggttgctgcagagaccgccgcacagggcccaacaccacgctattttacctgggacgaggtggctcaaagaagcggctgtgaagagagatggctggttatcgaccgtaaagtttacaatatatctgagttcaccaggaggcacccaggcggatccagggttatctcgcactacgctggccaggacgcaacagaccccttcgtggcgtttcacattaataagggcctggtcaagaagtacatgaattccctcttgattggtgaactgagccctgagcaacctagctttgagcccactaaaaataaagagctgacagacgagttccgggaactgcgcgctaccgtcgagcggatgggactgatgaaggccaatcacgtgtttttcctgctgtacttactacacattctgctgctggacggagccgcttggctgacactgtgggtcttcggaacatcattcctgcctttcttgttgtgcgcagtcctcctgagcgccgtacaggctcaggcaggctggcttcagcacgacttcggacacctatctgtctttagtacctctaagtggaatcacttgcttcaccattttgtcattggccacctcaagggcgcacccgcaagttggtggaatcatatgcactttcaacaccatgctaagcccaactgctttagaaaggaccctgacatcaatatgcatccatttttttttgccttggggaaaattctgtcggtggagcttggcaagcagaagaagaagtacatgccttataaccatcagcacaagtacttctttctgattgggcctcccgctctgctgcccctttattttcaatggtacattttctactttgtgattcagagaaaaaaatgggtggacttagcttggatgattaccttttatgtgaggtttttcctaacatacgttccactgctggggctaaaagcattcctgggtctgttcttcatcgtcaggtttctggaatccaactggttcgtgtgggtgactcagatgaatcatatacctatgcacattgaccatgacaggaacatggactgggtgtctacccaattgcaggccacatgtaacgttcataagtccgctttcaacgactggttttctggacatctgaattttcagattgagcaccaccttttccccacaatgcctagacacaattatcataaggtggctcccttagtgcagagtttgtgcgcaaaacatggcatagagtaccagtctaagcccctcctgagcgcctttgctgatatcatccactcactgaaagagtctggacagctgtggcttgatgcttacctccaccaatag

SEQ ID NO: 222925 - DNA, 1083 bp, synthetic construct
  misc_feature 1..1083: note = Description of Artificial Sequence: Synthetic coding sequence
  source 1..1083: mol_type = other DNA
atgaactcactcctgatcggcgaactgagtccagagcagccctccttcgaacccaccaagaacaaagagttgacagacgagtttagggagctgcgagcgaccgttgagcggatggggcttatgaaggccaatcatgtgttcttcctgctgtatctactgcatatcttgctgctcgacggagccgcatggctgaccctttgggtttttggcaccagctttctgcctttcctactgtgtgcagtactcttgagtgccgtgcaagcacaggctggctggctacagcatgattttgggcatctaagtgtgttctctacaagcaaatggaatcacctgctgcatcattttgtaattgggcaccttaagggcgctccagcgagctggtggaaccacatgcacttccaacatcacgcgaaaccaaattgtttcagaaaagaccctgacatcaacatgcatcccttcttcttcgccctggggaaaatattgtcggtggagctgggaaagcaaaagaaaaagtatatgccctacaaccatcagcataagtacttctttctgataggtccaccagcactgctgccactctacttccagtggtatattttttatttcgtcatccaacggaaaaagtgggtcgatctggcctggatgatcaccttctacgtgagattctttctgacatatgtgccactcttggggcttaaggcgttcctcggacttttcttcattgtgcggttcctggaatcaaattggtttgtatgggtgactcagatgaaccacattccaatgcacatcgatcatgacagaaatatggactgggtctcgacacagctgcaagccacatgcaacgtccataagtccgcctttaatgattggttctctggacacctgaatttccaaattgagcatcatcttttccccacaatgcctaggcataattatcataaagttgcccctcttgtgcagtctttatgtgctaaacacggtattgagtaccagagcaagcctctcctgagcgctttcgcagatatcatccactctcttaaagagtccggtcaactctggctagacgcgtacctgcaccagtag

SEQ ID NO: 222926 - DNA, 1083 bp, synthetic construct
  misc_feature 1..1083: note = Description of Artificial Sequence: Synthetic coding sequence
  source 1..1083: mol_type = other DNA
atgaattccctgttgatcggagagttgtcccctgagcaaccctctttcgagcccactaaaaataaagagttaacagatgagttcagagagttgcgtgccaccgtagaacggatgggactgatgaaagccaaccatgtgtttttcctgctgtatctactgcatattctgctccttgacggggcagcttggcttacactgtgggtttttggcacttcttttctgcctttcttgctttgcgctgtcttgctgtcagccgtccaggcacaggccggatggttacagcacgacttcgggcatttgtcagttttctccacttcgaagtggaaccatttgctgcatcattttgtgataggacatttgaaaggcgctcctgccagctggtggaatcacatgcactttcagcaccatgctaaacccaattgtttccgtaaagaccccgacatcaacatgcaccctttcttttttgcactaggaaagatcctgtctgtggagctgggcaaacagaaaaagaaatacatgccatataaccaccagcataaatatttcttcctcatcggccctccagcactgctgcccctgtacttccagtggtacatcttctacttcgtgatacaaagaaagaaatgggtggatctggcctggatgatcacattttatgttaggtttttcctgacatacgtcccactcttagggcttaaggcctttcttggactgttctttatcgtccgctttctcgagtcaaactggttcgtgtgggtgacccagatgaaccatattcccatgcacatcgaccatgacagaaatatggactgggtcagcacccagctgcaggctacttgtaatgtccacaagtccgccttcaacgattggttcagcggccatcttaatttccagatagagcaccacttgttccctaccatgcccagacacaactatcacaaggtcgctcccctggtccagagcctgtgcgctaaacatggaattgaataccagtcaaagcccctgctcagtgcctttgccgatattatccacagtctcaaggagtcggggcaactgtggctggacgcttatctccaccagtag

SEQ ID NO: 222927 - DNA, 1083 bp, synthetic construct
  misc_feature 1..1083: note = Description of Artificial Sequence: Synthetic coding sequence
  source 1..1083: mol_type = other DNA
atgaacagcctactgatcggcgagttatcccctgaacagccatctttcgaaccaaccaagaataaggaactgaccgacgaatttcgagaactcagggccaccgtggagagaatgggcctgatgaaggctaaccacgtatttttcctgctgtacctcttgcatatcctactgctcgatggagccgcttggttgacactgtgggtatttgggacctcatttctccctttcttgctgtgcgccgtgctgctgtctgccgtgcaggcccaggcaggctggcttcagcatgactttggacacttaagcgtgttctccacatccaaatggaaccacctcctgcaccactttgtaatcggccatttaaaaggggcacccgcttcctggtggaatcatatgcattttcagcaccacgccaaacccaactgctttaggaaggatcccgatattaacatgcatcctttcttcttcgccttgggcaaaattttatctgttgaattgggcaagcaaaaaaaaaagtatatgccatataatcaccagcataaatactttttcctcattggaccccctgccctattaccactctattttcagtggtacatcttttacttcgtgattcagcgcaaaaagtgggtggatttggcctggatgatcacattttacgtacgttttttcctgacatatgttcctctgcttggtctgaaagcattcctcggactgtttttcatcgttcgctttctggagtccaactggtttgtctgggtgacacagatgaaccatattcctatgcatatcgatcacgatcgaaacatggattgggtgtccactcagctgcaggcgacatgcaacgtccacaagtctgcctttaacgattggttctctgggcacctgaacttccagatcgagcatcacctcttcccaaccatgccccgacataactaccataaagtggcccctctagtacagtcactctgtgcaaagcacgggatcgaatatcaatcgaagccacttctgagtgcattcgcggacataatccactccctgaaagagtcgggccaactgtggttggacgcctacctgcatcaatag

SEQ ID NO: 222928 - DNA, 1131 bp, synthetic construct
  misc_feature 1..1131: note = Description of Artificial Sequence: Synthetic coding sequence
  source 1..1131: mol_type = other DNA
caggacgcctttcgcgcatttcaccaggacttgaacttcgttcgaaagtttttacagccgttactcatcggcgagcttgcccctgaagaaccgagtcaggacggacctctgaatgctcagctggttgaagactttagagcccttcatcaggccgctgaggacatgaaattatttgatgctagtcccacattcttcgcctttctgctgggccatatactggctatggaggtgcttgcctggctcctgatttatctcctaggacccggttgggtgccttctgccttagccgcattcattttagcaattagtcaggctcaggcgggttggctgcaacacgacttcggacacctctctgtatttagcaccagcaagtggaaccatctccttcaccacttcgttatcggccacctgaaaggcgctccagcgagttggtggaatcatatgcacttccaacaccacgccaaacccaactgctttagaaaggatccagatattaatatgcacccattcttctttgctctgggaaagatcctctccgtcgaattgggaaagcagaaaaaaaaatatatgccttataatcatcagcacaagtacttcttcctgattggcccacccgctctcctgcccctatactttcagtggtatatcttctactttgtgatccaaaggaaaaaatgggttgatttagcttggatgattacattctatgtaagatttttcctcacatacgtccccttactcgggcttaaggcatttttaggactgtttttcattagatttcttgagagcaactggttcgtatgggttacacagatgaaccacatccccatgcacatcgaccacgataggaatatggattgggtgtcaacgcaattgcaagcaacgtgtaatgtccacaagtccgcttttaacgattggttctccggccacctgaatttccagatagaacatcacctatttcccacaatgccgagacataactaccataaggttgcaccattggttcagagtctgtgtgcaaagcacggtatcgaataccagtccaagcccctgctttccgcttttgctgacattattcacagccttaaggaatcaggccagctctggctggacgcatacctgcaccagtag

SEQ ID NO: 222929 - DNA, 1269 bp, synthetic construct
  misc_feature 1..1269: note = Description of Artificial Sequence: Synthetic coding sequence
  source 1..1269: mol_type = other DNA
atgcacggacgagaggcgggaccatttgtctgcgtctgcgtgttgctggcctctatcccaacaccccagaccccgctccttcaggcatcattgccgccttttcatcctgcatcagctgggcatcccataaccggccagcaggatgctttcagggccttccatcccgacctcgagttcgtcggcaaatttttaaagccccttctgatcggcgagctggccccagaagaaccaagccaagatcacgggaagaatagcaaaattacagaggacttccgggctttacgtaagactgcagaggacatgaacctgtttaagaccaaccatgtgttctttcttcttctgctggcccacatcatagctttagaatcaatcgcgtggttcacagtgttctatttcgggaatggctggattcctaccttaatcactgcatttgtccttgccacctctcaggcgcaggcaggatggcttcagcacgactatggccacttaagcgtatatagaaagccaaagtggaatcaccttgtccacaagtttgttattgggcatcttaaaggcgcaagcgcaaactggtggaaccacagacattttcagcaccatgccaaaccgaatatctttcacaaagatcctgatgttaacatgcttcacgtgtttgtgctgggtgaatggcagcccatagaatatgggaagaagaagctgaaataccttccatataaccaccagcacgaatacttcttcctgattgggccacccttgttgatcccaatgtatttccagtatcagatcattatgaccatgattgtgcataaaaattgggttgatctcgcttgggcagtgtcttactatatccggttctttatcacttacatccccttctacggcattcttggcgcactacttttccttaactttatcaggttcctcgaatctcattggttcgtctgggtcacccagatgaatcatattgtaatggaaatcgatcaggaagcctaccgggattggttctcatcccagctgactgctacctgcaatgtggagcagagtttctttaacgattggttctctggccacctgaacttccaaatcgagcaccacctctttcctacgatgccaaggcacaacctgcataaaattgcccctcttgtcaagagtctgtgcgcaaaacacgggattgagtaccaggaaaagccccttctgcgcgctttgctggatatcatacgaagccttaaaaaaagcggcaaattgtggctcgacgcctatctccacaaatag

SEQ ID NO: 222930 - DNA, 1335 bp, synthetic construct
  misc_feature 1..1335: note = Description of Artificial Sequence: Synthetic coding sequence
  source 1..1335: mol_type = other DNA
atggggaagggcggaaatcaaggtgagggcgcagccgaaagagaggtgtccgtgcctacctttagttgggaggagattcagaaacataatctgaggaccgacagatggctggtgatcgatcgaaaggtttacaacattaccaaatggagcatccagcatcctggtggccagagagtcatcggccattacgccggtgaggatgcgactgatgcttttagggcatttcatccggatctcgagtttgttgggaagtttctcaagccgctcctcattggcgaactggctcctgaagaaccctctcaggaccatgggaagaacagtaaaattaccgaggactttagagcacttcgcaagacggccgaagatatgaatctgttcaagaccaatcacgttttttttctattactgctggcacacattatcgcccttgagtcaattgcgtggttcacagtcttctatttcggcaacggatggatacctacgctgatcactgcatttgttctggctacatctcaggcccaggcaggatggctgcaacatgactatggacatctgtctgtgtatcggaagcccaagtggaaccatctcgtacataaattcgtgattggacacctgaagggggcaagcgcgaactggtggaaccacaggcacttccaacatcacgccaaacccaatatcttccacaaagaccccgacgtgaatatgctgcatgtgtttgtgttgggggagtggcagccaatcgagtatggcaaaaaaaaactcaagtatctgccttacaaccaccagcacgagtattttttcctgattgggccacctctccttattcccatgtactttcagtaccagattatcatgacgatgattgtgcacaagaattgggttgaccttgcctgggctgtgtcgtactatataaggttttttataacctatattccattttatggtattcttggcgcactcttgtttctcaattttatccgcttcttggaaagtcattggtttgtgtgggtgacccagatgaatcatatcgtcatggagatcgatcaggaggcttacagagattggttttcttcgcagctgaccgccacttgtaacgtggagcagagcttcttcaacgattggttttctggacacctgaattttcagattgagcaccacctgtttcccaccatgccacggcataacctgcataaaatcgccccacttgtgaagtccctgtgtgcaaagcacggaatcgagtatcaggaaaagcccctgctgagggcattgctcgatataatcaggagccttaagaagtccggaaagctttggctggacgcgtatttgcacaagtag

SEQ ID NO: 222931 - DNA, 1161 bp, synthetic construct
  misc_feature 1..1161: note = Description of Artificial Sequence: Synthetic coding sequence
  source 1..1161: mol_type = other DNA
atgggaaaaggtggcaaccagggggagggtgcggcagaaagagaagtgagcgtccccaccttctcctgggaggagatccagaagcataatcttcgcacagatcgctggctggtcattgatcggaaggtctacaatattacaaagtggtctattcaacatcccggaggtcagcgagtgatcggacattatgcaggggaagacgcaacagacgcgttcagagcgtttcatcctgatttggaatttgtggggaagttcctgaaacccttgcttattggggaactcgccccagaggagccttcacaagatcatggaaaaaattcaaagattacagaagattttcgggctctgcggaagactgcagaagacatgaacctgtttaagacaaaccatgttttcttcttactcctcctggcacatatcatcgcacttgaatctatcgcatggttcaccgtgttttatttcggaaacggctggatcccaactctcattacagctttcgtcctggcgacgagccaggcccaagcgggttggctgcagcacgattatggtcatctgtctgtctaccgcaagcctaagtggaaccacctggttcataagtttgttattggccatctgaaaggggcttccgctaattggtggaaccatagacacttccagcaccacgcgaagcccaacatattccacaaagaccctgacgttaacatgctgcatgtgtttgtgctcggggagtggcaaccaatcgaatatgggaagaagaaactgaagtatctcccgtataaccatcagcatgaatacttctttctcatcggaccaccccttctgatccctatgtactttcagtaccaaataatcatgactatgatcgttcataagaattgggttgatctggcctgggccgtctcttactatattaggttttttattacttatatccctttttacggcatcttaggagccttacttttcctgaactttatcagatttctggagtcacattggttcgtttgggtgacgcagatgaaccacattgtaatggaaatcgaccaggaggcttaccgcgactggttcagctctcaattaaccgccacttgcaacgttgaacaatctttttttaatgactggttctcagggcatctgaactttcaaattgaacaccagtag

SEQ ID NO: 222932 - DNA, 1338 bp, synthetic construct
  misc_feature 1..1338: note = Description of Artificial Sequence: Synthetic coding sequence
  source 1..1338: mol_type = other DNA
atgggaggagtgggcgaacctgggccaagggaaggacctgcccagcccggtgctcccctccctaccttctgctgggagcaaattcgggctcacgaccagccaggtgacaagtggctggttattgagcgacgggtgtatgacattagcagatgggcccagcgccatccaggaggttcccgccttattgggcatcatggcgctgaagacgcaactgatgctttcagagcatttcaccaggatctcaattttgttcgtaagtttctgcaaccactgttaatcggtgagctggccccagaagagccgtctcaggacggaccactcaacgctcagctcgttgaggattttcgggctctacaccaagccgcagaggatatgaaactgtttgatgcttcaccaacattctttgcatttctcctgggtcacatcttggctatggaggtccttgcttggcttttgatctacttgctgggcccaggctgggtaccgagcgctttggccgcatttatcttggctatctcccaggctcagagctggtgtctgcaacatgacctggggcacgcctccattttcaaaaagtcctggtggaaccatgtggcgcagaaattcgttatgggtcaattgaaaggatttagcgcacattggtggaacttcagacacttccagcatcacgccaagcctaatattttccataaggatcccgacgttacagtggcccctgtattcctattaggcgagagctccgttgaatatggtaagaagaagcgtcgttacctgccctacaaccaacaacacctctacttctttctgataggccctcccttgctgactcttgttaatttcgaagtggagaatttggcctatatgctggtgtgcatgcaatgggccgacctcctgtgggccgcaagcttctacgcgagattcttcttgagctaccttcccttctacggtgttcccggagtgctacttttcttcgttgccgtgcgcgtcttggagtctcattggtttgtttggataacccagatgaatcacattccaaaggagattggccatgagaagcaccgcgattgggtctcctcccaactcgcagccacctgtaatgtagaaccgagcctgttcacgaactggttttcaggtcatctgaatttccaaatcgagcaccacctatttcctcggatgccaaggcacaattattccagggtggccccactggtcaaaagcctttgcgccaaacacgggttaagctatgaggtgaagccttttctcaccgcgctggtagacatcgtgagatcactaaaaaagtctggggatatctggctggatgcataccttcatcaatag

SEQ ID NO: 222933 - DNA, 1158 bp, synthetic construct
  misc_feature 1..1158: note = Description of Artificial Sequence: Synthetic coding sequence
  source 1..1158: mol_type = other DNA
atgggaggggtgggtgaacctggccctcgggaaggcccagctcagccaggggctcctcttcctacgttctgttgggagcagatccgagcccacgaccagcccggtgataagtggctggttattgaaagaagggtttatgacatttcaaggtgggcccaaagacaccctgggggatcccggttaatcggccatcatggagcggaagatgcgactgacgcattccgagcttttcaccaagatctcaacttcgtcagaaaatttctacaaccactgctgatcggcgagctcgcacccgaggagccctctcaggatggccctctgaacgcccaacttgtggaagactttagagcattgcatcaggcggctgaggacatgaagttattcgacgcatctcccactttcttcgccttcctgttgggtcacatcctggcgatggaagtgcttgcctggttgctgatctaccttcttggcccaggttgggttccaagtgctttggcagcctttatcctggccatctcccaagcccagagctggtgcctccagcatgacctcgggcacgctagcatcttcaagaagtcctggtggaaccacgttgcacagaagttcgttatgggccagctaaagggatttagcgcgcactggtggaactttaggcatttccaacaccacgcaaagcccaacatatttcataaggaccccgacgtaactgtcgcccctgtctttctgctgggcgaatcatcagtggagtacggaaaaaagaaaaggcgatatcttccatacaatcagcagcacctctatttctttctcattggccctccattgctcactctagttaatttcgaggttgaaaatctagcctatatgctggtgtgtatgcagtgggccgacctcctctgggcagcgagtttttacgccagattctttctgagttacctaccattctacggcgttccaggtgtgctgctattcttcgttgccgttagatacggcagagaatggcgcggacacacacaggctacaggggatcctcattgctctccccctcctgagttacctttctcccggctgcaaaatggcgcttccgggacggcgtcattggcctgttggtggaaccacatcaatacaagcgtggcgggagcacagggacggtgggtctag

SEQ ID NO: 222934 - DNA, 1017 bp, synthetic construct
  misc_feature 1..1017: note = Description of Artificial Sequence: Synthetic coding sequence
  source 1..1017: mol_type = other DNA
atgttccaggcattcccaggcgattacgattcggggtcgcgctgtagttcatctccctccgccgaatcccagtatctaagttccgtggactcattcggaagtcctccaaccgcagccgcaagccaggagtgcgccggtttaggtgaaatgcccggatcttttgtgcctacggtgacggcaatcacaacgagtcaagatctccagtggctagtgcagcccaccctgatatcatcgatggcccagagtcaggggcagccgctcgcctcccaacctccagtcgtcgatccctatgacatgcccggaacttcctattctacgcctgggatgtccggatactctagtggaggcgcatctggatctggtggtccttctacatcaggcaccactagtggaccaggccctgccagaccagccagggccagacctagacggccacgagaggaaaccctgaccccagaggaagaggaaaaaagaagggttcgacgtgaacggaacaaactcgcggctgccaaatgccggaatcgcaggagggagctaaccgacaggctgcaggctgaaacagaccagttggaagaggaaaaggcagagttggaaagtgagattgccgagctgcaaaaggagaaagaacgcctcgaattcgtactcgtcgcccacaagcctggttgtaagattccatatgaagaaggcccagggcctggaccactggcggaggtcagggacctgcctggttcagcaccagctaaggaagatggcttttcatggcttctgcctcctcccccacctccacccttgccgtttcagacctctcaggacgcacccccaaacttgactgccagcctgtttacccattcagaagtgcaggttttaggagatcctttcccggtggtgaatccctcatacacctccagcttcgtgttgacctgcccggaggtctctgccttcgccggagctcaacgaaccagtggttcagatcagccctcagaccccctgaactcaccgagtctcttagcgctctag

SEQ ID NO: 222935 - DNA, 909 bp, synthetic construct
  misc_feature 1..909: note = Description of Artificial Sequence: Synthetic coding sequence
  source 1..909: mol_type = other DNA
atgtttcaggccttccccggtgattacgattccggctctcgctgcagttcgagcccgtccgctgagtcacagtatttgtcctccgttgacagcttcgggagtccgcctactgcagctgcctctcaggagtgtgccggtctcggtgagatgcctggctcgtttgtccccaccgttaccgcaataaccacctcccaggatctccagtggctcgtgcagcccactctgatcagttccatggcccagtctcagggacagccattggcttctcaaccccctgtggtggatccttatgacatgcccggtacctcctatagtactccaggaatgagcgggtatagctctgggggagcctcaggtagcggcggtcctagtacatcaggaacaacatccggccctggcccagctcgcccagcgagggcgcgtccacggaggcccagagaagagacggagacagatcagctggaggaagagaaagctgaactggaatccgaaatcgccgagctgcaaaaggaaaaggagcgcttggaattcgtgctggtggctcataaacccggttgtaaaattccttatgaggagggccctgggcctgggcctctggccgaggttagggatttacctgggtcggccccagcgaaggaggatgggttctcatggttgcttcctccccctccccctccaccgcttccattccagacatctcaggacgcccctccaaacctgactgccagtctgttcacccactcagaggtgcaggttcttggcgatcctttcccagttgttaacccaagctacacatcttcgttcgtactgacttgccccgaggtatccgccttcgctggggctcagagaacatctggctccgatcagccatccgaccccctgaactccccctctcttcttgcactgtag

SEQ ID NO: 222936 - DNA, 588 bp, synthetic construct
  misc_feature 1..588: note = Description of Artificial Sequence: Synthetic coding sequence
  source 1..588: mol_type = other DNA
atgttccaggcattccctggtgattatgattcagggagccggtgctcgtccagccccagcgcagagagccaatatctctcatctgtggattcgtttggttctccacccaccgcagccgcttctcaggagacagaccagctggaagaagaaaaagcagaactggaaagtgaaattgctgagctgcagaaggaaaaagagcgcctggaattcgtgctagtagcccacaaacctggttgcaagatcccctatgaggaaggtccaggcccaggacctctggctgaagttcgcgatctccctggaagtgctcctgccaaggaggatggattttcatggctgcttcctccccctcctccaccccctctgccgtttcagacaagccaggatgcacctcccaatctcactgctagcttgttcacccactcagaggtgcaggtcctgggagatcccttccccgttgtgaatccgtcctatacatcgtctttcgtcctgacctgtccagaagtgtcagctttcgcaggggctcaacgaacctcagggagcgaccagccatccgaccccctgaatagtccaagccttctagctctgtag

SEQ ID NO: 222937 - DNA, 876 bp, synthetic construct
  misc_feature 1..876: note = Description of Artificial Sequence: Synthetic coding sequence
  source 1..876: mol_type = other DNA
atgtttcaggctttcccgggagattatgatagtggcagcaggtgcagcagcagtccctctgccgaatcccagtacctgtctagtgtagattctttcggctccccgcctaccgccgcagcaagtcaggaatgtgccggacttggggaaatgccgggttctttcgtgccaaccgtgactgccataaccacaagccaggacttgcagtggctcgtccagccgacgctgatctcgtccatggctcagtctcagggtcagccactcgccagccaaccgccagtggtggacccttacgatatgcccggaacctcatattccactcctggcatgtcaggctattcctctggcggagcctccgggagtggcggaccttctacatcaggaacgacctctggcccaggacctgcacggcctgctcgcgcacgtccacggaggccaagagaggaaacgttaacacctgaggaagaagagaagaggagggtacgtagggagagaaataagttggcagcggcaaagtgcagaaatagacgcagagagttaacagacagactacaggcagagacagatcagctcgaggaggaaaaggcagagcttgaaagtgagatagccgagttacagaaagagaaggagcgcctcgagtttgtgttggtggctcataaacccggatgtaagattccctacgaggaggggcctgggcctggtccactggccgaggaggtgcaggtcctgggcgatcctttcccagtcgtgaacccttcttacacatcctcttttgtgctgacctgccccgaggtttccgcttttgctggtgctcagagaacgagtggttcagaccaaccaagcgatcccctgaatagcccttccctgctggccctgtag

SEQ ID NO: 222938 - DNA, 912 bp, synthetic construct
  misc_feature 1..912: note = Description of Artificial Sequence: Synthetic coding sequence
  source 1..912: mol_type = other DNA
atgtcagataatggtgtgtgtgtgctggcatttaaatgtcctggcctgttaagatatacagcctatcgctgcaagcagctttccgacacatccatcatagcggtagcaagccattgccctctgctccagaaggtacacgtggggaatcaggacaagctgaccgacgagggcctcaaacagctcgggagcaagtgccgcgagttaaaggatatacactttgggcagtgctataagattagtgacgagggcatgattgtgatcgctaagggctgcctcaagctccagcggatatatatgcaggagaacaagctcgtaactgatcagtccgtgaaagcttttgcagagcattgccctgagctgcagtacgtgggctttatgggatgttctgtcacgagcaagggagtaattcatttaacaaaactgcgcaatctgtccagtctggatctgcgccacattactgaactggacaacgaaactgtgatggagatcgttaagcgatgcaagaatctatccagccttaacctgtgtttaaattggatcataaatgataggtgtgtggaggtcatcgccaaggaggggcagaacctgaaagaactgtacctcgtgtcctgcaagattactgattacgcgctgattgcaattggcaggtacagcatgaccattgaaaccgtggatgttggatggtgcaaggagatcacagaccagggcgctacacttatagcccagtcatcaaaaagccttcgatatctggggttgatgagatgcgataaggtgaatgaggttaccgttgaacagctcgtgcagcagtatccacacattactttctcaacagttttgcaggattgcaaaaggacacttgaaagagcataccagatgggctggacccccaacatgagtgcggcttcaagctag

SEQ ID NO: 222939 - DNA, 945 bp, synthetic construct
  misc_feature 1..945: note = Description of Artificial Sequence: Synthetic coding sequence
  source 1..945: mol_type = other DNA
atgagcgataacggcgtgtgcgtcctggccttcaagtgccctggtcttctccgctacacagcgtaccgatgtaagcagctgagcgacacatcaatcatagctgtcgccagccactgccctctgctgcagaaagtccatgtcgggaaccaggacaagctgaccgatgaaggcctgaaacaactgggatccaaatgtcgggaactcaaagatatccacttcggacagtgttacaaaatctccgacgagggaatgattgtgatcgccaagggttgcctgaagctgcagaggatttatatgcaggagaataaactggtgactgatcagtcagtgaaagcattcgctgagcattgccccgaattacagtacgttggatttatgggctgttccgtgacaagcaagggtgtaatccacctgaccaaactaaggaatctctcttcgctagatttgaggcacataaccgaactggataacgagacagttatggagattgtgaaaagatgtaaaaatctctcaagtctgaacctttgcctcaactggatcatcaatgatcgctgcgtcgaggtcatagcaaaggagggccagaatctcaaagagttatacctcgtcagctgcaagattacggactatgctctgatagcgattgggagatatagtatgaccatagaaaccgtggatgtcggatggtgtaaagaaataaccgaccagggtgccaccctgatcgctcagagctcaaagtctctgagatatctgggccttatgcgctgtgacaaggtgagggtagattatcaggtggtgtgcttcctgcacatttccatcgtgaatagccttatgtcctaccccctctcatttagcattagcactcccgtgtattacatcctttacatccatttcatctgtatttacgccataattgccatgcactgtctgccagccttcgtcaattag

SEQ ID NO: 222940 - DNA, 2106 bp, synthetic construct
  misc_feature 1..2106: note = Description of Artificial Sequence: Synthetic coding sequence
  source 1..2106: mol_type = other DNA
atggggcacctactgagcaaggaaccgaggaataggccttcccagaagagacctcggtgctgctcttggtgtcggcgtagaaggcccctcctcaggctacctaggcgcacccccgctaaggtgccaccccagccagcagctccgagatcacgagattgtttttttagaggaccatgcatgctatgtttcattgtacacagtccgggagctcctgcacccgcaggcccagaagaagagcctccactttccccaccgccaagagacggcgcatatgccgctgcttcctcttcacaacatctggccagacgatatgctgcgctggccgcagaggattgcgcggcagctgccagacgctttctgctttcctctgccgctgccgctgcggctgcagccgcatccgctagctctccagcgagctgttgtaaggagctgggcttggccgcagcggcagcttgggaacagcagggccgaagtctctttctggcaagcttggggccagtcaggtttttgggaccacccgcagcggtccagttgttcaggggaccgaccccatctccggctgagctgcctacccctccggagatggtgtgcaaaaggaaaggggctggagtgcccgcatgtactccatgcaagcagccaaggtgtgggggtggcggatgtgggggagggggtggcggaggagggggaggcggaccggctggcggtggggcatccccacctaggcctcctgatgcaggttgctgccaggcccctgaacagccgccacagccgctgtgcccgccacctagcagtccgacttcggagggggcaccaactgaggccggaggcgacgcagttagagccggaggcaccgccccattgagcgcgcagcaacagcacgagtgtggcgatgcagattgcagggagtctcctgaaaatccttgcgactgccatcgcgagcccccaccggagactcctgatattaaccagcttcctcccagtatccttctcaagatattctcaaatcttagcttggacgagagatgtctgtcagcctcattggtatgtaagtattggcgcgatctgtgtctcgattttcagttctggaagcaactggatttaagctcaaggcagcaagtgacagacgagcttttggagaaaatagcgagtagaagtcagaatattattgagattaatatttctgactgtcggagtatgagcgataacggagtttgtgtgctggcttttaagtgtccagggttgctgagatatactgcctacaggtgcaagcaactaagcgatacttctataattgctgtggcttcacactgtccactcctgcagaaggtgcatgtagggaatcaggataaactcacagatgaaggtcttaaacagctcgggtcaaagtgcagggaactgaaagatatccatttcggacagtgctacaaaatttccgacgaaggcatgattgtgattgcgaaaggctgcctgaaactgcagaggatttacatgcaggaaaataagctggtgaccgatcagagcgttaaagcctttgcggaacactgtccagaactacagtatgtgggattcatgggatgttcagtgacctctaaaggagttatccatctgaccaagttgagaaatttgtccagcctcgacttacggcacattacagaactcgataacgagaccgtaatggagatagtgaagagatgcaagaacctgtcctcccttaatctgtgtctgaattggattatcaacgaccgttgcgttgaagttatagctaaggagggccagaacctgaaagagctctatctggtgtcttgtaagataaccgattacgctctgattgctatcggcaggtactcgatgacgatcgagacggtggacgtgggttggtgtaaggaaatcaccgatcaaggagcgacattgatcgcacagtcgtccaagagcctcagatacttgggactgatgcgttgtgacaaggtaaatgaggtgacagttgagcagctcgtccaacagtaccctcatatcaccttctcgaccgttctccaggactgcaaacgcactctcgaacgagcataccagatgggctggacacctaacatgagtgccgctagtagttag

SEQ ID NO: 222941 - DNA, 2025 bp, synthetic construct
  misc_feature 1..2025: note = Description of Artificial Sequence: Synthetic coding sequence
  source 1..2025: mol_type = other DNA
atgtcaagttccagtcggggaccaggcgctggcgctagacggagacgcacgcggtgtcgacgttgccgggcatgtgttcggacagagtgtggagactgccatttctgtcgagatatgaagaaattcggcggaccaggtcgtatgaaacagagctgcctgctgagacaatgcacagcacccgtgttgccccatacggctgtctgtcttctgtgtggggaggctggcaaggaggacaccgtcgagggcgaagaggagaagtttggactaagcctgatggagtgcactatctgcaatgaaattgtgcacccaggttgcctgaaaatgggcaaggccgagggcgtgataaatgcggagattccaaattgctgggagtgtcccagatgtactcaagagggcaggacctcaaaggactctggggagggacctggccgaaggcgagcagacaacggcgaagaaggtgcatcgctcgggagtggttggaaacttacagaagaaccgcctcttccacccccacccccacgtcgaaagggacccctgcccgcaggccctccacctgaagatgttcccggacctcccaaacgcaaagagcgggaagcagggaatgaaccacctactcctcggaagaaagtaaaaggtggccgtgagcggcaccttaaaaaggttggaggtgatgcctgtctacttagagggtcggaccccggaggccctggcttgctgccacccagagtcctaaatccttcacaggccttcagttcctgtcatcctgggctacctcctgaaaactgggaaaagccaaagcctcccctggctagtgccgagggacccgcagtgccaagccccagtcctcagcgtgaaaaactggagagatttaaaaggatgtgccagctgcttgaacgcgtacccgatactagctcttcctcctctgactctgattccgacagtgactcgtctgggacttcgctctccgaggacgaagcccctggtgaggcgaggaacggtagacgcccagcgagaggcagtagcggcgaaaaggagaacaggggcggtagacgggctgtgaggcctggatctggagggcctctcctgtcctggcccctcggccctgcgccacctcccaggccaccccaactcgaacgacatgtggtaaggccaccgccaagatctcctgagcccgacacgcttccactcgcagctggcagtgaccacccactgccacgagccgcttggctccgcgtctttcagcacctgggacccagagaactgtgcatttgcatgcgggtgtgcaggacgtggtcacggtggtgctatgacaagagactctggcccagaatggatctgtcacgcaggaagagcttaaccccaccaatgctgagcggtgtggtcagacggcagcccagagcacttgacttgtcatggacaggcgtgagcaaaaaacaactgatgtggttactaaacagacttcaaggcctgcaagaactggtactctctggttgtagctggctgagcgttagcgccctggggtccgccccattacctgccctacgcttactggacctcagatggattgaggatgtgaaggatagccagttgcgagaactgctactgcctccgcctgacaccaagcccggtcagacagaaagccggggacggctacagggcgtggcagagctgagactcgcagggttggaattaacggatgcatcactccggttgctcttaagacacgcccctcagttgtccgcgctggacctctctcactgtgcccacgtgggggaccctagcgtgcatctgctgacagcacctacaagcccacttcgggaaactctggtgcacctcaatctcgccggatgccacaggctgaccgatcattgtctgcctttattcagacggtgtccacggctccgccgtctcgatttgagaagctgcagacagctttctccagaagcctgcgccagacttgcagcagcagggccacctgggccttttcgctgtccagaagagaagctcctgctcaaagactcctag

SEQ ID NO: 222942 - DNA, 2085 bp, synthetic construct
  misc_feature 1..2085: note = Description of Artificial Sequence: Synthetic coding sequence
  source 1..2085: mol_type = other DNA
atgggtatgaaggtgcctggcaagggagaatctgggccatcagcactgctgacgcccccaatgtctagttcctccagaggccctggcgctggcgcacgtagacggaggacaagatgtagacggtgccgcgcttgtgtgagaaccgagtgcggagattgtcatttttgtagagatatgaagaaattcggaggccctgggcgtatgaagcagtcatgcctgctgcgacagtgtactgctcctgtactaccgcacactgcagtttgtttgctctgcggggaggccggtaaagaggataccgtcgagggcgaggaagaaaagtttggactgtcgttgatggagtgtacaatctgcaacgagattgtgcaccccggttgtctgaagatgggcaaagccgagggtgtcatcaatgctgaaataccgaactgctgggaatgcccaagatgtacacaggagggcaggacgtccaaggattctggggaaggtccaggacgacgtagggccgataacggggaggagggggcaagcctagggagcggttggaagttgaccgaagaacctccattacctccacccccaccacgccgaaaaggtcccctgcctgccggtcccccaccagaggatgtgcccggtcctcctaaaaggaaagagagggaggccggaaacgagccaccgactcctagaaaaaaagtcaagggcggtagggaaaggcatcttaaaaaagtaggaggcgacgcgtgcctcctacgcggttccgaccccggaggtccaggactgctcccacccagggtactgaatccctcccaggcattcagctcttgccaccctggtctcccccctgagaactgggagaagcctaagcctccgctcgcctccgccgaggggccagcagttccctctccaagtccacaacgggagaagctggagagatttaaacgaatgtgtcaacttctcgagcgcgtgccggatacttcaagttccagtagcgacagcgatagtgattctgattcgagcggcacctccctcagcgaggatgaagctcccggtgaggccaggaatggtagacggcctgcacgagggagcagcggggaaaaggagaaccggggtggtaggagagctgtgcggccaggcagtggaggccctctcctaagctggcctttaggtccggcaccacccccacgccctcctcaactcgaacggcatgtcgttcggccaccaccacgcagtcctgaaccagatacactgcctttggctgccggtagcgaccatccactccctcgcgcagcgtggctgcgcgtcttccagcacctcggacctcgcgagctgtgtatctgtatgcgcgtctgtagaacctggtccagatggtgttatgataagaggctttggccgaggatggacctaagccgtaggaaatccctgacaccaccaatgcttagcggggtggttcggaggcagcctagagctctggacttgtcctggaccggtgtctcaaagaaacagcttatgtggctcttaaatcgccttcaaggacttcaggaactagtgttgtctggatgtagttggctgtccgtctctgccctcggctctgcacctttgcccgctctgcggttgcttgacctccgctggatagaggacgtaaaggactcccaactgcgagaactattgttgcctccgcctgataccaaacctggacagacagagtctcgtgggaggctgcaaggagtggccgagttaaggctggcgggacttgaactcacggacgcgagcctaaggcttctgctgcgacacgcccctcagctgtcggccctcgatctttcccactgtgcgcatgtaggcgatcccagcgtgcacctgttgacggcaccaacgagtccactgcgagaaactttggtccatttaaatctcgcaggatgtcaccgattaactgaccactgtctgcccttatttcgtaggtgcccacggctccgccgactggacctgcgctcatgccgccagctctccccagaggcctgcgccaggctcgctgctgccggtcctccaggaccctttaggtgtcctgaagagaagttgctgctcaaggattcttag

SEQ ID NO: 222943 - DNA, 1761 bp, synthetic construct
  misc_feature 1..1761: note = Description of Artificial Sequence: Synthetic coding sequence
  source 1..1761: mol_type = other DNA
taacggatgaagcaatcttgcctgctccggcaatgcaccgcaccagtgctgccccataccgcagtgtgtcttttgtgcggcgaagccggaaaggaggataccgttgagggcgaggaggaaaagtttggattaagcctgatggaatgtacaatctgtaacgagatcgtgcatccaggctgtttgaagatgggcaaggccgagggcgttataaatgccgaaattcctaattgttgggagtgtcctcgctgtacccaggagggaagaacgagcaaggactccggtgaagggccaggcaggcggcgagccgacaacggggaagaaggggcatccctggggagcggctggaagttgacggaagagcccccacttccacccccaccgcctagacgcaaggggcctctgccagccggaccaccacctgaggatgttcccggaccccctaaaaggaaagagagggaagccggaaatgagccccctactccacggaagaaggtgaagggtggcagggaacgccatctcaaaaagaaaccaaagcctcccctagcaagcgccgagggccctgctgtcccgagcccgtccccccagcgagaaaagctcgaaagatttaaacgcatgtgtcagctcctggaacgcgtgcctgatacaagtagctcgtcctctgattctgattctgactcagatagttctggcacctccctgagcgaggatgaggcacccggagaggcgaggaacgggcgaagaccagccagagggtcctctggcgagaaagagaatagaggtggaaggcgagccgttaggcccggaagtggaggtcctctgttatcttggccccttgggcctgctcctccacctagaccccctcagcttgagcggcacgtggtccgcccaccccctcgctcccccgagccggatactcttccactggcagctgggtctgatcacccattgccccgtgctgcctggttgagggtgttccaacacctcggaccaagagaactgtgtatatgtatgcgtgtgtgcaggacgtggtcacgctggtgttatgataagcgactgtggcccagaatggacctgtcaagacgcaaatctcttacccctcctatgctttcaggtgtggtacgtcgacagccacgcgctctggacctgtcctggaccggcgtctccaaaaagcagctcatgtggctgctgaaccgcctccagggactgcaggaattagttttgtctggctgcagctggctgagcgtttcagccctcggtagtgcgccactgccagccctgaggctgctggacctgaggtggattgaagacgtcaaggatagccagttgagagaactgctcctgccccctccagataccaaaccgggacagactgagtccagaggccgattacagggcgtcgctgagcttcggctcgcagggctggaattgactgatgcgagcctgcgcctgttgctgaggcatgccccacaactgtcggcgctcgacctgtcgcattgcgcacatgtgggcgacccgtcagtacatctgctgaccgcccctacttctcccttaagggaaaccttggtccaccttaacctggctggatgccaccggctgaccgaccattgtctgccactttttcggagatgtccacggcttagaagactggatctgcgatcctgccgccagctgagcccagaggcctgtgccagactcgcggcagcagggcctccaggcccattccggtgtccggaggaaaaactgctattgaaggactcctag

SEQ ID NO: 222944 - DNA, 495 bp, synthetic construct
  misc_feature 1..495: note = Description of Artificial Sequence: Synthetic coding sequence
  source 1..495: mol_type = other DNA
atggacctggaggaatgcattttgatcactgactcaacccttatccagttgagtattcattgtcccaagctacaggccctggtgagcctgtctttttcagatattattcatcttctgaaaatgaaagaaccaagccaccataataaaaagctcttcgggttttctttttgtaagtcactcagccactgtgagctcatcactgatgacgggattctacatctcagcaattcaacctgtggtcacgagcggctgcgagttcttgagctggacaattgtctactgattaccgatgtagccttagaacacctggagaactgtagaggcctggagcgcctggagttatatgattgtcaacaggtgacccgggctggtataaagagaatgcgggcacagctgccacatgtgaaggttcatgcttatttcgctccagtcacccccccaaccgccgtggcagggagcggccagagactgtgtcgatgttgtgtgattctatag

SEQ ID NO: 222945 - DNA, 1272 bp, synthetic construct
  misc_feature 1..1272: note = Description of Artificial Sequence: Synthetic coding sequence
  source 1..1272: mol_type = other DNA
atggtattttccaataatgacgaaggcctgattaacaaaaagctgccaaaagaactgctgctgaggatatttagttttcttgatatcgtgacactgtgcaggtgcgcccagatcagcaaagcctggaatattctggccctggacgggtcgaactggcaaagaattgacctgttcaatttccaaacagatgtagagggccgagtcgtggagaacatctccaagcggtgcgggggattcctccgtaaactgtccttaagaggatgtataggcgtaggcgattcctctttgaagacattcgctcagaactgccggaatatcgaacatctgaaccttaacggatgcacgaagatcactgatagtacctgttattctctcagtcgcttctgttctaaactaaagcacctggacctgaccagctgcgtgtcaatcactaactcatctctcaaaggaatatcagaaggatgtaggaacttggaatacctcaacctgagctggtgcgatcagatcacgaaggacggaatagaagctcttgttcgcggatgccgtgggctgaaggctttgttgcttcgaggatgtacccagctcgaggacgaggcactcaagcatatccaaaactactgccacgagcttgtttccttgaacttgcaaagctgctcacggattaccgacgagggagtcgttcagatttgcaggggatgtcaccggcttcaggcactgtgtctgtcaggatgttcaaacctgacagacgcctctttaacagctcttggactgaattgtcctcggctgcagattttggaggcagcacgctgttctcatctgaccgatgcaggattcactctgttagcaagaaattgtcatgagttagagaaaatggacttagaggagtgcatcctgatcactgatagcaccctgatccaactgagcatccactgccctaagctgcaggcgctgagcctgtctcactgcgaactgattacagatgacgggatcctacacttatccaattctacatgtgggcatgagcgccttcgcgtgctcgaactggacaactgtctcctgatcacagatgtggccctggagcacctcgaaaactgcaggggtttggagagactcgaactgtacgactgtcagcaggtcacccgcgctggcatcaaaagaatgcgcgcacagctcccccatgtgaaggtgcacgcctatttcgccccagttacgccccctacagcggttgctggcagcggtcaacggctgtgccggtgttgtgtcattctgtag

SEQ ID NO: 222946 - DNA, 1020 bp, synthetic construct
  misc_feature 1..1020: note = Description of Artificial Sequence: Synthetic coding sequence
  source 1..1020: mol_type = other DNA
atgtatatagctctcgtgtggatcctctttgttatgtggactttcgctcagaactgtcgaaatattgagcacttgaacctgaacggatgcactaaaatcaccgacagtacgtgttactcgctgagccggttctgcagcaaacttaagcatctggacctgacatcttgtgtgagcatcaccaatagctctctgaagggcatatcagaggggtgccgtaacttggagtatctgaacctgagctggtgtgaccagattaccaaagacgggatagaagccctggttcgagggtgccgtggactgaaggccctgctgcttcggggatgtactcagctcgaggatgaagccctcaaacatatccagaattattgccatgagctggtcagcttgaacctgcagtcatgcagcagaatcaccgatgagggggttgtgcaaatttgtcggggatgccaccggctccaggccctgtgcctctcaggttgcagcaacttgaccgacgcttccctgaccgccttgggattgaactgccctaggctgcagatactcgaggccgcacgatgcagccacttgaccgatgcaggcttcactttactcgcaaggaactgccatgagctggaaaaaatggacctcgaggagtgcattctcattacagactcaacccttatccagttgtctatacactgccccaagttgcaggccctgtctttgtctcattgcgaactgattacggatgatggcattctccacttaagcaatagtacgtgtgggcacgaaaggttacgtgttctggagcttgacaactgtcttcttatcaccgacgtagctttggaacacttagagaattgcagaggcctagagcggttagagctatatgactgccagcaggtgacccgtgccggaattaagaggatgcgagcccaactgcctcacgtgaaggtccacgcttatttcgcccctgtgacccccccaaccgctgtcgccggttcaggccaacgactatgtcgctgctgcgtcatcttatag

SEQ ID NO: 222947 - DNA, 1068 bp, synthetic construct
  misc_feature 1..1068: note = Description of Artificial Sequence: Synthetic coding sequence
  source 1..1068: mol_type = other DNA
atggtcttctcaaataatgacgagggtctgataaataagaagctcccaaaggagctgctcttgcggattttcagctttctggacatcgtcacactctgtagatgcgcccagatcagcaaagcctggaatattttggctctcgacggctcaaactggcagcggatcgatctgtttaactttcagaccgacgtggagggcagagtggtcgagaacattagtaaaagatgcggcggttttttaaggaagctgtcccttagggggtgcattggggtcggcgattcgagcctgaagacctttgctcagaactgtcgtaatattgagcacttgaatctgaacggatgcactaagatcacagattcaacatgctatagcctgtctagattttgttctaagctcaaacatattcaaaactactgccatgagctagttagcttgaacctgcagagctgtagcaggataacggacgagggggtggtccagatatgcagaggatgtcatcgcctgcaggccttgtgcctgagcggctgttccaacctgacagacgctagcctgacagccctcggtctaaattgtccaaggctgcaaattctggaagccgcacggtgctctcatttaaccgatgcagggttcacccttttggccaggaattgccatgagctcgaaaaaatggaccttgaagagtgcattcttataactgactctacattgatccagctgagtattcattgtcctaagctacaggcacttagtttgagtcattgcgagttgattacggacgacggcatcttgcatcttagtaattcaacctgcgggcatgaacgactccgggtgctcgagttagataactgtctcttgatcactgacgtggccttagaacatctggagaattgtcggggactggagcgattagagctctatgactgccagcaggttacccgggctggtatcaagcggatgagagcacagctgccccatgtgaaggtccacgcctatttcgcccctgtgactcccccaactgctgtcgcgggtagcggtcagagactgtgcaggtgttgcgtcatcctgtag

SEQ ID NO: 222948 - DNA, 402 bp, synthetic construct
  misc_feature 1..402: note = Description of Artificial Sequence: Synthetic coding sequence
  source 1..402: mol_type = other DNA
atggacctggaggagtgtatcctaattaccgattccaccttgatccagctctctatccactgtcctaagctgcaggcgctgtcactgagccactgcgagctgattacagacgacggaatcctgcacctctctaatagcacgtgtgggcacgagagactccgggtgctcgagcttgataactgtttacttataaccgacgttgctctggagcatttagaaaattgccggggattggagaggctcgagttgtacgattgccagcaggtcacccgcgctgggattaaacgtatgcgggctcagctcccacacgtgaaagtgcacgcctactttgccccagtcaccccccctactgccgtggccggatcaggacaacgtttatgtcgctgctgtgtcatcctttag

SEQ ID NO: 222949 - DNA, 1068 bp, synthetic construct
  misc_feature 1..1068: note = Description of Artificial Sequence: Synthetic coding sequence
  source 1..1068: mol_type = other DNA
atggtgttctctaacaatgatgaaggactgattaacaaaaaactgcccaaagagctcttgttacggattttcagctttcttgacatcgtaaccttatgtaggtgcgctcaaattagcaaagcttggaacatactggctcttgacggaagcaattggcaaaggatcgatctttttaattttcagaccgatgtcgagggcagggttgtcgagaatatttctaagagatgtggcggatttttaagaaagctatccctgcgcggatgcataggtgtcggagattcttccctgaagacctttgcacagaactgccgaaatatagaacacttaaatctgaatgggtgcaccaaaatcactgacagcacctgttactctctgagccgcttctgcagcaagctaaaacacatccagaactactgccatgagctggtgtccttgaacctgcagagctgctcaaggattacagacgaaggagtcgtccagatctgcaggggatgccataggctgcaggcgttatgcctgtcaggttgtagtaacttgaccgacgcaagcttaacagcactcggcctgaattgcccgagacttcagatcctcgaggctgcccgttgtagtcacttgacggacgccggtttcaccctgctggcccgaaattgtcacgaactggagaaaatggaccttgaagaatgcatactgattacggactctacattgatacagctgagcatccattgccccaaacttcaggctctcagcctgagtcattgcgagctgatcaccgacgatggcatcctccatctgagcaactcaacctgcggacacgaacgcctacgtgtactcgaactcgacaattgcctgctgatcaccgatgttgccctggagcatctggagaattgtagaggtctggaacggctggagctctatgattgccagcaggtgacccgggcaggcatcaaacggatgcgggctcagttacctcacgtgaaggtgcatgcttatttcgcacctgtcacacctcccaccgcagtggctgggtctggtcaacggctctgtcggtgttgcgttatattatag

SEQ ID NO: 222950 - DNA, 1260 bp, synthetic construct
  misc_feature 1..1260: note = Description of Artificial Sequence: Synthetic coding sequence
  source 1..1260: mol_type = other DNA
atggttttctcggccgtgttgactgctttccacaccgggaccagcaataccacgtttgtggtatacgagaacacgtacatgaatatcaccttgcctcctccgtttcaacatcccgacctgtcgccactgcttcgctactccttcgagaccatggccccaaccggcctgtcttcccttacagtgaatagcacagcagtgccaacgacccccgctgcattcaagagcctgaacctaccactgcagattacgttatccgctattatgattttcattctctttgtttcttttctggggaacttggtggtgtgtttaatggtgtatcagaaggccgctatgaggtccgcaatcaacattttgttggcaagcctagccttcgcagacatgctattggctgtactgaacatgccattcgccctggtgaccattttgaccacacgctggatatttggaaagttcttttgtagggtgtctgccatgtttttctggcttttcgtgatcgaaggtgtggccattctgctgattatctctattgatagatttttgattatcgtacagcggcaggacaagctcaacccataccgagcgaaagtgcttatcgctgtgagttgggccacgagtttctgtgttgccttccctcttgctgtcggaaaccccgacctgcagattccttctcgggcaccgcagtgcgtgttcggctataccacaaatcctggctaccaagcctatgtaattctgattagcctgatatcgttcttcatcccgtttctcgtcattctctactcttttatgggtatactgaatacactcagacataacgcgctgaggattcactcttacccagagggtatttgcctcagtcaggcctctaagttaggcctcatgtctcttcagaggccttttcaaatgtccattgacatgggattcaaaacaagggcatttaccaccattctgattctgtttgccgttttcatcgtttgctgggcgccatttaccacctacagcctagttgctacattcagtaaacacttctactaccagcacaatttcttcgagatttctacttggctgctctggttgtgctatctcaagtcagcccttaatcccctgatttattactggagaatcaaaaagttccatgatgcttgcctggatatgatgccgaagtctttcaaattccttccacaacttcctgggcatacaaaaaggcgaatacggccatctgctgtttacgtgtgcggtgagcatcgtactgtcgtttag

SEQ ID NO: 222951 - DNA, 1866 bp, synthetic construct
  misc_feature 1..1866: note = Description of Artificial Sequence: Synthetic coding sequence
  source 1..1866: mol_type = other DNA
atgagcccagtgtttcctatgctgaccgtgttgacaatgttttactacatttgcctgcgccgaagggccaggactgcgacacgcggtgagatgatgaatacccacagggccatcgaatcaaatagtcagacatcacctctcaatgccgaagtggtgcaatacgcgaaggaggtggtcgacttctctagccactacgggtctgagaactctatgagttacacgatgtggaacttagcgggtgtcccaaatgtgtttccaagcagtggcgacttcacccagaccgctgtgttccggacttatggaacctggtgggaccagtgccctagcgcttcattgccctttaaacgaaccccgcctaatttccagtcacaggactacgtggaactgacattcgaacaacaggtttaccctacagccgtgcatgtgctagagacataccacccaggtgccgtcattcgaattctggcgtgcagcgcgaatccttattcccccaatccgcctgccgaggtccgatgggagatactctggtccgaaagacccactaaggtgaatgccagccaggcaaggcagttcaaaccctgcattaagcagattaattttcctacaaacctcatccgactggaggtgaactcttctctgctggagtactataccgagctggacgcagtggttctgcatggagtcaaagataagcctgtgttatcactgaagacttccctcattgacatgaatgatatagaggacgacgcctacgcggaaaaggatggatgcggaatggatagcctgaacaagaagttctctagtgccgtcctgggcgagggcccaaataacggctattttgacaaactgccttacgagctgatacagctgattctgaatcatctgaccttgcccgacctgtgcaggcttgctcagacgtgcaagctgctgagccagcactgctgtgatccactgcagtacatccatctcaatttacagccgtactgggcgaagctggatgacacgagccttgagtttctgcaatctagatgtaccctcgtgcaatggttgaacctctcttggacaggcaaccgcggattcatctcagtagccggtttctccaggtttctgaaggtgtgcgggtccgaactagtgaggctcgagctctcatgcagccactttctcaacgagacctgcctggaggtgatcagtgagatgtgcccgaatctacaggccctgaacctgagttcttgcgacaagttaccaccccaggcttttaatcacattgcaaagctctgttctctgaaaagattagtgctctatagaacaaaggtggagcagaccgcactgttgtctatactgaacttctgctctgaacttcaacacttgagcctggggtcatgtgtcatgatagaagactatgatgtgattgccagtatgattggcgcaaagtgcaaaaagctacgcaccctggacctttggcggtgcaaaaacattacggaaaacggaatcgctgaactggcttcaggttgccccctcttggaagaactggatctgggatggtgccccacactgcagtccagcaccgggtgctttactcggcttgcgcaccagctgccaaatttgcagaagctgttcctgaccgcaaatcgttcggtttgtgacacagacatcgatgagctcgcatgcaattgtacacgcctgcagcagctggatatcctaggtaccaggatggtgagcccggcttccctgcgaaaactgctagagagctgtaaggatctaagtcttttggatgtgagcttttgcagccaaatcgataatagagcagtactcgaattgaatgcctcctttccgaaagtgtttatcaagaagtcattcactcagtag

SEQ ID NO: 222952 - DNA, 2076 bp, synthetic construct
  misc_feature 1..2076: note = Description of Artificial Sequence: Synthetic coding sequence
  source 1..2076: mol_type = other DNA
atggccccttttccagaggaagtggatgtgttcacagccccacactggaggatgaagcagctggtgggtctctactgcgacaagctgagtaagacaaattttagcaacaacaacgattttcgcgctcttctacagagtctatatgcaacatttaaggagtttaagatgcacgagcaaattgaaaatgaatacattataggccttttgcagcagcggagccagacaatttataacgtgcactcggacaataagctgtccgaaatgttatcattgttcgaaaaaggactgaagaatgtaaagaacgagtatgaacaactgaattacgctaaacaacttaaagagcggttggaggcttttactcgagacttccttccacatatgaaggaagaggaagaagtgtttcagcctatgctgatggagtatttcacttacgaagaacttaaagatattaaaaagaaagtgattgcgcaacattgtagccagaaggatacagccgagctcctgcgagggctctccctgtggaatcatgccgaggagagacagaagttcttcaagtactccgtagacgagaagagtgacaaagaagccgaagtgtccgagcattcgacaggtattacccatcttccccctgaagtaatgctgtccatattcagttaccttaacccccaggaactgtgtcgatgcagccaggtctcaatgaagtggtcccagcttaccaagaccgggtcactctggaaacatttatacccagtgcactgggcacgtggagattggtactctggtccggcaacagaactggatacagagccggatgacgagtgggtgaagaatcggaaggacgaaagccgtgcctttcacgaatgggacgaagacgccgacatcgatgagagcgaggagtctgccgaagagtccattgccatcagtattgcccagatggagaagcgccttcttcacgggttaatacacaacgtcctgccttatgtgggtacatctgtgaagaccctcgtactagcatactcttcagcagtttcctccaaaatggtccgacagattctcgaattgtgccctaatctggaacacttagacctgactcagactgacatcagtgatagtgccttcgactcctggagttggttgggctgctgccaaagcctccggcacctggacctctccggttgtgaaaagattaccgatgtcgccttagaaaaaatttcgagagccctgggaatcctgacatcacaccagtctggtttcctgaaaacttcaacttcaaagatcacgagtaccgcttggaagaataaggatataactatgcaaagtaccaaacagtatgcttgtctccatgacctcactaataaaggcattggtgaggagatagacaatgaacacccttggaccaaaccagtctccagcgagaacttcacttcaccatatgtgtggatgcttgatgccgaggacttggcggacattgaagataccgtggaatggcggcatcggaacgtggagtccctctgtgttatggaaaccgcaagtaactttagctgcagcacttcaggctgtttcagcaaagatatagttggtctccgcacctctgtttgctggcagcaacattgcgcctcccccgcttttgcctactgtgggcactccttttgttgtacagggaccgcgctgaggacaatgagcagcctgccggagagctctgccatgtgtcgtaaggccgcaaggacaaggctgccacggggaaaggacctcatctactttggcagcgagaagagcgatcaggaaacgggacgggtgctcctcttcctctcactctccggctgctaccaaatcactgatcacgggttgcgagtgctcacccttggaggcggattaccctacctggaacacctgaatctttcaggatgtcttacaattacgggagcagggttgcaggatctggtgtcggcttgcccctctctcaacgatgaatatttctactactgtgacaatattaacgggcctcacgccgacacagcttccgggtgccagaacctgcaatgcggatttagagcctgttgcagatctggggagtag

SEQ ID NO: 222953 - DNA, 1698 bp, synthetic construct
  misc_feature 1..1698: note = Description of Artificial Sequence: Synthetic coding sequence
  source 1..1698: mol_type = other DNA
atgaaagaggaggaagaggtatttcagcccatgctgatggaatattttacttacgaagagcttaaagatatcaagaagaaagtcatcgctcagcactgctcgcagaaggacacagcggaactgctccggggtctcagcctctggaaccatgcggaagagaggcagaagttcttcaaatattcagtggacgagaagtccgataaggaagccgaggttagcgaacattccactggaattacgcacctgccgcctgaagtaatgttgtctattttttcttacctgaacccacaagagctatgccggtgcagccaggtctcaatgaagtggtcccagcttacaaagactggaagcctctggaagcatctgtatcctgtgcactgggccaggggcgactggtactctgggcctgcaaccgaattagatacagaaccagatgacgagtgggttaagaatagaaaagacgaatcaagagcatttcatgaatgggacgaagacgccgatattgacgaaagcgaggaaagcgcagaagaatctatcgcgatctctatcgcgcagatggagaagcggctcctccatggtctgatccataacgttttgccatacgtcggtacctccgtcaaaacattagtgctggcatacagcagcgccgtttccagcaaaatggtgagacagattttggaactgtgcccaaatcttgagcacctggacctgacccagaccgatataagtgactccgctttcgatagttggtcttggcttggctgttgccagagccttcggcacctggacttgtccggctgtgaaaagatcacggatgtagcccttgaaaaaattagccgcgctttgggcatccttacatcccaccagagcggatttttaaaaacttccacaagcaaaataacaagtacagcttggaagaacaaggatattactatgcagtcaaccaaacaatacgcttgcttgcacgatctaaccaataagggcatcggcgaagaaatcgacaatgagcacccttggaccaaaccagtcagtagcgaaaatttcacctctccatacgtgtggatgctagatgcggaagacttggcagacatcgaagatacggtggagtggcgccacaggaacgtagaatccctgtgtgtgatggagacagcctctaacttctcttgtagtacgtccgggtgtttttccaaggatattgtgggtctcagaacttccgtgtgttggcaacagcactgcgcgagccctgcattcgcttattgtggccattctttctgctgcactggcaccgcactgcgcactatgagctcactgcctgagagcagtgccatgtgcaggaaagccgctcgcactcgactgccgagaggtaaagacctcatttacttcggttccgagaaatcagaccaggaaactgggagggtgctgttattcctgagcctgtcggggtgctaccagataaccgaccacggtctgcgcgttttgaccttgggaggaggcctgccatatctagaacacctgaatctgtccgggtgcctcacgatcactggcgcagggctccaggatctggtcagtgcctgcccgagcctcaatgatgaatacttttactattgtgacaacatcaacgggccacatgcagatactgcaagcggctgccaaaacctccagtgcggcttccgcgcttgctgccggagcggcgagtag

SEQ ID NO: 222954 - DNA, 2025 bp, synthetic construct
  misc_feature 1..2025: note = Description of Artificial Sequence: Synthetic coding sequence
  source 1..2025: mol_type = other DNA
atggccccatttccagaagaggtcgacgtattcacggctcctcactggcggatgaaacagttggtggggctttattgcgacaagtctctgtatgcaacctttaaagagttcaagatgcacgaacagatcgagaatgagtacatcattggactgctgcagcagcgttcccagaccatctataacgtgcactctgacaataagttgagcgaaatgctgagcttattcgagaagggactgaaaaacgtgaaaaacgagtatgaacagctaaattacgctaaacaactgaaggaacgtttggaggcctttacgagggactttttgccacatatgaaagaggaagaagaagtcttccagccgatgctgatggagtactttacttatgaagagcttaaggacatcaagaaaaaggtgattgcacaacactgcagccagaaggacaccgccgagctgctgagaggtctgagcctgtggaaccatgccgaggagcgccagaagttctttaaatatagtgtggacgaaaagtccgataaagaagccgaggtgtcagagcattcaactgggataacgcacctcccacctgaggtcatgctctcaatctttagttacctgaacccccaggaattatgtaggtgcagtcaggtgtcaatgaaatggtcccagctgaccaaaacgggatccttgtggaagcacctctaccccgttcactgggctagaggggattggtactcgggtcccgctaccgaacttgatacagagcctgacgatgagtgggtgaaaaatcggaaggacgaatcgcgagcgtttcacgagtgggacgaggatgcagacattgacgagagcgaggagagtgccgaggagagtatcgctatctctatcgcacagatggaaaagcgactgctgcacggactgatccacaacgtgctcccgtacgtgggaacgtctgtcaaaacccttgtcctcgcatactccagtgccgtttctagtaagatggtcagacagatcttggaactctgtccgaaccttgagcacctggacctgacacaaacagatatctctgattctgccttcgattcctggtcatggctggggtgttgccagtcgctcagacatttggacctgtccggctgcgaaaagataacagacgtcgccctggagaagatctccagggccctggggatcctgaccagccatcagagtggattcctcaagactagtacttccaagatcacatccaccgcttggaagaataaggacattacaatgcagtccacaaaacagtatgcatgtcttcacgacctgacaaacaaggggatcggagaggaaatcgataacgagcacccctggactaaaccagtgtcatcagaaaactttacaagtccctacgtgtggatgctcgacgcagaggacctcgccgacatcgaagatactgtagaatggcggcataggaatgtcgaaagcctttgtgtgatggagacagcatctaattttagttgttcaacctccgggtgtttctcaaaagatatagttggtctgcggacgagtgtgtgctggcaacagcactgtgcctctccagcctttgcctattgcggacactccttttgttgtacgggcacagctttaaggactatgtccagtctacctgagtctagcgcaatgtgccggaaagccgctcggactcggttaccacgcggtaaagacctgatctattttggatcagaaaaaagcgatcaggaaaccggccgtgtactcctcttcttgagcttgagtggctgctaccagataacagatcatggcctccgcgtcctgacactggggggagggctcccatatcttgagcacctcaacctgtccggatgcctgacaatcacgggggcaggattgcaggacttggtgtctgcgtgtcccagcctcaacgatgaatacttttactattgtgataatattaacggaccgcacgctgataccgccagcggatgccagaatctccagtgtggcttccgggcttgttgtagatcaggcgagtag

SEQ ID NO: 222955 - DNA, 1440 bp, synthetic construct
  misc_feature 1..1440: note = Description of Artificial Sequence: Synthetic coding sequence
  source 1..1440: mol_type = other DNA
gggaaggggtcctcgtctatctcttctgatgtgtcctcgtcaaccgatcatactccaacaaaagctcagaagaatgtggccacctccgaagattctgacctttccatgagaactctgagcacacctagtcctgctctcatatgcccacccaatttgccgggatttcagaatggcagaggatccagcactagctccagttcaatcacaggcgaaactgtggctatggtacatagtcccccacctactagactcacccaccccctgatccggctcgcttccagacctcaaaaggagcaagccagtatcgatcggctcccggatcactctatggtacagatttttagttttcttcctactaatcaattgtgccggtgcgcgagagtgtgccggagatggtacaatctggcctgggatcctcggttgtggagaaccatccgcctcactggagaaactattaatgtcgacagggctctgaaggtgctaaccagacggctttgccaggacacacccaatgtatgtctgatgctcgaaactgtgaccgtcagtggatgccggagactgaccgaccggggattgtataccattgcacagtgctgcccagaactgagacggttagaagtgtccgggtgctataacatttctaacgaagctgtcttcgatgtggtgtcactgtgccctaatctggagcacctggacgtctcaggttgctctaaagtcacctgtatttccctgacgcgtgaggcctccatcaaactgagccccctccacggcaaacaaatttcgatcagataccttgatatgacagattgtttcgtgctcgaagacgagggattacatacaatcgccgctcactgtacgcagctgacacacttgtatttgcggaggtgtgtccgacttaccgatgagggtttacgctacttggttatttactgtgcatccatcaaggagctgagtgtcagtgactgtagattcgtgagcgatttcgggttgagggagatcgctaaactcgagagtcggctaagatatttgtcgatagcccattgtggacgagtgacggacgtgggtatcaggtatgttgcaaagtattgttccaaactccggtatctcaacgctaggggttgtgaggggattaccgaccatggtgtagagtacctagccaagaattgcacgaaattgaaatcactggacatcggtaagtgtccgctggtcagcgatacaggtctagaatgccttgctctgaactgtttcaatctgaagagactgtctctgaaatcctgcgagagcattactggccaggggttacaaatcgtggccgctaactgtttcgatctccagacccttaatgtacaggattgtgaagtttcagtggaagccctacggtttgtgaagcgccactgcaaaagatgtgttatcgaacatacaaatcccgcatttttctag

SEQ ID NO: 222956 - DNA, 1476 bp, synthetic construct
  misc_feature 1..1476: note = Description of Artificial Sequence: Synthetic coding sequence
  source 1..1476: mol_type = other DNA
atgggtgcaaataatggcaaacaatacggtagcgaagggaagggctccagctcgatcagctccgatgtgagtagcagcacagaccatactcccaccaaggctcaaaagaatgttgcaacgtccgaggactccgacttatccatgcgcacattgtccacacccagtccagctctgatctgtccgcctaatttacctggattccagaatggtaggggctcatcaacatccagttcatccatcaccggcgagacagttgcaatggtgcactctccccctcccacaagattaacccacccgctaattaggctcgcttctaggccacagaaggagcaagcaagtattgataggctccctgatcattctatggtgcagatcttctctttcctcccaaccaatcagctgtgtcgttgcgccagagtttgtagacgttggtataatctggcatgggatcctcgactctggcggaccattcgccttactggggaaactatcaacgtggatcgtgctctgaaagtgctaacaaggcgactgtgtcaggacacccctaatgtctgcttgatgctcgagactgttaccgttagtggttgtcgcaggttaaccgatagggggctatataccattgcacagtgctgtcctgagctgcgtagacttgaagtgagtggctgttataatatttccaatgaggcggtatttgacgttgtgtctctctgccccaaccttgaacatcttgacgtgagtggttgttcgaaggtgacatgtatctcactgacaagagaggcctctattaagctttcacccctacacggcaagcagatcagcatccgttacttggacatgaccgactgctttgtgctggaggacgagggcctgcataccatcgccgctcattgcacacaactgacacatctgtacctccgtcggtgtgtacgccttacggacgaaggtttgcgctacttggtgatctactgcgcctccattaaagagctctccgtaagcgattgtcgcttcgtttccgattttgggcttagagaaattgctaagctagaatcccgcctgcgatacctgagcatcgcacattgtggaagggtgaccgacgtgggaatcagatacgtagccaaatactgctcaaaactgcggtatttgaatgcacgtggatgcgaagggatcacagatcacggagtggagtatctagcaaaaaactgcacaaagctgaaatccctcgatatcggaaaatgccctctggtgtcagacaccgggctagaatgtttggcgctgaattgttttaatcttaagcggctcagtctcaaatcctgcgagtctataactggtcaaggactccagattgtcgccgcaaattgtttcgatctgcagacgcttaatgtgcaggattgtgaggtatctgtcgaggcgttaagattcgtcaaaagacactgtaagaggtgtgtgattgaacacacaaatcctgcattcttttag

SEQ ID NO: 222957 - DNA, 3000 bp, synthetic construct
  misc_feature 1..3000: note = Description of Artificial Sequence: Synthetic coding sequence
  source 1..3000: mol_type = other DNA
atggaaaacctagagtccaggttgaagaatgccccatatttcagatgtgaaaaaggcactgacagcatcccactttgtcgaaagtgcgagacatgtgttctggcatggaaaatcttcagcacaaaggagtggttttgcaggatcaacgacatcagtcagagaagattcctggttggcatcttaaaacaattaaactccttgtacctactccattactttcagaatatcttgcagactacacaagggaaggatttcatctataatcggagcagaattaatctgtccaaaaaggagggcaaagtggtgaagtcatccctgaaccagatgcttgacaaaacagtcgagcaaaaaatgaaggagatactgtactggttcgctaacagcacacagtggaccaaagctaattacaccctcctcttgcttcaaatgtgtaatcccaagctgcttctcaccgccgctaacgtcatcagggtcctgtttctgcgggaggagaataacatttcaggcctgaaccaggatattacagatgtgtgcttttcccctgaaaaagaccacagtagcaagtccgccacgtctcaagtctactggaccgccaagacccaacatacgtcacttcctctgagcaaggccccagagaatgagcacttgttaggagcagcatctaaccccgaagaaccgtggcgaaactccttaaggtgcatatcggagatgaatcgactcttcagcggcaaaggagatataaccaaacccggatacgacccatgcaacctcttggtcgacttggacgacattagagatctcagctccggattttcaaagtaccgggattttatccgctatctgcccatccaccttagtaaatacatcctacgcatgctggatagacacactctgaataagtgcgcctccgtttcccagcactgggctgcaatggcacaacaggtgaagatggatcttagcgcgcacgggttcatccaaaaccaaatcacatttctccagggcagctatacaagaggaattgacccaaactacgctaataaggtgagtatccctgtgccgaagatggtcgacgacgggaaaagcatgagggttaagcaccccaagtggaagcttcgtaccaagaatgaatacaacctgtggacagcttatcagaatgaggagacacaacaggttctgattgaggagaggaatgttttctgcggtacctataatgtgcgtatactgtctgatacgtgggaccagaatagagtgattcactacagtggcggagacctcattgccgtgtccagtaatagaaaaattcatctgctagacatcattcaggttaaggcaataccggtggagttccgcggtcatgcgggatctgtacgagcgctgttcctttgcgaggaagaaaatttcctgctttctgggtcctacgacctctcgatcagatactgggatctcaagagcggagtgtgcacccggattttcggagggcaccagggtactattacatgtatggatctgtgcaaaaatcggctggtgtctggcggtcgtgactgccaggtgaaggtgtgggacgttgacacagggaagtgtctgaaaacattccgccataaagaccccatcctggctacgcggattaatgatacttacatcgtgtcgtcttgcgagagggggttagtgaaggtgtggcacattgcaatggcacagttagtgaagacgttaagtgggcatgaaggtgcggtcaaatgtctgttcttcgatcagtggcacctcctctccgggagcactgacggcttggtgatggcttggagtatggtgggcaaatatgaaaggtgcctcatggcctttaaacatccaaagatggtcgtgaacacagaatctaacgtgctaatgtttcagtttgagcacattaagtggcagtacgctgtagaaaaaactaaacagaaaaaaaacaaagagaaggaggaggagaaggaagagaatagtcttatggagatcctgagtaaatgcaatatccaggtccatagccccagagagagcgtgtctagcaagcagactgtcatccaggagctgctgcccggaaagccccctaaatctagggtcctcttgaaaccagctaagttttccagcgccgttcttatcgaagagctacaatcacaagggaaatccaagtcacctcgacgcgacgcggatgatgtagaaaaagctcagaaacaaggacaactcgaaacacctgggaaactgccttcgcacccgaaaaaaaaaagctggaagatccctatgtcccccgatcaatttctgctgacagtttccgcacttcagcatgctcacaattctggtgagtttgcctacccttgtcggcctcagacggagattaccgacgtctggggcccttctatcagttatccgagaaaagtgcttaatttcaagggcaaatctatccagcgagcggtcgatcggctgcgtctctctaacccacctattgatgtcaaacggaccagcatcccacttgagattcagaagctccagcccaaccttaaaatctcccttcatagtcccagagtgcaatctacaatcccacagcctatgattattcggtcccggttttctggttcactcaagggcggtgatcaggttacttccagcatcgagcgagcagtttgctccacgggcccacttacatcaatgcaggtgataaagcccaatcggatgctggcgccacaggtcggaacagccaccctcagcctaaagaaagaaagacccaggatctataccgccctggacccctttagagtgaatacggagttcgtccttttgacggtaaaggaggaaaaagaacaccaggaagcaaagatgaaggagtaccaggcaagagagtccacaggagtcgttgacccgggaaaagtgtctaaggcagcttggatccggaaaataaaggggttaccaatcgataatttcactaagcagggcaagacagctgcacccgaactgggccaaaatgttttcatatag

SEQ ID NO: 222958 - DNA, 3186 bp, synthetic construct
  misc_feature 1..3186: note = Description of Artificial Sequence: Synthetic coding sequence
  source 1..3186: mol_type = other DNA
atggagaatctcgagtcacggctgaagaatgctccttattttcgttgcgaaaaggggacagatagtatccccctgtgtagaaagtgtgagacctgcgtgcttgcttggaagatattcagtacgaaggaatggttctgccggatcaatgacatctcacagagaagatttctggtggggatactcaagcagctgaattcattgtaccttctgcactacttccagaatattttgcagaccacgcagggcaaagactttatttataatagaagtcggattaacttgagcaagaaggagggtaaggttgtgaagtcttctctgaatcagatgctggataaaaccgtagagcagaaaatgaaagaaattctatactggtttgcgaattctactcagtggactaaggcaaactacaccctactgctgctgcagatgtgcaaccccaaattgcttctgactgcggctaatgttatacgggtgctttttctgcgtgaagagaacaacataagcggtttgaaccaagatattacagatgtctgtttcagccccgaaaaggatcactccagcaaatctgcaacatcgcaggtgtattggactgctaaaacgcagcatacatcccttcccctgagtaaagcccctgaaaacgagcaccttctgggcgcagcaagcaacccagaggaaccttggagaaactcactgcgatgcatatcagagatgaacaggctgttttccggcaagggggacattactaagcctggctacgacccctgtaacctcctggtcgatctcgacgacatccgcgacctcagttctggattttcaaagtacagagactttatcaggtacctccctatccatctctccaagtacatcttgagcatgcttggatgcatgcgtggttttcctcgacacctcccgtcatggccctcaagtggcgttagcggatctatttttttcttccccggtatgctggaccgccacacgctcaacaagtgcgcaagtgtttcacagcactgggccgcaatggcccagcaagtcaaaatggatctgagtgcgcatggcttcattcagaaccaaatcaccttcttacagggaagctacaccaggggtatcgatccaaattatgctaataaagtgtccatcccagtacctaaaatggtggatgacggaaagagtatgcgggttaagcacccgaagtggaagctccgtactaagaacgagtacaacctgtggacagcttatcaaaacgaagaaacacagcaagtgctcatagaggagcgcaacgtcttttgcggcacgtataacgtgaggattctgtcagacacttgggatcaaaaccgagtcattcattactctggcggtgacttgatcgcagtatctagcaacagaaaaatccacctgcttgatatcatacaggtaaaagctatccccgtggaatttcgcggtcatgccggatctgtgcgagcactatttctgtgcgaggaggaaaattttttgctaagtgggagctacgatctctccattaggtattgggacctgaagtcgggagtatgtactcgaatcttcgggggtcaccaaggtaccatcacatgcatggacctctgcaaaaaccgtctggtctccggcggtcgagattgccaggttaaggtatgggatgtcgatactggaaagtgtttgaagacatttcgacacaaagatccaattctggcaacaaggatcaacgacacttacatcgtgagtagttgtgagaggggcctggtgaaagtgtggcacattgccatggctcaactcgtcaagactttgtctggccatgaaggcgctgtgaaatgcttgttcttcgaccagtggcatctcctttctggatccaccgacgggctggttatggcatggagcatggtaggaaagtacgagcggtgtctgatggcttttaagcaccctaaagaagtgctggatgtgagcctcctgtttcttcgagtcatctctgcatgtgccgatggcaagatcaggatatacaattttttgaatggtaattgcatgaaagtgctaaaagcaaacggtcggggagatccagtcctgagctttttcatacagggaaatcggatggtggtgaacacagagagcaatgtgctcatgtttcagttcgaacacatcaagtggcaatacgccgtcgaaaagaccaaacagaagaaaaataaagagaaggaggaggagaaggaggaaaactcattaatggaaatcctgagcaagtgtaacattcaagtgcatagtccgagagaatccgttagctctaaacaaacggtcatccaggaactgcttccgggtaaaccacctaaatcacgcgtattacttaaacccgctaaatttagtagtgacgacgtggagaaagcgcagaaacagggccagctggagactccaggaaaactgccctcgcaccccaaaaaaaagagctggaagattccaatgagtcctgaccaatttttgctgacagtgagcgcactgcaacacgcacataactcgggagagtttgcttacccgtgtcgacctcagaccgagatcacagacgtgtggggaccttcaataagttatccacgcaaggttctcaatttcaaggggaaaagcatccagcgagcagtcgaccggctgcgccttagtaatcccccaatagacgtgaagcgcacaagcatccctctggaaatccagaagctgcagcctaacctgaaaatttcactgcacagtcccagagtgcagagcactatcccacagccaatgattatccggtcccggttcagcgggtccctgaagggcggagatcaggtgaccagcagtatagaaagagccgtatgcagtactggcccattgacgtccatgcaagtgataaagccgaacaggatgctggcccctcaggtgggaacggctactctctcacttaaaaaggagcgtccaaggatctatactgcactggacccgttcagggtcaacacggaattcgtattactaactgtgaaggaagaaaaagaacaccaggaggccaaaatgaaagaataccaggctcgcgagtctactggcgtggttgacccagggaaagtgtctaaggccgcttggattaggaagatcaaaggactgcccatagacaattttacaaaacaggggaagacggccgcacccgaactgggacagaatgtgtttatatag

SEQ ID NO: 222959 - DNA, 3159 bp, synthetic construct
  misc_feature 1..3159: note = Description of Artificial Sequence: Synthetic coding sequence
  source 1..3159: mol_type = other DNA
atggagaatttggagtctcggctgaaaaatgcaccttattttcgatgcgagaagggcaccgattctattccgctttgtaggaagtgcgaaacttgcgtgctcgcatggaagatcttttctaccaaagagtggttctgccggatcaacgacatttcccaaaggaggttcctggtgggaatcctcaagcagctgaacagcctgtatttactgcactactttcagaatattctccagacgactcaggggaaagactttatttataatagatcccgtattaatctgtccaaaaaggagggcaaggtcgtgaaaagttcattgaatcaaatgctggacaagaccgtggaacagaagatgaaggaaattctgtattggtttgccaatagcactcaatggaccaaagctaattacaccctgcttcttctccagatgtgcaacccaaaactgctgctgacagccgctaatgtgatcagggtactctttctgcgggaggagaacaatatatccggcctgaatcaggatataaccgatgtgtgcttttcacccgagaaagatcactcatccaaatcagccacaagtcaggtgtactggaccgccaagacgcagcatacctccctgccactgagcaaggctccagaaaacgaacatctcttgggtgccgcatccaaccccgaagagccatggagaaattcactgagatgcattagcgagatgaaccgactgtttagcggaaaaggggatattacaaagccgggttacgatccatgtaatttactggtggatttggacgatattcgcgatctcagctccggattttccaaatatcgggactttatccgctacctccctatccatttgagcaagtacatcttgcgaatgctggatcggcacacactgaacaaatgcgcttcagtctcacaacactgggcagctatggcccagcaagtcaaaatggacctctcagcacacggattcattcagaaccaaataacgttccttcagggatcctacaccaggggaatcgacccgaactatgccaataaagttagtatccctgttccaaaaatggtggatgacggcaagtcaatgcgcgttaagcatcccaagtggaagctgcgcacgaagaatgagtataacctgtggaccgcttaccaaaatgaggaaacccagcaggtattaatcgaagaacgcaacgtgttttgcgggacatacaacgttcgaatcctgtctgatacgtgggaccagaatcgcgtgatccactactcaggcggagacctgattgctgttagctcaaatcgtaagattcacctgctcgatattattcaggtgaaggcaatccccgttgagttccggggtcacgcaggcagtgtccgcgctttgtttctgtgtgaggaggagaatttcctcttaagcggtagttacgatctgtcaataaggtactgggatctgaaaagcggcgtatgtaccagaatcttcggaggccatcaggggactatcacatgtatggatctgtgcaaaaaccggttggtctccggcggaagggattgccaggtgaaggtgtgggacgtggacaccgggaaatgccttaagaccttccgtcacaaagatcccattctggcaacacgaatcaacgatacatacattgtctcatcttgcgaacgcggtttagtaaaggtctggcacatagcaatggctcagctggtgaaaactctctccggacatgagggcgcagtgaaatgcctcttctttgaccagtggcacttgctgtcaggcagcaccgatgggctcgttatggcctggagcatggtgggtaagtacgagcggtgtcttatggcattcaagcacccgaaagaagtgctggacgtctctctgctgtttttgcgagtcattagtgcttgcgccgatggtaaaattcggatctataacttcctcaacggaaattgtatgaaagttctcaaagccaatggccgtggtgatcccgtgctgtccttttttatccagggcaatagaatggtggtgaataccgagtcaaacgtcctgatgttccagttcgagcacataaaatggcaatatgctgtagaaaagaccaagcaaaagaagaataaagaaaaagaagaagaaaaagaggagaatagcctgatggaaatcctgtccaagtgcaacatacaggtacatagtcctcgcgaaagtgtgtcatccaagcagacagtgattcaggaactcctaccgggaaaaccacctaaatcacgcgtcttgttgaagcccgctaaattctcctcagccgttctgatcgaggaactgcaaagccagggcaaatctaaaagccctcgccgagacgccgacgatgtagagaaggcacagaaacagggacagctggagacacccggtaaactgccttcccacccgaagaaaaagagttggaagatacccatgtctcctgaccagttcctccttactgtatccgcattgcaacatgcacacaattccggggaattcgcctacccatgtaggccacaaactgaaattaccgacgtgtggggtccctccatctcttacccgaggaaggtcctgaatttcaagggaaagagcatccagcgagccgtggatcggctgaggttaagtaaccccccaatcgatgttaagagaacctctatacccctcgagatccagaaactccagcctaatttgaaaatttccttgcactctcctcgtgtacagtccacaattccccagcccatgataatccgctcaagattttccggctccctcaagggcggagatcaagtaacaagcagtatcgagcgggcagtttgcagcacagggccattgacatctatgcaagttatcaagcctaacagaatgttggcaccccaagttggcacagccaccctgagtcttaaaaaagagcgcccacgtatttacacagctttggatccttttagagtcaatacagagtttgtccttttgaccgtcaaagaggagaaagaacaccaggaggccaaaatgaaggagtatcaggcacgcgagtccacaggagtggttgatcctgggaaagtatccaaggccgcttggattaggaagattaaaggactcccaattgataatttcactaagcaggggaagaccgctgctcccgaactgggccagaatgtttttatctag

SEQ ID NO: 222960 - DNA, 3156 bp, synthetic construct
  misc_feature 1..3156: note = Description of Artificial Sequence: Synthetic coding sequence
  source 1..3156: mol_type = other DNA
atggagaacctggagtcacgcctgaaaaacgctccgtacttccgctgcgagaaaggaacagacagtatccccctctgcagaaagtgtgagacttgcgtgctggcctggaagatcttttccacaaaagaatggttctgtagaattaacgatatctcccagcggaggtttctcgtcggtattctcaaacagctgaattcactgtatttgctgcattattttcagaacattctgcagaccacccagggcaaggactttatctataaccgcagtcggattaacctgagcaagaaggagggtaaagtggttaaatcctccttgaatcagatgctggacaagacagttgagcagaagatgaaggaaatcttatactggttcgctaatagcactcaatggacaaaggccaattacacgctgctgctcctgcagatgtgcaaccctaagctgcttttaactgctgccaatgtcataagggtgttgttccttcgggaggaaaacaacatcagtggcctaaatcaggatataactgatgtctgcttttccccagagaaagaccacagctctaagagcgctacctctcaggtttactggacagctaaaactcagcatacaagcctcccattgtccaaggcacccgagaatgaacatcttctgggtgcagcttccaaccctgaagagccctggcgtaattcgctgaggtgcatttcagaaatgaaccgcttgttttctgggaaaggtgacataactaaaccgggatacgatccatgcaacttactggtagacttagacgatatcagagacctctcttccgggttcagcaagtaccgggacttcatacggtaccttccaatccatctcagcaaatacattctccggatgttagaccgacacactctaaacaagtgtgcctctgtctcacagcattgggctgccatggcgcagcaagtcaaaatggacctgagtgcccatggcttcattcagaatcagattacattcctacagggatcttacactcggggaatcgatccaaattatgcaaacaaggtgagcatccccgtgcctaagatggtcgacgacggcaagagcatgagagtgaagcatcccaagtggaaacttcgcacaaagaacgagtacaacctgtggaccgcctatcaaaatgaggaaacccagcaggttctgattgaagagagaaatgtgttctgcggtacttacaacgttcgtattctatccgatacctgggaccagaatcgggtgattcactatagcggcggagacctgatcgcagtctcctctaaccgtaaaattcacctcctggacatcatccaggtaaaagcaattcccgttgagtttcgaggccatgccggttccgtccgagctctgtttctgtgcgaagaagaaaactttctgcttagcgggagctacgacctatcgatccggtattgggatctcaagtcaggcgtctgtactcgcattttcggagggcatcagggaaccattacctgcatggacctgtgtaaaaacaggctggtgtcggggggaagggattgccaggtaaaggtttgggacgttgacaccgggaagtgcctgaagacctttcggcataaagaccctatactcgcaacgaggatcaacgacacttacattgtgtctagctgtgagcgcggactggtgaaggtgtggcatatcgcgatggcccagctggttaaaaccctgtcaggccacgaaggcgcagttaagtgcctgtttttcgaccagtggcacttactctctggaagtacagacggcctcgtgatggcctggagcatggtaggcaaatacgagaggtgccttatggcctttaaacaccctaaggaggtcctggacgtgagcctcctattcttgcgggtaatcagcgcatgtgcagatggaaagattaggatctacaattttttaaacggtaactgcatgaaggtattgaaggccaatgggagaggagatcctgttctcagcttttttattcaggggaatcggatggtggtgaatacagaatccaacgtgctcatgttccagtttgaacacatcaagtggcagtacgccgttgaaaaaacaaaacagaaaaagaataaggaaaaagaggaagagaaggaagagaactcactgatggagatcctgtccaaatgtaacattcaagtgcatagtcctagggagtcagtttcatccaaacaaacggtgatccaggagctcctccctggaaagccacctaaatcgcgggtcctgctcaagcccgctaagttttcttccgcagtacttattgaggagctgcaatctcagggaaagtctaagagccccaggcgggacgacgatgtggaaaaagcacaaaaacagggccaactggaaacccctggcaaacttccatcccaccctaagaagaaatcgtggaagattcccatgtcaccagatcaattcctgttaacagtgtcagcactgcaacatgcacacaactccggagaatttgcttacccttgccgtcctcagactgagattaccgatgtgtggggccctagcatcagctatccccgaaaggttctcaatttcaagggaaaatcgatccagcgagcggttgatcggttacggttgagcaaccctcccattgacgtgaagagaaccagcattcccttggagatacagaaactgcagccaaatctgaaaatttccctgcattcacctagagtccagtcaactatccctcagcctatgatcattcgatcacggttttcaggctctttgaaaggcggtgaccaggtgaccagttctattgaacgcgctgtgtgctccactgggcctcttacaagcatgcaggtcattaaaccaaaccgcatgctcgcacctcaagtaggcacagcgactctgtctctcaaaaaggaaaggcccaggatctacaccgccctggacccgttcagagtgaacacagagtttgtactgctcacagtgaaggaagagaaagagcaccaagaggctaagatgaaagaatatcaggctcgtgaatccacaggggtggtggacccgggaaaggtgagcaaagcagcgtggatccgcaaaatcaaaggactgccgattgacaatttcaccaaacagggaaagactgccgctcccgaactggggcagaatgtttttatatag

SEQ ID NO: 222961 - DNA, 1629 bp, synthetic construct
  misc_feature 1..1629: note = Description of Artificial Sequence: Synthetic coding sequence
  source 1..1629: mol_type = other DNA
atggagccggatagcgtgatcgaagacaaaacgatcgaacttatgtgcagcgttccaaggagcctgtggttaggatgcgctaatctggttgagagcatgtgcgccttgtcttgcctccagagtatgccctccgtgcgctgtttgcaaatcagtaacggtacttcgtcggtaatagtctctcggaagagaccgtcagagggcaattatcagaaggaaaaggacctgtgtatcaaatactttgatcagtggtcagagtccgatcaggtagaattcgtggaacacctcatatctagaatgtgtcactatcagcatggacacattaactcatatctgaagcctatgctacagcgtgattttatcaccgccctgccagagcaggggctggaccacatcgcagagaatatcctgtcctacctcgacgctagaagtctttgcgctgcagaacttgtttgtaaagagtggcaacgcgttatctcggaaggcatgctatggaagaagctgatcgaacgtatggttcggaccgaccccctgtggaaggggctctccgaaaggagagggtgggatcaatacttgtttaaaaatcgccctaccgacggccctcctaattcattttatagaagtctctaccctaaaattatccaggatattgagacaattgagagtaactggcgatgtggacgacacaacctccagcgtatccagtgcaggagtgaaaattcgaaaggcgtctattgcctccagtatgacgacgagaagattataagcggtctgagagacaacagtatcaagatttgggacaagacatccctggagtgcctcaaggtgctgaccgggcacacagggtcggtgctttgtctgcaatatgacgagcgagtgattgttaccggatctagtgactcaacagtaagagtctgggatgtgaacaccggagaagtcttgaatacattgatccatcataacgaagcggtattacacctgaggttctccaacggcctcatggtgacgtgttctaaggatagatccattgccgtgtgggacatggccagcgccactgacattactctccggagggttctggtggggcacagggccgctgtcaatgtggttgacttcgatgacaagtatatagtgtctgccagcggggacagaaccataaaggtttggagtacaagcacatgcgaatttgttagaaccctcaacgggcacaaaagaggcatcgcctgcctccagtatagggacaggcttgtcgtctcaggctccagcgacaatactatccgcctctgggatattgagtgcggggcatgtctccgagtcctcgagggacacgaagaactggtgaggtgcattcgcttcgacaacaagagaattgtgagcggggcatatgacggcaagataaaagtttgggacttacaggccgcactggaccctagggccccagcaagtaccctttgcctcagaacgctggtagagcactccggaagggtcttcaggctccaatttgacgaattccagattatatcttcttctcacgacgatacaatccttatatgggactttttaaacgtgcccccatccgcccaaaacgaaactcgatccccttccaggacatatacgtatatttctaggtag

SEQ ID NO: 222962 - DNA, 1590 bp, synthetic construct
  misc_feature 1..1590: note = Description of Artificial Sequence: Synthetic coding sequence
  source 1..1590: mol_type = other DNA
atggagcctgattccgtaatcgaggacaagacaattgagctgatgaatacatctgtaatggaggaccagaatgaagatgaatcccccaagaaaaataccctgtggcaaatctctaatggcacgagcagtgtgatcgtgtccaggaagaggcccagcgaaggtaactaccagaaggagaaggacctgtgtatcaaatattttgaccagtggtccgaatcagatcaggtggagttcgtagagcacctgatttcaaggatgtgtcattaccagcatggccatatcaattcttacctgaagcccatgcttcagcgtgacttcattactgccctacctgagcagggcctggaccatatcgctgagaacatcctgagttacctggacgcccgatccctttgcgccgcagagctggtgtgtaaagagtggcaaagggtgatttcggaaggcatgctctggaagaaattaatagaacgcatggtaagaacagatccactgtggaagggactgtcagagcggaggggctgggatcagtatttgtttaagaatcgccctacggatggcccacccaactctttttatcgtagtctgtatcccaaaataatacaggacatcgagactatcgaaagtaactggcgatgcggaaggcataatttgcagcggattcagtgtcgctcagaaaactctaaaggtgtttactgtctgcaatacgacgacgaaaagataataagtggcctgcgggacaattcgattaaaatctgggacaaaaccagcctggaatgcctgaaagtcctaactggccacaccggcagcgtgctatgccttcagtatgacgagagggtcatcgtcacaggaagctccgatagcaccgtgcgcgtatgggatgtaaacaccggggaggttctcaacacactgatccaccacaatgaggcagtgctgcatctgcggttttccaatggtctgatggtaacatgctccaaggaccggtccatcgccgtatgggacatggcctctgctaccgatattaccctgcggagagtactagtcggccatcgagccgctgttaatgtcgtcgactttgatgataagtatatagtgtctgcatccggagacagaacaattaaagtgtggagtacttctacgtgcgaattcgttcgaacattaaacggacataaacgaggcatagcatgcctgcagtacagagatcgcttggtggttagcggaagctctgataatacgatacgactgtgggacattgagtgtggcgcatgcctgagggtgctggaaggacacgaggaactggtcaggtgcattaggttcgacaataagaggatcgtgtccggggcatacgacggcaaaatcaaggtgtgggacttacaagcagctttggacccaagggcacctgcctctacactgtgccttagaactctggtagagcatagcgggagagtttttcgcctgcaatttgacgaattccagatcatcagcagttcccatgacgacacaatcttgatctgggacttcctcaacgtaccacctagtgcacagaacgagacacgcagtccttcccggacatacacgtacatctctcgctag

SEQ ID NO: 222963 - DNA, 1527 bp, synthetic construct
  misc_feature 1..1527: note = Description of Artificial Sequence: Synthetic coding sequence
  source 1..1527: mol_type = other DNA
atggaaccggattcagttattgaggacaagactattgagctgatgataagtaacggtacctcatccgtgattgtctctaggaaaaggccgagcgaggggaactaccagaaggagaaggacctctgtattaaatacttcgaccagtggagcgaatcagaccaggtggagttcgttgagcatctgatatctcgaatgtgccattatcaacatggtcatatcaactcataccttaaaccaatgctgcagcgagatttcattacagcacttcctgagcagggtctggatcatattgccgagaacatcctgtcttacctggacgcacgctcactgtgtgctgcagaactagtttgcaaggaatggcaaagagttatatctgaagggatgctgtggaagaagctcattgagcgcatggtgcgtacagatcccctctggaagggcctgtccgaaagacgtggctgggatcagtacctgttcaagaacaggccaacagacggcccacccaactctttctaccggagtctgtatccaaagattattcaggatatagaaactatcgaatcgaactggcggtgtgggaggcacaatcttcagagaatccagtgtcgcagcgaaaattctaaaggagtctattgtctgcagtatgatgatgagaaaattatttccggtctgagagataacagcattaagatatgggataaaacctctctggagtgcctcaaagtcctgacaggccatacagggagtgtgctctgcctgcagtacgacgagcgcgtgattgtcaccggaagcagtgactctactgtgagggtgtgggacgtgaatactggcgaggtgttgaacacactgattcaccataacgaggcagtgctgcatttacgcttctcaaatgggctgatggttacttgctccaaggatcggtccatcgcagtctgggatatggcatccgccacagatattacgctgcgtcgggtactggtagggcacagggcagctgtgaacgtggttgatttcgacgacaagtacattgtgtcagcatctggggatagaacaatcaaggtttggtctaccagcacttgcgaattcgtgaggaccctgaatggtcacaagcggggaattgcctgcttacagtaccgggacaggttagttgtgtccggaagctccgacaacaccattagactgtgggacatagagtgtggcgcttgcctgagagtgctagagggacacgaagaacttgtccggtgtataaggttcgacaacaaaaggatagtgtccggcgcatacgatggcaagattaaagtgtgggatctgcaggctgccctagacccacgtgcgcctgcttccaccctctgcctaagaaccctggtagaacatagcggacgggttttccgcctgcagttcgacgagttccagatcatctcgtccagccacgatgacaccatcctgatttgggatttcctgaacgtccctccaagtgctcagaacgagacccggagcccaagcaggacctacacgtatattagccggtag

SEQ ID NO: 222964 - DNA, 1533 bp, synthetic construct
  misc_feature 1..1533: note = Description of Artificial Sequence: Synthetic coding sequence
  source 1..1533: mol_type = other DNA
atggaagaccagaacgaagatgaaagtcctaaaaaaaacacactctggcagatctccaacggaacctcttcggtcatcgtgtcccgcaaaaggccctcagagggcaattaccagaaggagaaagacttgtgtattaagtactttgaccaatggtcagaatccgaccaggtcgaatttgtggaacacctgatcagtaggatgtgccactatcagcatggtcacatcaattcctacttaaagcctatgctgcagagagattttattacggcgctgcccgaacagggactagatcacatagctgagaatatcctttcctacctggatgcccgaagcttatgcgcagccgaactcgtgtgtaaggaatggcagcgagtaataagcgagggcatgctgtggaaaaaattaatcgagcgcatggtgcgcacggaccctctgtggaagggattgtcagaacggagaggctgggaccagtacctctttaagaacaggcctaccgacggcccacctaactcattctataggagcctctacccaaaaatcattcaggacatcgagactatcgagagcaactggagatgcgggaggcataatttgcagaggatacagtgtcggagcgaaaactcgaagggagtctattgcctgcaatatgacgacgagaagattatctccggtctcagggataactcgatcaagatttgggataagacaagccttgagtgtttgaaggttttaaccggacatactgggtctgtcttgtgcctacagtacgacgaaagggttattgtgacagggtccagtgacagcacagtgcgagtctgggacgtgaacactggagaagtcctcaacacattaattcatcacaacgaggccgtcctgcaccttcggttttctaatgggctcatggtgacctgcagcaaggatagaagcatcgcggtttgggacatggcgtcagcaactgatatcactctcaggcgggtcttagtcggtcatcgggcagctgtgaatgtggtcgattttgatgacaagtatatcgtgtcagcctctggagaccgtacaattaaagtgtggagcacttcaacatgcgaatttgttcgcactctaaatgggcacaagagaggaatcgcctgccttcaatatcgggatcgtctcgtggtctctggcagctccgacaataccatcaggctgtgggatatagaatgcggagcctgcctcagagtgctggaggggcacgaggagctcgtccgctgcattagattcgataacaagaggatcgtgagtggggcatacgacggaaagattaaagtttgggacctacaagctgctctggatcccagggcccctgcctcgacactctgtttacggactctggtggagcactccgggagagttttcaggctccagtttgacgaatttcagataatttcatcttcccacgatgacaccatcctgatctgggattttctgaatgtcccaccctccgcacagaatgaaactagatcacctagtcgaacttatacatacataagtaggtag

SEQ ID NO: 222965 - DNA, 1395 bp, synthetic construct
  misc_feature 1..1395: note = Description of Artificial Sequence: Synthetic coding sequence
  source 1..1395: mol_type = other DNA
atggagattcggttaccggacctggcactcaaacgaatcttcagcttcctcgacttgttcgggctgctccaggtgtcacaagtgaataaacactggaacaggatcgcggactctgattacctttggcgctcactgtcccttcagcggtgggactgttcaaattttaccaatcagcaccttggcacacacacgtggaagcagtttttccttcaccagaggcgaaaagagctgagactggccctcgcccagccccacaactttatctataaggtcactaagaacattgcttttgagactgagctggcttacctgagcggcaacaggctgaccgtcgatgagcaggagaaatcgataatttgtagcgtttcgccaaaacaagagctgtgtgcctgggacgtgcaggagggcacaatgatctggagtagtccggtgcaggagttccatttttccaacctagtcaccctcccccaaatgcatcttgccatcacgatggacagaaaaaagacaataaaagtctggaactgccaggaccgcgacgcattggcagtgttaccgatgcctcagccctgttattgtatggaggcttacctgactaaagacggcccattccttatggtgggtgacgcggcaggagacatctataccttcactcttccaggactgcgagacgtttcaaaggtcaccgcgttccaatatggcatcgtcctcctgcattgctccccagataaaaagtgggtatttgcatgtggaacatactccagaactcttcctcaggtctttcttacagaaagtttgcttaggcccagcgagggaagtgtgccactgtctaccttcctgccgcataaactgtgcgcctctgcatgttggacaccaaaagttaaaaacaggataacactgatgagccagtccagcactggaaagaagaccgaattcatcacttttgatttgaccactaaaaaaacgggtgggcagaccgtgatccaggcgtacgaaatagcctcatttcaagtggcagctcacctcaagtgtccaatatggatgggcgcatctgatgggtatatgattgtatttacaagtggcccatatctgctgctgttcagtataacgggatttcttcttcaacgattcgaggatcatcaagcagccattaataacttttgggtggatccatgctatgtgctaaccacctcagagaactctgtccacgtctatatgtgggaggaaggaggtagacacccttacctgcgatcttgttgtcatctggaaaacacctggcacgaccacaccactgacagttgtatttcctccgttatgtgcgacaatgctagcattgtgctgcgagtacggaaggttagtgatagctctatactggttatgtatagcctgaatacctag

SEQ ID NO: 222966 - DNA, 1092 bp, synthetic construct
  misc_feature 1..1092: note = Description of Artificial Sequence: Synthetic coding sequence
  source 1..1092: mol_type = other DNA
atgttggccctgcgcgacgagcctcattcccctgatagcagaagccaggcctttgaaaccgaactggcctacctttctgggaataggttgaccgtcgacgaacaagagaagtcgattatatgttccgtgtcccccaaacaagagttgtgtgcctgggacgtgcaggaaatgcacctggccattaccatggaccgcaagaagaccattaaagtctggaactgccaggacagggacgcccttgccgtacttcccatgccccagccatgctactgtatggaggcctatcttaccaaggacggaccatttctgatggttggagacgctgccggagacatctatacattcactctgcctggcctccgcgatgtgagcaaggtcacagcatttcagtacggcattgtgctcctgcattgcagccccgataagaagtgggtgttcgcatgtggaacatactctagaacccttccacaggttttcctgaccgagtcccttttgaggccctccgaaggttcagtccctctgagtactttcctaccgcacaaattatgtgctagcgcttgctggacgccgaaggtaaagaatcggataacactaatgagccagagctcaaccggcaagaagacagaattcattactttcgacctcacaacaaagaagacaggcggacagacagtcattcaggcctacgagatagcctctttccaggtggccgcacatctgaagtgccccatctggatgggagcatctgatggatacatgattgtcttcacctcgggcccttacctgcttctgtttagtatcaccggattcctgctgcagcggttcgaggatcaccaagcagccattaacaacttctgggtggacccttgctacgtcctgaccactagcgaaaattccgtgcatgtttatatgtgggaggaaggagggcgacacccttacctcaggtcatgttgccaccttgagaacacctggcatgatcataccacagattcatgtatttcgtccgtgatgtgcgacaacgcctctatcgtcctgagagtgcggaaggtctccgactcgagtattctggtcatgtatagcttaaacacttag

SEQ ID NO: 222967 - DNA, 1185 bp, synthetic construct
  misc_feature 1..1185: note = Description of Artificial Sequence: Synthetic coding sequence
  source 1..1185: mol_type = other DNA
atggagattcgactccctgacctggctctcaaaaggatcttctcttttttggatctgtttgggctgctgcaggttagtcaggtgaacaagcactggaaccgaattgctgactccgactatctttggaggagcctgtcactccagcggtgggattgtagtaatttcaccaatcagcacctaggaactcacacgtggaaacagttttttttacatcaaagacgtaaggaactccgcttggcgctggcccagccacataatttcatctacaaagtcactaaaaacatcgcttttgagaccgagctcgcctacctatctggaaacagactcaccgtggatgaacaggagaaatctatcatatgcagtgtcagtccgaaacaagagctttgtgcttgggatgtgcaggaggtgggcgacgccgctggcgatatttataccttcactctgcccggattacgggacgtctctaaggttacagcctttcagtacggcatagtgctgttacattgctctccagacaagaaatgggtgtttgcatgcggcacctactcacggactctccctcaggttttcctcaccgagtctctgctccggccttccgaggggagtgttcctctgagtaccttcctgcctcataagttgtgcgcttctgcctgctggacacctaaagtcaagaataggattacacttatgtcacaatctagcactggtaagaagaccgaattcatcaccttcgacctaactaccaagaaaactggcggacagacagtaattcaggcatatgaaatcgcatcatttcaggtagcggctcacctcaaatgccccatctggatgggtgcctcagatggttatatgattgtgtttacttccgggccttatcttctcttgttctccattacaggattcttgctacagcggtttgaggaccaccaggccgctattaataacttctgggtggacccatgttacgtgctgacgacatctgaaaactccgtccatgtgtacatgtgggaggaggggggacgtcatccctatttacgctcttgttgtcatctggaaaacacatggcacgaccacaccacggattcatgcatctcttctgttatgtgtgataatgcaagtattgtgctgcgggtgcggaaggttagcgacagttccatcctagtaatgtattctttgaacacctag

SEQ ID NO: 222968 - DNA, 1338 bp, synthetic construct
  misc_feature 1..1338: note = Description of Artificial Sequence: Synthetic coding sequence
  source 1..1338: mol_type = other DNA
atgtctccaactcaccagattcaggacccaaagcattggaaccggatcgcagactccgattacctgtggcggtccctctccctccagaggtgggattgctctaactttactaaccagcacctcggtacccacacatggaaacaattcttcctccaccaacggagaaaggagctgcgtcttgcattagcacagcctcacaacttcatctataaggtcacaaaaaacatcgcattcgagacggagctggcatatctgtcaggcaatcgcctcacagtcgacgagcaggagaaatccataatctgctcagtgtccccaaaacaggaactgtgcgcgtgggatgtccaggagggtacaatgatttggtcctcaccggtgcaggaattccacttttcaaaccttgtgaccctgcctcagatgcacctggctattactatggatagaaagaagaccattaaggtgtggaattgccaggaccgagatgccctagcggtcctcccgatgccgcagccttgctactgcatggaagcctatttaacaaaagatgggccatttctgatggtcggagacgctgctggagacatttatacctttactttgccaggtctccgagacgtctccaaagtgactgccttccagtacggtatcgttttactgcactgctcacctgacaaaaaatgggttttcgcatgtgggacatattctaggacacttccgcaggtgttcctaacggagtcactgctgagaccatctgagggaagcgtgccactgagtacattcctgccccacaagctgtgcgcgtccgcttgttggacacctaaggtgaaaaaccggatcactcttatgagccagtcctccaccggcaagaagactgaatttattacttttgatcttacaacaaagaagacgggaggacaaaccgtcatacaggcttacgaaattgcttcgttccaggtggcagcacacttgaaatgcccaatttggatgggcgcttccgacggttatatgattgtatttacctccgggccatatctcctgcttttttccataacggggttccttttgcagcgcttcgaggaccatcaggccgctattaacaacttttgggtagatccgtgctacgtgcttaccacttctgaaaacagcgtgcacgtgtacatgtgggaagagggcggtcgccacccatacctgcgaagctgttgccatctggagaatacatggcacgaccacaccaccgacagttgcatctctagtgtgatgtgcgataacgcttccatcgtgcttagagtacgcaaagtgtcggactcgagcattctggtgatgtattctctcaacacatag

SEQ ID NO: 222969 - DNA, 1239 bp, synthetic construct
  misc_feature 1..1239: note = Description of Artificial Sequence: Synthetic coding sequence
  source 1..1239: mol_type = other DNA
atggccgctgcagccggagaagaagaggaagaggaggaggcagccagggagtctgccgctcgtcccgcagcgggtcctgccctctggcggctacccgaagagctcctgctgctcatctgcagctatctggacatgcgcgctctcggccgtctggcacaggtttgcagatggctgcggagatttacatcctgtgatcttttgtggcggcgaattgcacgggcttccctcaactcaggctttaccaggctgggaactgacctgatgacctcggttcccgtcaaggaacgggtcaaagtgagccagaattggcggctgggtcgttgtcgcgaaggcattctcctaaaatggcggtgtcgccaaatgccatggatgcagttggaagacgattcactatacatctcccaggctaatttcatcttggcctatcagttccgacccgacggtgcatctctgaatagacggcctttgggagtgtttgcgggacacgacgaggacgtttgtcactttgtgctggcaaactctcacatcgtgtccgcgggtggggacgggaagatcggaatacataagattcactccactttcacagtcaagtatagcgcccatgaacaggaagttaactgtgtggactgtaagggcggaattattgtttccgggtcaagggaccgcacagctaaagtgtggccactggcatccggcaggctgggacagtgcctccacaccatccagaccgaggacagggtatggtctattgccatcagcccgctgctgagttcttttgtgaccggtactgcatgctgcggtcactttagccctcttcgaatatgggaccttaactctgggcagctgatgactcatctcggttcagattttcctccaggagctggtgtgctggacgtcatgtatgagagccccttcacactattatcttgcggctacgatacttacgtgaggtattgggacctgcgtacttctgtgcgcaagtgtgtcatggagtgggaagagccacatgactcgaccttatactgtctgcagaccgacggcaatcacctgctggccactggaagcagctactatggggtcgtgaggctttgggatcgcaggcagagggcatgcttgcacgcctttccactcacctcaacccccctttccagtccagtgtactgtctcagactgactaccaaacatctgtacgcagccctgtcttataatctacatgtgctagactttcaaaacccgtag

SEQ ID NO: 222970 - DNA, 1239 bp, synthetic construct
  misc_feature 1..1239: note = Description of Artificial Sequence: Synthetic coding sequence
  source 1..1239: mol_type = other DNA
atggctgcagcagccggagaagaagaggaggaggaggaagctgctcgggaatcagccgcacggcctgcagccggtcccgctctgtggcgactgcccgaagagcttcttctgctgatctgtagctatctggacatgcgagccttgggacgtctggcacaggtgtgtcggtggctccggaggttcacttcatgcgacctgctttggagaaggattgcccgtgcaagcctcaatagtgggttcacacggctcgggacggacttgatgactagtgtgccagtgaaggagagggtcaaggttagccaaaattggaggctgggaaggtgtcgcgagggtattttactcaagtggcgctgttctcagatgccgtggatgcaacttgaggatgactcgctttatatttctcaggccaatttcatcctggcttaccaatttcgaccagacggagctagcctgaatagacgacctctgggggtgtttgccggacacgacgaagatgtgtgccatttcgtgctggcgaattctcacatcgtttcagcgggaggcgacggtaagattgggattcataagatccattcaacctttaccgtgaagtacagtgcccatgagcaagaagtcaactgcgtggactgtaagggcggtatcatcgtttccgggagccgcgaccgcactgccaaagtctggccattggctagcggcagactcggccagtgtctgcacaccattcagaccgaggatagagtatggagcatcgcaatctcgcctctcctctctagttttgtgaccgggaccgcctgttgtggacacttcagtcccttaaggatttgggacctaaacagcggacagcttatgactcatctgggctccgacttccccccaggcgctggagtcctggacgtcatgtacgagtccccattcacgctcctgtcctgcggatacgatacatacgtgaggtattgggatctgagaaccagtgttcggaagtgcgtgatggaatgggaggagccccatgattccactttgtattgtctgcagaccgatggaaaccacctattggctaccgggtcttcatactacggtgtggttcggttgtgggaccgcagacagcgtgcctgtctgcacgcctttccactgacaagcacgcccctgagttctccagtgtactgtctgcgcctcactacaaaacacctctacgcggcactgagctacaacctccacgttctggactttcagaatccctag

SEQ ID NO: 222971 - DNA, 639 bp, synthetic construct
  misc_feature 1..639: note = Description of Artificial Sequence: Synthetic coding sequence
  source 1..639: mol_type = other DNA
atgcgagccctcggtcggctggcgcaggtgtgtcgctggttgcgcaggtttacttcatgtgacctgctgtggaggcgcatagccagggcgtccctgaattcaggcttcaccaggctaggcacagatctcatgaccagtgttcctgtcaaggagagagttaaagtaagtcaaaattggcgcttaggcagatgccgtgagggcatcttgcttaaatggcgatgtaggcaaatgccttggatgcaactcgaagatgactctctgtacatctcccaggccaacttcattctcgcatatcagttccggcctgatggggcaagcttgaatagacgacctcttggcgtttttgccggtcacgacgaggacgtgtgtcactttgttttggccaacagtcacatagtgagcgccggaggcgacggtaaaattggaatccataagattcattcaacattcacggtcaagtatagtgctcatgagcaggaggtcaactgtgtggactgtaaaggcggaatcatcgtgtcgggttcgagggacagaaccgccaaagtctggcctctggcttccggtcggctggggcagtgtcttcacaccattcagacagaggatagagtttggtccatcgctatctcccctctgctctag

SEQ ID NO: 222972 - DNA, 576 bp, synthetic construct
  misc_feature 1..576: note = Description of Artificial Sequence: Synthetic coding sequence
  source 1..576: mol_type = other DNA
atgacttcagtgccagtgaaagaacgtgttaaggtatctcagaactggagactgggtcggtgccgcgagggtatactgctgaagtggaggtgcaggcagatgccatggatgcagctggaagatgacagtttgtatatctctcaggccaatttcattctcgcctatcagtttagacctgatggcgcttccttgaatagacgaccgctgggtgtgttcgcagggcacgatgaggatgtctgtcacttcgtgctggctaatagtcacattgtgtcggctggcggagatggaaaaatcggaattcataagattcacagcacgtttactgttaaatatagcgcccacgaacaggaggtaaactgtgtggactgtaagggcggaatcatcgtttccgggagcagggacaggactgctaaggtctggcccctagcctccggtagactgggccagtgcctacatactattcagacggaagaccgggtgtggtcaatcgctatttcgccactgctcagttctttcgtgactggtaccgcgtgttgtgggcatttctccccactgaggatctgggatttgaactag

SEQ ID NO: 222973 - DNA, 1884 bp, synthetic construct
  misc_feature 1..1884: note = Description of Artificial Sequence: Synthetic coding sequence
  source 1..1884: mol_type = other DNA
atgtgcgtgccaagatccgggctgatactatcctgcatttgtctctactgcggtgtgttgctccctgttttattacccaatcttcctttcctaacctgcctcagtatgtccacactggagtccgtgacctatttaccagagaaaggcttgtattgccaaagactgccttcttccaggacgcacggcggaactgagtccctgaaaggcaagaatactgaaaatatgggattctatggtacgctgaagatgatcttctacaaaatgaagagaaagttggaccacggatccgaagttcgaagcttctccctgggaaaaaaaccttgtaaagtaagcgaatatacatctacaacgggactagtgccgtgtagcgctacgccaaccacattcggtgatctgagagccgcaaatggccagggtcagcagagaagaagaatcacctctgtgcagcccccaacagggctccaggaatggctcaagatgtttcagtcctggagcggtcctgagaagctgctggctctggacgaactaatcgactcttgcgaaccgacacaggttaagcatatgatgcaggtgatcgagccacagttccagagagacttcatctccttgctgccaaaggagctggcgctgtatgttcttagctttcttgaacctaaggatctgctccaggccgctcaaacgtgtaggtactggcgcattctggctgaagataacctgctgtggcgcgagaagtgtaaggaagaaggtattgacgagcccctccatatcaaaagacgcaaagtaatcaaacctggctttatccactcaccatggaagtcagcctacatccgccagcaccgcatagatacaaactggaggcggggtgaactgaaaagccccaaggtactgaaggggcatgacgatcatgtcatcacatgtctgcagttctgtggaaatcgcatcgtatctggatcggacgataacactctgaaagtttggtccgctgtcactgggaaatgcttacggaccttggtggggcataccggtggcgtgtggtcctcacagatgcgggataacattattatctcaggcagtaccgatcggaccctgaaggtctggaacgccgagaccggggaatgcatacataccttgtatggccatacttctaccgtccggtgcatgcatctgcacgaaaagcgcgtggtgtcaggaagcagagatgccaccctcagagtgtgggacatagagaccggccagtgtttgcatgtgctgatgggccatgttgctgccgtgaggtgcgtacagtacgacggtcgtcgcgttgtgagcggggcttatgacttcatggtgaaggtgtgggaccctgaaactgagacgtgcctgcacactcttcagggccacacaaacagagtgtactctttacagttcgatgggatccacgtggttagcgggtcgctggatacatccatccgcgtctgggacgtagaaactggcaactgtattcatacccttactggccaccaatcactcaccagcggcatggaactgaaggataacatactcgtgtctggcaatgccgactcgacggtgaagatttgggatattaagacaggtcaatgcctgcaaaccctgcaggggcctaataagcaccagtccgcagttacgtgtctgcagttcaataaaaactttgtgataacaagttccgatgacggtaccgttaagctgtgggacctcaaaacgggcgagttcatccggaacctggtgacacttgagagcggtggaagtggtggagtagtgtggcgcatcagagcctccaacactaagctggtctgtgccgtgggttctaggaatggaaccgaagagacaaaactcctcgtactggattttgatgtggatatgaaatag

SEQ ID NO: 222974 - DNA, 2124 bp, synthetic construct
  misc_feature 1..2124: note = Description of Artificial Sequence: Synthetic coding sequence
  source 1..2124: mol_type = other DNA
atgaatcaggaattgctttcagtgggcagtaaaagacggcgtaccggcggttcactgcgaggcaatccatcctcatcacaagtggatgaagaacaaatgaaccgtgtggtggaagaggagcagcagcaacaattgcgtcagcaagaagaggaacatactgctcgcaatggagaggtagtgggcgtggaacccagaccaggtggacagaatgactcacaacagggacagctcgaggaaaataataaccggtttatcagcgtagatgaggactccagtggtaatcaggaagagcaggaagaggacgaagaacatgcaggggaacaggacgaggaagacgaagaggaagaggagatggatcaggagtccgacgacttcgatcaatccgacgactcatcgagagaggatgaacatacccacacgaattcagtaactaacagttcaagtatcgtggatcttcccgtacaccagctttcaagcccattctacactaagaccactaaaatgaaacgaaaactcgaccacggatctgaggttaggagtttctccctggggaagaagccatgcaaagtcagcgaatacacctccactaccggcttagttccctgctcagccacaccaactacctttggggatctgcgcgctgcaaacggccaggggcagcaaagaagacgtatcacgtctgtgcaaccaccaactggcctgcaggagtggctgaaaatgttccagagctggagcggacctgaaaagttgctcgcattagatgaactaatagacagctgcgagcccacacaagtgaaacacatgatgcaagttatcgagcctcagttccaacgcgactttatctccttgctgcctaaggaactggctctgtacgttcttagcttccttgaaccaaaagacctgctgcaagcagcccagacatgcagatactggcggatactggcagaggacaatctgctttggagagaaaagtgtaaagaggaggggatcgacgaaccgctacatatcaagagacggaaggtgatcaagccagggtttattcatagtccctggaagagcgcttacataagacaacaccgtattgacaccaattggcgtcggggagaacttaagtctcctaaagtgcttaaaggacatgacgatcacgtgatcacctgtctgcaattttgcggcaatcgtattgttagcggtagtgatgataataccctgaaggtctggagtgcggttacaggcaagtgtcttcgcacactagtggggcatactgggggtgtatggtccagtcagatgcgcgacaacattataatctctggatcaactgacagaaccctgaaggtgtggaatgcagaaaccggagagtgcatccacacactgtacggacacacctccactgtccggtgtatgcacttgcacgagaagcgggtggtatccggcagcagggacgccacgctgagggtgtgggacatagaaaccggccagtgtctgcacgttttaatggggcatgtcgccgcagtgagatgcgttcagtacgatggtaggagggtcgtgtctggtgcatacgatttcatggttaaggtctgggacccagaaactgaaacctgccttcacacactccaagggcacactaaccgagtgtactcacttcagtttgatggcattcacgtggtgtcgggctctttggatacatctatcagagtttgggatgttgagacaggaaattgcatacataccctgactggtcaccagagcctgacctctggaatggaactgaaggacaacatcctggtatctggcaatgctgactcaacagtgaagatctgggatattaaaaccggacaatgcctacagacattacagggccctaacaaacatcagagcgctgtgacttgtctccagttcaacaaaaactttgtcatcacctcaagtgacgacggcacggtgaagctgtgggacctgaaaaccggcgaattcattaggaaccttgtaaccctggaatctggaggctccggcggagttgtgtggagaattcgagcgagcaatacaaaactggtatgcgccgtcggctcgcgaaacgggacagaggagactaagctgcttgttctggattttgacgtagacatgaaatag

SEQ ID NO: 222975 - DNA, 1770 bp, synthetic construct
  misc_feature 1..1770: note = Description of Artificial Sequence: Synthetic coding sequence
  source 1..1770: mol_type = other DNA
atgtctaagccgggaaagccgaccctaaatcacggcttggtaccagtggacttgaaaagcgctaaggaaccgttacctcatcagacagtgatgaaaattttctcgatctccataatcgcacaaggtctacccttttgtaggagaaggatgaaacggaagttggaccacgggagcgaggtcaggtcttttagcttggggaagaaaccctgcaaggtttccgagtatacctccaccaccggcctcgttccatgctctgctacaccaacgaccttcggcgatctgcgcgctgccaatgggcaagggcaacagagacgccgtatcacctcagtccaacccccaaccggtctgcaagagtggctgaagatgttccagagttggtctgggcctgagaaactgctggccttagatgagctcatcgattcttgtgaacccacgcaggttaagcatatgatgcaggtgatcgaacctcagttccagagggacttcataagtctcctccctaaggagttggcactatacgtcctatcattcctcgaaccgaaagacctgctccaggctgctcagacatgcagatattggagaattctcgctgaagacaatctcttgtggcgggagaaatgcaaggaggagggcattgacgagcccctgcacatcaagcgcaggaaggtgattaagccaggttttattcattccccttggaagagcgcctacatccgacaacacagaatagataccaactggcgaagaggagagttgaagtcacccaaagttttaaaggggcatgacgaccatgtcataacctgtctgcagttctgcggaaatcgaatcgtctctggtagcgatgataacaccctcaaagtctggtctgccgtgactggcaaatgcctgcgtactctcgtcgggcataccggaggcgtgtggtccagccaaatgagggataatatcataatcagtggctctacagatcggactctgaaggtatggaatgccgagacaggagaatgcatccacactctttatggccacacgagtactgtgaggtgcatgcacctccacgaaaagagagtggtcagcggatccagagatgcaactctgagggtgtgggacattgagaccggtcagtgcctgcatgtactgatgggtcatgtggctgcggtgagatgtgtgcagtatgatggtcggagagttgtgtctggcgcttatgacttcatggtcaaagtgtgggatccggaaaccgagacttgcctgcacacgctacaaggtcatacaaaccgtgtgtacagtctgcagtttgacggcattcacgtggtgtcagggtccttagacaccagtatccgggtctgggacgtagaaacaggaaactgtatccacactctgacaggacaccagtcactcacttctgggatggagcttaaggacaatatcctcgttagtgggaacgcagatagtactgtgaaaatctgggatatcaagaccggtcaatgtctgcagactctccagggccctaacaagcaccagagtgctgtgacctgcctgcagttcaacaagaattttgtaattacctcatctgacgatgggactgtgaagctctgggacctaaagactggggagttcattcgtaacttagtgacactcgagtccgggggatcagggggtgtggtatggagaatacgcgctagcaatactaaactcgtgtgtgctgtcggctctcggaacggcacagaggaaacaaagctactggttctggatttcgacgtcgacatgaaatag

SEQ ID NO: 222976 - DNA, 1596 bp, synthetic construct
  misc_feature 1..1596: note = Description of Artificial Sequence: Synthetic coding sequence
  source 1..1596: mol_type = other DNA
atgctgttttttaaatgcatttcccttcttcttatctggttgattcccggtcaatccaccaccggactagtcccatgctccgctacaccgacgacattcggagatttacgcgcagccaacggccagggccagcagagacggagaatcaccagcgtgcagcctcccactggcctgcaggaatggctgaagatgttccagagttggagcggccctgaaaaactcttggccctggacgagttgattgactcttgcgagccaacacaagtgaagcatatgatgcaggttattgaaccccagttccagagggactttatctctctgcttcctaaagaactagcattatatgtgctttcctttctggagccaaaggacctgctccaggctgcacaaacctgtaggtattggcgtattctggcggaggacaacctcctgtggcgagagaagtgtaaagaggaggggattgacgaaccactacacatcaaacgaaggaaagtcattaagccaggttttatacatagcccatggaagagcgcgtatataaggcaacacaggatcgacacaaactggagaaggggcgaactcaagagcccaaaggtcctgaaggggcacgacgaccatgtgataacttgtctgcagttctgcggaaatcgaatcgtaagtggcagtgacgacaacacactgaaggtatggtctgccgtgactgggaaatgcctccggactctggtgggacacactggtggcgtttggtcctctcagatgagagataacattatcattagcggcagcaccgatagaacacttaaagtgtggaacgcagagactggggagtgcatccacaccttgtacggtcacacctccactgtccggtgtatgcatttgcatgagaagcgcgtggtctcaggcagtagagatgccacccttagggtgtgggatatcgagactggccagtgcctgcacgtactgatgggacacgtggccgcagttcggtgcgtacagtatgacgggaggcgtgtggttagcggggcttacgatttcatggtcaaggtgtgggaccccgagacagagacttgtctccacacactgcagggacataccaatcgagtgtatagtttgcaattcgacgggatccacgtcgtgtctgggtcattggatacctctattagagtctgggatgtagagacaggcaactgcatccacaccctgactggccatcagtccttgacgtccggcatggaactgaaagataacatcctagtgagcgggaacgcggatagtaccgtgaaaatctgggacatcaaaacggggcaatgcttgcagaccctgcagggacccaacaaacaccagagcgccgttacatgtctgcagtttaataaaaacttcgtcatcacttcctcagatgatggaacagtgaaactgtgggatctcaaaaccggcgagtttatccgcaatctcgtaaccctggaatcaggaggctccggcggagtcgtctggcgaattagggcaagtaacactaaactagtatgcgccgttggatcccgtaatggcacagaagagaccaaactcctggtcttagactttgacgtagacatgaaatag

SEQ ID NO: 222977 - DNA, 1797 bp, synthetic construct
  misc_feature 1..1797: note = Description of Artificial Sequence: Synthetic coding sequence
  source 1..1797: mol_type = other DNA
atggacgattactcattggatgaatttaggaggcgctggcaggaggagctggcccaggcacaagccccaaagaagcgcaggaggcctgaggctgccgagcggcgtgcgaggcgacccgaggtgggatctggcaggggggaacaggccagcggcgaccccgcactggctcagcggctgctcgagggcgctgggagaccacctgccgctcgtgccactagagccgagggacaggacgtggcctctcgctcacgcagccccctggctagggagggagcgggtggcggagagcagctggtcgatcagttgatccgagacttgaacgagatgaacgacgttcctttctttgacatccagctgccctacgaactggcaattaatatctttcagtatctagatcgtaaagaactggggaggtgcgcacaggtctcgaagacatggaaggttatcgccgaggacgaagtcctttggtaccgtctgtgccagcaggaggggcacctcccagacagtagcatcagcgattactcatgctggaaactgatttttcaagaatgccgagctaaggagcatatgcttcggaccaactggaagaaccgcaagggagctgttagcgaactggaacacgtcccagatacagtgctgtgtgatgttcatagccacgatggagtggtgatagctggatacaccagcggcgacgttagagtgtgggacacacggacatgggactatgtcgccccttttctcgaatccgaggacgaggaggacgaacctgggatgcagcccaatgtgtcctttgtgcgaatcaattcttctttagcagtggccgcttatgaagacggcttcctcaatatttgggatctccggactgggaagtatccagtgcaccgtttcgagcacgacgctaggatacaggcacttgccctgagccaggacgatgctaccgtcgcaacggcaagcgctttcgatgtcgtgatgctctcccccaacgaggagggatattggcagatagccgcagagttcgaagtccctaagcttgtgcagtatctggagattgtgccggaaacaagacggtacccggtggcggtcgctgcggcaggtgatctaatgtacctgttgaaagccgaggattctgcaaggacccttctgtatgcccatggaccgcctgtgacgtgcctggacgtgagtgcgaaccaagtcgcgtttggcgttcaggggctgggatgggtgtacgaaggctccaagattctcgtgtacagtctggaagccggtcgtaggctgctgaagctgggcaacgttctccgggattttacatgcgtcaatcttagcgattctcctcctaatcttatggtgtcgggcaacatggatggaagggtccggattcacgacctgcgcagtggaaatattgccctgagcctctcagctcaccagctacgggtctctgctgtccaaatggacgactggaagatcgtgtcaggaggtgaagaagggctggtgtctgtgtgggattacaggatgaaccagaagctctgggaggtgtattccggacaccccgtgcaacatatttctttttcctcccactccctcattaccgccaacgttccgtatcaaactgtgatgaggaatgcagatttggatagctttacaacacacagacgacatcgcggactgattcgagcttacgaatttgcagtcgaccagctcgctttccagtcacctctccctgtgtgcagatccagctgtgacgccatggcaacccactattacgacctagctctcgctttcccatacaaccacgtctag

SEQ ID NO: 222978 - DNA, 1599 bp, synthetic construct
  misc_feature 1..1599: note = Description of Artificial Sequence: Synthetic coding sequence
  source 1..1599: mol_type = other DNA
atggatgactactccctggacgaatttaggcggcgttggcaggaagagttggcgcaagcacaggccccaaaaaagcgccgtcggccagaggccgctgaaaggcgcgcacgcagaccagaaaacgagatgaatgacgttccttttttcgacatccagctgccatacgaactggctatcaacatctttcaatacctggatcggaaagagctcggcagatgtgcccaagtctccaagacttggaaggttattgctgaagacgaggtgctgtggtacagactgtgccagcaggagggacacttgcccgactcatctatctccgactactcatgttggaagttgatctttcaggaatgtcgtgccaaggagcatatgctccgcactaactggaagaatcggaaaggagccgtttcagaactcgagcatgtgccagacaccgtcctttgcgatgttcattctcacgacggcgtggttatcgcaggctataccagtggggatgttcgcgtgtgggatacacgaacttgggattatgtggctcccttccttgaaagtgaggacgaggaagatgagcctggcatgcagcccaacgtgagtttcgtgagaatcaattcaagcttggctgtcgcggcatacgaagacggctttctcaatatatgggatttaaggaccggtaagtatcccgtgcataggttcgagcatgatgccaggatacaggccctggccttatcacaggacgacgctacagtcgctaccgcctctgcgtttgatgtggtgatgctctcacctaatgaagagggctactggcagattgctgctgagtttgaggtgcccaagctagtccagtacttggaaatcgtgccagagaccaggaggtatcctgtggcagttgctgcggcaggggatctgatgtatctcctcaaagccgaggacagcgcgagaacgttactgtacgcccacggcccacctgtcacgtgtctggatgtttccgctaatcaggtcgccttcggcgtgcagggattgggctgggtgtatgagggatctaaaatcctggtgtattctctcgaggctggtcgcaggttgctcaaactgggcaacgtattacgcgattttacctgcgtcaacctgtcggactcccctcctaaccttatggtgtcagggaatatggacggccgtgtgagaatccatgatctgaggagcgggaacatcgccctgtccctgtccgcccaccagctaagagtgagtgctgtgcagatggacgattggaaaatagtaagcggcggtgaagaggggttagtgtctgtctgggactaccgaatgaatcagaagttgtgggaagtttatagtggacatcctgtgcagcacatttccttttccagccactctttgatcaccgcaaatgtaccctaccagacggtcatgagaaacgccgacctggatagttttacgacccataggaggcacaggggactgattcgggcttatgagtttgccgtcgaccagcttgcgtttcagagtccactgcccgtatgccgctcaagctgtgatgccatggctactcactattacgacctggccctcgccttcccatataatcacgtatag

SEQ ID NO: 222979 - DNA, 1599 bp, synthetic construct
  misc_feature 1..1599: note = Description of Artificial Sequence: Synthetic coding sequence
  source 1..1599: mol_type = other DNA
atggatgactacagtctggatgagtttagacgcaggtggcaggaggaactggcacaggctcaggccccaaagaagcggaggcgcccagaagcagccgagcgtagagcgagacggccagaaaacgagatgaatgacgtccctttttttgacatccagttaccttacgagctggcaatcaatatatttcagtacctggataggaaagaactcggtcgctgcgcacaggtgtccaaaacctggaaagtgattgctgaggatgaagtactgtggtaccgcctatgccaacaagaagggcacctgcccgacagcagcatctctgactacagctgctggaaactgatttttcaggagtgtagggccaaggaacacatgctgcgaactaactggaagaaccggaaaggagcggtatcagaactcgaacatgtgcccgataccgtactgtgcgacgttcactctcatgatggagtggtcatcgccggttatacaagtggggacgtcagagtgtgggacacgcggacgtgggactatgtggcaccattcctcgaatccgaggacgaggaagatgaacccggtatgcaacccaatgtctctttcgtcaggatcaactcatccctggcagtcgcagcgtatgaagacggatttctgaacatctgggacctgcgaaccggcaagtatcctgtgcatcggtttgaacacgatgcaagaattcaagccctagccctttcacaagacgatgcgacagtggctactgcctctgctttcgacgtggtgatgctgtccccaaatgaggaagggtactggcagattgccgctgagtttgaagtaccaaagttggtacaataccttgagatcgtgccagaaacgagaagatatcctgttgctgtggccgcagctggggacctgatgtatctcctgaaggccgaggatagtgcaagaacccttttgtacgcccacgggccacctgtcacctgtcttgatgtgtctgcaaaccaggtcgcgtttggggttcaaggactgggctgggtgtatgaaggctctaaaatcttggtatacagcctagaggcaggacgacgattgttgaagttgggcaacgtgttgcgggatttcacttgtgtgaacctaagcgactctccccctaacttgatggtcagcgggaatatggatggccgtgtcaggatccacgaccttcgaagcgggaatattgccctgagcctcagcgctcaccagctccgcgtgtctgccgtgcagatggatgactggaaaatcgtttctggaggagaagaaggactggtaagcgtgtgggactatcggatgaatcaaaagctctgggaagtttactcggggcacccggtgcagcacatttccttctccagccacagtctgattaccgcaaatgtcccctatcagacagtgatgagaaatgccgaccttgatagctttacgacgcacaggcggcatagagggctcatccgtgcgtacgagttcgccgtagaccagctggccttccagtctccactccccgtgtgccgcagtagttgtgatgcaatggccacccattactacgacctggccctagccttcccttataatcacgtttag

SEQ ID NO: 222980 - DNA, 2871 bp, synthetic construct
  misc_feature 1..2871: note = Description of Artificial Sequence: Synthetic coding sequence
  source 1..2871: mol_type = other DNA
atggaggccggagggctgccattggagctctggcggatgattctggcctacttacacttacccgatctgggcagatgctccctggtgtgcagggcttggtatgagctgatcctctcccttgattcaacccgctggcgccagctgtgcttgggctgcactgagtgccggcaccctaattggcctaatcagcccgacgttgagcctgagagttggcgcgaagctttcaaacagcactatctggcatctaagacctggacaaaaaacgcgcttgacctcgagtcgagcatttgcttttcattgttccgcagaagacgggagcggagaacgctgtccgtgggccctgggagagaattcgactccctcggcagtgcattggctatggccagtttgtatgataggattgtgctgttccccggagtgtacgaggagcagggggagatcatcctgaaagtgcctgtggaaattgtgggacaaggaaagttgggagaagtggcactcctcgcctctatagatcagcactgttctacgacacgcctgtgcaatcttgtgtttactcctgcgtggttctcccctatcatgtataagacaacatcaggccacgtccaattcgacaactgcaatttcgagaacggtcatatccaggtgcatggcccagggacctgccaagttaaattttgtacctttaaaaacactcacattttcctgcataatgtgccactgtgtgtgctggaaaattgtgagtttgttggatcagagaataatagcgtgacagttgaggggcaccccagcgcagataagaactgggcatacaaatacctcctcggcctcatcaaatcatcaccgactttcctccctacagaagattcagacttcttgatgtcgctggatttagaatcccgagaccaggcctggtctcccaaaacgtgcgatattgtaattgagggatctcagtcgcctacctcaccagctagtagcagccccaagccaggctccaaggcgggatctcaagaggctgaagttggatctgatggggagagagtggcccagacaccagactcaagcgatggtgggctatctcccagtggagaggacgaagatgaagatcaattaatgtacaggctgtcataccaggttcagggtcctagacccgtgttgggaggttccttcctcggcccaccgctgcctggcgctagcattcagctgccttcttgtctggttcttaattcgcttcagcaggaacttcagaaagacaaagaagctatggccttggcaaatagtgttcaggggtgcttgatcaggaagtgcctcttccgtgacgggaaaggtggtgtgtttgtctgtagccatgggagggcaaaaatggagggaaatatcttcagaaacctgacatacgcggttcgctgcatccacaactccaaaatcattatgttgcgaaatgatatctataggtgcagagcctcaggcatctttcttcgcttagaggggggtggcttaatcgctggaaataacatctatcataatgccgaagcaggtgtcgacattcggaaaaaatcaaacccactgatcttgtgcaaccagattcatcatggcttaaggtccggcattgttgtactaggtaacggaaaaggtattatcaggaataaccaaatcttctcaaacaaggaggctggaatctacattctctatcatgggaaccccgtagtgtccgggaaccacatcttcaagggaagagctgccggaatagctgtgaacgagaatgggaagggcctcatcaccgagaacgtaatacgtgagaatcaatgggggggtgtcgacatccgaagaggcggaatcccagtcctgagaagcaacttaatttgcttcgggtattctgacggtgtggtggtgggcgatgagggaaagggactgattgaaggaaatacaatttatgcaaacaagggttgtggtgtgtggatgatgagctcctctctcccacatgttacctccaaccacgtgtcctataatggcctgtacggagtcgctgtgttcagccagaaagatgggagtagtgagctgccgaggggacaccgggctcaagaaaacttctcggaagacggagatgctatcctctgggagactgaattggaaaaggaggatgaccctttgaggcgcccaattactattgcgctggttgaatcaaattccatcaaccataatggcgcaagtggtctatatgtacagtcaagcgaggcgctccatgtaattactaacgttattcacgcaaacggtgacagagggatcacagtggcccaaagcagtcagccaaccagagtcgcaaacaattcaatctcttgtaaccgacagagcggtgtgaaggtggaagcccagtgcaaagtggaactgcgcggaaacggtatttacgataatagaggccacggaattattactaaaggtgacagcacaatagtgattgagaacgatattattggtaaccgtggctctggtcttcagctcctccctagaagcgacaccaaagtaatcaaaaacaggatccattctttccgtgcctacggaatcgcagttcgcggtagagctaaagctctcgtgcaggagaacattattttccaggggaagacctctaagaccatcttccagcaaattagcaataacagggagtgcatcatgcagaataacaaattcctcgtttttaagaaaaagtccgacacctggcgtctggtcaatcctcccgcaagaccccatctggagaactcactgcgcaggccttccgccgctcataatggacagaaggtcactgccatggctaccagaatcactgcgagagtggaaggtgggtatcacagtaacagatctgtgttttgcacaatcctgtag

SEQ ID NO: 222981 - DNA, 216 bp, synthetic construct
  misc_feature 1..216: note = Description of Artificial Sequence: Synthetic coding sequence
  source 1..216: mol_type = other DNA
atggaagccggtgggctgcccctggagctctggcgcatgattcttgcctacctacacctacccgacctgggtcgctgctccctggtctgtagggcatggtacgaacttattctcagccttgattctaccagatggagacagctatgcctggggtgcacagaatgtcgccaccccaactggcctaaccagcccgatgtcgaacccgaaagttggtag

SEQ ID NO: 222982 - DNA, 1446 bp, synthetic construct
  misc_feature 1..1446: note = Description of Artificial Sequence: Synthetic coding sequence
  source 1..1446: mol_type = other DNA
atgctccgaaacgacatttacagatgcagggcatccgggatctttcttaggcttgagggaggtgggctgattgccggaaataacatttaccataacgccgaggccggagtggatatccggaagaagtcaaaccccctgatactctgtaaccagattcatcacggactgcgatccgggatcgtagtattgggcaatggaaaaggtattatcagaaataatcagattttcagtaataaggaagctgggatatatattctgtaccatggcaatcccgtggtaagcggcaaccatatcttcaaggggagggctgccggtatcgcagtcaatgaaaatggcaaggggcttatcacggagaacgtgatccgtgaaaatcagtgggggggagtcgacataaggaggggcggtatcccagtgcttcgtagtaacctgatttgcttcggctattcagacggggtcgtagtgggcgatgaaggcaagggccttatcgaaggtaacacgatttacgcaaataaggggtgcggggtgtggatgatgtccagctccctcccgcacgtgacatcaaaccatgtgagttacaacgggctatatggggtcgcagtgttttcacagaaggatggaagcagcgagcttcctagaggccatagggcccaggagaatttctctgaagacggtgacgccatactctgggagacagagctggagaaagaagacgatcctttaagaaggcccatcactatcgccctggtggagtcaaactctatcaaccacaacggggcttctgggctgtatgttcagtctagcgaagctctgcacgtgatcaccaatgtaatccatgcaaacggagatcggggaattactgtcgcccaaagcagtcaacccacaagagtggccaacaatagcatctcctgcaatagacagtcaggagtcaaggtggaagcccagtgcaaggtcgagctgcgagggaacggaatctacgataaccgcggtcatggtatcatcactaagggtgacagcaccatcgttatcgagaacgatatcatcgggaatcgcggttcaggcctccagcttctgccgcgttcagacaccaaggtgataaagaaccggattcacagcttccgggcttatggcatcgcggtgcgcggacgggcaaaggcactggtgcaggagaacataatcttccagggcaaaaccagtaagacaatatttcagcagatctccaataatagggagtgtatcatgcaaaacaataagttcctggtgttcaaaaaaaagtctgacacctggcggctcgtcaatccacccgcacggccacatttggagaacagcctacggagacctagtgctgctcacaacgggcagaaggtcactgccatggctactaggataaccgcacgcgtggagggtgggtaccactccaatcggagtgtgttctgtacgattctctag

SEQ ID NO: 222983 - DNA, 2532 bp, synthetic construct
  misc_feature 1..2532: note = Description of Artificial Sequence: Synthetic coding sequence
  source 1..2532: mol_type = other DNA
atggtcgccgaagaatcaggccctggcgcacagaactcgccatatcagctgagaaggaaaacgttgctgcccaaacgcaccgcttgtccaacaaagaactctatggagggtgcctccaccagtaccacagaaaacttcggccatcgcgctaagcgcgctcgtgtaagtgggaagtcccaggacctgtcggctgcccctgcagaacagtatttgcaagaaaagttgcccgacgaagtggttctcaaaattttcagctatctccttgagcaggacctgtgcagagctgcatgcgtgtgcaaaaggttcagcgagttggctaacgatccaattctatggaaacgactttatatggaagtatttgagtatacaaggccaatgatgcatcccgagcccggtaagttttatcagatcaatcccgaagagtatgaacaccccaacccctggaaggagagcttccagcagctctacaagggcgcacacgttaaacccggatttgccgaacacttctatagtaatcccgcacgctacaaagggagggaaaatatgttgtactatgacaccattgaggacgcacttggcggtgtgcaggaggcacattttgacggactaatctttgtacattctggaatctatactgatgaatggatctatattgaatccccaatcaccatgatcggcgcagcacccggaaaagtggccgataaggtgattattgagaacacacgggactccacattcgtgttcatggaggggtccgaggatgcctacgtcggttatatgacaatccggtttaatcccgatgacaaatctgcgcagcaccataatgcccaccactgcctagagatcactgtgaattgcagccctattatagaccactgtattattcgatcgacctgcacagtcggctccgccgtttgtgtctccggtcagggtgcttgccctactatcaagcactgtaatatctctgactgcgaaaacgtgggcctgtacataacagaccacgctcagggtatctacgaggataacgagatcagcaacaatgccctcgctggtatatgggtcaagaaccatggcaacccgatcattcggagaaatcatatccaccacggcagagatgtgggcgtctttacgtttgaccacgggatgggatatttcgagagttgcaatatacaccggaaccggatagccggattcgaggtcaaagcctatgccaatcccacagtcgtgagatgtgaaattcatcacggccagaccgggggaatctacgtgcatgagaaaggcagaggacagtttatcgaaaataagatctacgctaataattttgctggagtttggattaccagcaacagcgatcctaccatcaggggtaattccatattcaacgggaaccagggcggagtttacatcttcggcgacggacgcggtcttatagaaggcaatgatatctatggtaacgccctggctggcatccaaattcgtacaaactcctgccccatagtgagacacaataaaatccacgacggccagcatggtggcatctatgttcacgagaaagggcagggcgttattgaagagaatgaagtttactctaataccctggctggagtgtgggtgactaccggatctacgcccgtcctacgcaggaaccgtattcattcagggaagcaggtgggtgtctacttctatgacaatgggcatggagtcctcgaggacaacgacatttacaatcatatgtactcaggcgtacagatcaggactggcagtaaccctaagatcagacgcaacaagatttggggagggcagaacggcggtatattggtttacaactcaggccttggatgtattgaggataacgagatcttcgacaatgccatggccggagtgtggatcaagaccgactctaaccctaccctaaggagaaataaaatacacgatggcagggacgggggtatctgcatcttcaacgggggacggggtcttcttgaagagaacgacatcttccggaatgcacaggctggagtactgatctccacaaacagtcacccaatactgaggaagaaccgcatcttcgacggcttcgcagctggaatagaaatcactaaccatgctactgcgacgctagaagggaaccagattttcaataatagattcggcggactgtttctggcaagcggcgtaaatgtcaccatgaaggataataagattatgaacaatcaggatgctatagagaaggcagtgagtaggggtcaatgtctgtacaaaatttcatcctacacgagctatccaatgcacgatttctatagatgtcacacctgcaatacaactgatagaaatgcgatatgcgtgaattgtataaaaaagtgtcatcagggccatgatgtcgagtttatccggcatgacaggtttttttgtgattgcggggcaggcaccctgagtaacccttgcaccctcgctggggagccaacccacgatactgataccctgtacgatagtgccccacctatcgaatcaaacacacttcagcataattag

SEQ ID NO: 222984 - DNA, 282 bp, synthetic construct
  misc_feature 1..282: note = Description of Artificial Sequence: Synthetic coding sequence
  source 1..282: mol_type = other DNA
atggagggtgcctccaccagtacgactgagaattttggtcatagggccaagagagctcgagtttctgggaaaagccaggacttatcggcagctcctgccgaacagtacctccaggaaaagctgcccgatgaagtggtgctgaagattttcagctacctccttgaacaggacctttgccgggcagcttgtgtgtgtaagcgcttcagtgaacttgccaacgatcccattctttggctgggggaggttgcccatgcctacaacccttctacattaggagggtag

SEQ ID NO: 222985 - DNA, 2532 bp, synthetic construct
  misc_feature 1..2532: note = Description of Artificial Sequence: Synthetic coding sequence
  source 1..2532: mol_type = other DNA
atggtggccgaggagagcggaccaggcgcacagaatagtccttaccagctgaggaggaagacactgctgcccaagcgaacagcctgtcccaccaagaatagcatggaaggtgcttccacctcaaccaccgaaaattttggtcatagagccaagagggcacgggtcagcggaaagagtcaggatctgtccgccgctccagcagaacagtacctccaggaaaaactacccgacgaggtggtgttaaagattttcagctatctgcttgaacaggacctttgtcgagctgcttgcgtctgcaaaaggttcagtgagctggccaacgacccaattctgtggaaaaggctgtatatggaggtctttgaatataccaggccaatgatgcatccagaacccggtaagttctatcagatcaatccagaggagtacgagcacccaaacccttggaaagaaagttttcaacagctgtataagggcgcacatgtaaagccaggatttgcggagcatttctattctaatccagcgagatataaaggacgagaaaacatgctctactacgatactatcgaagacgctctcggcggagtgcaagaggcacatttcgacggccttatctttgtgcacagcgggatttacactgatgagtggatttatattgagtcacctattactatgatcggcgctgcccctggcaaggtcgcagataaggtgatcattgagaacaccagagactctacttttgtcttcatggaagggtctgaagatgcctacgtggggtacatgaccattcggttcaacccagatgacaaatccgctcagcatcacaacgcccaccattgcctggaaatcactgtgaactgttctcctatcatcgatcactgtattatccgcagcacttgcacagtgggatcagctgtgtgcgtctccggacaaggagcctgtccaacaattaagcattgcaatattagcgactgcgagaacgtcggcctttacattacagatcacgctcagggcatttacgaggacaatgagatatcgaataatgccctggctgggatttgggtcaaaaaccacggcaacccaattatcagacgtaatcacattcaccatgggagggacgttggagtgttcacctttgaccatgggatgggctactttgaaagttgcaacatccaccgcaatagaatcgccggtttcgaagttaaagcttatgccaacccaaccgttgtgagatgcgaaatacatcacgggcaaacaggaggaatttatgtgcatgaaaaaggtagaggccagttcatagaaaacaaaatttacgcaaataacttcgcaggggtgtggatcacaagcaacagcgacccaacgattcgcggtaactcaattttcaatgggaatcagggcggagtgtatatctttggcgacggtcggggtttaatcgaaggaaatgacatttacgggaacgcattggctggtatccagattaggacaaattcttgtccaattgtgcgccacaataagatacacgatggccaacatggtggtatttatgtccatgagaaagggcagggcgtcatcgaagagaatgaggtgtattcaaatactctggccggagtatgggttacaactggttcaacaccggtgttacgacggaataggatacacagcgggaaacaggtgggcgtttacttttacgacaacggccacggagtcctggaggataatgacatctacaaccatatgtacagcggcgttcagattcgaactggaagcaaccctaagattcgtcgtaataagatctggggcggtcagaacggcggaatcctggtgtacaactccggccttgggtgtatagaggataatgaaatttttgacaatgccatggccggtgtttggattaagactgactccaatcccacgctgcggagaaataaaattcacgatggcagagacggcggtatatgcatctttaatggaggccgagggctgctagaagaaaatgatatctttaggaatgcacaggccggtgtcctgatatcaactaactcacacccaatcctgaggaagaatcggatcttcgacgggtttgctgccggtatcgagatcaccaatcatgccaccgcaactctcgaaggtaatcagatctttaacaataggttcggcggattgttcctcgcatcaggcgtcaatgtcactatgaaggataacaaaatcatgaacaatcaggatgcgattgaaaaggctgtttcaaggggacagtgcctatacaaaatatcctcctatactagttatcctatgcatgacttctaccggtgccacacctgtaacactactgaccggaacgcaatctgcgtgaattgtataaagaagtgccatcagggtcacgatgtcgagtttatacgccatgatcggttcttttgtgattgcggggctggcacacttagcaatccctgcacccttgcaggtgagcctacacatgacactgacaccctctacgattccgcacctcccatcgagagcaacaccctgcagcacaattag

SEQ ID NO: 222986 - DNA, 2784 bp, synthetic construct
  misc_feature 1..2784: note = Description of Artificial Sequence: Synthetic coding sequence
  source 1..2784: mol_type = other DNA
atgaactctgtcagggcagccaaccgcaggcccaggcgagtctcccggccacgccctgttcagcagcagcagcagcagcctccccagcagccacccccacagccgcctcaacagcagccaccccagcagcagccaccccctccgccacagcagcaacagcaacagcaacccccaccgccaccccctcctcctccccctttgccacaggaaagaaacaatgtcggtgagcgggatgatgatgtcccagcagacatggtggccgaggaatcaggcccaggcgctcaaaattccccttaccaactgcgcaggaaaactctgctgcctaagaggaccgcttgtcccactaaaaattcaatggaaggcgctagcacaagtaccactgagaatttcggccatcgtgcgaagagggcacgggtgtccggtaagtcacaggatttatcagcagctccagcggaacagtacctgcaggagaagctgccagatgaggtcgttcttaaaatcttttcatatttgctggagcaagacttgtgtagagccgcatgtgtctgcaagaggttcagtgagctcgctaatgatccaatactgtggaaaaggctgtatatggaggtgttcgagtacacccggccaatgatgcacccagagccaggcaagttctatcagatcaacccagaagaatatgaacaccctaatccctggaaggaatctttccagcagctctacaagggggctcacgtaaaaccaggcttcgcagaacatttctattccaatcctgccagatacaagggtcgcgaaaatatgttatactatgacactatagaggatgccctgggcggtgtgcaggaggcccatttcgatgggctcatatttgtacactctggcatttacaccgacgaatggatatacattgaatctccaatcaccatgatcggtgccgctcctggtaaggtcgccgataaggtcatcatcgagaacaccagggactcaacatttgtgtttatggaagggagtgaagatgcatacgtggggtatatgaccatcagattcaatcctgacgataagtctgcccagcatcataatgctcaccactgtttggaaattactgtaaactgtagtcctatcatcgaccattgcattatacgcagcacatgtaccgtagggtcagctgtgtgtgtatccggtcaaggcgcatgccctactataaaacactgtaacatcagcgactgcgaaaatgtgggtctgtacattaccgaccatgctcaaggcatttacgaggataacgaaattagtaataacgctttggccggaatctgggtcaagaaccacgggaaccccattatcagaaggaaccacatccatcatgggagagacgtaggagtcttcacattcgaccacgggatggggtacttcgaatcttgcaacatacatcggaatagaatcgctggcttcgaggtgaaggcctatgcgaatccaacagtcgtgcgatgcgaaattcatcacggccagacggggggtatatacgtgcacgagaaggggagaggccagtttatcgagaataaaatttacgccaacaactttgctggagtatggattacgtccaactccgaccctacgataagagggaactccatcttcaatggtaaccaaggcggtgtttacattttcggcgacggaaggggactgattgaaggaaacgacatttacggaaacgccctagcaggcatacagattcgaacgaatagctgccctatcgtgcggcacaacaagattcacgacggccaacacgggggaatctacgtgcacgagaaagggcagggcgtcatcgaggagaacgaggtgtatagtaacactctggccggtgtttgggtcaccacaggcagcaccccagtactaaggagaaaccgcattcactccggtaagcaggtgggagtctacttctatgacaatggccacggggtactcgaggataacgacatatacaatcacatgtatagcggagtgcagattcggactggcagcaatcccaaaattcgcagaaataagatatgggggggacagaacgggggtattttagtatataattctggcctcggctgcattgaagataacgagatcttcgacaacgctatggcaggcgtctggatcaagactgactctaacccaactctgcgcaggaacaaaattcacgatggtcgtgacggtgggatatgtattttcaacggaggacgtggattgctggaggaaaatgatatttttaggaacgcacaggcgggtgttctcatttctacaaacagccatcctatactcagaaaaaacaggatatttgacggattcgcagccggaatcgaaatcaccaaccatgccaccgccaccctggaggggaaccagatttttaataaccggttcggaggcctattcctcgcctccggtgtcaatgtgacaatgaaggataacaagatcatgaacaaccaggacgccatcgagaaggctgtttcacggggtcagtgcctgtacaagatcagttcttacacctcctatccgatgcacgacttctaccggtgtcatacatgtaatacgacagatcgcaacgcaatttgcgtgaattgcatcaagaaatgtcaccaggggcatgatgttgagttcatccggcatgaccgctttttttgtgactgcggagccggtacattgtccaacccatgcaccctggcgggagagccgacccacgacacagacaccctctacgatagcgctccaccaattgagtccaatacactgcagcacaactag

SEQ ID NO: 222987 - DNA, 1056 bp, synthetic construct
  misc_feature 1..1056: note = Description of Artificial Sequence: Synthetic coding sequence
  source 1..1056: mol_type = other DNA
atggagatcaaggaagagtttacgtcgctggttatggacgaggccctactgaaggaaatgactttcatgcacgagaagggacagggtgtcattgaagagaatgaggtatactctaatactctagccggagtttgggttactactgggtcaacccctgtgctgagaagaaaccggatccactccggcaagcaagtgggagtgtacttttacgacaacggtcatggcgtgctggaagacaacgatatctacaatcatatgtactccggagtccagatccggaccggctcaaatcccaagatccgcaggaacaaaatctggggcggtcaaaatggcggtatcctggtgtacaacagcggactgggttgcattgaggacaacgagatttttgacaacgccatggctggcgtttggataaagacggattcaaatcccactctcagaaggaacaagattcatgacggccgagatgggggtatctgtatcttcaacgggggacgaggactcctggaagaaaatgacatattcagaaacgctcaggccggtgtgctgatatctaccaactcgcatccaatcctgaggaagaatcgcatcttcgatggattcgccgctgggattgagatcacaaatcatgctactgccaccctggaaggcaaccagatcttcaataaccgcttcgggggtttgttcctggctagcggggtgaacgttaccatgaaagataacaaaataatgaataaccaggacgcaatagagaaggcagtgtcacgcggtcagtgtctctataaaatctcctcttatacatcatacccaatgcatgacttctaccgctgccatacatgtaacaccaccgatcgtaacgccatttgtgtaaattgcatcaaaaaatgccaccaggggcatgatgtcgagtttatccggcatgaccgattcttttgcgattgcggcgctgggacattatctaatccctgtaccttagctggggagcctacacatgatacggacaccctatacgacagtgctccacccatagagtccaacaccctgcagcataattag

SEQ ID NO: 222988 - DNA, 1305 bp, synthetic construct
  misc_feature 1..1305: note = Description of Artificial Sequence: Synthetic coding sequence
  source 1..1305: mol_type = other DNA
atgccatccgaaatcttactcaagatcttcagttatctagacgccgtcagtttactctgtaccggctgcgtgagccgcaggttttatcatttggccaacgacaacttcatctggattgggatatacagcacagccttctctccggcacgatccaactggaagttcaactcagttgagaaaatcgccatgtctatgagcttcttaagcgttcaggataaagaagccggatactggaagaaagagtacattactaagcaaatcgcatctgtgaaggccgctctggcagatatactaaaacccgtcaacccctacaccggtttgccagtgaagaccaaagaagcactaagaatcttcggcctggggtgggccatcatattgaaggagaaaggtgggaaagagtatatcatggagcatgtggatttgagcattaacgatacgagtgttacagtgatatggtacggtaagaagtggccctgtcttgccagtctatctacactggacttatgtggcatgactccggttttcactgactggtacaaaaccccaaccaagcatagacttcggtggcactccctgattgcgaaatataacctctcccacctgacaatcagcacaatgattggttgcgataggctgattaggattttctgcctccaccccggtctgctggtcggcgtatggaaaaaggaagaggaactggcgtttgttatggcgaatctccatttccaccacctggtggagagaagcactctcggcagcgccacgatcccctacgaacttcctccacacagcccctttttggatgattcccccgagtacggactgcacggataccagctccatgttgaccttcacagcggaggggtattctacctctgcggcacatttcggaatctgtttaccaaaaggggaaatattgagaatggccacgtgaagctgatcgtgatccacctcaaaaataaccgagaacacctgcccttaatcggaaaggtggggctgtcctggaaaactgatatctttgacggttgcatcaaaagctgcagcatgatggacgtgaccttactggatgagcatggaaagccattttggtgtttttctagcccagtttgcttaagatcccctgcaacaccttccgacagctcttcattcctcgggcagacttacaacgtcgattacgtcgatgccgagggcagagtccatgtcgagctggtgtggataagagagacagaggagtatctgattgttaatctggtattgtatttgtcaattgccaaaatcaatcactggtttggcacagagtactag

SEQ ID NO: 222989 - DNA, 1533 bp, synthetic construct
  misc_feature 1..1533: note = Description of Artificial Sequence: Synthetic coding sequence
  source 1..1533: mol_type = other DNA
atggcaactgggagaggtaggattctgcagcaacattggttagggctccagacacttaggggtccgtctcgcggagggggtgccgctaggggccgagctagggccttcggatgtcgcaagggtcccggagtgaagctgagcgcaggcagtgctgcgctgaggtgccacgccggaggtggccaacactgggagtctagcttcagctgttgttctggctttctggacggaatgccatccgagattctgctgaaaatattttcctatctggacgcagtgagccttctgtgcactggctgcgtgagtaggcgcttctaccatctggccaatgataattttatctggatcggaatatacagtaccgcttttagcccggctaggtctaattggaaatttaattccgtagagaagattgccatgagcatgtcattcctgtctgtacaagataaggaggctggctattggaaaaaggaatatatcaccaaacagatagcgagcgtaaaagcggctttagccgatatcctgaaacctgtgaacccatacaccggtctcccggtaaagactaaggaagccttaagaatatttggattaggttgggcaataattctgaaagagaagggaggcaaagagtatattatggagcacgtggacctttctatcaatgacactagcgttaccgtgatttggtacggaaagaaatggccctgtctagcttccctatctacacttgacctgtgtggcatgaccccagtgtttacagactggtacaaaaccccaacaaagcacagactccgctggcattcccttatcgctaagtacaatctctctcacctcacaatcagcacaatgatcggttgtgacaggctgattaggatcttttgtctccatccagggctgttagtcggcgtgtggaaaaaagaagaagagctggccttcgttatggctaatctgcactttcaccaccttgttgagcgatccaccctcggttctgccacaataccctacgagctccctccacacagtcctttcttggacgactccccagaatatggcctgcatggatatcagttgcacgttgaccttcactctggcggtgtcttctacctttgcggcactttccgcaaccttttcactaagcgcggtaatatcgaaaacggccatgtcaagctgatagtcatccatttgaaaaacaaccgcgagcacctccctcttatcggtaaagtcgggctgtcctggaagacagatattttcgatggctgtataaaatcctgctccatgatggacgttaccctattagacgagcatggtaagcccttctggtgctttagctctcctgtttgcctgagaagtcccgcaaccccctctgactcgagtagcttcctgggccaaacctacaatgtcgattacgtagatgccgaggggagggtgcatgtggaattggtttggattcgggagaccgaagaatatttaattgtcaacctcgttctctacttgagtattgctaagataaaccattggttcggaaccgagtattag

SEQ ID NO: 222990 - DNA, 879 bp, synthetic construct
  misc_feature 1..879: note = Description of Artificial Sequence: Synthetic coding sequence
  source 1..879: mol_type = other DNA
atgatggcattcgcaccaccaaaaaatacggacggcccaaaaatgcagaccaagatgagcacatggacccctctcaaccaccaactgctgaatgatagggttttcgaagagagaagagcattactggggaaatggtttgataagtggaccgactcacagcggaggcgcatcctgaccgggctgctggagcgttgttccctgtctcagcagaaattttgttgcagaaagctgcaggagaaaataccggcagaagcgctcgactttacaaccaagctacctagagtgctctccctttatatcttttctttcctggatcccagatctctgtgccgctgtgctcaggtgtgctggcactggaagaatctcgccgaattagatcaactgtggatgctcaagtgtctgcgattcaactggtatatcaacttctcccctactccttttgagcagggcatatggaagaagcactatatacagatggtcaaggaactccacatcacaaaacctaagaccccaccgaaggacggatttgtgatcgcggacgtgcagctggtcacgtctaactctcctgaagagaaacagagcccccttagcgccttccgtagttctagctctttacggaagaagaacaacagcggagagaaagcactgcccccatggaggtctagcgacaaacacccgaccgacattattcgatttaattacctggacaacagggaccccatggagactgtccaacaggggaggagaaaaagaaatcaaatgacacctgatttctctcgccaaagtcacgataaaaaaaataagctccaggatcgcacccgattgcgcaaagctcagtcaatgatgagtcgcaggaaccctttccccctgtgcccatag

SEQ ID NO: 222991 - DNA, 891 bp, synthetic construct
  misc_feature 1..891: note = Description of Artificial Sequence: Synthetic coding sequence
  source 1..891: mol_type = other DNA
atggacggagatggggatccggaaagtgtggggcagcctgaggaggcctctcccgaggaacagcccgaggaggcgtcagcagaagaggaaagacccgaggatcaacaggaggaggaggccgcagcagcagctgcctatctcgatgaacttcccgagccgttgctgctaagagtcttggcggctctgcctgccgcagagctggtgcaggcttgccgcttggtgtgcctccggtggaaggaactagtagacggcgcacctctgtggttgcttaagtgtcagcaggaaggcctcgtgcctgagggaggggtcgaggaagagagagaccactggcagcagttttactttctgtcgaagcgacggagaaacttgctcaggaacccctgcggggaggaggacttggaaggctggtgcgacgttgagcatggaggcgacggctggagagtggaggagctgccaggagattccggagttgagtttactcacgatgagagcgttaagaagtattttgccagtagcttcgaatggtgccgaaaggcacaggtgatcgatcttcaggccgagggatactgggaggaacttctggacaccacgcaaccggcaatagtggttaaagattggtatagcggcaggagcgacgctggatgtctctacgagttaactgtgaaactgttgagcgagcatgagaatgtcttggccgaattctcctctgggcaggtggctgttccccaggattccgatgggggtggctggatggaaatttctcacactttcacagattacggcccaggcgtgagattcgtgcgctttgagcatgggggacaggatagcgtttattggaaaggctggttcggggcacgcgtcaccaattcaagcgtttgggtcgagccatag

SEQ ID NO: 222992 - DNA, 594 bp, synthetic construct
  misc_feature 1..594: note = Description of Artificial Sequence: Synthetic coding sequence
  source 1..594: mol_type = other DNA
atggacggggatggcgaccctgagagtgtgggccagccagaagaagcatctccggaggagcagcctgaagaggcttcagcagaagaggagcgccctgaggaccaacaggaggaggaggcagctgctgctgccgcttaccttgatgaattgcctgaacccctgctgctccgtgtgctggccgcattaccagccgcagagttggtgcaggcttgcaggctggtgtgcctgagatggaaggaattagtggacggtgcccctttgtggctcctcaagtgccagcaggagggattagtccccgaggggggagtcgaggaagaacgggaccattggcaacagttttattttctcagcaagcggagacgcaacctactgaggaacccctgcggtgaggaggacttagaaggatggtgtgacgtggagcatggcggtgacggctggagggttgaggagctgccaggcgattcaggtgtcgagtttacccacgacgagagtgcaccagtcttacctggaggtgtggctaagcatagaggactgttgggcggagctgctggtcacgactctgcagggcatcggggagaaggtctggtcagatag

SEQ ID NO: 222993 - DNA, 1614 bp, synthetic construct
  misc_feature 1..1614: note = Description of Artificial Sequence: Synthetic coding sequence
  source 1..1614: mol_type = other DNA
atgaagcattactctcccaccgactacgttaattggctcgaagaatacaaagtgcgtcagaaagcaggcttagaagctagaaaaattgtcgcaagtttcagcaagaggtttttctcagagcacgtaccttgcaacggattctcggacatcgaaaatcttgagggcccagaaattttcttcgaagatgaactcgtttgtatccttaacatggaaggtcggaaggctttgacctggaagtactatgccaaaaagatcctgtattacctccggcaacagaaaatactgaataatctgaaggccttcttgcagcagccggacgactacgagagctacttggaaggggctgtatatatcgatcagtactgcaacccattaagcgatattagcctgaaggatattcaggctcagatcgactccattgtagagcttgtctgcaaaacgctgagaggtattaatagccggcatcccagccttgcattcaaagctggtgaatcctccatgataatggaaatcgagttacagtcccaggtcctggacgccatgaattacgttctgtacgaccagcttaagttcaaaggaaaccgcatggactattataatgcacttaacctgtacatgcaccaagtgctcatcaggagaacaggaattcctatcagtatgtctcttctatatcttaccattgctcgacagctaggcgtgccactggagcctgtgaactttccctcccacttcctgctgaggtggtgccagggtgccgaaggcgctaccctggatatattcgattatatctatatagatgcctttggaaagggtaagcagttaacagtgaaggagtgtgaatatttgataggtcagcacgttaccgccgctctgtatggtgtagtcaacgtgaaaaaggtccttcaacgaatggtcggaaatcttctcagcctgggcaagcgagaagggatcgatcaatcctaccaactactccgagattccctcgacctctacctggctatgtaccccgatcaagtgcagctacttttgctacaagcccgtctctatttccacttgggcatctggcccgagaaagtgcttgacatcctgcagcacatccagacactggatccaggacagcacggtgccgtagggtatttggtgcagcacacgcttgagcacatcgaacgcaagaaggaagaggtcggcgtggaagtgaaactccggagcgatgagaaacaccgtgacgtctgctattcaatcggactgattatgaagcacaagcgctatggctacaactgcgtgatttacgggtgggatccgacctgtatgatgggacatgagtggattcgaaacatgaatgtccactcccttcctcatggccaccaccagccattttataatgtcctggtggaggacggctcatgtcgctacgcagcgcaggagaatttggagtataatgtcgagccgcaggaaatctcacatcccgatgttggaaggtacttttcggaattcacaggcacacactacattcctaacgctgaacttgagatcaggtaccccgaagacctggagtttgtgtatgagactgtacagaacatctactctgcgaagaaggagaatattgacgagtag

SEQ ID NO: 222994 - DNA, 1887 bp, synthetic construct
  misc_feature 1..1887: note = Description of Artificial Sequence: Synthetic coding sequence
  source 1..1887: mol_type = other DNA
atggccgcagccgcagtggacagcgccatggaagtcgtgccagccttagcggaggaggcggctcctgaggttgctggtctgtcatgccttgttaatctgcctggagaagttttggagtacattctgtgctgtggaagtttaacagcggcagacattgggagggtgtcttccacctgtagacgactccgagagctttgccagagctcagggaaggtttggaaggaacagttccgggtgagatggccaagtttgatgaagcattattcccccacggattacgtgaattggctcgaagagtacaaggttcgccagaaggctggcctggaagcccgaaaaatagttgcttctttttctaaacggttctttagtgaacacgtcccgtgtaacggcttctccgacatcgaaaacctggagggccctgagatcttctttgaggatgaactggtgtgcattttaaacatggaaggccgtaaagcccttacctggaagtactacgccaagaagatactgtactacttaaggcagcagaaaatactgaacaatcttaaggcgtttctacagcagcccgacgattacgaatcttaccttgagggcgcagtgtatattgaccagtattgtaatccgctctccgacatttcactgaaagatatccaggcccaaatcgattctattgtagaactcgtatgcaaaactctgcggggtatcaattcacggcatccgagcctggcttttaaggcaggcgaaagctcaatgatcatggagattgagcttcagtctcaagtgttagatgccatgaactacgtgttatacgatcagttaaagtttaagggaaacaggatggattactacaatgctctgaatttatatatgcatcaggtgctcatccgcagaacaggcatacccatttcaatgagtctgttgtatttaaccattgcacggcagctgggggtaccacttgagccggtcaacttccctagccactttcttctgaggtggtgtcaaggtgctgaaggcgctacgctagacatttttgactacatatacatagacgcgtttggcaaggggaagcaactcaccgttaaagagtgcgaatacttaatcggccaacatgttacagctgcgctgtacggtgttgtgaatgtgaaaaaggttctgcagcgtatggtcggtaaccttctctctttgggcaagagggaaggcatcgatcagagctaccagcttttgagagacagcctcgatctttacttggccatgtacccagaccaggtgcagctgctactgctgcaggccagactctattttcacctgggtatctggcctgagaagtcattctgcctcgtcttgaaggtcttagatatcctgcagcatatccaaaccctggatccaggccaacacggcgcagtgggatacctggtgcagcatacgctcgagcatattgaacggaagaaggaggaggtcggtgtggaggtaaaattaagaagcgacgaaaaacaccgcgatgtgtgttactctatcggacttatcatgaaacacaagcgttacggctacaattgtgtaatctatgggtgggaccctacttgcatgatgggccatgaatggatccgcaatatgaacgtgcacagcctgccacacgggcaccatcagccattttacaatgtcttggtagaggatgggtcatgccggtatgccgcacaggagaaccttgagtacaatgtggaaccccaggaaatttcccatccagatgtcgggagatatttttccgagttcaccgggactcactatatccccaacgccgagctcgaaatcaggtacccggaggatcttgagtttgtgtatgaaactgtgcaaaatatatacagcgccaaaaaagagaacattgacgagtag

SEQ ID NO: 222995 - DNA, 1866 bp, synthetic construct
  misc_feature 1..1866: note = Description of Artificial Sequence: Synthetic coding sequence
  source 1..1866: mol_type = other DNA
atggcagctgccgcagtggattcagccatggaagtggtgcccgctttagcagaggaggcagctccggaggtggccggactttcatgcctggtgaacttgccaggtgaagtactggaatacattttatgctgtggaagtctgaccgccgctgacattggcagggtgtcctccacatgccgcaggcttagggaactttgccaatccagcggaaaagtttggaaagaacagttcagagtgcggtggccctctctcatgaaacactatagtcctacagactatgtcaattggctagaggaatataaggtgcggcaaaaagccggattggaggccaggaagatcgtcgcctcattctcaaagcgttttttcagcgaacacgtgccctgcaacgggttcagcgatatcgaaaatctggaaggacctgagattttcttcgaggacgagctagtctgtatcctgaacatggaaggcaggaaagctctgacctggaagtactatgcgaagaagatcctgtattacctacgccaacagaagattctaaacaatctgaaggcattcctccagcaacccgatgactacgaaagttatctcgaaggtgctgtctatatagaccagtactgcaatccactgtcagacatttctctcaaagatatacaggcccagatcgactcaattgtggagctcgtgtgtaagacactgagaggtattaacagcagacacccgagtctggcttttaaggctggtgagagctccatgataatggagatcgaacttcagagccaagtcctcgatgctatgaactatgtgctatatgaccagttaaaatttaagggtaacagaatggattattataacgcgctgaacctgtacatgcatcaggtgctgataagaagaactggaatacctatttcaatgtctcttctctacctgactatagcccgtcaactgggggtgccactggagccagtcaattttcccagccattttctgctcaggtggtgccagggggctgagggcgcaacattagatatcttcgactacatatacattgatgctttcggaaagggcaaacagctcaccgtgaaggagtgtgaatatctcatcggccaacacgtgacagctgcactgtacggagtcgtgaacgtcaaaaaggtcctccagaggatggtcggaaaccttctctctctgggtaaaagggaggggatcgatcagagctatcagcttttgagggattcccttgacctgtatctcgctatgtacccagatcaggtgcaactgcttctccttcaggctcggctctactttcacctgggcatttggccggagaaagtgttagatatcctgcagcatatccagaccttagatccagggcagcacggtgcagtaggctatctcgtgcaacacacactcgaacatatcgaaaggaagaaggaggaggtgggcgtggaggtaaaactccgctccgacgagaagcaccgtgacgtctgctatagcataggcctcattatgaagcataaacggtacggatacaactgtgtgatctacggctgggaccccacctgtatgatgggtcatgagtggattaggaatatgaatgtgcacagcctgcctcatggccaccatcaaccgttttataatgtcctggttgaggacgggagctgtaggtacgccgctcaagaaaatctggagtacaatgtggagccacaggagatctcacaccctgatgtgggaaggtattttagcgagtttactgggacacattacatcccgaacgcggaactcgagatcaggtatcccgaagatctcgagttcgtctatgagaccgtgcagaatatttattcagcaaagaaagaaaacattgacgagtag

SEQ ID NO: 222996 - DNA, 1434 bp, synthetic construct
  misc_feature 1..1434: note = Description of Artificial Sequence: Synthetic coding sequence
  source 1..1434: mol_type = other DNA
atgaagcactattcccctaccgattacgtcaactggcttgaagaatacaaagtcaggcagaaggcgggtttagaagcaagaaagatcgtagcctccttctcaaagaggttcttctcagaacacgtgccttgtaacggtttttcagatatagagaatctggagggtccagaaattttttttgaagatgagttagtgtgcatcctcaatatggaaggaaggaaggcactgacttggaagtactatgccaagaagattttgtactacctccggcagcagaagatcctgaataaccttaaggcattcctgcagcagcctgacgactatgagtcttatctcgagggggcagtgtacatcgaccaatattgcaatcccttgtcggatattagtctcaaggacatccaggcacagatcgacagcattgttgagctagtttgtaaaacactcagagggataaatagtcgccatcctagtctcgccttcaaggccggtgagtcttctatgatcatggagattgaactacagtctcaggtgttagacgccatgaattacgttctttatgatcagctgaaattcaaaggtaacaggatggactattacaacgcattgaatctttacatgcaccaagtcctcatccgtcgaacgggaatccctatctctatgagtctgttatacctcacaatcgcgcgtcagctcggagtacccttagagcctgtcaattttccaagccacttcctcctgaggtggtgccagggtgccgaaggcgagggtatcgaccagagttaccagctgctgcgcgactctctcgatctttatctggcgatgtatcctgaccaggtccagctgctgctactacaggcaagactgtacttccacctgggaatatggcccgagaaggtgctcgacatattgcagcacattcagactcttgacccaggccaacacggcgctgtgggctatctcgtgcaacacacattggagcatatcgaacgcaagaaggaggaggtaggagtggaggttaagctgagatccgacgagaaacacagggacgtttgctacagtatcggtctgattatgaaacacaagagatatggctacaactgtgtcatctatggttgggacccgacctgcatgatgggccacgaatggatccgcaacatgaacgtgcactcccttccccatggtcatcaccagcccttttacaatgtgctcgtcgaagatgggagctgtagatacgctgcccaagaaaacctggaatacaacgtggaaccacaggaaatcagtcacccagacgtcgggaggtattttagcgagtttaccggcacacactacattcccaacgccgagctagagataaggtaccctgaagacctggaattcgtgtacgagactgtgcagaacatctattccgccaagaaggagaacatagacgaatag

SEQ ID NO: 222997 - DNA, 1212 bp, synthetic construct
  misc_feature 1..1212: note = Description of Artificial Sequence: Synthetic coding sequence
  source 1..1212: mol_type = other DNA
atggaaccggtgggatgttgcggcgagtgcagggggtcttctgtggatcccagatccacatttgttctgtcaaacctggctgaggtggttgagcgagtccttactttcttacccgctaaagcccttctcagggttgcatgcgtttgccggctatggcgcgaatgcgtgaggcgggttctccgcacccaccgatcagtgacctggatcagcgctggcctggcagaggccggtcaccttgaggggcactgcctcgtgcgcgtggtcgcagaagaacttgaaaatgtccgaatcctgccccataccgttctttatatggcggatagcgagacttttatatcgctggaggaatgccgcggtcataagagagccagaaaacgcacatctatggaaactgctttggcgcttgaaaagctcttccctaagcagtgccaagtgctgggcatcgtcaccccgggtatcgtggtgacacccatgggctccggctccaaccgtccgcaggaaattgagattggggaatctggatttgcactattattcccacaaatcgagggcatcaagatccagcccttccatttcattaaggatccaaagaatcttacccttgaacggcaccagctgacagaagttggactcctcgacaatccagaactacgtgtcgtcctagtctttgggtacaattgctgcaaagtgggcgcttccaactacttacagcaggtggtatctacattcagtgatatgaacattatattggcgggtggccaggtggataatctcagtagcctcactagcgagaagaacccattggatatcgatgcctccggcgtcgtcggcctgtctttctccggtcatcggattcaaagtgctaccgtgctgctgaacgaggatgtttccgatgaaaagaccgctgaggctgctatgcagcggctcaaagccgctaatatacctgagcacaacacaataggcttcatgtttgcttgcgtgggtaggggtttccagtactatcgagccaaggggaatgtggaagctgatgcctttcggaaattctttccatctgtaccgctctttggcttcttcggcaatggcgagataggctgcgacaggattgtgaccggaaactttatcttgcgcaaatgtaacgaagtcaaggacgacgaccttttccatagttacacaaccattatggctcttatccacttgggctcttccaaatag

SEQ ID NO: 222998 - DNA, 831 bp, synthetic construct
  misc_feature 1..831: note = Description of Artificial Sequence: Synthetic coding sequence
  source 1..831: mol_type = other DNA
atggaaccagtgggctgctgcggcgagtgtaggggcagtagcgtagacccacgcagtacattcgttctttctaacctggcagaggtcgtcgagcgcgtcctgacatttttgcccgcaaaagcattgctaagggtcgcctgtgtctgtcgattgtggcgggagtgcgtgcgacgtgtgctacgaacccatcggtccgttacatggattagcgccggtctcgccgaagctggccatcttgagggccattgcttggtcagggtggtggccgaggagctggagaatgtgcggatactcccacataccgttctgtacatggcagacagcgagacatttatatcactcgaggaatgccggggacacaagcgagcacgcaagaggacatcaatggaaacagccctggcactggaaaagttattcccaaaacagtgccaggtgctggggattgtaactcccggtatcgtggtgacccccatgggaagcgggagcaaccgacctcaagagattgagattggtgaatccgggttcgccctgctgtttccccagatagagggcatcaagattcaaccattccacttcatcaaagatcctaagaatttgacattagagaggcatcagctgactgaggttgggttactcgataaccccgaactcagagtggttttagtgtttggatacaattgctgtaaagtgggggcttcaaattacctgcaacaggttgtatctacattctccgacatgaatattatcttggccggaggccaggttgataacctgtcctccctgaccagcgaaaagtacgtgctctgcgcgagcgatttcgtgtgcgaatag

SEQ ID NO: 222999 - DNA, 900 bp, synthetic construct
  misc_feature 1..900: note = Description of Artificial Sequence: Synthetic coding sequence
  source 1..900: mol_type = other DNA
atggccgacagcgaaacgtttatctctcttgaagaatgtagaggccataaacgcgctcgtaagcggactagtatggagacggccctagcccttgaaaaactatttccaaaacaatgccaggtcttggggatcgttactcctgggattgtggtgacacctatggggtcaggatccaatcggcctcaggagattgaaataggggaaagtggctttgccttgctgttccctcaaattgaaggaatcaagatccagcccttccactttatcaaggaccccaaaaatcttactttagagaggcatcagctcaccgaggtcgggctgttagataatcctgaactccgcgtagtccttgtctttggctataactgctgtaaagtgggcgcttcgaattacctccagcaggtcgttagtaccttttctgacatgaacataatattggctggcggacaggtggacaatctgagctctctgacctccgagaaaaacccccttgacattgacgcttcaggtgttgtcggactctcattttccgggcatcgtattcagtctgctaccgtgttgctcaatgaggatgtgagcgatgaaaaaacagccgaggcggcaatgcagcggttgaaagcggctaacattccggaacataacaccatagggttcatgtttgcatgcgtggggagaggtttccagtattacagggccaaaggcaacgttgaggctgatgcgttccgtaaatttttcccctcagttccactgttcggattttttggtaatggggaaatcggctgtgatcggatcgtgaccgggaattttatcttgaggaagtgcaacgaggtaaaagatgatgacctgtttcattcatacaccacaatcatggcattgatccatttgggaagctcaaaatag

SEQ ID NO: 223000 - DNA, 1743 bp, synthetic construct
  misc_feature 1..1743: note = Description of Artificial Sequence: Synthetic coding sequence
  source 1..1743: mol_type = other DNA
atgggggagaaagctgtcccactgctgcgccgtcgcagggtgaagaggtcctgtccctcctgcggatctgagttgggcgtcgaggagaagagaggaaagggcaatccaatatccattcagctctttcccccagaactcgttgagcacataatctcttttctgccagtccgcgatctagtggcactgggccaaacttgccggtacttccatgaagtgtgcgacggagagggagtttggcggagaatctgtcggcgtctgagccccagattgcaagaccaaggatcgggagtgaggccatggaagagggccgcaattctgaactacacgaagggcttgtactttcaggcattcgggggtagacgcagatgcttgtccaagtctgtagcgcctctgttggcacacggatatagaaggtttctgcctacaaaggaccacgttttcattctggattatgttggcaccctgttttttctgaaaaatgccctggtttcaacactgggccagatgcagtggaaaagagcctgccgatatgtggtcctgtgcagaggtgcaaaagatttcgcatccgatcccaggtgtgacactgtctatcggaagtacttgtacgttctggccaccagggaaccccaggaggtagttggtacgacttcatccagggcctgcgattgtgttgaagtttacctccaatcaagtgggcaacgggtgtttaagatgactttccaccactccatgaccttcaagcagatcgttttagtgggacaggaaactcagcgggcactgctgctgttgacagaagagggcaagatatactctctggtggtgaacgaaacacagctggatcagccgcgatcttataccgtccagcttgctctgagaaaggtatcacattatctaccacatctgagggttgcttgcatgacatcgaatcagtcgtccactctgtacgttacggaccagggaggcgtgtactttgaagttcatacaccgggtgtctaccgagacctgtttggtaccttgcaggccttcgatcctcttgatcagcagatgcctctagctctgtcacttccagccaaaatactcttttgcgcgctaggatacaatcacttaggtctggtggatgagttcgggcgtattttcatgcaggggaacaacagatatggacagctgggcacaggcgacaaaatggatcgaggtgagcccacacaggtttgctacctgcagcgacctattaccctttggtgtggcctgaatcatagcctggtcctatcccagtcaagcgaattctctaaggagctgctgggctgcggttgcggcgctggtggccgactgccaggctggccaaagggaagcgccagcttcgttaagttgcaggtaaaagtgccactatgcgcatgcgcactgtgtgctactcgggagtgcctgtatatcctgtccagtcatgatatcgaacaacacgccccttatcggcatctgcccgcatcccgcgtcgtgggtactccagaaccgtcccttggcgctagggccccacaggaccctggcggtatggcccaggcatgcgaggagtacctgtctcagatacactcctgccaaacattgcaagaccggactgagaagatgaaagaaatcgtgggctggatgccactgatggcggctcagaaggactttttctgggaggcactggacatgctgcagcgcgctgagggcggaggaggcggagtgggacctcctgcgccagaaacttag

SEQ ID NO: 223001 - DNA, 957 bp, synthetic construct
  misc_feature 1..957: note = Description of Artificial Sequence: Synthetic coding sequence
  source 1..957: mol_type = other DNA
atgggagagaaggctgtccctctgttgaggagaaggagggtgaaacgtagttgtcccagctgcgggtcagagctgggagtagaggagaaacgtggcaagggaaatcccatctctatccaactttttccccctgagctggtggaacacatcatctccttcctccctgttagggacctagttgcactgggacagacctgtcgatatttccacgaagtgtgcgatggtgagggcgtatggcgcagaatctgcagacgcctgtcaccaagactgcaggaccaggatacgaaggggctctacttccaagccttcggaggaagaagaagatgccttagcaagagcgtagctccattgcttgctcacgggtacagaagattccttcctacaaaagatcacgtgttcatcctggactacgtgggaacactgttctttcttaagaacgccctggtcagtaccctcggccagatgcaatggaaaagagcctgccggtacgtagtcctttgtcgaggggcaaaggatttcgccagcgacccaaggtgtgatactgtttaccgtaagtatctttatgtcttggctaccagggagccccaagaggtcgtgggcacaacaagctcaagagcatgcgactgtgtggaagtctatctgcagtcctccggacagcgcgttttcaaaatgacattccaccattctatgacatttaagcagatcgttctggttggtcaggagacacaacgtgcactcctgctgctaactgaggagggtaaaatctactccctcgtggtgaacgaaacccagttggaccagccacgctcttataccgtccagctcgcactgcggaaggtgagccattatttaccgcatctgcgagtggcctgcatgactagcaatcagagctcaacgctgtacgttaccgaccctatcctctgttcatggctgcagcctccctggcctgggggttag

SEQ ID NO: 223002 - DNA, 1857 bp, synthetic construct
  misc_feature 1..1857: note = Description of Artificial Sequence: Synthetic coding sequence
  source 1..1857: mol_type = other DNA
atggtgtgggagagccaacaggagagaggcggacagggccctcggaggcaggaagggagaagccgggagggagccataaggatggtccgcggatcacagagaagaaagctccagaaattcacaaggctctgcggtcgtgaggagggtctgagagttaagcggtcatgcccttcctgtggcagcgagctcggcgtcgaggagaaacggggtaagggtaatccaatttcaattcagcttttcccgccagagctcgtcgagcacattatctcattcttgccagtgagggatttggttgccttgggacagacgtgccggtatttccacgaggtatgcgacggagaaggagtgtggagaagaatttgtagacgcctgtccccaaggttgcaagatcagggttcaggcgtacgtccatggaagcgcgcagcaatcttaaactacactaaaggcctgtattttcaggcttttggaggacgaagacgatgtctgagtaagtcggtcgcacccctgttggctcacggatatagacgctttctgccgactaaagatcacgtttttatacttgactatgttggtacgctgttttttctcaaaaatgcgctggtgagcaccctgggacagatgcagtggaaacgggcttgtcgctacgtggtgttatgcagaggagccaaggatttcgcttcagatccccgatgcgacacagtgtatcgaaagtacctctatgttctcgctacccgcgaaccacaggaagtggtgggtaccacctcttccagagcctgtgactgtgtagaggtttatctccagtccagcggtcagcgggtgtttaaaatgacctttcaccactctatgacattcaagcagatcgtccttgtggggcaggaaacacaacgagcactcctgctgctgaccgaggagggcaaaatctattcacttgtcgttaatgagacccagctagaccagccacgaagctatacagtacaacttgctctgcgcaaagtctctcattacctgccccatctgagagttgcctgcatgacttcaaaccaaagctctacactctacgtgaccgaccagggaggagtgtatttcgaggtgcacacacccggagtttatcgggacctttttggaaccctccaggcctttgacccccttgatcagcagatgccgcttgcactgtccctcccggcaaaaatattattctgcgccttaggctacaaccatcttggcctcgtggatgaattcgggagaatattcatgcaaggaaacaatcgctacggtcaactagggaccggtgacaagatggatagaggtgagcccacacaagtgtgctatctacaaagaccaatcacactgtggtgcgggcttaatcattccctggtcttatcccaatcgtctgagtttagtaaagagttgctgggctgtggttgcggggcagggggtagactcccaggatggcccaaaggatcagcttcttttgtcaagttgcaggtgaaagttcctctttgtgcatgcgcgttgtgcgcgacgcgcgagtgtctgtacatcttgagctcacacgacatcgagcagcatgcaccgtacagacacctgcctgcctctcgagtcgttggcacccccgagccttcccttggagcacgcgctcctcaggatccaggtggcatggcgcaagcctgcgaagaatatctttcccagatacactcctgccaaacattacaggaccggacggagaaaatgaaggagatcgtgggctggatgcccctgatggcagcccagaaggatttcttctgggaagcactagacatgctgcagcgcgcagagggtggtgggggtggagtgggccctccagctccagaaacgtag

SEQ ID NO: 223003 - DNA, 957 bp, synthetic construct
  misc_feature 1..957: note = Description of Artificial Sequence: Synthetic coding sequence
  source 1..957: mol_type = other DNA
atgggggagaaggccgttcctctgctgaggcggcgtagagtcaagagatcttgcccaagctgtggctccgagctgggcgtagaggaaaagagaggcaagggcaaccccatctccatccaactctttccacctgaactggtagagcacatcatctcctttctgccagtgcgagacctcgtggctctcgggcagacctgtaggtacttccacgaggtctgcgatggcgagggggtatggcgccgaatctgtcggaggctgagtcccagacttcaagaccaggatactaagggtctttatttccaagctttcggaggcaggcgacgctgtttaagtaagtctgtagctcctctgctcgctcacgggtaccgcagattcctgccaacgaaagaccatgtgttcattttggactatgtggggaccctgttcttcctcaaaaacgcgctagtgtccacgctgggtcagatgcaatggaagcgggcttgtcgctacgtcgtcttatgtagaggcgcaaaggacttcgccagcgatcctcgatgcgatactgtgtataggaagtacctgtacgtgctggctactagggagccccaggaagtcgtggggacaaccagctctcgcgcatgtgattgcgttgaggtgtacctccagagcagcggtcagcgggtttttaaaatgactttccaccattcaatgacgttcaagcaaattgtgctggtgggccaggagacgcagcgggcactgctgctcttgacagaggagggaaagatttactccttagtggtgaatgaaacacagttggaccaacccagaagttataccgttcaacttgccctgcgcaaggtcagccactaccttccccacctccgagttgcttgcatgacgagcaaccagagtagtaccttgtacgtgactgatcctatcctttgcagttggctgcaaccaccctggcccggtggctag

SEQ ID NO: 223004 - DNA, 1707 bp, synthetic construct
  misc_feature 1..1707: note = Description of Artificial Sequence: Synthetic coding sequence
  source 1..1707: mol_type = other DNA
atggtaaagcgcagttgcccaagctgcggttccgaactcggtgtagaggaaaaacgcggaaagggtaaccccatttccattcaattatttccacctgaattggtggagcatatcattagcttcttgccggttcgggacctcgtggccctcgggcagacctgccgatatttccatgaagtgtgcgatggcgagggcgtctggaggcggatctgtaggcggctgtccccccgactccaggaccagggatccggcgtgaggccgtggaagcgcgctgcgattcttaactacaccaagggcctctactttcaagcgttcgggggacgtcgcagatgcctctctaagtccgtggccccattgctggcacatggatataggaggtttttgcctaccaaggaccacgtgtttatactcgattacgttggtacactttttttcctaaaaaacgccctggtctccaccttgggtcaaatgcaatggaaacgcgcatgcaggtatgtcgtattgtgccgaggcgctaaagattttgcttctgatcctcgttgcgacacagtctacaggaagtacctgtatgtgttagcaacaagggagccgcaggaagttgtgggaacgacttcttcacgtgcctgtgactgtgtcgaggtctacctgcagtccagcggccagagggttttcaaaatgacatttcaccatagcatgactttcaaacaaatcgtcttagttggtcaggagactcagagggccctgctgctgctgacagaggagggcaaaatatactcgctggtggtgaatgagacccagctggaccagcctagaagttatacagtccaactggccctgcggaaggtgtctcattatctcccccatttgagggtggcctgcatgacatctaaccaatcctcaacactgtatgtgacagaccagggcggagtctactttgaagtgcatacgccgggtgtctaccgggacctgtttggaactctgcaggccttcgaccccctggaccagcagatgccactcgctttgtccctcccggcaaaaattcttttctgcgccttgggctataaccacttgggcctggttgatgaatttgggagaatttttatgcagggtaacaatcgctatggtcagctgggcaccggtgacaaaatggatcgcggagagccaacccaggtatgctacctgcagaggccaatcactctgtggtgcgggctcaatcacagtttggtattgtcacagagcagtgaattcagcaaggagctcctgggatgcggctgcggtgccggtggtaggctgcctggttggccaaaaggatcagcctcattcgtgaaactgcaagttaaagttcctttgtgtgcctgcgcgttgtgtgctacccgggagtgcctttacattctgagctcccacgacatcgagcagcacgctccatatcgacacctcccagcatcgcgggttgtaggcactcctgagccctcactgggagcaagggctcctcaagatccagggggtatggcccaagcatgcgaggagtatctgagtcagattcactcgtgccagactctccaggatcgaacagaaaaaatgaaggagatcgtgggctggatgcctctaatggcagctcagaaagacttcttctgggaagctcttgacatgctccaacgggcagagggtgggggtgggggtgtggggccaccagcccctgagacctag

SEQ ID NO: 223005 - DNA, 1104 bp, synthetic construct
  misc_feature 1..1104: note = Description of Artificial Sequence: Synthetic coding sequence
  source 1..1104: mol_type = other DNA
atgccttttctgggccaagactggcgttctcctggctggtcgtggatcaagactgaggatggctggaagcgatgtgaatcttgttcacaaaagctggagagagaaaacaacaggtgcaatatcagccattcaattatcttgaattcagaggatggggagattttcaacaatgaggaacatgagtacgcctctaaaaaaaggaaaaaagatcacttccggaatgacacaaacactcaatccttttatcgggagaagtggatttatgtacacaaggagagcaccaaagagcgccacgggtactgtacactgggtgaagcgttcaacagactggacttcagttcagccatacaggatatccgccgtttcaattatgtcgtgaaactgctgcagttgatcgccaagtcgcagctcacatccttgagtggcgttgctcaaaagaattacttcaatatattagataaaatcgttcaaaaagtcctggatgatcatcacaatcctagactgattaaggatctccttcaggatctgtcatccactctctgcatcctcatcagaggagtcgggaaaagtgttcttgtcggcaacattaatatctggatctgtcggctggagactatattggcctggcagcagcaactgcaagacctgcaaatgaccaaacaagtcaataacggtctgactttgtcggatctccctctgcatatgctcaataacattctgtaccgctttagtgacggatgggacatcatcactcttggccaagttacccccactctgtatatgctcagtgaagaccggcagttgtggaagaagctttgccaatatcacttcgctgaaaagcagttttgccggcacttgatcctgagcgagaagggacatatcgagtggaaactgatgtacttcgcactgcagaagcattacccagctaaggaacagtatggcgatacgctgcatttctgtaggcattgctccatcttgttttggaaggattaccacctggctctattgttcaaggactcaggccacccctgcacagccgcagacccagactcttgtttcacacctgtgtccccgcaacacttcattgatctgttcaaattctag

SEQ ID NO: 223006 - DNA, 1077 bp, synthetic construct
  misc_feature 1..1077: note = Description of Artificial Sequence: Synthetic coding sequence
  source 1..1077: mol_type = other DNA
atgccttttctgggacaggactggaggtcacctggctggagttggattaagacagaggatgggtggaagagatgcgagtcatgttctcagaaattggaacgcgaaaacaaccggtgcaatataagccactctattatcctaaattctgaggatggtgagatttttaacaacgaggaacacgaatatgcctcaaagaagcgcaagaaagatcattttcggaacgatactaatacccagagtttctatagggagaaatggatatacgtacataaagaatctaccaaggaacgtcacggatactgtaccctgggcgaggctttcaatagactcgactttagtagcgccatccaggatatcagaaggttcaactacgttgtaaaactcttgcaattaatagcgaagtctcagcttacttctctgtcgggagtcgcccagaagaattactttaacattctggacaaaattgtacagaaggttctagacgaccaccacaatccgagactaatcaaggacctgctccaggacctctctagtacgttatgcatactgattcggggtgtggggaagagcgtgcttgtggggaacataaatatctggatttgcaggctggagacaattctggcatggcagcagcagctccaagacttgcaaatgaccaagcaggttaacaacggcctgaccttaagtgacctcccactgcatatgttgaacaatatcctgtatcggtttagcgatggctgggacattataacactgggccaggtaacgcccacactgtatatgctgtccgaagacagacaactgtggaagaagctctgccagtatcacttcgcagagaagcagttttgtaggcatttgatcctcagcgaaaaaggccatattgaatggaaactgatgtacttcgctttacagaagcactatcctgccaaggaacagtacggagatacgctgcacttttgcaggcactgcagcatcttattctggaaagactctgggcatccttgtaccgcagccgatccagactcctgtttcacaccagtgtctccacagcacttcattgacctattcaaattttag

SEQ ID NO: 223007 - DNA, 876 bp, synthetic construct
  misc_feature 1..876: note = Description of Artificial Sequence: Synthetic coding sequence
  source 1..876: mol_type = other DNA
atggagaaatatagtatcatgaagtctatgaatatgcatagaaagaaaggcaagcgcactatcttggaaatgacacaaatccttaaaaggcacggatactgcactctgggggaagccttcaatcgcctagacttctctagcgctatccaggacattcgccgttttaactatgtagtaaaactgttgcagctgatcgccaaatcccagctgacctctctgtcaggagtcgcccagaaaaactatttcaacattttagacaagattgtccagaaagttctcgacgatcaccacaaccctcgcctcatcaaggacctgctccaggatttaagttccaccctatgtatccttattcgcggagtcggcaaaagcgttctggttggcaatattaatatctggatctgtcgacttgaaactatcctggcatggcagcagcagctacaggatctgcagatgacaaaacaagtcaacaacgggctgactctgtcagacttgcccctgcatatgcttaacaacattctgtatcggttctccgatggatgggacataattacgttggggcaggtgactcctaccctttacatgttaagcgaggacaggcagttatggaagaagctctgtcagtatcactttgccgaaaagcaattttgcagacatttgatcctttcagagaagggacatatagagtggaagttaatgtactttgccttgcagaagcactatccagctaaagagcagtacggtgataccctccacttctgccgccactgctcaattcttttttggaaagactctggacacccctgcactgctgctgacccagactcctgctttaccccagtgtccccccagcacttcatcgacctcttcaaattctag

SEQ ID NO: 223008 - DNA, 876 bp, synthetic construct
  misc_feature 1..876: note = Description of Artificial Sequence: Synthetic coding sequence
  source 1..876: mol_type = other DNA
atggagaaatacagtattatgaaaagcatgaatatgcacaggaaaaaaggcaaaagaacaattctcgagatgacccaaattctcaagcggcatggctactgtacactcggcgaggcattcaatcgactggatttttcgtctgccatccaggatattcgcagatttaattatgtcgtcaaattgctgcagttaatcgccaagagtcagctgacatctttgagcggagttgctcagaagaactactttaacatcctggataagattgttcaaaaagtcttagatgaccaccacaatcccaggttgattaaggaccttctccaggatttgagctccacactgtgcattctgatccgtggcgtaggcaaaagtgtgctggtagggaatattaacatctggatctgcagattggagacaatcctggcatggcaacagcagcttcaagacttgcaaatgacaaaacaggtgaataatggcttgaccctgagcgacctgcccctacacatgttgaacaacattctgtatcgtttttctgacgggtgggatatcatcacattaggacaggtgacccctaccctctacatgctttcggaggatcgacagctctggaaaaagctctgtcagtatcattttgcagaaaagcagttttgccggcacctgatattgagcgagaaggggcatatcgaatggaagttgatgtattttgctctccagaagcattaccctgccaaggagcagtacggcgatacccttcacttttgccggcactgctccattctgttttggaaggacagcgggcacccttgcacagccgctgatcctgactcctgttttaccccggtgtctcctcagcactttatagatttgttcaaattctag

SEQ ID NO: 223009 - DNA, 993 bp, synthetic construct
  misc_feature 1..993: note = Description of Artificial Sequence: Synthetic coding sequence
  source 1..993: mol_type = other DNA
atgccatttcttggccaggattggaggtctcccggatggagctggattaaaactgaagacgggtggaagcgttgcgagtcctgctcccagaaacttgaacgcgaaaataaccggtgtaacattagccactccataattctgaattccgaagacggcgagattttcaataacgaggaacacgagtacgcatccaagaaacgcaagaaggatcacttcagaaatgatacgaacactcagagtttctacagggagaaatggatatacgttcataaagagagtaccaaagagaggcacggatactgtacattgggggaagccttcaaccggttggattttagttccgccatacaggatatccggagatttaactacgtggtgaaattgctgcagttgatagccaaaagtcaactgacctctctgtctggagttgcacaaaaaaattacttcaatattctcgataagatcgttcagaaggtactagatgatcaccacaatccacggctgattaaagatctcctccaggacctttcttcaacactgtgcatcttgattcgcggagtaggcaagtctgttctggtgggcaatataaacatttggatttgtcgtttggagactatcctggcctggcagcagcagctgcaggacctgcagatgacaaaacaggtgaataatggcctcaccttgtcagatctcccgctgcttagcgaggaccggcagttgtggaaaaagctgtgccagtatcacttcgcagagaaacagttctgcagacatctcatcctgtctgagaaaggccacatcgaatggaagctcatgtattttgctctgcagaaacattatcccgcaaaggaacagtatggagatactcttcatttctgccgccactgcagtatcttgttttggaaagatagtgggcacccctgcaccgctgccgacccagacagttgcttcacaccagtctcaccgcagcatttcatcgatcttttcaaattctag

SEQ ID NO: 223010 - DNA, 378 bp, synthetic construct
  misc_feature 1..378: note = Description of Artificial Sequence: Synthetic coding sequence
  source 1..378: mol_type = other DNA
atgccgttcctgggtcaggattggcgcagccctggctggtcctggataaagacagaggatggctggaagcgatgcgagtcctgtagtcagaagttggagagggagaataaccgctgtaatatctcccactccataattttaaattctgaagatggtgaaatcttcaacaacgaggagcacgaatatgcgtccaagaaacggaagaaggaccatttccggaatgatacaaacacccagagcttttaccgggagaagtggatctacgtgcacaaagagagcactaaggagcgtcacggatactgcactctgggggaggctttcaatcgccttgacttctccagcgccatacaggacatcaggaggttcaactatgtttag

SEQ ID NO: 223011 - DNA, 852 bp, synthetic construct
  misc_feature 1..852: note = Description of Artificial Sequence: Synthetic coding sequence
  source 1..852: mol_type = other DNA
atgggcgcatcagtgagccggggacgcgcagcaagggtcccggctcctgagcccgaaccggaggaggctctcgatctatcccaacttcctcccgagctactgctggttgtgctttctcacgtgccaccccgaactctcctgggccgatgtaggcaggtctgcagaggatggcgagctcttgtggacgggcaggcactctggctgctgattttagctagggaccacggagctacgggacgcgcattactgcacttggctcgtagctgccagtctcccgctcgaaatgctcgtccctgtcctctcggtaggttttgtgccagacgccctatcgggcgaaatttaattcggaacccttgcggtcaggagggactccggaaatggatggtccagcacggaggagatggttgggtggtcgaggaaaatcggactacagtgcctggcgctcctagtcagacctgtttcgttactagcttctcatggtgctgcaaaaaacaggttctcgacttggaggaggagggcctatggcccgaactgcttgacagcggtaggattgaaatctgcgtttcagattggtggggagcccgtcacgactctggctgtatgtatcggctccttgtacagcttttagacgcaaaccagacggttttagacaaattcagtgctgtgcccgatccgataccccaatggaataataacgcttgcctgcacgtgacgcacgtgtttagcaacattaagatgggagtgcggtttgtgtcttttgagcatagagggcaggacacacagttttgggccggacactacggagccagagtaactaatagctctgtcattgtcagagtgcgtctgtcatag

SEQ ID NO: 223012 - DNA, 852 bp, synthetic construct
  misc_feature 1..852: note = Description of Artificial Sequence: Synthetic coding sequence
  source 1..852: mol_type = other DNA
atgggcgcttcagtttctcgaggtagagccgcaagagtgccagccccagagcctgaacccgaggaagcccttgatctgtcccagctgcctcccgaactgctgctggtggtcctaagtcacgtccctcccaggacgttactagggaggtgtcggcaggtctgtcgcggatggagagcgttggtcgacggccaagcactctggctgcttatcttagcgagagaccacggggcaaccggacgcgctctgctgcacctggctaggtcttgccagtcccccgctcggaacgcacgtccctgccctctaggaagattctgcgcgagacggccaatcggtagaaacctgataagaaacccctgtggacaggaaggactgaggaaatggatggtgcagcacggcggtgatgggtgggtggtggaggaaaatagaacaacagtgcccggagctccctcgcagacctgcttcgtgacatccttctcatggtgctgtaaaaaacaggtgctggatctggaagaagaggggctatggccggagctgctcgactccggacgaattgaaatctgtgtcagcgattggtggggggctcgtcacgatagtggttgtatgtatcgattactggtccaacttcttgacgccaatcagactgtccttgacaagttctctgcagtcccggacccgatcccccagtggaataacaacgcttgtctgcacgtaacacacgtgtttagcaacatcaagatgggagtgcgcttcgtgtctttcgaacaccgagggcaggacacacagttctgggctggacactatggagcacgggtgactaatagttccgtgattgtaagagtgcgactgtcttag

SEQ ID NO: 223013 - DNA, 1107 bp, synthetic construct
  misc_feature 1..1107: note = Description of Artificial Sequence: Synthetic coding sequence
  source 1..1107: mol_type = other DNA
atggcagctgccgctgaagagcgcatggccgaggagggcggaggcggacagggggatggcggatccagcctggctagcggatccacccagaggcaacccccacctccggcacctcagcacccccagcccggatcccaggcactcccagcacccgctctggccccagaccagctgccacagaataacacactcgtcgccttgcctatcgtcgctatagaaaacatactgagcttcatgtcctacgatgaaatatcccagctgcggctggtctgcaaaaggatggatctggtctgtcaacgtatgttaaatcagggctttctgaaggtggagagataccataatctgtgtcagaagcaggtaaaggcccagctccctcgccgtgagagcgaaagaaggaatcacagtctagccaggcatgcagacattttggccgcagtcgagaccagactgtctctgctcaacatgacgttcatgaagtatgtggatagtaacctgtgttgctttatccccggaaaggtgatcgatgaaatctaccgtgtacttaggtacgttaactctacaagggccccacagagagcacacgaggtgctgcaggagttacgagacatcagctctatggccatggagtacttcgacgagaaaatcgtccctatactcaaacgaaagctgcccggatccgacgtgtcgggcaggctaatggggtcccctcccgtgcccggtccgagcgctgctctgaccacgatgcagctgttcagcaaacagaacccgtctcgccaggaagttactaaactgcagcagcaggtgaagactaacggagcgggtgtaacggtgctgaggagggaaatatcagagctgcggaccaaagttcaggagcaacagaaacagctgcaagatcaagatcagaaacttctggaacaaacgcaaataattggggaacagaacgcacggctggcagaactcgaacggaaattgcgcgaggtgatggagagtgcagtgggaaactctagtggcagtggacagaacgaagaaagtcccagaaaacggaagaaagccacggaggccattgacagtctgcgcaagtctaagcggttgaggaatcgcaagtag

SEQ ID NO: 223014 - DNA, 540 bp, synthetic construct
  misc_feature 1..540: note = Description of Artificial Sequence: Synthetic coding sequence
  source 1..540: mol_type = other DNA
atggctgcggctgctgaagagaggatggccgaggaaggaggcggtgggcaaggtgacggcggatcctcgctggcttcagggtctacgcagaggcagccgccaccccctgcccctcagcacccacagccaggttcgcaggccctgcccgcacccgcactggcccctgatcagttaccccaaaataataccctggttgctcttccaatcgttgccatagaaaatattttgtcctttatgtcttatgacgagatttcacagcttaggctcgtctgcaagcggatggaccttgtgtgccagcggatgctgaaccagggattccttaaggtggaacgctatcacaatttgtgccagaaacaggtgaaagcacaattgcccaggagggagtccgagaggcgcaaccattcccttgcgcgtcatgccgacatactagccgctgtggaaaccagactatccctgctgaacatgacttttatgaagtatgttgattctaatctgtgctgtttcatccccggaaagttccaggaccgactgcagccatag

SEQ ID NO: 223015 - DNA, 1416 bp, synthetic construct
  misc_feature 1..1416: note = Description of Artificial Sequence: Synthetic coding sequence
  source 1..1416: mol_type = other DNA
atggccgcaatggaaactgagacagccccacttacacttgagtcgcttcctaccgatcctcttctgttaatcctaagctttcttgactaccgagatctgattaactgctgctacgtttctcggagactgtcacagttgagtagtcatgacccgctttggagaagacattgtaaaaagtactggctcatcagtgaggaagagaaaactcaaaaaaatcagtgttggaagagtttgttcatcgatacctattctgacgtgggccgatacatagaccactacgcagccatcaagaaagcttgggacgatctaaaaaaatatctggaaccaagatgtccacgcatggtgctgagtttgaaggagggcgctagggaagaggacctggacgcagtggaagcccaaattggttgcaaactgcccgatgattatcgttgcagctatcgcattcacaacgggcaaaaactggttgtacccggtctcttagggagcatggccctctccaaccactatagaagcgaggacctgttagacgttgacaccgctgctggaggcttccagcaacgacagggcttgaagtattgtctacctctcacattctgcattcacacagggctgtcacagtacatagccgtcgaggctgctgagggcaggaataaaaacgaggtcttctaccagtgtccagaccagatggcgaggaatccggctgcaatagatatgttcattattggagctaccttcaccgactggttcaccagttacgtgaaaaacgttgtgtccggcggatttccgatcattcgagaccagattttcaggtatgtgcatgatccagagtgcgtagcaacaacgggtgatatcacggtgtccgtatccacgtcttttctgcccgagctgtctagcgtgcatccgccacactacttttttacatatcgcataagaatcgagatgagtaaagacgctcttcccgaaaaggcatgtcagcttgactctcgctactggcgtatcaccaacgccaaaggagacgtagaggaggtgcaaggtcctggagtggtcggagagtttcccatcatatcgccaggtagggtgtacgagtacacctcctgtacaaccttctcaaccacgtccggctacatggaggggtattacacttttcatttcctgtacttcaaagacaagattttcaacgtggctatacccagatttcatatggcttgccccaccttcagggtttcaattgctagattggaaatgggccctgacgaatacgaggaaatggaggaagaggaggaggaggaggaggaagaagatgaggacgacgactctgcggatatggacgaaagtgacgaggacgatgaagaagaaagaaggcgaagggtgtttgatgttcccatacgccgacgaagatgcagtcgactgttctag

SEQ ID NO: 223016 - DNA, 519 bp, synthetic construct
  misc_feature 1..519: note = Description of Artificial Sequence: Synthetic coding sequence
  source 1..519: mol_type = other DNA
atggaaaccgagaccgccccactgactctggagtccttacctaccgaccccttgctgctcatcctctcctttttagactatagggatcttatcaactgttgctacgtctcaagaagactgagtcagctgtcatcccacgaccccctgtggaggcggcattgtaagaaatactggcttatttcagaagaggagaagacccaaaagaatcagtgctggaagtctctgttcatagacacctattctgacgtgggccgttacatcgaccattatgccgctatcaagaaggccggtatgatctcaagaaacatctggtcccctggagtcctgggttggtttgtgagcataaaccggggatgctctaggggcaggccacgctgctgtggaagcgccgattggtgcaagctgcccgacgactacaggtgttcttataggatacacaatggacagaagctggtggtacccggatcctactgggaagcttggcattgtctaatcaccatcgtcctgaaaatatgctag

SEQ ID NO: 223017 - DNA, 1248 bp, synthetic construct
  misc_feature 1..1248: note = Description of Artificial Sequence: Synthetic coding sequence
  source 1..1248: mol_type = other DNA
atggcggctatggaaacggagaccgcccctctaactctggagagtcttcccaccgatcccctactgcttattttgtccttcttggattatagggacctcataaactgttgttacgtatcaaggcgactgtctcaactgtcctcgcacgaccctctgtggcgcaggcactgtaagaagtactggcttatttccgaggaagagaagacccagaagaatcagtgttggaagtcgttgttcatagatacctacagcgatgtcggacgctatatcgaccattacgccgctataaaaaaggcctgggatgatctgaaaaagtacctggagcctaggtgtccaagaatggttctctccctgaaagagggagcacgcgaggaagacctggacgcggtagaagcccagatcggctgtaaactccccgatgactacagatgctcttacaggattcacaatggccagaaactcgtggtgccaggcctgcttggctcaatggcactttcgaaccactacaggagcgaggatcttctggacgttgatacagcagccggtggattccagcagagacaggggctgaaatattgcctcccactgacgttctgcatccatacgggactgtctcagtatattgccgtggaagccgcagaggggaggaacaaaaacgaagtgttctatcagtgtcccgaccaaatggcaaggaatccagccgcaatagacatgttcattattggtgccacattcaccgactggttcacaagttacgttaagaatgtggtttctggcggattccctataattcgtgaccagatatttagatatgtccacgaccccgagtgtgtggctaccactggggatataactgtgagtgtgtcaacatcatttctgcccgagctaagcagcgtgcatccccctcattacttctttacatacagaatccggattgagatgagcaaggacgcactgcctgagaaggcgtgccagttagacagccggtactggcggatcacaaacgcaaaaggcgacgtggaggaggtgcaaggtcccggagtggtaggtgagttcccaattatctcacctggcagggtttatgagtacacatcttgcaccacattctctaccactagtggctacatggaaggttattacactttccacttcctgtatttcaaggataaaatatttaatgtcgcaatcccacggttccatatggcatgccctacttttcgcgtatcaattgccaggttggtgtcctag

SEQ ID NO: 223018 - DNA, 2238 bp, synthetic construct
  misc_feature 1..2238: note = Description of Artificial Sequence: Synthetic coding sequence
  source 1..2238: mol_type = other DNA
atggaggaagaacttcaacactcccattgcgtgaattgcgtctcacgacggtgcatgaccagaccagagcccggaattagctgtgatttgatcggctgccctctagtctgcggagccgtgttccacagctgtaaggcagatgagcatcggctcctctgcccatttgagagagtgccttgcttgaactccgacttcggctgtccctttacgatggcacgcaataaggtggcggagcacttggagatgtgccccgcttccgtggtgtgctgcaccatggaatggaaccgatggcccgtcagttatgccgaccgcaagagctatgagaatctctcacgtgacgtggatgaggtggctcagctggacatggcactcgctttacaggaccaaagaatgctgctggagtctttgaaggtggccacaatgatgtctaaagccacagataaagtgagcaagccaagggaacaaatcagcgtcaagtctagcgtccccgagattcctcacgccaacggactggtttcagtggatgaggaatcctacggtgccttgtatcaagctaccgtagagacaacccggtctctcgcagccgctctggatatcctgaacacggccacaagggatattgggatgctgaacacctctgtgcccaacgatatggatgaacagcaaaacgcacgggagtccttagaggatcagaatctcaaggaccaggaccacctttacgaggaggagataggtgccgtaggagggatcgactacaacgataccaatcagaatgcccaatcagagcagaacggcagcagcgacctgctgtgcgatcttaacaccagtagctatgacacatcagcattgtgtaatgggtttcctctggagaacatctgtacacaagtaattgatcagaatcagaaccttcacggcgattccaagcaaagtaatctgactaatggggactgcgtggcgtcatccgacggaaccagtaaaccctcttcgtcacttgctgtggccgcacagctgcgggaaatcatcccttcctccgccttacctaacggaaccgtccagcacattctgatgcccgacgacgaaggtgagggagagctgtgttggaagaaggtcgacctcggggatgtgaagaacgtcgacgtgttgtcattctctcacgcaccatcgtttaattttctgtcaaacagctgctggtccaaaccgaaggaagataaggcagtggacacatccgacctcgaagtggccgaagatcccatgggactgcaagggatcgatttgatcacagccgctcttctgttctgtctgggcgattccccaggcggaagaggtatctcggattctcggatggcagacatctaccatatcgatgtgggtacccagacgttctcgctgccctcagccatcttggccacgagcaccatggttggtgagatcgcttctgcatctgcctgtgatcatgctaatcctcagctgagcaacccgagccctttccagaccctgggattagacttggtgctcgagtgtgtcgccaggtaccagcctaagcagcgtagtatgtttactttcgtgtgcggacagctcttcagacgtaaagagttcagcagccattttaagaacgtccatggggatatccacgccggattaaacggttggatggaacagcgctgtccactggcctattacgggtgtacatatagtcagagacggttttgccctagcattcagggtgctaagatcatccacgataggcatttgagaagcttcggagtgcaaccatgtgtcagtaccgttctggtggagcccgcacggaactgcgtgctgggccttcacaatgatcatctgagctccctgccgttcgaagtgctgcagcatattgccggattcctggacggattttctctctgtcaactcagctgcgtgagcaaacttatgagagacgtttgcggctctttgctgcagagtcggggaatggttattttgcagtgggggaagagaaagtacccagagggcaacagcagctggcaaattaaggagaaggtgtggcgcttttcgaccgccttctgctccgtgaatgaatggaaatttgcagatatcctgtctatggcagaccacctcaaaaagtgttcatacaatgttgttgaaaaaagagaggaggccatacctcttccatgtatgtgcgtgactcgcgagctgaccaaagaaggtcgatccctgcgctcagttctgaagcctgtgctctag

SEQ ID NO: 223019 - DNA, 1620 bp, synthetic construct
  misc_feature 1..1620: note = Description of Artificial Sequence: Synthetic coding sequence
  source 1..1620: mol_type = other DNA
atggcagtgtgcgctcggctgtgcggagtaggtcctagtagaggttgccgtagacgccagcagcgacgcggacccgcagaaacagctgcagccgatagtgagcctgatacagatcctgaagaggagaggatcgaggcctccgccggtgtggggggaggcttatgcgccggaccttcccctccacctccacggtgttccttgctggagctccctccagaactccttgtggaaatattcgcctccctacctggcacagatctgccgagcctcgcacaggtttgcacaaaattccggagaatcctgcataccgacactatatggcggaggcgctgtagagaggaatacggagtgtgtgaaaatcttcgcaaactggagatcacaggggtgtcgtgtcgcgacgtttatgctaagctccttcataggtaccggcacatactggggctatggcagcccgatatcggtccatatggagggctgctgaatgtcgtggtggatgggctctttattatcggatggatgtacctaccacctcatgatcctcatgtcgacgacccaatgaggttcaaacccctgttccggatccacctgatggagcgcaaagctgccactgttgagtgtatgtacggccacaaagggcctcaccatggccacatccagattgtgaagaaggacgaatttagcacaaaatgcaatcaaaccgatcaccaccgaatgtccggtggaaggcaggaggaatttaggacatggctgcgggaggagtggggaagaaccctggaggacatttttcatgaacatatgcaggagctgatcctgatgaagtttatctatactagtcagtacgacaattgcctaacctatagacgtatctacctgccaccctcacgccctgatgatctgattaaacctgggctctttaagggtacctatggaagtcatgggctcgagatcgtgatgcttagtttccacgggagaagagccagagggacaaagattactggggatcccaacatccctgccggtcagcagacagtggagatcgatctgcggcaccggatacagctgcctgacctagaaaatcagcgcaactttaatgagctgagccggatagtgcttgaagtcagggaacgcgttcggcaggaacagcaggagggcggacacgaagccggagagggtagaggaagacaaggtccccgtgagagtcagcctagccccgcacagccccgagccgaggcgccaagcaagggcccagacgggactccaggtgaggacggcggagaaccgggagacgccgtcgcagccgcagagcagcccgctcagtgtggtcagggtcagccatttgtcctccccgtgggtgtatcctcccggaacgaagactacccaagaacttgccggatgtgtttctacggaacggggctgattgcaggccatgggttcacctccccagaaaggacaccgggtgtgttcatcctcttcgacgaagatcgctttggttttgtctggttggagctcaaatcgttctccctgtatagtagggtccaggcgacctttagaaacgccgatgccccaagcccacaggcgttcgacgagatgctgaagaacattcagtcgctgacaagttag

SEQ ID NO: 223020 - DNA, 1068 bp, synthetic construct
  misc_feature 1..1068: note = Description of Artificial Sequence: Synthetic coding sequence
  source 1..1068: mol_type = other DNA
atgcccttcctgggacaggattggagatcccccggacaaaactgggttaaaacggcggacgggtggaaaagattcctggatgagaagagcggatcattcgtgtctgacctgtcctcatattgtaacaaggaagtgtataacaaggagaatttgttcaatagcctgaactacgacgtcgctgccaaaaagcggaaaaaggacatgttgaattctaaaaccaagactcagtacttccatcaggagaaatggatttacgtccataaaggatccaccaaggagagacacggctattgtacgctaggcgaagcctttaatcggttggacttttctacagccatactggacagtaggcgatttaactacgttgttaggctgctggaactcatcgctaagtcccagctgacatcactttccggcatagcccaaaagaacttcatgaacattctggaaaaagtggttcttaaggtgctggaagaccaacaaaacatacgtcttatcagagaactgctgcaaaccctgtacacatcactgtgtacgctggtccagcgcgtggggaaatctgtcctggttggcaatattaacatgtgggtgtacagaatggagacaatcctgcactggcagcaacagctgaataatatacaaatcacaaggccggcatttaaagggttgacttttactgatcttcctttgtgtctgcaactgaacattatgcagcgcctcagcgacggcagagatttagtgtcccttggccaggcggcaccagatctccacgtgctgtctgaagatagactgttgtggaagaaactgtgtcagtaccacttctcagagaggcagattaggaagcgcctcatcctgagcgacaagggacagcttgattggaaaaagatgtattttaagctagtacgatgttacccgaggaaagaacaatatggagacactttacagctgtgcaagcactgtcacattctaagctggaagggaaccgaccacccatgcacagctaacaatccagagtcatgttccgtctcactgtcacctcaggacttcataaacctattcaagttttag

SEQ ID NO: 223021 - DNA, 789 bp, synthetic construct
  misc_feature 1..789: note = Description of Artificial Sequence: Synthetic coding sequence
  source 1..789: mol_type = other DNA
atgccattcctcggtcaggactggcggtcacctggacagaattgggtcaagacagccgatggctggaagaggttcctcgatgagaagagcggctcatttgtcagcgatctgtcttcatactgtaacaaagaggtctacaacaaggaaaatctgttcaactcgcttaactacgatgttgccgcaaagaaaaggaaaaaggatatgctgaactctaagacaaaaacacagtattttcaccaggagaaatggatatacgtccacaagggctccactaaagaacgccacggctactgtactcttggggaggcttttaatcgcttagacttttctaccgccattctcgatagccgacgcttcaattacgtggtgagaccagcatttaagggtctaaccttcactgaccttccgttatgcctgcagctgaacatcatgcagcgactttccgacggcagagatttagtgagcttgggccaagccgctcctgacctgcacgtgctatctgaagacaggctgttgtggaagaaactttgccagtaccacttcagcgagcgacagatccgtaagagactaattctgtccgacaagggccagctggactggaagaaaatgtacttcaagttggtgcgatgctacccgagaaaagagcagtacggcgatacgctgcagctgtgcaagcattgtcacattctgagttggaagggcaccgaccatccctgtactgccaacaacccggagtcctgctccgtgagcctgagcccccaggactttatcaatcttttcaagttctag

SEQ ID NO: 223022 - DNA, 1668 bp, synthetic construct
  misc_feature 1..1668: note = Description of Artificial Sequence: Synthetic coding sequence
  source 1..1668: mol_type = other DNA
atgttattgttcttgagcgtgcctcagccgaggccccctggggctagaacacgggctggtgcagcacgcgtcgcccgatggcgccgtttgagactccagcagctccgccgactcagagggctgctcagagtactgcgtgggcgtccgggagcaggaagccgcagaaggggcaggatggccctctgtgggcaagcagctggggcagccagcctgccttccgagctgattgtgcacatattctctttcctgccagcccctgacaggttaagagcctccgcctcttgcagccactggagagaatgcctcttttaccctgcgctctggcctcagcttcgaatctgcctgagggtgagtccagccgaacagcctagactggagttcctcatgagaaaatgcggctggttcgtaagggaattgcgtgttgagtttgccgctgaaaattatctgtcgggaggtggccctggggacggcggaggggcagacaccggcaccgggggagaggaagtggaagccttacagctttccgcaaggtggcttgaggtactgcggacgtatcttgagctggtcctatgtgttctggtgtctatcagaaacaacagaaatctgcaaaagttcagtctttttggggatataagcgttctacagcagcaggggtctctgagtaatacatacctctccaaggtcgaccctgacggcaaaaagattaagcagattcagcagttatttgaagagatactaagcaacagcaggcagctaaaatggttatcttgtggcttcatgctcgagatcgttacgcctacttcactgagcagccttagcaacgcggtcgctaacacaatggaacacctgtcactcctggataataatatcccaggtaacagtacactgatcactgccgttgagctggagagatttgtgaatctgcattccctggccctagatttttgcgactttacagcagagatggctcgggtgcttacagacagcaaccacgttccactgcagcggctgtcccttctcgttcacaacgttagcgtgatgcacaaaagcctggataatatgcctaacgacgaacattggaaggcattgtcgcgaaagagcacgtctttccgcgtgtacatcatggctttcgacataaaaagtgaggatatgttgaagatcctgaaaccaagtattcccctggagcgcattcactttgattcttatatcacttgcgtatctggcgcaatcgtggatctaatatcgcggcagtatgataaattcctgactcactttatcctgatgaatgatgttatcgacacgtctgggtttcctgatctcagcgacaaccggaacgaagaccccctggtgctcctggcctggcgctgtactaagctttcccttctagccatacacggctacacggtgtgggcccataacctgatcgcaattgccagactaagaggatccgatctgaaggtgcttgaagtgaccgaggaatctattgactttgaccagggtgaactggccgatcaggacgtggacccagtacataacttgattgaacaggtcagcctgggtctgggacagccttggcatgctgtgatggatatcgagtctcttagtgtttttactgagcccaaccggcacttttaccgtgagatgcagtcctttagcgaagacatctag

SEQ ID NO: 223023 - skipped

SEQ ID NO: 223024 - DNA, 2136 bp, synthetic construct
  misc_feature 1..2136: note = Description of Artificial Sequence: Synthetic coding sequence
  source 1..2136: mol_type = other DNA
atgcatctcaaaccctactggaagctgcagaaaaaggagcacccaccagaggtttcacgcgagactcaacgcactccaatgaatcaccagaaagccgtgaacgatgaaacgtgcaaggcttcacacatcaccagtagcgtgtttcctagtgccagcctcgggaaggcctcctctcgtaaacccttcgggatcctttcacctaatgttctgtgcagtatgagcggtaaatctcccgttgaatcgtctctcaacgtgaaaacaaaaaagaatgctccatccgctacgattcatcagggcgaggaggagggacctttggacatttgggccgtggtcaagccgggaaataccaaggaaaaaattgcattcttcgcctctcatcaatgctcaaaccgcattgggtctatgaaaatcaagagcagctgggacatcgatggtcgtgccacaaagaggaggaaaaagtctggcgatcttaaaaaagccaaggtccaggttgagcggatgcgcgaggtgaactctaggtgttaccagcccgagccatttgcttgcggcatcgaacactgctcagtccattatgtgagcgactcgggggacggagtttatgccggacgcccactgagtgtgatacagatggtggccttcctggaacagcgcgcttcagcactcctggccagttgctcgaagaattgtactaactctccagccatcgtgcgcttttcaggccagtccaggggagttcctgcagtctcggaatcctactctgcacccggtgcctgcgaggagccaacggagcgagggaacctcgaggtaggcgaaccccagtcagaacccgtgcgagttttagacatggtggcaaaactggaatccgagtgcctgaagcgtcaaggccaacgggaaccaggtagcctgtctaggaacaattcattccggcgtaacgtaggcagggtgctgttagctaactctactcaggcagacgaaggcaaaaccaagaagggcgtgctcgaggctcctgatacacaagtgaatcctgtggggagcgtatccgtcgactgtggcccatcccgcgctgatcggtgttcacccaaagaggatcaggcgtgggacggcgcttcccaggactgcccaccactgccagcaggtgtgtcattccacattgacagcgctgagctcgagccaggatctcaaacagcggtgaaaaattcaaacagatacgatgtggaaatgaccgatgaactcgtgggcttgcccttctcatctcatacttactctcaggcctcagaactcccaaccgatgccgtggattgtatgagtagggagctggtctccttgacttcccggaaccccgaccagcggaaggaatctctgtgcatcagcataaccgtgtcaaaagtcgacaaagatcagcccagcattttgaattcctgtgaggacccagtgcccggtatgttgttttttctgcccccaggccaacatctcagcgattattcccaacttaacgaatccacaaccaaggagtccagtgaggcctcccaactggaggatgctgctggcggagactccgccagcgaggaaaaatctggtagtgccgagcccttcgtgcttccagctagtagcgtcgagtcaaccttgcccgtgctggaagctagctcttggaaaaagcaggtgagtcacgactttcttgagactcgcttcaaaatccagcagctcttggagccacagcaatacatggcttttctgcctcaccatatcatggtgaaaatatttcggctactcccaaccaagagccttgtggccctaaaatgcacctgctgctattttaaatttatcatagagtactacaatattcgccctgcagattctcggtgggttagggatcctaggtatcgagaggatccatgcaaacagtgcaagaagaaatatgtcaagggagatgtgagcctgtgtaggtggcatcctaagccctattgccaggcccttccatatggacctggctattggatgtgctgccataggtcgcaaaaaggatttcccggttgtaagctgggtctgcatgataaccattgggtgcccgcatgtcatagcttcaatagggccatccacaaaaaagctaagggaacagaggccgaggaggagtactag

SEQ ID NO: 223025 - DNA, 2136 bp, synthetic construct
  misc_feature 1..2136: note = Description of Artificial Sequence: Synthetic coding sequence
  source 1..2136: mol_type = other DNA
atgcatcttaaaccctactggaaactgcagaagaaggaacatcccccagaagtgagtcgagaaacacagcgaaccccaatgaaccatcagaaggcggtgaatgatgagacatgcaaggccagtcatattacgtcttccgttttcccctctgcttcccttgggaaggcgagctcccgcaaaccatttggaatcctaagcccaaatgtgttgtgcagtatgagcgggaaatcccccgtggagtcaagcctgaatgtaaagactaaaaagaatgccccttctgccacaatccaccaaggagaggaagaagggccattggacatttgggccgtggtgaaacccggtaacaccaaggagaagatagcgttttttgcatctcatcaatgctctaacaggatcgggtccatgaagatcaagagtagctgggacattgacggcagagccactaaaaggagaaaaaagtctggggatctgaagaaggccaaggtacaggtggagaggatgcgggaggtgaacagcaggtgctaccaacccgagcccttcgcttgtggcatagaacactgctccgtgcactacgttagcgactctggagacggcgtgtatgccggaaggcccctgtccgtgatccaaatggtggccttcctggagcagagggcctcagccctcctggccagctgttctaagaactgtactaactcccccgcaatcgtcagattttccggacagtctagaggagtgccagcagtcagtgagtcatatagcgcaccaggcgcttgcgaggaacccacagagcgagggaacctcgaagttggggagccacagagtgaacctgtccgagtgcttgatatggtggctaagttagaatcagaatgccttaagcgccagggccagagagagcccggtagcttgagccgaaataacagcttcagacgcaacgtcggacgggttctcctggccaactcgacccaggcagacgagggcaaaactaagaagggagtcttggaagccccagacacccaagtgaaccccgtagggagtgtgtcggtcgattgtggcccatcccgggctgatagatgctcaccaaaggaggatcaagcgtgggatggcgcttctcaggattgcccacccctgcccgcaggtgtttcttttcatattgactctgcggagctggaacccggatctcagacagctgtcaaaaactccaatagatatgatgtcgaaatgacggacgaactcgtggggcttccatttagtagccatacctattcacaggccagcgagctccccacagacgctgtagactgtatgagccgggagctcgtctccctgactagccgcaaccctgatcagaggaaagagtcactgtgcatttctattacagtcagtaaggtggacaaggatcagccttcaatcctgaattcctgtgaggacccagtacccggaatgctcttcttcttaccaccaggacaacacctgtccgattactcccagttgaacgaaagcaccacgaaagagtcatctgaagcatctcaactggaggatgcagcgggaggcgactcagccagtgaagaaaaatcagggagtgccgagcctttcgtgcttccagccagtagcgttgagtccactctccctgtgctggaagcctcctcgtggaaaaaacaggtatcacacgacttcttagagacaagattcaaaatacagcagcttttagagccccaacagtatatggcctttctgccacaccacatcatggtgaaaatctttcggctgctgcctacgaaatccctggtcgcccttaagtgtacttgctgttactttaagttcattatcgaatactataatatcagacccgcagacagccggtgggttagagatccaaggtacagggaggacccctgtaaacagtgcaaaaaaaaatacgttaaaggagatgtcagcctgtgtaggtggcacccaaagccctactgccaggcattgccttatggcccaggctattggatgtgctgtcacagaagtcagaaaggttttcctggatgtaagcttggactccatgacaatcattgggttccagcctgccatagttttaatagagccattcacaagaaagcaaagggcaccgaggcagaggaggagtactag

SEQ ID NO: 223026 - DNA, 567 bp, synthetic construct
  misc_feature 1..567: note = Description of Artificial Sequence: Synthetic coding sequence
  source 1..567: mol_type = other DNA
atggccagctggctgccggagacactatttgagaccgtgggacagggcccaccaccctctaaagactactaccagctactagtcacccggtcccaagtgattttcagatggtggaaaatctctctccggagcgagtaccggtcaacaaagccaggagaagcgaaagagacccacgaggacttcctcgagaacagtcatttacaggggcaaacggctctcatcttcggcgctaggatcctggattatgtgataaacctgtgcaaaggcaaattcgattttctggagaggctaagcgatgacctactgctcacaatcatctcatatctggacctggaggacattgcccgattgtgccagaccagccacagatttgccaaactgtgtatgtctgacaagctctgggaacaaatcgtgcagagtacctgcgacacgattacacccgatgtgagagcactagctgaggatacgggttggcgccagctctttttcacgaataagctgcagctgcagaggcaactccgcaaaaggaaacaaaagtacggcaacctccgcgaaaagcagccatag

SEQ ID NO: 223027 - DNA, 2832 bp, synthetic construct
  misc_feature 1..2832: note = Description of Artificial Sequence: Synthetic coding sequence
  source 1..2832: mol_type = other DNA
atgggtccccgaaagaaatcggttaagacctgtattatgaacaatgagatccctgaagagatgaccgcagatgagaccaaggactacatgaatcagttatctcatgaggtattgtgccacatctttaggtatctaccattgcaagacatcatgtgcatggagtgcctgtccaggaagcttaaagaagctgtgaccctgtatcttcgcgtggtgcgtgtagtggacctttgcgctggaaggtggtgggagtatatgccttccggatttaccgacgcttccttccttactctcctcaagaaaatgccagatgtggagcagctgtatggcctgcaccctcgatacttggagcggcgtagggtgaggggccatgaggcattcagtatcccgggtgtgctggaagcgctgcaggcatgcccgaacctagtgggagtcgaaacttcccacttggaattggtggagtcaatatggacctatatgcctcacgtgcacattcttggcaaatttcgtaacagaaatggagcctttcccataccaccggagaacaagctcaagatccctatcggagccaagatacagacactgcacctggtgggagttaacgtgcccgaaatcccatgcattccaatgttgcgacacctttacatgaagtgggtacgactgaccaagccgcagccgttcaaagactttttgtgcatctcgctcagaacgttcgtcatgcgcaattgcgccggaccaacaaactctctcaagtatgtgcccctggtgacaggtttggccagcgccaggaacctggaacacttggaaatggtgcgagttccgtttctgggaggcctcatccagcacgtggtcgaggacagctggagaagtggtggattcaggaacctgcatacgatcgtattgggtgcgtgcaagaatgccctggaggtggacttgggttacctcattataaccgctgctcgcagactgcacgaggtgaggatccagccgtctctgactaaagacggtgtcttctcagccctcaaaatggccgaactggaattcccacagttcgagactttacacctgggctacgtcgatgaattcttactgcaatcacgaatggccaatgctgatctggttaaatacggactggcggacgttgtggaaaatcctggcataattacggatattggtatgaaagcagtaaacgaggtgttttcttgcatcaaatatctcgccatatacaattgccctcacttgcataacccttacaactggatcagtgaccacagtcgttggactcgtctggtcgacatcaatctcgtgagatgccatgcacttaagctggattcttttgggcaattcatagagctacttccctctctcgaattcatcagcctggaccagatgtttagagagccacctaagggctgtgctcgtgttggcctgtccgccggaaccggtatcggggtctcctcagcattagtatcaaatcagaactccaataatgatgacaacaacgctcagaataacaatgcaaacattcacgataacaaccaccaccatcctgacgactctgatgaggagaatgacttccgccaggacttgcagcctggtgagcagcagtttgccgctgacgcgttgaatgagatggaagacatagtccaagaggatggagaggtggttgccgaatccgggaataacaccccagctcattctcaagcgatcattccggtggatgtcgatgaggagcaagcagggccaagcggcttacaaagggtggtgaagccaaccagtatcactgtgcacgatagcgaatctgacgacgaggaggactcccttgaactgcaggaggtctggattcctaagaacgggactcgccgatattccgagagggaggaaaagactggggagtctgtccaatctagggagctgtctgaagtggcaaagacgaagccaagacacgccatgaagcggaaacgtacggcggataagtctacctcgactagcgatcctgtcatcgaagacgaccacgtgcaggtcctggtgttgaagtccaagaacctggttggagtgactatgacaaactgcggcatcacggatctcgtcctgaaggactgtcccaaaatgatgttcattcacgccactcgatgccgcgtgctcaaacatctgaaagtggaaaatgctccgattgtaaaccggttcgactacgcacagtgtaagaagctaaatatggaccaagtgctcgaccaaatcctgagaatgcccccagaacgtaatcgtatcatttatctgcgccctatgcagcaggtggacactttaactctcgaacagaagctgtttagcggcccttatccatatcacatttgcatcatccacgaattctctaacccccctaacgttcgcaataaggtccggatccgtagttggatggataccattgctaatataaatcaagaactgatcaagtatgaatttttccccgaagccactcgaagtgaggaggatcttaaaaagtatccaaaatacccatggggtcgtgagatctacactttagagggggttgtggatggagcaccctacagcatgatcagcgatttcccttggctgcgctccctccgggctgccgaaccaaatagcttcgcgaggtatgattttgaggacgatgaagagtctacgatttacgctccaagacgaaaagggcagctgtccgcagacatttgtatggagaccatcggagaggaaatcagtgagatgagacaaatgaaaaagggtgtcttccagagggtggtggctatcttcatacattattgcgacgtcaacggcgagccagtggaggacgactacatctag

SEQ ID NO: 223028 - DNA, 3567 bp, synthetic construct
  misc_feature 1..3567: note = Description of Artificial Sequence: Synthetic coding sequence
  source 1..3567: mol_type = other DNA
atgggccctagaaaaaagtcggttaagacatgtatcatgaacaacgaaatccccgaggagatgacggccgacgagaccaaggattacatgaatcagctgtcccacgaggtcctgtgccatatctttcggtatctccccctccaggacatcatgtgcatggagtgcttgtcgcgcaagctgaaagaagctgtgacgctttatctgagggtcgtgcgggtggtggacctgtgcgcgggacggtggtgggagtacatgccgtccggcttcaccgatgcctcttttctcaccctgcttaagaaaatgcccgatgtcgaacagctgtatggtttacatcctcgctatctcgagcgaagacgagttcgcggtcatgaagccttctcgatcccaggtgtcctggaggccctccaggcgtgccctaatctcgtcggtgtggagacctcccatcttgagctcgtggagtccatttggacatacatgcctcatgtccatatacttggaaagttcaggaaccggaatggtgcttttcccatacctccagagaataagcttaaaattcctattggggctaagatccaaacactccacctggtcggcgtgaacgtccctgaaattccttgtattccaatgctgaggcatctgtatatgaagtgggttcgactgaccaagccgcagcctttcaaggacttcctgtgtataagcctgagaacctttgtgatgcgcaactgtgcaggtcctacaaattcgctaaaatacgtgcctctggtaacaggtctggcttcagcgagaaacctagaacatctcgaaatggtgagagtgccatttctgggagggctgattcaacatgttgtggaagacagttggcgttccgggggattccggaacctgcacacaattgtcctgggcgcatgcaagaatgctctggaggtggacctggggtatctgatcatcaccgccgctagaagacttcatgaggtgagaatccagcccagtctgacaaaggacggggtgttcagtgccttaaaaatggccgagctcgagtttccacagtttgagaccctgcacctgggctatgtcgatgaattccttctgcagtctcgcatggctaacgccgacctcgtaaagtacggccttgcagacgtcgttgagaatccaggtataattaccgacataggtatgaaggcagtcaacgaggtgttctcatgtattaagtatttggctatttacaattgtccacatctgcacaatccgtacaactggatatccgatcattcaagatggaccaggttggtcgacatcaacctggtcagatgtcacgctcttaagcttgattctttcggacagtttattgagttgctgccatccctagaattcataagtctggaccagatgttcagagagcccccaaagggctgcgcacgcgtaggactatcagctggaacaggaattggagtgagtagcgctctggtcagcaaccagaactctaataacgacgataacaacgcccagaataacaacgccaatattcatgataacaaccaccaccatcccgacgattcagacgaggagaacgatttcaggcaagatcttcagcctggcgagcaacaattcgcggcagatgcccttaatgaaatggaagatattgtgcaagaggacggagaggtagttgccgagtcaggaaataacacccccgcacacagccaggctatcataccggtcgatgtggatgaagagcaggccggaccatctggcttgcaacgggtcgtcaagccaacgtcaattacagtacacgattcagagagcgatgacgaggaggacagcctggaactgcaggaagtctggatacctaagaacggaacacgccgatatagcgagagagaagagaaaaccggggagagtgtacagtctcgagagctgtctgtgtccggaaaaggtaaaaccccactcagaaaacgctacaactcacatcaaatgggccagtcgaagcagttccctctggaggaatcttcatgcgaaaagggctgtcaggtcacatcagagcagatcaaagctgacatgaaggctgcccgagacatccccgaaaagaaaaaaaataaagacgtgtacccttcttgcagttctaccaccgcaagcactgtgggcaacagctccagtcataacactgcctcccaaagtcccgatttcgtacgcactgtgaatagcggcggatcatccgagccctcaccaactgaggtggacgtttctagacagtgtgcttgtagccccggaggctccgaggacagtgaggccatggaagagggcgatgccgaatcttcagtttgtcctaggtgttgttgtcacagacctcaagagagccagagacgaactagccgctgctccgatgaggaaagaccgagtacatcccgtgcctgtgtcgtgaatggaccagatgggaccagatccgcctttagctttcgcacacttccacaaggaggttcatcaggccctgcacatgatgagaggacgaatggttccgggtcaggcgctaccggggaggatcgtcggggttcatcacagccagagtcatgtgatgtacagtcaaacgaagactaccctagacgccctttaaccagagctcgttctagactctcacacgtgctgttggtgtctgagtcggaagtcgccaagaccaaaccgagacacgccatgaaacgcaaaaggacggccgacaaatccacctccacatccgaccctgttattgaagacgaccacgtccaagtgctcgtcctgaagtcaaagaatctcgtgggagttacgatgaccaattgcgggataaccgacttggtcctcaaggattgtcctaaaatgatgttcattcacgccacaaggtgcagggtactaaaacacctgaaagtggaaaacgcacctattgtgaatcggtttgactatgcccagtgtaagaaacttaacatggatcaggttctcgaccaaatattacgtatgccacccgagcgcaatcgcataatctatctccgcccaatgcagcaagtggacaccctcacactcgaacagaaactgtttagcgggccttatccgtaccatatctgtatcattcacgaatttagcaatcccccaaacgtgcggaacaaggtcaggatccgttcctggatggataccatcgcgaacatcaaccaggaactgatcaaatacgaattcttccctgaggccacccggtccgaggaagatctgaagaagtacccaaaatacccgtgggggcgtgaaatctataccctggagggggtggtcgatggggctccgtattccatgatttcggacttcccctggctccgatcactccgtgcagctgaaccgaactcatttgctcgctatgatttcgaagacgacgaagagtctacaatatacgccccacgtagaaagggccagctttcggccgacatttgcatggagacaatcggagaagagatctcagaaatgagacagatgaaaaagggggtgttccagcgagtcgttgctattttcattcactactgcgacgttaacggagaaccagtggaggatgactacatttag

SEQ ID NO: 223029 - DNA, 3342 bp, synthetic construct
  misc_feature 1..3342: note = Description of Artificial Sequence: Synthetic coding sequence
  source 1..3342: mol_type = other DNA
atggggccacgaaagaaatctgttaagacctgtattatgaataatgagatcccagaggagatgactgccgacgagactaaggattacatgaatcagctttcccatgaagttctctgccacattttccggtatcttcccctccaggatatcatgtgcatggaatgtctgtccaggaagctcaaagaggccgtgaccctctacctgagggtggtgagagtggtagatctttgtgcaggtaggtggtgggagtacatgccatccggatttacagacgccagctttttaacactgcttaagaagatgcctgatgtggaacagctctacgggcttcaccccagatatttagaacggagacgcgtgcgaggtcacgaggccttctctatccctggagtactcgaggcactgcaggcttgtcccaaccttgtcggagtggagacctctcatctggagctggtggagtcgatctggacatatatgccacatgttcacatattgggcaagttcaggaaccgcaatggtgcattccctattccgccagaaaacaagctgaagattcccattggcgcaaagattcaaaccctgcacttggtgggcgtgaatgtgcctgagattccctgcatccccatgcttcggcatttgtatatgaagtgggtgcgattgacgaagccccagcccttcaaggattttttatgtatctctctgagaactttcgtgatgcgtaattgcgccggtcccaccaattcacttaaatatgttccactggtaacaggtctcgcttctgctcggaacctggaacatctagaaatggtgcgtgtgccttttctgggagggttaatacagcatgttgtggaagatagctggagatccggcggatttcgtaacctgcacactattgtgctgggcgcatgtaaaaatgcccttgaggttgatttaggatacttgatcattaccgctgcccgacgcctccatgaggtgcgcatacagcctagcttgactaaggatggtgtgttctcagctctcaaaatggcagagctggagtttccccagttcgagacactacatctggggtatgtcgacgagtttctcctgcagtccagaatggccaatgccgaccttgttaagtacggtcttgcagacgtcgttgagaatcccggaattatcacggatataggcatgaaggccgtgaatgaggtcttttcttgcattaagtacttggccatatacaattgcccacatctgcacaatccttacaactggatctcggatcactctaggtggactcggcttgttgatataaatctggtacggtgtcacgccctcaagctggacagctttggtcagttcatcgagctgctgccaagcttggagttcataagtctcgaccaaatgttcagggagcctcccaagggctgcgccagggtgggcctgagtgccggaaccgggattggcgtaagtagcgccctggtgtcaaatcaaaattccaacaacgatgacaacaatgcccagaataataacgccaatatccatgataacaaccatcaccaccctgatgattcggacgaggagaatgacttcagacaagacctacagcctggcgagcagcagtttgccgcagatgccttgaatgagatggaagatatcgtgcaagaggatggggaagtagtagctgagagtggaaataatacaccggctcactcccaagctataatacccgtcgatgtggacgaggaacaggcgggtcctagtgggcttcagcgagtcgttaaacccacttcaataacggtgcacgatagtgaaagcgacgacgaggaggactctttagagttacaggaagtttggatccctaaaaacggcacccgtcgttactccgagcgggaggagaagacaggagaaagcgtccaatctagggagctgtcagtgagtggcaaaggtaagaccccgcttcgaaaacgttacaactcccaccaaatgggccagtcaaagcagttccccctagaggagtcctcttgtgagaaagggtgccaagtgacttcggagcaaatcaaggctgacatgaaggccgcacgagatatcccggagaagaaaaaaaacaaggacgtgtatccgtcatgttcctctacgacagcttctacggtaggcaactcgagctcacacaacaccgcctctcaatccccagatttcgttcgcactgtcaattctggaggatccagcgagccctcaccgaccgaggtggatgtgagtaggcaatgtgcctgtagcccaggcggatccgaggacagcgaagccatggaagagggcgatgcagagtctagtgtttgtccacgctgttgctgtcaccggccacaggagtctcagaggagaacctctcgctgcagtgatgaagaacgtccttcgactagcagagcctgtgtggtgaatggtcccgacgaggtggcgaaaaccaagcccaggcatgctatgaagcggaaacgaaccgcagataagagtacatctaccagcgatcccgtcattgaagatgaccacgtgcaagtactggtccttaagtcaaagaacttggtcggagtcacgatgacaaattgcggtatcaccgacctggtgttgaaagattgtccaaaaatgatgttcattcacgcaacccgctgccgggttttaaagcatcttaaagtcgaaaacgccccaatagtgaatagattcgactatgcacagtgcaaaaagctgaatatggatcaggtcttggaccaaatcctgcggatgccgcctgagagaaatcgcattatttacctcagaccaatgcagcaggtggataccctcacactcgaacagaaactttttagcggaccgtatccatatcacatttgtatcatccatgagttttccaatcctccgaacgtgaggaacaaggtgcggatcaggagctggatggacacaattgctaacatcaaccaggagctgataaagtacgagtttttccctgaggctactcggagcgaagaggatcttaagaaatacccgaaatacccttggggcagagagatctacacgctagagggtgtcgtggatggcgctccttattccatgatctcggatttcccatggcttcgcagcctgcgggcagctgagccaaattcattcgctcgctatgactttgaagacgacgaagaatccaccatttatgcccctcgcaggaagggccagctatcagccgacatctgtatggagaccataggcgaggagatcagcgagatgcgccaaatgaaaaagggggtgtttcagcgggttgtcgccatcttcatacactattgtgatgtaaacggggaaccagtggaggacgactacatatag

SEQ ID NO: 223030 - DNA, 2832 bp, synthetic construct
  misc_feature 1..2832: note = Description of Artificial Sequence: Synthetic coding sequence
  source 1..2832: mol_type = other DNA
atgggcccaagaaaaaagagtgtcaagacttgcatcatgaataacgagatccccgaggaaatgaccgcagatgagacaaaagattacatgaatcagttgtctcatgaagtcctgtgccacatttttaggtacctccccctgcaggacataatgtgtatggagtgtctgagcagaaagctcaaggaggcagttactctctatcttagagtggtcagggtagtcgacttgtgcgctggtcgttggtgggaatacatgccgtcaggctttaccgacgcctctttcctcactctgctgaagaagatgccagacgtggaacagctttacggactgcacccacggtacctggaacgcagaagagtccgaggccacgaagccttctccatccccggagtgcttgaggcgctgcaagcgtgtccgaacctggttggagtcgagacaagccacctggagttagtggagagcatatggacttacatgccccacgtccatatcctgggaaaatttcggaatcgcaacggcgctttcccaatccctcctgaaaacaagctgaagattccaataggtgcaaagatccagactctccacttggtaggcgttaatgtccccgagatcccttgcattcctatgctaaggcacctgtacatgaagtgggtgcgtctcaccaaaccacaaccattcaaagatttcctgtgcatcagtcttaggaccttcgtgatgaggaattgtgctggaccaacaaatagccttaaatacgtgcctctcgttacaggcctcgcctccgctcgcaacctggagcacctggaaatggtccgagtgccctttctgggcggactcatccagcatgtagtggaggatagttggcgcagtggaggcttcagaaacctgcacacgatcgtgctgggggcttgcaagaatgctctcgaagtggacctcggatatcttatcattaccgctgccagacgcctacatgaggtgaggatccagcccagcctaaccaaggatggggtgttcagcgcactcaagatggcagaactggagttcccccagtttgaaacgctgcacttaggctacgtggacgaatttctgctgcagagtagaatggccaacgccgaccttgtcaaatatggattagcagacgtggtcgaaaaccctggtatcatcactgacatcggaatgaaagccgtgaatgaggtcttcagctgcataaaatatctggccatctacaactgtccacatttgcacaacccatataactggatctccgaccacagccggtggactaggctggtcgacatcaacttggtgcgatgccatgcattaaaacttgactcattcggccaattcatcgaactgctgcccagcttggaatttatctctttagatcaaatgttcagagaaccccctaaggggtgtgctcgcgtgggtctctctgccggaactggcataggcgtcagtagcgcactggtgagcaaccagaacagcaacaatgacgacaataacgcgcagaacaacaatgcaaatattcacgataacaaccatcaccacccagacgactctgacgaggagaacgatttccgccaggacctgcagccgggagagcagcagtttgccgcagacgctctgaatgagatggaggacattgtccaagaggatggtgaagtcgtggcagagagtggaaacaacaccccagctcattcacaagcgatcatccccgttgacgtggacgaggagcaggcgggtcccagcgggttacagagggtggtgaagcccaccagcatcaccgttcatgattccgagtctgatgatgaagaagatagtctggagctgcaggaagtgtggatcccgaagaatggtacacgtcggtactcagagagggaggagaaaacgggcgagagtgtacagtctagggagttgtccgaagtcgcaaaaaccaagccccgacacgccatgaagaggaagcgaaccgcggacaaatctacctcaacatccgacccagtcatcgaagatgaccatgtgcaagtactggtgttgaagtcaaaaaatcttgtaggcgtcactatgactaactgtggaataaccgatctagtgctgaaagactgccccaagatgatgtttatccatgcgactcgatgtagagtattgaagcatctgaaagtcgagaatgctccaatagtcaatcgctttgactatgcacagtgtaagaagctgaatatggaccaggtactcgatcagatcctgagaatgcccccagagaggaataggatcatatatttgaggcccatgcaacaagtcgatacactcactttggagcaaaaactgttctctggcccatatccctaccacatttgtatcatccatgaattttcaaatcctcctaatgttagaaacaaggtccgtattcgttcctggatggataccatagccaacatcaatcaggagctcatcaagtatgaatttttccctgaggccacccggtcagaagaagatctcaagaaatacccgaagtacccctgggggagagaaatctataccctggaaggagtcgttgatggggcaccgtattccatgatatccgacttcccttggttgcggtccctgagggcagccgaaccgaacagctttgctcgctacgatttcgaggacgacgaggagagcacgatttacgcacctcggcgaaaagggcagctgtcagccgatatctgcatggagacaatcggagaagagattagcgaaatgcgccaaatgaagaagggggtgtttcagcgggtcgtggccatcttcatccactattgtgacgtaaacggtgagcccgtggaagacgactacatctag

SEQ ID NO: 223031 - DNA, 1329 bp, synthetic construct
  misc_feature 1..1329: note = Description of Artificial Sequence: Synthetic coding sequence
  source 1..1329: mol_type = other DNA
atggacgaggagagtgagctcattcagccccaggatcagagttgctgggctttcctccctgatctgtgcttgtgccgcgtattttggtggctcggcgatcgggaccggtcccgggctgcactggtgtgcaggaaatggaatcagatgatgtacagcgccgaactctggagataccggacaataaccttctctgggagaccatcgcgggtccatgccagcgaagtggaaagcgccgtctggtacgtcaaaaagttcggccgttacctggaacacctcgaggtcaaatttatgaatccatataacgccgtgctcaccaaaaagttccaggttacgatgcggggtctattatcctgccttagtaaatcaaataacaggttgaagtccttgtccatccagtatttagaattggatcgactggtgtggagaaattcgatacggagcagctttattagtagtctgagttttttcctgaagaagatgggcaagcgcctggactacctgaacctgaaaggtgctcgactaactgtagaacaaggctgccagatactggactccctcagttatatgcgtaatgagaacgtgatttctgagctgaacattgaagactacttctcccaccaccttgcggtgtataatagtccccagtttaaaaagaccatgtctactttccacaacttggtctccttaaaccttaattataactgtatctccgacgagcttctcgagaacctttgcgagaacgcgtctactctgcggactattaacataaagtgtcacgtccacgacccacacggccaggtaatctggggaatgtcatgggcaaagctcgcgaggcaggccactaatctcaaggtaaatttcttttttgagaggattatgaaatatgagagactggctcgtatactgctccaggagatacccatccggagcatttccttacggagttgttattttagtgaccccgattgttccatgaggccgacacttatagatctattacccactttcaggcatactctgcagaaattaacttgtgaattcaataacaaccatgagagtctcgatgaggaactgcatctgctgatcatctcttgccgtaagctgttctactttaaaatttgggcctttctggacgtttctttcgttgagcgaatccttaaaagtcagaaggagcggcaatgtgctttgcgcgtgtttaaggccaggatctacactaatcgttacgagacgaacgaagaggacaaaactctccaggaaatttatcgtaaataccgaaagctcatcgaaagcgagctgtcatacttcgtgatagtttactccgttatgtag

SEQ ID NO: 223032 - DNA, 1164 bp, synthetic construct
  misc_feature 1..1164: note = Description of Artificial Sequence: Synthetic coding sequence
  source 1..1164: mol_type = other DNA
atggctggaagcgaacctaggagtggtactaatagtcctccaccgcctttttccgactggggacgccttgaggctgccatcctgagtggctggaaaacattctggcaatctgtctctaaagaaagagtggccagaacaacaagtcgtgaagaggtggacgaggctgcgtcaactttgaccaggctccccattgacgtccaactgtatattcttagcttcctgtccccgcacgacctttgtcagctcggatcgacaaaccactactggaacgagactgtgagagatcctatcctgtggcgatactttctcttacgcgacctcccatcctggagctccgtggattggaagagtcttcctgacctggaaatcttaaaaaagcccattagtgaagttactgatggcgctttttttgactacatggcagtttatcgaatgtgctgcccctacactagaagggccagcaagtcgtcccgccctatgtatggagccgtaacaagtttccttcattccctcatcattcaaaatgagcccagattcgctatgttcgggccagggttagaagagcttaataccagtctcgttctttccctgatgtcctctgaagagctgtgcccgacagctggcctgcctcagcgacagattgatggcatcggaagcggagtgaacttccaactgaacaaccagcataagttcaacatcctgatcctgtactctactaccagaaaagaaagagacagggctcgcgaggaacacacaagcgctgtgaacaagatgttctcgaggcacaatgaaggagacgatcagcaggggtcccgctatagcgtgataccccagatccagaaagtatgcgaagtggttgacggatttatctacgtcgccaacgctgaggcacacaaaagacatgagtggcaagacgagttttctcacatcatggctatgacagatcccgcttttggctcttccggcagacctctgctggtgttatcctgcatttcccaaggtgacgtcaagcgtatgccctgtttttacctcgcacacgaactccatctaaaccttttaaaccacccctggttggtacaggacactgaagctgagaccctgacagggtttctgaatgggatcgagtggatactggaggaagtggaaagcaaacgggctcgttag

SEQ ID NO: 223033 - DNA, 924 bp, synthetic construct
  misc_feature 1..924: note = Description of Artificial Sequence: Synthetic coding sequence
  source 1..924: mol_type = other DNA
atggcaggctctgaaccacgcagcggcacgaatagccctccccctccattttcagactggggacggcttgaggctgctattctgtccggctggaaaaccttctggcagagcgtgtccaaggagcgcgttgctagaactacttctcgggaagaggtggatgaagccgcatctaccctgacaaggctgccaatcgatgtacagctctacattctgtcttttctaagccctcacgacttgtgtcaacttggtagcacaaatcattactggaatgagaccgtgcgagaccctattctgtggaggtacttccttctgagagatttgcccagctggtcatctgtggattggaagtctctcccggatctggagatcttgaagaaaccaatcagcgaggtgacagatggggcattctttgattacatggccgtgtacaggatgtgctgtccctacacacgcagagccagcaaatcaagtaggcccatgtacggtgctgtcacctccttccttcacagcctaataattcagaacgaacctcgttttgctatgtttggacccggtcttgaggaactgaacacgtccctggtcctgagcctcatgtcttccgaggaactgtgccccaccgctggtttgcctcagaggcagatcgacggcatcgggagcggcgtaaatttccagctcaataaccagcacaagtttaacatcctgattctgtactcaaccacacgtaaggaaagggacagagccagggaggagcacaccagtgcggttaacaaaatgttctcccgacataatgagggggatgaccaacaggggagtaggtactccgtcatcccgcagattcaaaaggtgtgtgaagtggtggatggcttcatctacgtggccaacgcagaggcgcacaaaagtaaatactcctacgtccatttttag

SEQ ID NO: 223034 - DNA, 2130 bp, synthetic construct
  misc_feature 1..2130: note = Description of Artificial Sequence: Synthetic coding sequence
  source 1..2130: mol_type = other DNA
atgggtaaagctcggaggtctccccctggacaccataggcactgcgaaggttgcttcaacaggcattgtcacattccagtcgagccaaatacttcttgcctggtgatcagttgtcatctcctatgtggagccacctttcacatgtgcaaggaggctgaacaccagctcctttgcccactggaacaagtgccctgtttaaattctgagtacggctgcccactcagcatgagtaggcacaagctcgccaaacatctccaggtgtgccctgcctccgtcgtgtgttgttctatggagtggaacaggtggcccaatgtagacagcgaaacaacacttcatgagaacattatgaaagaaacaccttccgaggagtgtctagacacagcccttgcattacaagaccagaaggttctgtttaggtcgctgaaaatggtggagttatttcccgagactagggaggccaccgaggaagagccaacgatgaacggcgaaacatccgtggaagagatggggggtgctgtaggtggcgtcgatatcgggctggtgcctcacggcctctccgccacaaacggggaaatggctgagttaagccaagaggaacgcgaggttttagctaaaactaaggagggaatggatctggtcaagttcgggcagtgggaaaacatctttagcaaagagcatgccgcttccgcactcacaaattcatcagcaagttgcgaatcgaagaacaagaacgatagtgagaaggagcagatcagttccgggcacaacatggtcgaaggcgaaggggctcccaaaaaaaaggagccccaggagaaccagaaacagcaagatgtgagaacagccatggagaccaccgggctggccccatggcaggacggggtattggaaagactcaaaacagctgtcgacgccaaggactacaatatgtacctggttcataatggcaggatgctgattcacttcggccaaatgccagcctgcaccccaaaagaaagggacttcgtgtatggcaagttggaagctcaggaggttaagaccgtgtacaccttcaaggttccagtgtcctactgcggtaagagagctcggttgggcgatgctatgctaagctgtaaaccctccgagcataaagctgtcgacacttctgatctgggaatcaccgtggaggacttgcctaagtctgacctgataaaaacgacactccagtgcgccctggaaagagagttaaaagggcacgtgattagcgagtctcgatccattgacggcttgttcatggacttcgcaacacagacctataacttcgagccagagcagttcagttctggcaccgttcttgccgatcttacagccgctacccctggcggtttgcatgtggaactacactccgagtgcgtcacaaggcgccataacaaaagttcctccgcatttacttttacctgtaacaagtttttcagacgagatgaattccctctccattttaaaaatgtgcacacagacatccagtcttgcctaaatggctggtttcagcatcggtgccctctagcctacctgggatgtacctttgtgcagaaccacttccgaccaccaggacagaaagctaaagtaatctacagtcaggaactgaagacctttgccatcaaacctgaggttgcgcctgaattgtcggaaggcaggaagaataaccacctcctcgggcatggaggcaagtcccagaactccctgacgtctctgccgttggaaattctcaagtacattgccggatttcttgattccgtttctctggctcaactcagccaggtcagcgtgctgatgagaaacatttgtgcaaccctactgcaggagcgaggaatggtactgctgcaatggaaaaagaagaggtactcacatgggggtaccagctggcgggtgcaccgagagatatggcagttctcatccctgttctctaaaatcaaaagctgggaattcaatgaggtgaccagcatgagtgagcatctgaagtcatgtccttttaacattgttgaacataaaaccgatcccatactgcttaccagcatgtgtcagccaagggaacaggcacgtgaatcactcgtgagtacttttagaattcgccctcgaggaagatacgttagctag

SEQ ID NO: 223035 - DNA, 2811 bp, synthetic construct
  misc_feature 1..2811: note = Description of Artificial Sequence: Synthetic coding sequence
  source 1..2811: mol_type = other DNA
atgactacagggctttccgaccagcaggtggtctgcgatctcgatcaccgcgctgtggaggccctgctccaggctgtccgaaagcggatggcaggcgcttctcccgcagtaccacatgaacgggctcgactgacagggggagcggctgccgttgaaccggcatgcagaggcggagggggtgccatggcgtcactagatctcccttatcggtgtccccgatgtggggagcataaaagattccggagcctttcgagcctgagggcacacctggagtatagccacacttatgagacattgtacatcctgagcaaaaccaattctatctgcgatggggctgccgcagctgcggcagcagcagcggctgcttctggctttccactggctcctgagcctgccgctctgctcgcggttcccggtgctcggcgagaagtcttcgagtcaacaagcttccaggggaaagagcaggctgcaggcccttcaccagccgctccacacttgctccatcatcatcatcatcacgcccctttggcacattttcctggggacctggtccctgcctctcttccatgcgaggagttggctgagcccggtctcgtgcctgcagctgcagctcggtatgcactgcgggagatcgagattcccttgggcgaactgtttgcccgaaaatccgtcgcatcctcagcgtgcagtaccccaccaccaggcccagggccaggcccttgccctggcccagcatcagccagcccagcaagtccaagcccagccgatgttgcttacgaagagggacttgccagacttaaaataagggccctcgagaagctcgaggttgaccggcgattggagcgactctctgaagaagtcgaacagaagattgcaggccaggtcggacgcttacaagccgaactggagcgcaaagcagccgaactggagacagcccgacaagaaagtgcccgactggggagagaaaaagaagagttagaagagagagcctctgaactgagccgccaagttgacgtcagcgtggagttattggcttccttgaaacaggatctggtgcataaggaacaggagttgagtagaaaacaacaggaggtggtccagatcgatcaattcttgaaagagacagcggctagagaggcatccgcgaaactgcggctgcagcagtttatcgaagagctattggagcgcgctgatcgtgctgagcggcaacttcaggtaatctccagcagttgcggcagtacgccctccgcctccctggggagagggggaggcggtggaggcgcaggcccaaatgcacggggtcccggtcgcatgcgtgaacatcatgtcggccctgcggtcccgaacacttatgccgtctctcgccacggcagcagtccatcaactggggcttccagcagagtgcccgctgcctcccagagctctggctgctatgacagcgattccctagagctgccacggccagaagagggcgctccagaggacagtggaccgggaggactggggacccgggctcaggcggctaacggtggcagcgagaggagccagccacccaggtcctccgggttgcggaggcaggccatccaaaattggcagagacgcccacggaggcattccaccgaaggcgaggagggagatgtctcagacgtgggctcccgcaccactgaatccgaagcagaaggcccattagatgcacccagaccgggtccagcaatggcaggcccattgtcctcatgccgcctaagtgcacgaccagaagggggatctggtagaggcaggcgggcagagagggtatcaccaagcagaagtaacgaggttatctctccggaaatcctcaagatgagagctgctttattctgtatttttacttaccttgatacgaggactctgttgcacgcagctgaggtgtgcagagactggcgcttcgtcgccagacatccggctgtatggacacgagtgctactcgagaacgcaagggtctgcagtaaattcttagccatgctggctcagtggtgcacacaagcccattccctgaccctgcagaacctgaagccaaggcaacgcggaaaaaaagagagtaaagaggaatatgcccgttccactcgcggatgtctcgaagcaggtctggaaagtctcctcaaagcggcagggggaaatctgctcattctacggattagccactgtccaaatatactgacagacagatcgctatggctggccagttgttactgcagggctctacaggcagtcacctataggtccgctactgacccagtgggccacgaagttatctgggccctgggcgcaggctgcagagagatcgtgagcctgcaagtcgctccgctgcacccttgccagcaacccaccaggttctcaaaccgatgcttgcaaatgattgggagatgctggccgcacctccgcgctctgggtgtcggcggtgccggttgcggcgtgcaaggtctggcaagtctggcgcgtaactgtatgcggctgcaggttcttgagctggatcacgtgtctgaaatcacgcaggaagtcgcggctgaggtgtgtcgagaaggactaaagggcttagagatgctggtactgacagccacaccagtgactcccaaggcgttgttacattttaactctatctgcaggaatttaaagtccatcgtggtacagattggtatcgccgattattttaaggaaccatcatctcctgaagcccagaagctctttgaggatatggtcactaaactccaagccctcagaagaaggcctgggttttcaaagatcctccatattaaggtggaagggggttgctag

SEQ ID NO: 223036 - DNA, 2628 bp, synthetic construct
  misc_feature 1..2628: note = Description of Artificial Sequence: Synthetic coding sequence
  source 1..2628: mol_type = other DNA
atggctagcctggacttaccatacagatgccctcgctgcggagagcataagcggttccggagtctcagctcccttcgcgcacacttagagtattcccacacatacgaaacactatacattctgtccaagaccaacagcatctgcgatggagcggctgccgcagccgctgccgcagctgcggcatccggattcccattggcaccagaaccggctgccttactggctgtgcctggggcaaggagagaggtgtttgagagcacctcatttcagggaaaggagcaagccgctggcccttccccagccgctcctcacctgctccaccaccaccaccaccacgctcctcttgcccactttcctggagatctcgtaccggcttccctgccttgtgaggagctggcagagccaggactcgtgcctgcagctgctgcccgttatgcattgcgggagatcgaaataccgttgggcgagctgtttgctcggaagtcagtcgcgagcagtgcatgctcaacaccccctcccggacctggacccggaccttgtcctgggccagcgtcagcctcgcctgcaagtccaagccccgctgatgttgcatatgaagagggcctggccaggctgaagataagggccctagagaagctggaagtcgatcgaaggctcgagcgtctgtccgaagaagtggaacagaaaatcgccggacaggtcggcaggctccaggctgaactcgaacgaaaggcagcagagctggaaacagctaggcaggagtcagcacgtctgggcagagagaaggaggaactggaggagcgggcatctgaactttctcggcaggtggatgtgagtgtggagctcttagccagtctgaaacaggatttggtgcacaaggagcaggagctgagtagaaaacagcaagaggtggtgcagatcgaccagtttctgaaagagaccgcagccagagaggcttccgccaaacttcgcttgcagcagttcatagaagaattgttagagagggctgaccgggctgagcgccagctacaggtaatctcgagctcctgtgggtctaccccgtcggcctcgctgggtcgaggcggtggcggtgggggtgcaggtcccaatgctcgcggacctggcagaatgcgagagcaccacgtgggaccagccgtgccgaacacctatgcggtgtctaggcacgggagcagccccagcaccggcgctagctcccgcgtgcccgctgcctctcaatcttccggctgttacgattctgatagcctagagctgccaagaccggaagaaggcgctcctgaggattctggaccgggaggcctgggtacccgggctcaagctgcaaacgggggttcagaacgctcacagccccctagatctagcgggcttcgacggcaggccattcaaaactggcagcggcgtcctcgcagacacagtactgaaggcgaggaaggtgatgttagtgacgtcggatctcggacgacagaaagcgaggcggaagggcctctcgatgcacccaggcccggacccgctatggccggtcccctgagcagctgtaggctctctgcgcgacccgagggaggcagcggacggggtcgcagggcagagcgggtctcaccttctaggagtaacgaggtcatcagcccagagatcctcaagatgagggccgctctcttttgtatttttacttacctcgacactaggacactcctccacgcagctgaggtgtgtcgtgattggagatttgtggctaggcatcctgccgtgtggaccagggtcctcctcgagaatgccagggtatgcagcaagttccttgccatgctcgctcagtggtgcacccaggcccattccctgacccttcagaacctgaagcccagacagcgcggaaaaaaggagtccaaggaggaatatgccagatcaacgcgcggttgcctggaagctggcctggagagtctgcttaaagccgcaggtgggaatctcctgattctacggatcagtcattgtcccaacattctgactgaccgatcactgtggctagcttcgtgttactgtcgtgcactgcaggctgtgacatatcgtagcgccacggatccagtggggcacgaagtgatttgggctctgggggcagggtgcagagagattgtttctcttcaggtcgcccctctgcatccatgccagcagcctacgcgctttagcaatcggtgccttcagatgattggtcggtgttggccacacctcagagctctgggagtggggggagcaggctgcggcgtgcaggggttagcaagtctggccagaaactgcatgagactccaggttttggaactcgatcatgtcagcgaaatcactcaagaggttgccgctgaagtttgtcgagagggcctcaagggcctggagatgctggtgctcacggcgacccccgtgacgcccaaagcactgctgcatttcaactccatctgtaggaatttgaagagcatcgtcgtgcagattgggattgcggactatttcaaagaacccagctctccagaggcccagaagctttttgaagacatggtcacgaagctgcaggcactgcgacgaagacccggatttagcaaaattctgcatattaaggtcgaggggggatgctag

SEQ ID NO: 223037 - DNA, 2154 bp, synthetic construct
  misc_feature 1..2154: note = Description of Artificial Sequence: Synthetic coding sequence
  source 1..2154: mol_type = other DNA
atggcaagctcctcagattccgaggatgacagtttcatggccgtcgaccaggaggagactgtgctggaaggtactatggatcaggacgaggagccacaccctgtgctggaagctgaggaaacaaggcataaccggagtatgtcggagctgccggaagaagtgctggaatacatccttagctttctgagtccataccaggagcataaaacagcagcactggtttgtaaacagtggtaccggctcatcaagggtgtcgcacatcaatgttaccacggctttatgaaagcagtccaagagggaaatatacaatgggagtcgaggacttacccgtatccaggaactccaatcacccagcggttttcccattcggcatgttattatgatgcgaatcagtccatgtatgttttcggtggttgtacccagtcgtcgtgcaacgctgcattcaatgacctctggcgcctggatctcaattctaaggagtggatcaggcctttagccagcggctcttatcctagccccaaagcgggagcgacgctggtggtgtacaaggatctgttagtgctgttcggagggtggacccgtccatccccgtatccgctgcatcagccagaacgcttttttgacgagattcacacatacagcccctccaagaattggtggaactgcattgttactacccacgggcctccacccatggctggccacagctcttgtgtgatcgatgacaagatgatagtatttggcggtagccttggaagccgtcagatgtccaacgatgtttgggtccttgatcttgaacagtgggcctggtccaagcccaacatctctggtcccagtccccacccgaggggaggtcagtcccagattgttatcgatgacgcgactatcctgattctgggcggatgtggaggccctaatgccttgttcaaagacgcttggctgctgcacatgcattcgggaccgtgggcctggcagcctttgaaagtggagaatgaggaacacggcgctcccgagctatggtgccatccggcatgtagagtgggacagtgtgtggtggtattctcccaggccccatcagggcgtgcacctttaagtcccagccttaacagtaggccaagccctatctccgctactcctcccgcactggtaccagaaacccgagagtaccgatctcaatctcccgtacgctccatggatgaggcaccctgtgtcaacggccgttggggaaccctgcggcctagggctcagcgacagactcccagtggcagcagagagggctccctctcgccagccagaggcgacgggtctcctatccttaatggtggcagcctgagccccggaaccgccgctgtcggaggatctagcctggactctcctgttcaagccatctcaccaagtaccccaagcgcacccgagggatacgatctgaaaatcggtttgtccctcgcaccgcgtcggggaagtctgcctgaccagaaggacctgcgattgggttcgatcgatctgaattgggatttaaagccagcaagtagctccaacccaatggacggcatggacaaccgcaccgtcggtggttcaatgcggcatcctcctgagcaaactaatggtgtgcacactccaccccacgtggccagcgctctggcgggtgctgtgtctcccggtgccttacgcaggtcactcgaggccattaaggccatgtccagcaaaggaccgtccgcttcagctgccctctctcctccactcggatcatcacccggatccccaggatctcagtctctctcctctggagaaaccgtccccatccccaggcctggtccagcccaaggggacgggcattccctacctccgatcgctcgacggttgggccaccacccaccccaaagtcttaacgtcgggaagcctctctaccagagtatgaattgcaaaccaatgcagatgtacgtactcgacattaaagacacgaaagaaaagggcagagtgaaatggaaggtattcaactcgagcagcgtggtaggaccccctgagacttcacttcacaccgtggtgcagggccgaggggaattgattattttcggcggactgatggacaagaagcaaaatgtgaaatattatcctaaaacgaacgccctgtatttcgtcagggcaaaaagatag

SEQ ID NO: 223038 - DNA, 900 bp, synthetic construct
  misc_feature 1..900: note = Description of Artificial Sequence: Synthetic coding sequence
  source 1..900: mol_type = other DNA
atgtcctctccccctcagatcgtcatagacgacgcaacaattctcattctgggtggatgcggtggtccaaatgctttatttaaagatgcgtggcttctgcacatgcactcaggaccctgggcatggcagcctctgaaggtagaaaatgaggagcatggtgcccctgagctgtggtgccatccagcctgtagggtcggccagtgcgtggtggtgttcagccaggcgccttccggtagggctcccctgtcgccatccctcaacagccggccatccccaatcagtgcgacacctcctgcactcgtcccagaaacgagggagtaccgctctcagtctcctgtgcgtagcatggacgaggccccttgcgtgaacggacgctggggaaccctgagaccacgggcacaacggcagacccccagcggcagcagagagggtagcctaagtccggctaggggcgatggctcaccgatcctgaatgggggtagcttgagtcctggaaccgccgcagtgggcggatctagcttggatagccctgtgcaggccatctctccctccacgccttcggcccctgaggggtatgatctaaagattggcctatcactggcccctcgccgagggagtttgccagatcagaaggatctgagactgggctctatcgacctgaattgggacctcaaaccggcttcctcctcaaatcctatggacgggatggataatcgcaccgtgggtggaagcatgcggcatccacctgaacagacgaacggggttcatacacctccccacgtagcgagtgcactcgcaggggcagtgtcacccggtgctctgcgtaggtccctggaagccatcaaggctatgagcagcaagggcccatccgccagtgcagccctcagccctcccctctag

SEQ ID NO: 223039 - DNA, 900 bp, synthetic construct
  misc_feature 1..900: note = Description of Artificial Sequence: Synthetic coding sequence
  source 1..900: mol_type = other DNA
atgagttcgccccctcagatcgttattgatgatgcaacgatactgatccttggagggtgtgggggacccaacgccctgttcaaggacgcttggctgttacacatgcactctggcccttgggcatggcagccgctaaaggttgagaatgaggagcatggtgctcccgagctgtggtgtcacccagcttgcagggtgggacagtgcgtagttgtttttagtcaggccccaagcggcagagcccctctgtcgccttcactaaatagccggccttcaccaattagcgctacaccaccagcactggtccccgaaacccgggagtaccgcagccagtcccccgtgcgctcaatggacgaagctccgtgcgtgaacgggcgatggggaaccctgaggccacgcgctcagcgccaaaccccaagcggatcccgggaaggctcactaagccctgctcgaggtgacgggtcaccgattctgaacggcggtagcttgagccccggtactgccgcagtgggtgggagttctctagactccccggtgcaagcaataagcccttcaacacctagcgcccctgaaggctatgacttaaagatcggtctgtcactcgcgccaaggagaggatctctacctgatcaaaaagatctacggctcgggtccattgatctgaattgggatctgaaacccgcttcaagctcaaaccccatggacggtatggacaatcgtactgtggggggttcaatgaggcatccacccgagcagacaaacggagttcatacacctccacatgtggcatccgcactggctggcgcagtcagcccgggagccctgcggcgaagtttggaggccatcaaagctatgagtagtaagggacctagcgctagcgcagctctgtcccctccactgtag

SEQ ID NO: 223040 - DNA, 2127 bp, synthetic construct
  misc_feature 1..2127: note = Description of Artificial Sequence: Synthetic coding sequence
  source 1..2127: mol_type = other DNA
atgtcatttaaggacaaggatgagcgtatatcctgtctggaggcatatgtgactctaacctcaaagtcatctcgatttacagatgagaccgaaatcctgaagatgtctcaaagacattctggacaggctggaacagaagctggaaatggtgccgattctcctcccattgtgaacagtaaatattccactttcagggacttctgcagcacttcctcattccaagattctggatataatgaattgaagagctgttcgttcgacaacattgacaaagaatatctcggtaaaaaggaaaaaggcccaacactgctttatgagcaccccgagacaagtggcctagggctaacgcaccccctggagtcaccaacccaaaagaaaaagtgcattctgcctcgaaaggaaaaggataagacacccgagctctgtgagactcccaagatcagtggcaaaaaatgcttaccgcgaagacgccttaatgtttccttcgctttactgaagggggacttcgagtctcagaacagctctctggaaagctccatctctcaggttattaatctggagaaaaatatcccatcatccgctagcggctttagccgcgcaaacaatttttctcccctcgtgactagcacattaaaaacggaggaagtgacatcctgtagtcagaagctcaggctgaacttctctcagcagaagaccagcactattgacgattcaaaagatgattgctccttattcgaggtagagtgtatcagccccattcagggtaacaactttaaggactccatcactcacgacttcagtgatagctctctttgtattaatgacgaaaatgcctgtccagaactcctgggttcatctgtctccgggacaacctgcggtactgacgaagatatttttgttacccccatttccaatctggttgcaaacatccggtttaatgctagccagattctctctcccagtcccgaggttaggggctcaattagcaccccagaggattctgggtttaatagtctgtccttggaaaaatctgaagatagcctcagcgaccaggagggctcgtttcaagaactcctgcagaaacataaggggacacccaaagtaggcgacactatccgcaaaacgcgtcatctcggaaggtctagacgcctgagtactctccgcgagcaaagttcccagtccgagacagaagaggagaagcagatcgtgcacccagattcagaaaaacgtgctgcggctgctagtgctatcagtgaagggcagctgagttccgatgagagcggggatctgacgttttccctcaaaaatctctcgaagaccccagcgctgcagctagtccatgagctgttcatgaagtctaagaggaaacgcctccaggagaactccggtcacgagttcctggagcagggggacggagaaaaaatcgctgtgttgcagtgcatcctggccggactgatagggaagaagatggggatcgaaaagttggacatcctgacagagttaaaatataggaatctgaagcacatactcgccatggtgctggaaagccttaccgccgaaagcctgtgctctgtttggaaagtttctagaaattggagggagattgttgtgcaggataaaaacgccaatcggagaaggaaattttacattacccaactgaaaactgactccgaaggcgctgtgcttaacgtggaggatgctgccactcgcctgcagctgttgaacagatcagctttaagatccgtgcaggcccaggcaagaatcccagggagtcaacgggagcagggctccacgctttcaccgtggggagaagtcctcacgccactggcgagctcgagcgtgacccacctcagctccaaacaggaggagtacgtgaaggtggccaaaaccctgttcactgatgaagctcttaagccctgtccccgttgccaatccccagcaaaatatcaaccatataaaaaacgtggtctctgtagtcggaccgcatgcgggtttgatttttgcgttctgtgcctttgtgcctatcacggctctgaggaatgtagcagaggggcagccaagcccaggaataggaaggacgccctacctggaagtgcccagagtaagagaaaccttaagaggctgtag

SEQ ID NO: 223041 - DNA, 675 bp, synthetic construct
  misc_feature 1..675: note = Description of Artificial Sequence: Synthetic coding sequence
  source 1..675: mol_type = other DNA
atggccgttgggaacattaacgaactgcccgagaatattttacttgagctgtttactcacgtgcccgcaaggcaactcctacttaattgccgtctggtgtgtagcctatggcgagacctcatagacctagtcaccctgtggaagcggaagtgtctaagggaaggtttcattactgaggattgggatcaaccagtggccgattggaagattttctactttctcagaagcctacataggaatttgcttcataatccttgcgccgaggaagggtttgagttctggtcattggatgtcaatgggggtgacgagtggaaagtggaggatctcagtagagatcagcgtaaggagttcccaaatgaccaggtaagatctcaggccagactccgcgtgcaggtgccagcagtccggtctgcacctgtggtacgggctcgggcttctggcgatctacccgctcgccctggagaccacccggcagaggaaaggtgccaagtggagggaggtctccctcatattttacaactgccggctagacggcctctccatctggtgagcgctaggaggaggggtcattctctcctgggtaggctcgtgaggccagagggacaccagcagcagcaccaccaccgggctcccgcagcgctaacgcctccagaaccccctagcgcagagccatag

SEQ ID NO: 223042 - DNA, 768 bp, synthetic construct
  misc_feature 1..768: note = Description of Artificial Sequence: Synthetic coding sequence
  source 1..768: mol_type = other DNA
atggctgtgggaaacatcaacgagcttccggagaatatccttttggagctctttactcacgtgcctgccagacagctgctgctgaactgccgcctcgtgtgctccctgtggagggatttaatcgatcttgtgaccttatggaaaagaaagtgcctgagagaagggttcatcaccgaggattgggatcagcccgtggccgactggaaaatattctatttcttaagatccctgcaccgtaacctgttgcacaatccatgcgccgaagaggggtttgagttctggtctctcgacgtcaatggaggagacgaatggaaggtggaagatctcagcagggaccagcggaaagagttccctaacgatcaggttaaaaagtatttcgtgacttcatactacacctgtctgaaaagccaggttgttgatctcaaggcagaggggtactgggaagaactgatggataccaccaggcccgacatagaagttaaggattggttcgctgctaggcctgactgtggcagcaagtaccagttgtgtgttcagcttctttctagtgctcacgctccgctgggtacattccagcccgatcctgctaccatacaacagaagagcgacgccaagtggcgcgaagtgagtcataccttttcaaattatccacctggcgtgcgctatatttggtttcagcacggaggggtggacacacattactgggccggatggtacggtcccagagtgacaaattcctccataaccatcggaccccctttgccttag

SEQ ID NO: 223043 - DNA, 675 bp, synthetic construct
  misc_feature 1..675: note = Description of Artificial Sequence: Synthetic coding sequence
  source 1..675: mol_type = other DNA
atggctgtcggcaacataaatgaattgcccgaaaatattctgttagaactgtttacacatgtgccagccaggcagcttttgttgaattgccgcctggtgtgttctctctggagagaccttatcgaccttgtcaccttgtggaaacgaaaatgtttgagggagggttttatcacggaggattgggaccaacctgtggctgactggaaaattttttacttcctccgttcgctacataggaatttgctgcataacccatgcgcagaagagggcttcgaattttggtccctagacgtaaatggtggtgacgaatggaaagtggaagacctatctcgagatcagagaaaagagttccctaacgatcaggttcgaagccaggccaggctgagggtacaggtacccgctgtgagaagcgcgcctgtcgttcgggcacgggcatccggggacctgcccgctagacccggtgaccatcccgctgaggagcggtgtcaggtcgagggcggtctgccgcatatcttacagcttcctgcaagacgaccgctgcatttagtgtctgcacggagaaggggccactcactgcttggcaggctggttaggccagaagggcaccaacagcaacaccaccaccgggctcccgcagctctcacgccacccgaacccccatctgccgaaccctag

SEQ ID NO: 223044 - DNA, 675 bp, synthetic construct
  misc_feature 1..675: note = Description of Artificial Sequence: Synthetic coding sequence
  source 1..675: mol_type = other DNA
atggcggtgggaaacatcaatgagttgcctgagaatatcctgctcgagctcttcactcacgtgccagcaagacagctcttactcaactgccgacttgtctgttctttatggcgcgatctgatcgacctcgttacactgtggaagagaaagtgtttgcgagagggcttcattaccgaggactgggaccagccagtggccgactggaagattttttacttcctcaggagcctacaccgaaatctgcttcacaacccatgcgctgaagaaggcttcgagttttggtccctggacgtaaatggtggtgatgaatggaaggtcgaggacctatcccgggatcagcgcaaagagttcccgaatgaccaggttcggtcccaggctcggttaagggttcaggtgcctgccgtgaggtccgcccctgtcgtgcgagctcgggcttcgggagacctacctgccaggccaggggaccacccagcggaagagagatgccaggtggagggagggcttccacacatcctgcaattgccagcccgacgtccactccatctcgtgtcggctcggagacgaggtcattctctactgggtcgtttagtgagacctgaggggcatcagcagcagcaccaccatcgggctcctgccgctctaacccccccagaacccccatccgctgagccatag

SEQ ID NO: 223045 - DNA, 771 bp, synthetic construct
  misc_feature 1..771: note = Description of Artificial Sequence: Synthetic coding sequence
  source 1..771: mol_type = other DNA
atggcggttggaaatatcaacgaactgcccgagaatatcttactggagctgttcactcatgtgcctgccaggcagttactgcttaattgccgactcgtttgttcactgtggagggacctgatcgacctcgtgaccctatggaagcggaagtgcttacgcgaaggattcattactgaagattgggaccagcccgtggccgactggaagatcttctattttctcagatcacttcaccgcaacttgctgcataacccctgtgctgaggaggggttcgaattctggtcactcgatgtgaacgggggagatgagtggaaagtcgaggacctgtcgagggaccagaggaaagaatttcccaacgatcagcacctgcctcaggtcccaggtgggggtccacaaggacgcagagtactcgggggtgcggacggataccatacagcaggacaccgaggtcaagggctcgtgcgaagccaagcaagactgcgcgtacaggtgcctgctgtcaggagcgccccagtggtaagggctcgtgcctctggggacttaccagcccgtcctggtgaccaccccgctgaagaacgttgccaggtcgagggcggattaccccacatactgcagttgccagccagacgacctctccatcttgtgagtgcacgtcgaagggggcatagtttgctgggcagactcgtgaggcctgagggtcatcagcaacagcaccatcatcgggctccagcagccttgactccaccagagcccccttcagccgaaccatag

SEQ ID NO: 223046 - DNA, 768 bp, synthetic construct
  misc_feature 1..768: note = Description of Artificial Sequence: Synthetic coding sequence
  source 1..768: mol_type = other DNA
atggccgtgggtaatataaacgagttaccggaaaacatcttactcgaactgttcacacatgtgccagcaaggcagttgctgttgaactgtcggctcgtgtgctctctctggcgggaccttattgatctggtcaccctgtggaagagaaagtgtctccgggaaggatttatcactgaggactgggatcaaccggtagcggactggaagattttttacttcctgagaagtctgcaccggaacctgctgcataacccatgcgcggaggaaggctttgaattctggtctctcgacgtcaatgggggtgatgaatggaaagtcgaagacctatcgagggaccagcggaaggagtttccgaacgatcaggttaaaaaatattttgtgacctcctactacacatgtcttaagagccaggtggtagatctgaaagccgagggttattgggaggaactgatggacactacccggccagatatcgaggtcaaagattggtttgcagcgcgtcctgattgcgggtctaagtaccagctctgcgtgcagctgttgagtagtgctcatgcacctctggggacatttcaacccgaccccgcaaccatccagcagaaatcagatgcgaagtggcgcgaggtctcgcacacattttctaattatccccctggagtgaggtatatatggttccagcacggtggcgtggacacacactattgggctgggtggtatgggcctcgggtgacaaattcctccataaccattgggcctcccctcccatag

SEQ ID NO: 223047 - DNA, 498 bp, synthetic construct
  misc_feature 1..498: note = Description of Artificial Sequence: Synthetic coding sequence
  source 1..498: mol_type = other DNA
atggcagttggcaacatcaatgagctgcccgaaaacattttacttgaactttttacacacgtgccagctcggcaactcctattgaattgtcgcctagtgtgttctttgtggcgggacctgattgacctcgtgacactgtggaagcggaagtgtctcagggagggattcattaccgaggattgggatcaaccagtcgcagattggaaaatcttctatttccttagatcgctccacagaaatctattacacaacccttgtgctgaggaagggttcgagttctggtcactcgatgtaaatggcggtgacgagtggaaggttgaggacttaagcagggatcagaggaaggaatttccgaacgaccaggttcgttcacaagctcgattgagggtgcaggtgccggcagttcgaagtgcccctgtggtgagagccagagcatccggcgaccttcccgcacgccctggcgaccatccagcagaagagcgctgccaggtggagtag

SEQ ID NO: 223048 - DNA, 861 bp, synthetic construct
  misc_feature 1..861: note = Description of Artificial Sequence: Synthetic coding sequence
  source 1..861: mol_type = other DNA
atggctgcacctgcacctggcgctggagccgcttctggaggcgctggctgtagcggaggtggggctggtgccggagcaggaagcggcagcggcgctgcaggggctgggggacgactgccttccagggtgctggaactggtattctcttatctagaactgtccgagctgcgttcctgtgccctggtctgcaaacattggtaccgttgtctccacggcgacgagaatagcgaggtgtggcggagtctttgtgccaggagcctggcagaagaggcgctgcgcacagacatcctttgtaatctgccgtcgtataaggccaaaatccgcgcattccagcacgcttttagcaccaacgattgttcacggaacgtttatatcaaaaagaatggttttacacttcaccgcaatccaatcgcccagagcaccgatggggctcggacaaagattgggtttagcgaggggagacacgcatgggaggtgtggtgggaggggccattgggtactgtagctgtgattgggatcgccacaaagagggctcctatgcagtgtcagggatatgtggcattgttgggctcagatgaccaatcttgggggtggaatttagtggataataaccttctgcacaacggggaggtgaacggaagttttcctcaatgcaacaacgctcccaaataccagataggtgagaggatacgtgtcattctggacatggaggataaaaccctggcttttgagcgcggatacgaattcctgggcgtcgcttttagagggctccctaaagtgtgtctttaccctgcagtctctgcagtatatggaaatactgaagtcaccctcgtttacctgggaaagccactcgacgggtag

SEQ ID NO: 223049 - DNA, 1812 bp, synthetic construct
  misc_feature 1..1812: note = Description of Artificial Sequence: Synthetic coding sequence
  source 1..1812: mol_type = other DNA
atggatcgcggatctctgttgcctttccagctgtggtgtccaaggccttttggcacatattctcagaatcaaccgcgacctcctagtgccgcactgaagccatccgcatgccccgaaccagggggaggcgcagaaccagatcacgggccagcgcacagcgaaaacacacccccagccctggccaccgaggtccctgcgtcccagcccgctcccctcctgagcgctgcagccgcaggagacgaaggccgtgtactgctcgacacttggtacgtaatcaaaccagggaatactaaggaaaaagtagccttctttgttgctcaccagtgcgggggaggaagtcgagcgtcttcaatgaaagtgaaagggcactggggaagtgatagttcaaaagcaaagcgacgcagaagatgtctagaccccacaaaggctccgcctgacccgggaggtcgtgagggtcccccagccgctgaagaagggccagctagcgccggagaggacgtcgacctgttgagtgtagcagaaatggtggccttggtggagcagcgagcggctttggcactgcagagctaccccagaccgactaccccagctccagtggtctttgtatccgcagagcagggtggacctgccaagggagtcggctctgagagacgctccggcggaggcgactgctcgcgagttgcggaagccgtcgcccacttcgaggcccagagggattccccgccaaccaaaggcttaaggaaagaagagcggcctggcccagggcctggcgaagtcaggatcgcctttagaatttccaatggcagggagccacgagcccctgattccggcttgccttctggaggcggagggagacctggctgcgcttatccgggatcccccggaccaggtgcgagggccaaggacaaaattacatgtgatctgtatcagctgatctcaccttcaagagacgcccttccgagcaacgtggagttcttgctagccagagccgatgaggcttcagagggtgacagcccagcacccgctcggcctgaagacacgccacccgctcctcctcctcctccagccagagactgcggtgcaagcggctttcacgtggatgtggttgtcaccggagtggtggacgaatgcatcttctttggcaaggacggcacgaagaatgttaaggaggagactgtatgcctcacggtgagcccagaagagccacccccacccggtcaactgttcttcctccagaaccgcggacctgacggcccaccagaaccacctccagcagacagccctgccacagcaccagggcctgacgacgccgaggggaccgctgacacctctctgtgtaggttgtatcgccatgtttctcacgatttcctggaaatcaggtttaaaatacagaggttactggagcctcgacagtatatgttgctgctccctgagcacgtgctggtaaagatttttagttttctgcctacacgagctttagcagcactgaagtgcacttgtcaccatttcaagggcattattgaggctttcggtgtgcgcgctacggattcaaggtggtcaagagacccgctgtaccgggacgacccgtgtaagcagtgcagaaagaggtacgaaaagggcgacgtcagcctgtgcaggtggcacccaaagccctatcatcatgatctgccatatggcagatcttattggatgtgctgcagacgagctgatagagaaaccccaggatgcagactgggattgcatgataataattgggtgttgccatgcaacggaccaggcggaggcagagccggtagggaagagggacggtag

SEQ ID NO: 223050 - DNA, 609 bp, synthetic construct
  misc_feature 1..609: note = Description of Artificial Sequence: Synthetic coding sequence
  source 1..609: mol_type = other DNA
atgacttgtttgaccgacgtgcccactggttgcgctgccgtggagcccacagcacgcttacctgccgctgcctgggcctccacaatcactaccgggtgttgccccgcaatggggcaggccggagccggacccgctggaagaaggggaggcgaggccggaggcggagagggaagagcacatcacgcccatccaagccccttaccacgcgaacccagggttcggacaggacctccagcccacagtccaacaccagggtcaatcgacccctcgccagaactcagctggggatcagctggcgtgacgcaggaatcgcctctcctggaccccgtagatttccttttgttcagaacccgagccgtggatcccctgcggcgagtgtttttctttttctatcagcatcttaccttcttctctattcaaccccagccacctccttgtcacgcttttcaccctaaggacccgcctgcgggtagtaggcgccagctgatccttgtgcctcttaaaggtccgcctattctggccccaatactgagcctcacccctattctgtctagatggtcctgttatttcccgcgatccaggattgcccaagggtggcacttaagctag

SEQ ID NO: 223051 - DNA, 1359 bp, synthetic construct
  misc_feature 1..1359: note = Description of Artificial Sequence: Synthetic coding sequence
  source 1..1359: mol_type = other DNA
atggcatcacggattaataccaacttcacgctgatcccaaaccagaagcttaggaggtcaaatcggcaaacttcttgttatagcaagaccctgggaagtgggttccagccaataagcacgttcggtaacttcaaggccctcccactggagatatttcagattattctcaagtacctgagtgtcaaggacatttctatgcttagcatggtgagtaaaaccgtgagccagcatataataaattatatctcaacctctagcggcagtaagagactcctgctacaagactttcacaacctggaactgcccgatcgcagacaggacagtgccattctggagcactatagatccctgggattactgttcaagcgctgcacactactgttacccactaaggaaaggctgaaatacatccataagattctgacagaggtttcctgttttaagtttaatgggtgcgcagcacccatgcaatgcttgggcttgacttgctacggcatgtttttacagacactgacagccggatgggatgaactagagtgccacagggtgtacaacttcctgtgcgaactgaccaatctttgtcgcaagatccaaatggcggtgtgttccaagcctggcagcgcccagaagctggagctgagaattaggcttttttgcagaaatgtcttgctggaccactggacccataggagtgatagcgccttttggctgactaggatcctcaagccctggcccatggtgaatcaggctagattgctttatattatcttcgggccaatctcaccacaggacggccaggtcgtgtggcaggagatgatcgaggaaccaactgatgagtttagcctgaaggggctggcagacgcgattaaacttttatatgacgctagcaccaaagagtggaccgcagacgatgtgatctctctggttgacgagctaagcgtagtacctcgagagtggcttctcgagaataacgcaagactcctgatgctctctggaaataacatctgcttcagcttcatggcttctaaagccgtcaatgggagaacgatcgagctcgctcgtcttgtcgtgttcttggccctggtgtgtgaaaaagagctctactgtatggattggacagttaagatgatgcagaaagtgtgcaaggttttctcaacaccagtcgagcgcaagaactttctccagaatgttgccaacgctttcgcctgtgtgattatggagatgctgcagagcattatgtctggcgacagagacgaagacgataggtctttcctgaacctctttcatcttgttcacgcccaggctaattttcacaaagaagtgctgtatcttaccatgaatactcctctcagcacatag

SEQ ID NO: 223052 - DNA, 2133 bp, synthetic construct
  misc_feature 1..2133: note = Description of Artificial Sequence: Synthetic coding sequence
  source 1..2133: mol_type = other DNA
atggggggaaagcagagagatgaggatgatgaggcctatggcaagcctgtaaaatacgatccatccttcagagggccaattaagaatagatcttgcaccgacgtgatatgttgtgtgctttttctgctctttatcttaggctatatcgtggtggggattgtggcatggctgtatggagatcccagacaggtgctctatcctcgaaacagtactggagcatactgcggaatgggcgagaataaagataaaccctacttgctgtatttcaatatattcagctgtattctctcctcgaacatcataagcgttgctgagaatgggctgcaatgccctacaccacaggtttgcgtatcctcctgtccagaggatccatggacagtcgggaagaacgaatttagccaaactgttggcgaagtcttctacaccaagaatcggaatttttgtctgccaggtgtcccctggaacatgaccgttatcacctcactccagcaggaactgtgcccatccttcctcctgccttcagcacctgccctgggaaggtgcttcccctggacaaatgttacccctcctgccctgcccggtattaccaacgacaccactatccagcagggcatatctgggctgattgactctctgaatgccagggacatctcagtcaaaatttttgaagactttgcccagagttggtattggatactggtcgcattgggggtggcacttgttttgtccctgttgttcattctcctgctccgactggtggccggtcccctagtccttgtacttatcctcggagtgctcggagtgctagcctacgggatttattactgctgggaggagtaccgagtgttaagagataaaggggcatccatctctcagctgggctttaccacaaatctttctgcctaccaatctgttcaggaaacctggttggcggcactaattgtgttagccgttctcgaggcaattctgctgctaatgctgattttcttgaggcagagaattcggattgccatagccttgctcaaggaggcctctaaggccgtggggcaaatgatgtccactatgttctatcccctggttaccttcgtgttgttactgatatgcatcgcctattgggcgatgacagccctgtacttggcaacctctggccagccccagtacgtcctgtgggcatcaaacatatcgtctcctggctgcgaaaaggttccaatcaacaccagttgcaaccctactgctcatctcgtcaatagcagctgccccggtctcatgtgcgtgtttcagggatatagctccaaagggttgattcagcggtcggtgttcaatctgcagatatatggggtcctggggcttttttggacgctgaattgggtgttagccctgggccagtgcgtgctggcgggtgctttcgccagcttttactgggctttccataagccacaggatattccaacgtttcccctaattagcgctttcatcagaaccttgagataccatactggctccctggcgttcggcgcattgatcctgaccctcgtacagatcgcccgtgtgatactggagtacatcgaccataagctgaggggcgtgcagaatcccgtcgccaggtgtatcatgtgctgctttaagtgttgtttatggtgtcttgagaaatttataaagttcctgaacaggaacgcctatattatgatcgccatttacggaaagaacttctgtgttagtgcgaaaaacgccttcatgcttctcatgaggaacattgtaagggtcgtggtcctggacaaggtgactgacttgttgctcttctttggaaaacttctggtggtgggcggtgttggtgtgcttagctttttttttttttctggtagaataccaggcctgggcaaggatttcaagagtcctcacttaaactactattggctgcccataatgacctccatccttggagcctacgtgatcgcctcaggtttcttttccgtgttcggcatgtgcgtggatactctgttcttatgttttctcgaagatttggaacggaacaatgggagcctggaccggccatattatatgtctaaatcccttctgaagatcctggggaagaaaaacgaagctccccctgataacaagaagcggaagaagtag

SEQ ID NO: 223053 - DNA, 1206 bp, synthetic construct
  misc_feature 1..1206: note = Description of Artificial Sequence: Synthetic coding sequence
  source 1..1206: mol_type = other DNA
atgaagtgcgattttaactgcaatcacgtacactccggtcttaagcttgtgaaacccgatgatattggcaggctagtgagctataccccggcttaccttgagggcagctgtaaggattgcatcaaagactatgaaagactgtcctgcatagggtcccccatcgtgtccccgagaatcgttcagctggagaccgaatctaagaggcttcataacaaggaaaaccagcacgtgcaacaaaccttgaactctacaaacgaaatagaggctttggaaacttctaggctgtacgaggattctggctactcatccttctcactgcaatcaggtctctcggaacatgaagaaggatccttgctcgaagaaaattttggagatagtctccaatcatgtttgctgcagatccagtcacctgaccagtaccccaacaaaaatcttctccctgtcctgcattttgagaaggttgtctgttctacactaaaaaagaacgcaaaaaggaacccaaaggtggatcgcgaaatgctcaaagagatcatcgcccgtggcaacttccggctccagaatatcataggacgcaagatgggcctggagtgtgtggacattttgtctgagctatttagacgtgggctgcggcacgtgcttgcaacgatcctggcacaactgagtgatatggacctcattaacgtgtctaaggttagtactacctggaagaaaatacttgaagacgataagggggcattccagttgtacagcaaggccatccaaagggtgacagaaaataataataagttcagccctcatgcttctacgcgcgagtacgtgatgtttcggaccccattagcctcagtgcagaaatcagctgcccagacctcactgaagaaggatgctcaaaccaagttaagcaaccaaggggatcagaaaggttccacgtacagtaggcataatgagttctctgaggtggccaaaactttaaagaaaaatgaatcactcaaggcgtgcatccggtgtaatagtccggctaagtacgattgttatcttcagagagctacatgcaagcgagaaggatgtggatttgattattgtacaaaatgcttgtgcaactaccacacaacaaaagattgcagcgatggtaagctgctgaaagccagctgcaagatcgggcctctgcccggtacgaagaagtctaaaaagaacttgcgcaggctatag

SEQ ID NO: 223054 - DNA, 882 bp, synthetic construct
  misc_feature 1..882: note = Description of Artificial Sequence: Synthetic coding sequence
  source 1..882: mol_type = other DNA
atggacgcaccccattccaaggctgcactcgacagcatcaacgagctgcctgaaaacatccttctggagctgtttactcatgtcccggcacgccagttgcttctgaactgtagactggtatgttctctgtggcgcgatctcatcgacctgatgacactttggaagaggaaatgccttagagaaggttttataaccaaagattgggatcaacccgtggccgactggaaaatcttctatttcttaaggagcctccatagaaacctactcaggaacccttgcgccgaggaagacatgttcgcatggcagatagatttcaacggcggagacagatggaaagtggagtctctgccgggagcgcacggcactgattttcccgaccctaaagtaaaaaagtacttcgttactagctacgagatgtgcctcaaatcccagctggttgacctggtggctgaaggttattgggaagagctccttgacacattccgaccggatatcgttgttaaggactggttcgctgcgcgtgcagactgtggttgcacctatcagctcaaggtgcaactcgcgagtgctgactattttgtgctagcttcttttgagccacctccagtcactatccagcaatggaacaacgctacctggacagaggtgtcgtacacatttagtgattatccccgaggagtgaggtatatcttgttccagcatggcggacgtgacacacagtactgggccggatggtacggaccacgggtgaccaactcatctatcgtcgttagcccaaagatgacacgaaaccaagccagttctgaagcacagccaggccagaagcatggacaggaagaagctgctcagagcccgtatagagccgtagtccaaatattctag

SEQ ID NO: 223055 - DNA, 750 bp, synthetic construct
  misc_feature 1..750: note = Description of Artificial Sequence: Synthetic coding sequence
  source 1..750: mol_type = other DNA
tgaaacgaactccctgagaatattttgctagagctgttcacccacgtgccagccagacagctgttacttaattgccgtctggtttgctcattgtggcgggatcttattgacttaatgacactctggaaaaggaagtgtctgcgagagggattcataaccaaagactgggatcagcctgtggccgactggaaaattttctattttctgagaagtctgcaccgcaacctgttgaggaatccgtgcgcggaagaagacatgttcgcctggcagatcgattttaatggcggagaccggtggaaagttgagagcctgcctggagcccacggaaccgacttcccagacccaaaggtgaagaagtatttcgtaacttcctatgagttcgccgctagggcggactgtggatgcacttatcaattgaaggtgcagctggcatctgcggactattttgtactggctagtttcgagccgccacctgtgacgatccaacagtggaacaatgcaacctggacagaagttagctataccttctcagattacccgagaggagtgagatatatcttgtttcagcacggaggcagggatacccagtattgggccggatggtatgggcctcgcgtaacaaattcctctattgttgtgtcacccaagatgacccggaatcaagcgtccagtgaagcacagccaggacagaaacatggacaggaggaagctgcacaatcgccttatcgagccgtggttcagatcttttag

SEQ ID NO: 223056 - DNA, 1569 bp, synthetic construct
  misc_feature 1..1569: note = Description of Artificial Sequence: Synthetic coding sequence
  source 1..1569: mol_type = other DNA
atgcggctaagggtccgattgttaaagcgcacctggcctttagaagtgcctgagactgaaccgactctaggccacctgaggtcccatttgaggcagtctctcctgtgcacttggggatatagtagcaacactcggttcaccatcacgttgaactataaggatccactcaccggagacgaagaaactcttgccagttatggaatcgtgagtggtgacctgatctgtttgatcttgcaggacgacattccagcccctaatataccatcgtccacggattccgagcattcctccctgcagaacaacgaacagcctagtctggcgacaagctcaaatcagaccagcatgcaggacgagcagccatccgactctttccagggccaggccgctcagtccggagtgtggaatgacgattccatgctcggcccatctcaaaatttcgaggccgaatcaattcaggacaacgcgcacatggcggaggggacaggcttttacccgtctgaaccaatgctgtgctctgagagcgtcgagggccaagtgcctcattcactggagacactgtaccagtcggccgattgtagtgacgccaacgatgctctgatcgtcttgattcacctgctgatgctggagagcgggtatataccgcagggtacagaggctaaagcccttagcatgcccgaaaaatggaaactgtccggagtatacaagctccagtacatgcaccctttgtgtgagggatcttcggccaccttgacctgtgtgcccttgggcaacctcattgtcgtgaatgcgactttgaagataaataacgagattcgctctgttaaacggctgcagcttctcccagaaagcttcatctgcaaggaaaagttgggggagaacgtggccaacatttacaaagatctacagaagctctcccgcctgttcaaagaccagctcgtctacccgctgctcgcctttaccagacaggccttaaatctgccagacgtctttggcctcgtggtattgccgctcgagcttaagcttcgcatttttcgtttattagacgttcggtcagtactgtctctgtccgccgtctgcagagacttgttcaccgcctctaacgacccacttctatggaggttcctgtatctaagggacttcagagacaataccgtcagggtccaggatacagactggaaagagctataccggaaacgtcatatacagaggaaggaatcaccgaagggacgttttgtgatgcttctcccgtcttcgacccatacaatccccttctatccaaaccctcttcaccctagacccttcccatcttctcgtctgcccccagggataataggcggtgaatacgaccagaggcccacgctcccatacgtgggcgatcctatttcttcccttataccaggacctggcgagactcccagccagttccccccactccgaccacggttcgaccctgtgggcccactgcccggaccaaatcccattctacctggtcgaggtggacccaatgataggttccctttccgcccttcccggggacgacccactgatggcaggctgtcgttcatgtag

SEQ ID NO: 223057 - DNA, 1332 bp, synthetic construct
  misc_feature 1..1332: note = Description of Artificial Sequence: Synthetic coding sequence
  source 1..1332: mol_type = other DNA
atggctcgccctcctggcggaagcggacccctgctcgatagtgaacattctagtctacagaacaatgagcagccaagcttggccaccagctccaaccaaacctctatgcaggacgagcagccatccgactcctttcagggacaggcggcacagtctggtgtgtggaatgacgatagcatgctggggcctagtcagaacttcgaggccgagagcattcaggataacgcccacatggccgagggcacagggttctacccctcggaacctatgctgtgctctgagtcggtggaaggccaagtgcctcactcgctggagacactctaccagtccgccgattgctccgacgcaaacgatgcacttatcgtgcttatccatctgctaatgctagaaagtggatacattcctcaggggactgaggcgaaagcactgagcatgcctgaaaaatggaaattgtctggtgtgtataaattacagtacatgcacccactctgcgagggtagttccgctacattaacctgtgtacctctgggtaacttgatcgtggtcaacgcaaccctgaagatcaataacgaaattcggtcggtgaaacgactgcagctgctgcctgagtcattcatctgtaaggaaaaactgggagagaacgtggccaatatctacaaagacctgcagaagttaagtcgtctctttaaggaccagctggtgtaccccctgttggccttcacccggcaggccctgaacctaccggacgtgtttggtcttgtggtgctgccccttgaactgaagctgagaatcttcaggcttctggacgtgcgttcagttctcagtctctcagcggtctgtagggatctcttcaccgcttcgaatgatcctttgctctggcgcttcctgtatctgcgcgactttcgcgacaacacagtgcgcgtgcaggacaccgattggaaggaactctataggaaacgccacatccagaggaaagagtccccaaaaggcagattcgtgatgctattaccttctagtactcataccattcccttctatcccaaccctctccacccaaggccatttccttcgtccaggctgccccctggaatcataggtggggagtatgatcagcggccaacactgccctacgtgggggaccctatcagctcactcatccccggaccaggcgaaacaccgtcccagtttccccctcttcgccctaggttcgaccccgttggcccactgccaggcccaaacccaattctacccggaagagggggaccaaacgatagattccctttccgaccctcacgtggtcggcctacagacggcaggctgtcatttatgtag

SEQ ID NO: 223058 - DNA, 1227 bp, synthetic construct
  misc_feature 1..1227: note = Description of Artificial Sequence: Synthetic coding sequence
  source 1..1227: mol_type = other DNA
atgcaggatgagcagccatctgatagttttcaggggcaggctgcccagtcgggagtatggaacgatgacagtatgcttggaccgagccagaattttgaagccgaaagtattcaggacaacgcacatatggccgaggggacgggattctatccatcagagcccatgttgtgttcagaaagcgttgaaggccaggtgccccatagccttgagactctgtatcaatcagccgactgtagcgatgcgaatgacgcgctgattgtactaatccacctgctgatgttggagtctgggtatattccccaggggacggaagctaaggccttgtccatgcccgaaaaatggaagttgtccggggtttacaagctgcagtatatgcaccctctttgcgaaggctcttctgccacgctcacctgtgtgcctctcggcaacctgattgtcgtgaacgctactctgaagatcaacaatgagattagaagtgtcaagcgattacagctcctgccagaaagtttcatctgtaaggagaagctgggagagaatgtggccaatatctataaagatttacagaagctgtccaggctgtttaaggatcagctagtctacccactgctggcatttactcgccaggcactcaatctccctgacgtgtttggactggtggtgcttcccctggaactgaagttacgaattttccggctactcgacgtgcggagtgtgctcagtctgtctgccgtctgtcgcgatcttttcaccgcgagtaacgacccattactgtggagattcttgtacctgagggacttcagagataacactgtgagggtacaggatacggactggaaagagctgtacagaaagaggcacatccagcggaaagaaagccctaagggacgtttcgtcatgctactaccctcttcaacgcacaccatccccttctacccaaaccctttacatcctcgccctttcccatcatcccgtctacccccaggtattatagggggagagtatgatcagcgccctaccctcccatatgttggcgaccctatctcaagtctgatacctggccctggagaaactccttcccagttcccaccactaagacctcggtttgatccagttggtccactgcccggaccaaatcccattctgcccggacgcggaggtccgaatgataggtttccttttcgcccatcaagagggcgaccgacagacggcaggctgagcttcatgtag

SEQ ID NO: 223059 - DNA, 699 bp, synthetic construct
  misc_feature 1..699: note = Description of Artificial Sequence: Synthetic coding sequence
  source 1..699: mol_type = other DNA
atgcagctcacatttgcatggttgcacgtatttggaaggacactgaggatgatgaatttttctggtaaagggtgcgccaacccctgggggcattgtagtatttataataagaacccccctttgggattttccttccgtaaactgtacatgcagcttgacgaggggagtctgacatttaacgccaacccggacgagggggtgaattactttatgagtaaggggatcctcgatgacagccccaaagaaatcgctaaattcatcttttgtactcggaccctgaactggaaaaaactgaggatttacctggacgagaggcgtgacgtgctggacgacctggtcactttacacaatttccgcaatcagtttttgcccaatgccctacgcgagtttttccggcacatccatgcccctgaggagcggggagagtacctagagacacttatcaccaagtttagtcatagattttgtgcatgtaaccccgacctgatgagggaactcggactgagcccagacgccgtatacgtcctgtgttattctttgattctgctgagcatagacttgacctcgccacacgtgaagaacaagatgagtaaaagggagttcattcgtaataccaggagggcagcccagaacatttctgaagactttgtaggtcatttgtacgataacatatacctgattgggcatgtggccgcttag

SEQ ID NO: 223060 - DNA, 960 bp, synthetic construct
  misc_feature 1..960: note = Description of Artificial Sequence: Synthetic coding sequence
  source 1..960: mol_type = other DNA
atgggccaaggactctggcgagtggtgagaaaccaacagctgcagcaggagggatattcagagcagggctacctcactcgagagcagagtaggcgcatggctgccagtaatatcagcaatacgaatcatagaaagcaggtacaggggggaattgacatctatcacctcctaaaggcgagaaaaagcaaggagcaggagggattcataaacttggagatgcttccgcctgagctatcctttactatcctgtcatacctgaatgccacagatttatgcctcgcttcttgtgtctggcaagacctcgcaaatgacgagctgttgtggcagggcttgtgcaaaagcacatggggccattgctccatatataacaaaaaccctcctctcgggttctcattccgcaaactctatatgcaattggacgaggggtcgctgacctttaatgctaatcctgacgaaggtgtgaattatttcatgtccaaaggcatcctcgacgattctcctaaagaaatcgctaaatttattttctgtaccaggactctcaattggaaaaaactcaggatctacctggacgagagaagggatgtcttagatgacctggtgacacttcacaattttcgcaaccaatttttaccaaacgccctgagggagttttttaggcatattcatgcgccagaagagcggggagagtacctggagacactcatcaccaaattctcccacaggttttgcgcctgtaatcctgacctgatgcgagagctgggactctctccagatgcagtgtacgtgctttgctacagcctgattctgctcagtatagatctaacctcaccacacgtgaaaaataagatgtcaaagcgagagtttatccggaacacccggagagctgctcagaatatcagcgaggattttgtcgggcatctgtacgataatatttacctcatcggacacgtagcagcttag

SEQ ID NO: 223061 - DNA, 555 bp, synthetic construct
  misc_feature 1..555: note = Description of Artificial Sequence: Synthetic coding sequence
  source 1..555: mol_type = other DNA
atgggtcaaggtctttggagagtggtgcggaaccagcaactgcagcaggaggggtactccgagcagggctacctaaccagggagcagagtaggcggatggccgcttcaaacatcagtaacacaaaccataggaagcaggtgcaaggaggtatcgacatttaccatttgctgaaggccaggaaatccaaagagcaggagggattcattaacctcgaaatgctgccccctgagctctccttcactatcctaagttacctcaatgccactgatctgtgcctggcttcctgtgtttggcaggatctcgctaacgatgaattgctttggcaggggttatgcaagtctacctggggacattgctccatatataacaagaatccaccattaggcttttcattccgaaagctgtacatgcagcttgatgaaggatctctgacttttaacgccaatcccgacgaaggggtgaattacttcatgtctaaagggattctcgacgactctccgaaggagatagccaagtttatcttttgtacaaggactcttaactggaaaaaatag

SEQ ID NO: 223062 - DNA, 1344 bp, synthetic construct
  misc_feature 1..1344: note = Description of Artificial Sequence: Synthetic coding sequence
  source 1..1344: mol_type = other DNA
atgcctgatattatttgggttttcccgccacaggccgaagctgaggaggactgccattccgacaccgtgagggccgacgatgatgaagagaacgaatcccccgctgaaaccgacctgcaagcccagctacaaatgttcagagcacagtggatgtttgagcttgctcctggggtgtcgagctctaatctcgagaacagaccgtgcagggcagcgcgtgggagcttgcagaagacaagtgccgacactaagggcaagcaggaacaggctaaggaggaaaaagcacgagaactgtttcttaaagccgttgaagaagagcaaaacggagccttatatgaggccattaaattttacagaagagctatgcagctggtaccagacatagagtttaaaatcacctacactaggtcacccgacggagacggggtaggcaattcctacatcgaggataatgacgatgactctaagatggctgacctgctgtcctactttcaacagcagctcacatttcaagaatcagtactgaagctgtgtcagccagagctggaatccagccaaatccacatcagcgttctgccgatggaggtcctgatgtatatcttccgatgggtggtgtcgagtgaccttgatttacggtcactggaacagctgagcctggtatgtaggggcttctacatatgcgcaagggatccagagatttggcggctggcttgtcttaaggtatggggacgctcctgcatcaagttggtgccctacacaagctggcgtgagatgttcttagagcgtcccagagtcagattcgacggagtgtacatcagcaaaacaacctacatccggcagggagaacagtctttggacggcttctacagagcctggcaccaagtggaatattacaggtacattcgcttttttcccgacgggcatgttatgatgttgacaacccccgaggagccacagtcaattgtcccgaggctgagaacgcgcaacacccgaaccgacgccatccttctgggacattaccgcctgtcgcaagatacagacaatcagaccaaggtgttcgccgtcatcacaaagaaaaaggaagagaagccactggactataagtacagatacttccggcgagtaccagttcaggaggctgaccagtcgttccatgtgggcctgcaattatgctcgtccgggcaccagcgttttaataagctgatctggatccaccactcatgccacattacctataaaagcacaggagagacggcagtgagcgcttttgagattgacaagatgtatacacccctcttcttcgctagggttcggtcctataccgcatttagtgagaggcccttgtag

SEQ ID NO: 223063 - DNA, 1314 bp, synthetic construct
  misc_feature 1..1314: note = Description of Artificial Sequence: Synthetic coding sequence
  source 1..1314: mol_type = other DNA
atggcggaggcggaggaggactgccactctgacacagtgagggctgacgacgatgaagagaacgaatcaccagccgaaacagacttgcaagcccagctacagatgtttagggcccaatggatgttcgaactggcccctggggtgtcctccagcaatctggagaataggccttgtcgcgcagcaagaggcagcctgcaaaagacttccgccgacacaaaaggcaaacaggagcaagccaaggaggaaaaggctcgcgagttgtttttgaaggctgtggaggaggaacagaacggagcactgtatgaggcgatcaaattttaccgtagagcaatgcaattagtgcccgacattgagtttaaaatcacatataccaggtcacctgacggggatggcgtcgggaatagctacatcgaggacaatgatgacgattctaagatggctgatctacttagctactttcagcagcagctgacattccaggagagcgtgctgaagctgtgtcagcccgagcttgagagtagccaaattcacataagcgtgctgccaatggaagtactgatgtatatcttccggtgggtcgtctcttccgatttagacctgaggagcctggaacagctgagcctagtttgtcgcggattctacatttgcgcccgagatcctgagatctggagacttgcctgcctcaaagtgtggggaagatcctgtatcaaactagtgccttatacttcgtggcgggaaatgttcttggagagaccaagagtccggtttgatggggtgtatattagtaaaacaacatatatacgccaaggggaacagtccctggatggtttctacagagcctggcatcaggttgaatattaccggtatatccgattttttccagacggacacgtgatgatgctgacaacacctgaagagcctcagtcgatcgtacccagactgagaacaaggaacacccgcacagacgccatactgttaggacactatagacttagccaggatactgacaaccagaccaaggtgtttgccgtgatcacaaagaagaaggaggagaaaccactggactacaaataccgctactttcgcagggtgccggtgcaggaagctgaccagtcatttcatgtgggtttgcagctgtgctcatccggccatcaacggttcaataagcttatttggatccatcattcctgtcatatcacctataagagtactggtgagaccgccgtatcagcttttgagatcgacaagatgtacacacccctgttttttgcccgagttcgctcttacaccgccttttccgagaggccactttag

SEQ ID NO: 223064 - DNA, 1212 bp, synthetic construct
  misc_feature 1..1212: note = Description of Artificial Sequence: Synthetic coding sequence
  source 1..1212: mol_type = other DNA
atgttccgcgcacagtggatgttcgaactggcaccaggcgtgtctagctctaatctcgagaacaggccatgtagggcagcacggggttctttgcagaagacctctgccgatacaaaaggaaaacaggagcaggccaaggaggagaaagcccgtgagcttttcttgaaggccgtggaggaagaacagaatggagccctttacgaggcgatcaaattctatagaagggccatgcagctagtacccgacatcgaattcaaaattacgtatactcgtagcccagacggagacggcgtaggaaacagctatatcgaggacaatgacgacgattctaaaatggcggacttactctcatatttccaacagcaattgacctttcaagagtccgtgcttaagctgtgtcagcctgagctggagtccagtcaaattcatatctctgtgctccctatggaggtgctgatgtatattttcaggtgggtggtgtcgagcgacctcgacctccggtctcttgaacagctgtctctggtctgccgcggtttctacatctgcgcaagggatcctgaaatctggcgtctcgcttgtttgaaagtgtgggggagatcctgtataaagctggtcccctatacaagctggcgagaaatgttcctggagcgacctagggttcgtttcgatggcgtctatatcagtaaaaccacatacatccggcaaggcgaacagtctctcgatgggttctacagagcctggcaccaagtggagtactacaggtatatacgctttttccccgatggacacgtgatgatgctcaccacacctgaggaaccccaatccatagtcccccgactgcgcactcgcaacactcgaacggatgcgattctcttgggacattatcgtctcagccaagacactgataaccagacaaaggtgtttgccgtgatcacaaagaagaaagaagagaagccacttgactacaagtaccggtactttcgccgtgttccagtgcaagaagccgaccagtctttccacgtcggcctacaactctgttcatctggacaccagcgcttcaacaagttgatttggatccatcatagttgtcatattacatataaatctaccggggaaaccgctgtttccgctttcgagatagataaaatgtacactcccttgttctttgcccgtgtgcgcagctataccgcattttcggagcgtccattgtag

SEQ ID NO: 223065 - DNA, 147 bp, synthetic construct
  misc_feature 1..147: note = Description of Artificial Sequence: Synthetic coding sequence
  source 1..147: mol_type = other DNA
atgtttagagcccagtggatgtttgagttagctccaggcgtttctagcagtaacctggaaaatcggccttgtcgcgctgccagggggagcttgcagaagacctcagcagataccaaggggaaacaagaacaggcgaaagaggaatag

SEQ ID NO: 223066 - DNA, 357 bp, synthetic construct
  misc_feature 1..357: note = Description of Artificial Sequence: Synthetic coding sequence
  source 1..357: mol_type = other DNA
atgttccgagctcaatggatgtttgagttagctcccggagtctctagttccaacctagagaatcgcccatgtcgcgctgccagaggttctctgcaaaagacctctgccgacacaaaagggaaacaagaacaggcgaaggaggaaaaagccagagagttgttcttgaaggcagtggaagaggagcaaaacggcgctctctatgaagctatcaaattttatcgcagggctatgcagctagtacccgatattgaattcaaaatcacctacactagatcacctgacggcgacggggttggcaatagttatatcgaggataacgacgacgattccaagatggcagacctgctctcatattag

SEQ ID NO: 223067 - DNA, 438 bp, synthetic construct
  misc_feature 1..438: note = Description of Artificial Sequence: Synthetic coding sequence
  source 1..438: mol_type = other DNA
atgtttagggcccagtggatgtttgagttggcccctggcgtgtcatctagcaacctcgagaaccgcccatgtagagccgcaagaggctccctgcagaaaacaagtgctgatactaaaggcaagcaggagcaggcgaaagaagaaaaggcacgtgagctgttcctcaaagcagtggaggaggaacaaaacggcgctctgtatgaagctattaaattttacaggcgcgcaatgcagcttgttcctgacatcgaatttaagatcacctatacaagaagtcctgacggtgacggcgttggcaactcttatattgaggacaatgacgacgactccaaaatggctgacttgctgagttactttcagcagcagctgaccttccaggagtccgtgcttaaactgtgccagcctgagttagagtccagccagatccacatttcctag

SEQ ID NO: 223068 - DNA, 3132 bp, synthetic construct
  misc_feature 1..3132: note = Description of Artificial Sequence: Synthetic coding sequence
  source 1..3132: mol_type = other DNA
atgaggagatttaaaaggaagcacctgaccgctatcgactgtcagcatttagcgagaagtcaccttgcggtgacccagccattcggtcaaagatggacaaatcgcgaccccaaccacggcctctatccgaaaccaaggacaaagcggggttcccgcggtcagggttctcaaaggtgtatccccgaattctttcttgccggaaaacagccctgcaccaacgatatggccaagagcaacagtgtcggccaggactcctgccaagactccgaaggggacatgatatttcctgccgagagtagctgcgccctgccccaggagggaagcgcaggtccaggctccccagggtcagcacccccatcccggaagagatcatggtcatccgaggaagagagcaatcaggctactggcacaagcaggtgggatggggtaagtaagaaagctcccaggcaccatctttccgtaccctgcactaggcctagagaagcgaggcaggaagccgaggacagcacatctaggttgtccgctgaatcgggagagaccgaccaggacgccggtgacgtcgggcctgacccaattccagactcttactatggattactcggcaccttgccttgtcaggaggcactgtctcatatttgttcgctgccttccgaagttctgaggcatgtgtttgcttttctgcccgtggaagacctctattggaacctcagcttggtgtgtcacctttggagagaaataatatccgaccccctatttatcccgtggaaaaaactgtatcaccgctatctaatgaatgaggagcaggctgtctctaaggtggatggcattttgtccaactgcggtatcgagaaggaatcagatctgtgtgtcctaaatctgatccgctatactgctaccaccaagtgttcaccaagtgtggaccctgaaagagtgctgtggtcgctccgagaccatcccctgctacctgaggctgaagcctgcgtcagacaacacctccccgatctgtacgcagctgcgggaggtgtcaatatatgggctctggtggccgctgtggtgctactgtcttcctctgtgaacgacatccagcggctgctgttctgtctacgccgtccttcatcaactgttacgatgccagacgttaccgaaaccctgtactgtattgcggttctgctgtacgctatgcgagagaagggcattaatatcagcaaccggattcattacaatatcttttactgcctttacctgcaagagaacagctgtacgcaagctacaaaagtcaaagaggagcctagcgtgtggccgggtaagaagactatccagcttacgcatgaacagcaactgatcctgaatcataagatggaacccttacaggttgttaaaatcatggccttcgcaggaaccgggaagacgagcacgctggtcaaatatgctgaaaaatggagtcaatcccgctttctctatgtgactttcaacaagtccatagcaaaacaagccgaacgggttttcccaagtaacgtcatttgtaagaccttccactccatggcttatggccatataggacggaagtaccagtcaaagaaaaagcttaatctctttaaactaaccccatttatggtaaacagcgttctggctgagggcaagggaggatttattagggctaaacttgtctgcaagacgctcgagaatttcttcgcttcagcagacgaagaactcactatcgaccatgtcccgatctggtgtaagaattcccaggggcagcgggtgatggttgaacagtccgagaagctcaacggcgttcttgaggcctcaagattatgggataatatgcgtaagctcggcgaatgcaccgaagaggctcaccaaatgacccacgatggatatctgaagctctggcaactgagcaagccctcgctagcatcattcgatgcaatcttcgtcgatgaggcacaggactgcacaccagccatcatgaatattgtgttatcccagccttgcggaaagattttcgtgggggacccgcaccaacagatttacacctttaggggagcagtcaatgccctcttcactgtcccccacacccacgtgttctacctcacccagtccttccgttttggagttgaaattgcttatgttggagcaacaattctggatgtctgtaagagggtgcggaagaagacgctggtgggaggcaaccaccaatctggcattcgtggcgatgccaaggggcaagttgccttgctgagccggactaacgcaaatgtatttgacgaggctgtacgcgtgacagagggcgagttcccaagtcgtatccaccttatcgggggtattaagtcgtttgggctggaccgaattattgacatttggattctgctccagcccgaggaagaacgcagaaagcagaacctcgttatcaaggataaatttatcaggcgttgggtccataaggagggtttctctggattcaagcgctatgttaccgccgctgaggacaaagaattagaagccaaaatcgctgtggtggaaaagtataatattcgcatacccgaactcgtccagcgaattgaaaaatgtcatattgaggacctggattttgccgagtatatactgggaactgtgcataaagccaaggggctggaatttgacaccgttcacgtattggatgacttcgtgaaggtgccctgcgcaagacataatttgccgcagctgcctcacttccgggtggagtctttttccgaggatgaatggaatctgctgtatgtcgccgtcacaagggcaaaaaagcggctaatcatgaccaagtcactggagaacatcttgaccttggccggagagtattttctccaggccgaattaacttccaatgtgctgaaaaccggggtcgtccgatgctgtgtgggacaatgcaacaatgcaatacccgtagacaccgtactcacgatgaaaaagctccccatcacctactccaacaggaaggagaataaaggtgggtacctgtgtcattcttgtgctgaacagagaataggtcccttggctttcctgacagctagccccgaacaggtccgggcaatggagcggactgtggaaaatattgttttgcccagacacgaagcgctcctctttcttgtgttctag

SEQ ID NO: 223069 - DNA, 1215 bp, synthetic construct
  misc_feature 1..1215: note = Description of Artificial Sequence: Synthetic coding sequence
  source 1..1215: mol_type = other DNA
atgaatgaggaacaggcagtatccaaggtggacggcatcttaagcaattgcggcattgaaaaggaatccgatctctgtgtcctgaacttaattaggtacactgcaacaacgaagtgttcccccagtgtcgaccccgagcgggtgctctggtcattgagggaccatccactccttccagaagctgaagcatgcgtcagacagcaccttccggacttgtacgcagcagccggaggagtaaacatatgggcacttgtggccgctgtggtccttctgagcagttctgtcaacgacatccagaggttattgttttgtctccggcgaccctcttctaccgttaccatgcccgacgtgactgagacactctactgcatcgcggtgctgctttacgcgatgcgcgagaaggggataaacatctccaaccggatacactataacatcttttactgtctatatcttcaagagaactcctgtacgcaggctacaaaggtcaaagaggagccaagcgtctggcctggaaagaaaaccatccagctcacacatgagcagcagctcatcctgaatcataaaatggaaccccttcaagtggtcaagatcatggcttttgctgggaccggaaaaacttctacactggttaagtacgcggagaaatggtcgcagagcagattcctttatgtgaccttcaacaagagtattgcaaagcaggccgaacgggtgtttccatccaacgtcatttgcaagactttccattctatggcctacggccatatcggacgtaagtaccaaagtaagaaaaaactaaacctttttaagctgaccccattcatggtcaatagcgtcctcgcagagggcaaaggaggattcatcagggcaaagctggtgtgcaagactctcgagaacttttttgccagtgcagacgaggaactaactatagaccatgtccctatttggtgcaaaaattctcagggccagcgagtgatggttgaacagagcgagaagctcaacggcgtcctggaggccagccgtttgtgggacaacatgcgaaagctgggtgagtgcaccgaggaggctcatcaaatgacccacgatggctacctgaaactgtggcaactgtccaagccatcccttgcctctttcgacgccatctttgtggatgaagcacaagccggagccagacacggagctcactgcggtgaacataggaccgccccagcgtag

SEQ ID NO: 223070 - DNA, 3285 bp, synthetic construct
  misc_feature 1..3285: note = Description of Artificial Sequence: Synthetic coding sequence
  source 1..3285: mol_type = other DNA
atgagctacgaagttacgagcggatgtcattggacttgccaggtgccagagtcttgtgacaatggcttgcattgtgccggacccctggggcacctccacagaaggtgccaacgtacaagcgctcacctgctcgtgtttacagaacatgcggaaatgagacgcttcaagcgaaagcacctgactgccattgattgccagcatttggcacggagccatctggccgttacacagccatttggtcaacgctggaccaatcgtgatcctaatcacggtctgtatcctaaaccaagaacaaaacgtggttccaggggccagggcagccagagatgtattcctgaattctttctcgccggaaagcagccatgcactaatgacatggccaagtcaaattctgtaggccaggatagctgtcaggattccgaaggcgatatgatatttccggcagaatcatcttgtgccctgcctcaggagggctctgctggacccggttcacccggatcagctcccccatcccggaagagaagctggagttccgaggaggaatccaatcaggctaccggaacttccaggtgggacggggtctccaagaaggcccctagacaccatctatcagttccctgcaccagacccagagaggcgagacaagaagcagaggattcaacatctaggctgagcgccgagtccggagaaactgaccaggacgccggagacgtgggcccagacccgatccccgattcttattacggcctcctaggtacactaccctgccaagaagccttgtcccacatttgttcgctgccaagcgaggttctgcgccatgttttcgcctttctcccagtcgaagatctttactggaatctcagcctcgtgtgccacctatggagggagattattagcgatccactatttataccgtggaagaagttataccatcggtatctgatgaacgaggagcaggcggtatcaaaggtcgacgggatcctgagtaattgcgggatagaaaaggaatccgatctgtgcgtactgaatctgatccgttacacggctacaactaaatgttcgccaagtgttgatcctgaacgcgtcttatggagtcttcgtgaccacccgctgctccctgaagccgaagcatgcgtgcgacagcacctcccagatctctatgctgcagctggtggcgtgaacatttgggcattagtagccgctgttgtgctgctgtcttcttctgttaatgatatacagaggttgctgttttgtctacgcagacccagttccacggtaaccatgcccgacgtgactgagaccctctattgcattgccgtgttactgtacgccatgagagaaaagggaattaatatctcaaatcggattcactacaacattttttactgcttgtacctgcaggagaattcctgcacccaagccactaaggttaaagaagaaccttcggtgtggccaggcaagaagacgattcaactcacacacgaacagcagctgatcctgaaccacaagatggaaccactccaggtggtgaaaattatggccttcgccggtactgggaaaacatccacgctggtcaagtatgcagaaaaatggtcccagagcaggttcctgtacgtgacattcaacaagagcatagctaaacaggctgagcgagtgttcccctcaaatgtcatttgcaaaacctttcattcaatggcttacggacatatcggtcgaaaataccagagcaaaaagaaattgaacttattcaagctgacacctttcatggtgaacagtgtcctcgcggaaggaaagggcggatttattcgtgctaagcttgtttgcaagacactggaaaattttttcgctagtgccgacgaagaattgactatcgatcatgtcccgatctggtgtaaaaatagccagggacagagggtgatggtcgagcagtccgaaaagctcaatggagttctggaggctagccggctttgggacaacatgcggaagttgggcgaatgcaccgaagaagctcaccagatgactcacgacgggtacttaaaattatggcagctctcaaaaccctctttggccagctttgatgctatcttcgtagatgaggctcaagattgcaccccagctatcatgaatatcgtgctgagtcagccctgtggtaaaatttttgtgggcgatcctcatcagcagatctacacattccgaggagcagtgaatgcccttttcaccgttccacatacacatgtcttttacctcacccagtcattccgatttggcgtggagatcgcctatgtcggggctacaattctggacgtgtgtaaaagagtgagaaaaaaaaccctggtcggagggaatcaccaatccgggattaggggtgacgcaaaggggcaagtggcattgttgtccagaacaaatgccaatgtttttgatgaggctgtgagggtgactgagggagaatttccatcacgcatccatctgatagggggaatcaaaagctttgggcttgaccgcatcatagacatctggatcttgttgcaacccgaggaggagcgccgaaagcagaatctggtgatcaaggacaaattcattcggaggtgggtccataaagaaggattttcaggctttaaacgttacgtgacagcagcagaagacaaggaactcgaggccaaaatcgctgtcgtggagaagtacaacatacgaattccagaactagtgcagcgtattgagaagtgtcacatcgaagatcttgattttgccgagtatatattaggcactgtgcacaaggccaagggcttagagttcgacaccgtgcatgtgcttgacgatttcgttaaggtgccatgtgcgagacataacctgcctcagcttccgcacttcagagtcgaatcatttagcgaagatgagtggaatttactgtacgtggctgtaacccgtgcaaagaagcgattgatcatgaccaagtccttggagaacatactgacactggctggcgagtatttcctgcaggccgaactgaccagcaatgttttaaaaactggagtcgtaagatgttgcgtcgggcagtgtaacaatgccatcccagtggacactgtgttgacaatgaaaaagctgcctataacctacagcaacaggaaggagaacaagggaggttacctgtgtcacagctgtgctgaacaaaggataggccctctggccttcctgacagcatcacctgagcaagtcagggcaatggaaagaaccgtagagaatattgtgctgccccgacacgaggctcttctgtttttggtgttctag

SEQ ID NO: 223071 - DNA, 1644 bp, synthetic construct
  misc_feature 1..1644: note = Description of Artificial Sequence: Synthetic coding sequence
  source 1..1644: mol_type = other DNA
atggcttacgggcacataggcagaaagtatcagtcaaagaaaaaactgaatctgtttaagctgactccatttatggttaattctgtgctggcagagggtaagggcggatttatccgtgccaaattagtgtgcaagacactggagaattttttcgcatcagcagatgaagaactcaccatagaccatgttccaatttggtgcaagaactcccaggggcaacgcgtgatggtggaacagtccgagaaattgaacggcgtgcttgaggcctcaaggttatgggataacatgagaaaactaggagagtgtaccgaggaggcacatcagatgacccatgatggatatctaaagttgtggcagctgtcaaaacccagcctggccagttttgatgctattttcgtggacgaggctcaagattgtacacccgctatcatgaacattgtgctgtctcagccttgcggtaagatatttgttggggaccctcaccagcagatttacacattcagaggggcagtgaacgccctgttcactgtcccccatacccatgtgttttatctgactcaaagcttcagattcggcgtagaaatcgcttatgtgggggctaccatcctggatgtctgcaagcgggtcaggaagaaaacactggttggtggcaatcaccagtcgggaatcagaggtgacgcgaaaggccaagtggctctactgtccagaaccaacgcaaacgtgttcgatgaagcagtccgggtgaccgagggcgagtttccatcccgaatccacctaattggcggaattaaaagcttcggactggatcgtattattgatatatggattctcctccagcctgaggaggaacggaggaaacagaacctggtgatcaaagacaagttcatacgcaggtgggtgcataaggaagggtttagtggcttcaaaaggtacgtaactgccgctgaggacaaggagttagaagcaaagattgctgtagtcgaaaaatataacattagaattccggagctcgttcagcgcatcgagaaatgtcacatcgaggatttagactttgccgagatggagtctcaccatgtgggacaggcaggcctcgagcttcccaccagtgagtatatcctgggaacagttcacaaggctaagggcttggagtttgacaccgtacacgtgttggatgattttgtcaaggtgccctgcgcacgccacaaccttccacagctacctcacttcagagtggagagcttttcggaagacgagtggaatttactctatgtcgcggtgacaagagccaaaaagaggctcattatgaccaaatctctggagaacattctgaccctggctggtgaatattttttacaggccgaactgacttccaacgtgctcaaaactggagttgtcaggtgttgcgtgggccagtgtaataatgccattccggtggacaccgtgctgaccatgaagaaattgcccatcacatatagtaatcggaaggagaataaaggagggtatttgtgtcatagctgcgccgaacagcgcataggccctttagccttcttaacagcatcaccggagcaggttcgcgctatggagcgaacagtggagaatatagtgctgcccagacacgaggcgctgcttttcctggtgttttag

SEQ ID NO: 223072 - DNA, 1215 bp, synthetic construct
  misc_feature 1..1215: note = Description of Artificial Sequence: Synthetic coding sequence
  source 1..1215: mol_type = other DNA
atgaatgaggagcaggccgtgtccaaggtcgacggcattctgtctaactgtggaatcgaaaaagaatctgacctatgtgtgctgaatcttattcggtacaccgctacaaccaagtgttcgcccagcgttgatcccgagcgcgtgttatggtccctgagagatcacccattactgccggaggcggaggcctgcgtcagacagcatctgccagacctttacgccgcagctggcggtgtgaatatctgggcactggtggccgcagtggtactgctgtcttcttctgtgaacgacatccagagactgttattctgtctgaggcgaccatcttctacagtcaccatgcctgatgtaaccgagaccttgtactgcatcgctgtattactctacgcaatgagggagaaaggtattaacatcagtaaccggattcattataacatcttttactgcctgtacctgcaggaaaacagctgcactcaggccaccaaggtcaaagaggaaccctctgtgtggcctgggaaaaaaactattcagctgacacacgaacagcagttgatcctgaatcacaaaatggagccgctgcaagtcgtgaaaataatggcgttcgccggaactggaaaaactagcaccctcgtgaaatatgcggaaaagtggtcacaatcccggtttctctacgttacatttaataaaagcatagcgaagcaggctgagcgggtatttccatcaaacgtaatctgcaaaacatttcattccatggcgtacggtcatatcggcagaaagtatcagtctaagaaaaaattgaacctctttaagctgacacctttcatggtcaactctgtgctagcggaggggaaaggcggtttcatccgcgcaaaattggtgtgtaagacactggaaaatttcttcgcctcagcggacgaggagctgactattgaccacgtaccaatctggtgcaagaatagtcagggtcagagggtgatggtcgaacagtctgagaaactgaacggcgttctcgaagcttcacgtctttgggacaatatgagaaagctaggcgaatgtaccgaagaggcgcatcaaatgactcacgacgggtatttaaagttatggcaactgtccaagccaagcttagcaagctttgacgcaatctttgttgacgaagctcaggcaggggctagacacggcgctcattgtggcgaacaccgaacagcacctgcctag

SEQ ID NO: 223073 - DNA, 576 bp, synthetic construct
  misc_feature 1..576: note = Description of Artificial Sequence: Synthetic coding sequence
  source 1..576: mol_type = other DNA
atggaccctaagcaaactaccttgctttgcttagtgctgtgccttgggcagcgaattcaggcccaagagggggacttcccgatgcccttcataagtgccaaatctagccctgtcattccactagacggcagcgtaaagattcagtgccaggccattcgcgaagcctaccttactcagttgatgatcatcaaaaactcgacttatagggagattggtcggcgactgaagttttggaacgagacagatcctgaatttgttattgatcatatggatgcaaacaaagctggcaggtatcaatgtcagtatagaattgggcattaccgctttcggtactctgataccttagagctcgtggtgacagactcaatccaccaagattacactacacaaaatctcatccgcatggctgtggctgggcttgttctggtagctctgctggcaatattggtggaaaactggcatagtcataccgccctaaataaagaggcttctgccgatgtcgctgaaccatcctggtcacaacaaatgtgccagcccggattgactttcgccaggactccatcagtctgtaagtag

SEQ ID NO: 223074 - DNA, 537 bp, synthetic construct
  misc_feature 1..537: note = Description of Artificial Sequence: Synthetic coding sequence
  source 1..537: mol_type = other DNA
atggatcccaaacaaactactctgctgtgtttgggtctctatggcaaaccattcctctcggccgacagggggctggtgctgatgcccggtgaaaacatctcgctgacgtgtagctccgcacacattcctttcgacagattttctttggcaaaggaaggggaacttagccttccacagcaccaatctggtgagcacccagccaatttttcgctgggcccagttgatcttaatgtgagcggtatttacagatgctacggctggtacaacagaagcccctacctttggtccttcccatcaaatgctctggagctcgtggtgacggattctatccatcaggactacaccacacagaatctgatcaggatggcagtggctggtcttgtcctcgtggccttgctggcaatcctagtggagaactggcacagccacaccgcactcaacaaagaagctagcgcagatgtggcggaaccatcgtggagccagcagatgtgccagccaggcttaacctttgcccgtacaccaagtgtttgcaagtag

SEQ ID NO: 223075 - DNA, 864 bp, synthetic construct
  misc_feature 1..864: note = Description of Artificial Sequence: Synthetic coding sequence
  source 1..864: mol_type = other DNA
atggacccaaaacagactacactgctctgcctggtcctctgtttagggcagaggatacaagctcaggagggcgatttccccatgccttttattagcgctaaaagctcccctgtgattcctcttgatggaagtgtgaaaatccagtgccaggctatccgcgaggcgtatctgacacagctgatgatcattaaaaactccacttaccgcgagatcggaaggcgactgaagttttggaacgagaccgaccccgagtttgtgatcgaccacatggatgccaacaaggcaggacgatatcagtgccagtacaggattggccactaccggttccggtactcagacacactggaactggtggtgacggggttgtacgggaagccattccttagcgccgatcgcggtctggtgctgatgcccggagaaaatattagtctcacatgttcctcagcccacatcccatttgacagattctcgctggctaaggaaggagagttgagtttgcctcagcatcaaagcggtgaacacccagcaaacttttccctgggacctgtcgatctgaatgttagcggaatttaccgttgctatgggtggtataaccgctctccatatctatggtcatttccaagtaatgcacttgagttagtcgtgaccgattccatccatcaggattacaccacacagaacctgataaggatggctgtcgccggactggttttggtcgctctactggccatcctcgtagaaaattggcactcccacactgccttaaataaggaggcaagtgcggacgtggctgaaccttcctggtcacagcagatgtgccagccagggctgacgttcgcccgtacacccagtgtatgcaaatag

SEQ ID NO: 223076 - DNA, 828 bp, synthetic construct
  misc_feature 1..828: note = Description of Artificial Sequence: Synthetic coding sequence
  source 1..828: mol_type = other DNA
atggatcccaagcaaaccaccctgctctgtttaggcgactttcccatgcccttcatctcagcaaaatctagcccagttatccccttagatggttctgttaaaattcagtgtcaggccatccgggaggcatacctcacccagctgatgattatcaaaaacagtacatatcgcgagattgggagacgattgaaattctggaacgaaacagatcctgagttcgtcatcgaccatatggacgccaataaggcaggtcgctaccaatgccagtacaggatcggacactatcgattccggtattctgatacacttgagctcgtggtgaccggcctctatgggaagccattcctgtcggcagataggggactggttctcatgcctggggagaacatttccctgacctgctctagtgcgcatattcccttcgataggttttcgctcgcaaaagaaggcgagttgtctcttcctcagcaccaatcgggggagcaccccgctaactttagtttaggaccggtggaccttaacgtgagcggcatctaccggtgttacggctggtacaacaggagtccatatttgtggagcttcccaagcaacgcactggagttggtggtgaccgattccatccatcaagattacacaacacagaacctgattcgcatggccgttgcgggactcgtgctggtggccctgctcgcaatcctggtggagaactggcatagtcacacggcgctaaacaaggaagcgagcgctgatgtggctgaacccagctggtctcagcagatgtgccaaccaggcctgactttcgccaggacacctagcgtttgcaaatag

SEQ ID NO: 223077 - DNA, 630 bp, synthetic construct
  misc_feature 1..630: note = Description of Artificial Sequence: Synthetic coding sequence
  source 1..630: mol_type = other DNA
atggatcccaagcagaccactctcctatgcctgggtgacttcccgatgcctttcatttctgctaagagcagtcctgttattccgttggacggctcagttaaaatccaatgccaagctatacgagaagcctatcttacccagctcatgatcatcaagaattccacctaccgagaaatcggcaggcggctgaagttttggaacgagactgatcccgaattcgtcattgaccacatggacgccaataaagcaggacgctatcagtgccagtacagaataggccattacaggttccggtactcagacacactggagctcgtcgtcactggcttgtatggcaaaccattcctgagcgcggatcgtggtcttgtattaatgccaggggagaacatcagcttaacatgcagcagtgctcacatccctttcgacagatttagtcttgccaaggagggagaactcagcctccctcagcaccagtccggggagcatccagcaaacttcagtctcgggcctgtggatctgaatgtctctgggatttacaggttgcatccccctcggcttcacgacgccgagttagacccgcacgggaggggcagaacgggaccgagaggctcgctgggacataccggctag

SEQ ID NO: 223078 - DNA, 762 bp, synthetic construct
  misc_feature 1..762: note = Description of Artificial Sequence: Synthetic coding sequence
  source 1..762: mol_type = other DNA
atggatcccaaacaaactactctgctgtgcctgggcgactttccaatgccatttattagtgctaagagcagcccagtgatcccacttgacggatctgttaaaattcagtgtcaggccattcgggaggcatatctgacccagctgatgatcatcaagaattccacctaccgcgaaatcgggcgtcgcttgaagttctggaacgagactgatccagagttcgtaattgaccatatggatgctaataaagctggcagataccaatgccagtacagaatcggccactacagattcaggtactccgatacactggaactcgtggtgacaggcctatacggcaaacccttcctgtcagcagaccggggattagtcctgatgccgggtgagaacataagcttgacttgttcatctgcgcatattcctttcgatcgcttttccctcgcaaaggagggggaattgtcactgcctcaacatcaatcaggagagcatccagcaaacttctccctagggccagtggatcttaacgtgtcaggcatctatcggtgttacgactccatccaccaggactacacaactcaaaatctgatcaggatggctgtggccggtctggtgttagtggcactgctcgccattctggtagagaattggcacagccacactgcactaaacaaagaggcctccgcagacgtagccgagccttcctggagccagcagatgtgccaacctgggctgaccttcgccagaacacctagcgtatgtaaatag

SEQ ID NO: 223079 - DNA, 798 bp, synthetic construct
  misc_feature 1..798: note = Description of Artificial Sequence: Synthetic coding sequence
  source 1..798: mol_type = other DNA
atggaccccaagcagaccacacttctctgcctggttctgtgcctgggtcagagaattcaagcacaagaaggggatttccctatgccatttatcagtgcaaagagttccccagtgatcccgttagatggcagcgtgaagatccagtgccaagccatccgggaagcctacttgacacaattaatgataataaagaatagcacatacagagaaatcgggcgtagactgaaattttggaatgagaccgatccagagttcgtgattgaccacatggacgccaacaaggccggtcgatatcagtgccaatacaggatcggccactacagatttcggtacagcgacactctggaactcgtggtcaccgggctctatggaaaaccttttcttagtgccgacagaggtctcgtgctgatgcctggcgaaaatatctccctgacctgtagttctgcgcatattccctttgaccgatttagcctggccaaagaaggcgaactgtcactgccacagcaccaaagtggggagcatcccgctaatttctcccttgggcctgtggacctcaatgtatcaggcatttatagatgctatgattctatccaccaggattacaccacacagaacttgattagaatggcagtggccggtcttgttttggtggctctgctggctatcctggtggaaaactggcactctcacaccgctcttaacaaggaagctagtgccgacgtggccgaaccatcttggagtcaacagatgtgtcaacccggacttacctttgctcggactccatccgtctgtaaatag

SEQ ID NO: 223080 - DNA, 540 bp, synthetic construct
  misc_feature 1..540: note = Description of Artificial Sequence: Synthetic coding sequence
  source 1..540: mol_type = other DNA
atggaccccaagcaaactaccctcctgtgcttaggagactttcccatgccctttatatctgctaagtcttccccggtaataccgttggacggctccgttaagattcaatgccaggctatccgggaagcctacttgactcagctcatgattattaaaaactcaacttatcgggaaataggtcggcgtctaaaattctggaatgagaccgaccctgaatttgtcattgatcacatggacgcgaataaggctggcaggtaccagtgtcagtataggatcggccactatagattcagatattcagacaccctggaactcgtagtcacagactcaatccatcaggattacaccactcagaacctgatccgaatggcggtggcaggtctcgtgctggtagctttattggctattctcgtggagaactggcacagccacaccgccctcaataaggaagcaagtgcagacgtcgcagaaccctcttggtcccagcagatgtgccagccgggactcaccttcgcccgaaccccctccgtatgcaagtag

SEQ ID NO: 223081 - DNA, 720 bp, synthetic construct
  misc_feature 1..720: note = Description of Artificial Sequence: Synthetic coding sequence
  source 1..720: mol_type = other DNA
atggaccctaaacagaccactcttctatgcctggtgctctgtcttggccaaagaatccaggcccaagagggcgattttcctatgccctttatatccgccaagagcagtccagttatcccactggacggatcagtcaaaattcagtgtcaggccatcagggaggcatacttgactcagttgatgattataaagaactcaacatacagggaaattggcagacggctgaagttctggaacgagaccgaccctgagtttgttattgatcacatggacgccaataaagcgggtcgttaccagtgtcagtaccggattgggcactaccgattccggtactcggacactttagagctggttgtgaccggcctttatggaaaaccatttctgagtgccgatagagggctggtgcttatgcctggggagaacatctccctgacttgttcgagcgcccatatcccattcgacagatttagcctggcgaaggagggcgagctttccctgccccagcatcagtccggagagcatccagccaactttagcctcgggcctgtggatctgaacgtgtcaggaatttaccggtgttacggttggtataaccgcagtccgtacctgtggagtttcccaagcaatgccctggagctcgtggtaactggcaggtataggcctgtccagccatgtgtgtgggtcggctgccccggtccttgtcaccgggcaggaatatag

SEQ ID NO: 223082 - DNA, 774 bp, synthetic construct
  misc_feature 1..774: note = Description of Artificial Sequence: Synthetic coding sequence
  source 1..774: mol_type = other DNA
atggcgccagctatggagtctcctaccctgctgtgtgtggccctgctatttttcgcccctgatggggtgctggccgttccacagaaacctaaagtcagtctcaaccctccatggaacagaattttcaagggagaaaatgtgacactaacttgtaatggcaacaacttcttcgaagtgtcatcgacaaaatggtttcacaacggcagcctttccgaagaaaccaacagcagcctgaacattgtgaatgctaagttcgaggacagtggggagtacaagtgccagcaccagcaggtgaatgaaagcgagccagtgtatctggaagtttttagcgattggctactgttgcaggcgtccgccgaagtggtcatggagggacaaccattatttctcagatgtcatggctggcgaaattgggacgtctacaaagtcatttattacaaggatggtgaagcattgaaatattggtacgagaaccataacatttcaataactaacgcaaccgtggaggactcgggcacatactactgcacaggcaaagtgtggcagctggactatgaaagcgaaccactgaacatcactgtcatcaaggccccacgcgagaaatattggctgcagtttttcatccccctcctggtcgttatcctctttgccgtggatacaggactctttatttctactcagcagcaagtaacttttctgttgaagatcaaacggacccgaaaggggttcaggttattgaaccctcaccccaagcccaaccccaaaaataactag

SEQ ID NO: 223083 - DNA, 261 bp, synthetic construct
  misc_feature 1..261: note = Description of Artificial Sequence: Synthetic coding sequence
  source 1..261: mol_type = other DNA
atgatcccagccgtagtgctcttactgttgttgcttgttgagcaggctgcagccctcggcgaaccacagctgtgctacatcctggacgcaattctctttttatatgggatagtgctgaccctgttatactgtagactgaagattcaagtgcgcaaagccgcaattacttcatatgaaaagtccgatggagtatacacagggctcagcaccaggaaccaggagacctacgaaaccctaaagcacgagaagccaccccagtag

SEQ ID NO: 223084 - DNA, 339 bp, synthetic construct
  misc_feature 1..339: note = Description of Artificial Sequence: Synthetic coding sequence
  source 1..339: mol_type = other DNA
atgatccccgcagttgtgttactgttgttgctgctagttgaacaggccgctgcactgggtgaacctcagctttgctacatcctcgatgccattctgttcctgtatggtattgtgctgaccctgctgtattgccgtctaaagatccaagtcagaaaagccgcaattacatcgtatgaaaaatccgacggcgtttacactatggaatccccctcgatcacacgcctggaatgcagtggtatgatttgggcccactgcaatctttgtctcctcgggtctcgagatagccgcgcatcgccatccagggtcgccaaaacaaccgggaccaccatgccttcatag

SEQ ID NO: 223085 - DNA, 792 bp, synthetic construct
  misc_feature 1..792: note = Description of Artificial Sequence: Synthetic coding sequence
  source 1..792: mol_type = other DNA
tgatgttcttttggagtccaacttatgggcaagtgggtcccatgggtgagcgtgtttcaggaggagacagtcacactgcattgtgaggtcttacacttacctggcagcagttcaactcagtggttcctgaatggaaccgccacacagaccagcaccccgagctataggatcacaagtgcttccgtcaacgactccggtgaataccggtgccagcgaggcttgtccggcaggtcagaccctatccagctggagatccacagaggatggttactgttgcaggttagcagtagagtgttcatggaaggagagccccttgccctgagatgtcacgcttggaaagacaaactggtctataacgtactgtactaccgcaatggaaaagcatttaaatttttccactggaacagcaaccttacgattctgaagactaacatatctcacaacggtacttaccactgtagcggcatggggaagcacagatatacatccgcaggtatatcccaatacacagtgaaggggctgcaattacctactcccgtgtggttccatgtgctcttctacctcgcagttggcatcatgttcctggtgaatacagtgctgtgggtcacaatccgcaaagaacttaaacgaaagaaaaaatggaacctggagatttccctggatagcggacacgaaaagaaggtgatatcatccctccaggaggatagacacttggaagaggagttaaagtgtcaggagcagaaggaggagcagctgcaggaaggggtgcaccgcaaggaaccccagggatag

SEQ ID NO: 223086 - DNA, 567 bp, synthetic construct
  misc_feature 1..567: note = Description of Artificial Sequence: Synthetic coding sequence
  source 1..567: mol_type = other DNA
atgtggttcctcaccactctgctgctgtggggctggttgctcctgcaagttagcagccgtgtattcatggagggagagcccctcgccttgcgctgccatgcctggaaggataagctcgtatataatgtgctatattaccgtaatggaaaggcgtttaagttctttcactggaattctaacctgactatactgaaaaccaacattagccacaatgggacctatcactgctcaggaatgggcaaacaccgctacacgagcgccggaattagccaatacacagtgaagggccttcaactgcccactccagtttggtttcacgtgctattctacctcgccgtcggcatcatgtttctggtgaatacagtactctgggtcacaatcaggaaagaactgaagagaaagaaaaagtggaacttagaaatttcccttgacagtggccacgaaaagaaagtgatatctagtcttcaagaggataggcatctggaagaagagttaaaatgccaggagcagaaagaggaacagcttcaggaaggcgttcacaggaaggagcctcagggcgcaacctag

SEQ ID NO: 223087 - DNA, 843 bp, synthetic construct
  misc_feature 1..843: note = Description of Artificial Sequence: Synthetic coding sequence
  source 1..843: mol_type = other DNA
atgtggttcctcacgacactgttgctgtgggtgcctgtggatggccaagttgatacaacaaaagccgtcatcaccttacagccaccctgggttagcgtattccaggaagaaacagtcactctccactgcgaggtccttcatttgccgggtagcagcagcactcaatggttcttgaacggcaccgccacgcagacctccaccccaagttatcgtattacatccgcctctgttaacgatagcggcgagtatcgctgtcagcgcggactatctggtagatctgacccaatccagctcgagattcaccgtggatggctgctactgcaggtgagttctagagttttcatggaaggcgagcccctggcccttcggtgtcatgcttggaaggataagcttgtgtataatgttctctattatcgcaacgggaaggcctttaaattctttcattggaattccaatcttacgatccttaaaactaacatctcacacaatgggacataccactgtagtggaatgggcaagcatagatacactagcgccggaatcagccagtataccgtgaagggattgcagttacccaccccagtttggttccacgtgctgttttatctggccgttgggatcatgtttctggtgaataccgttttgtgggtgaccatacgaaaggagctaaagcggaaaaaaaagtggaatttggaaatttctctcgattcaggccatgagaagaaagtcattagctccctgcaggaagatcggcatcttgaagaggagctgaagtgccaggaacagaaagaagaacagctgcaggaaggcgtgcaccgaaaggagccacagggcgctacatag

SEQ ID NO: 223088 - DNA, 954 bp, synthetic construct
  misc_feature 1..954: note = Description of Artificial Sequence: Synthetic coding sequence
  source 1..954: mol_type = other DNA
atgactatggaaacccagatgtcacaaaatgtatgccccaggaatctgtggctgttacaacctctgacagttctgttgctcctggcctccgcagattctcaggccgctgccccacccaaggccgtcctgaagctggaaccaccctggatcaacgtgctccaggaggatagcgttaccctgacatgtcagggcgctcgatctcctgaatccgactctatccaatggtttcacaatggaaatcttatcccaactcatacccagccttcttatcggttcaaggcaaacaacaacgactcaggcgagtatacttgccaaacaggacaaacgagtcttagtgatccagtgcatctcaccgtgctgagtgagtggttagtcctgcaaacgccacatttagaattccaggagggggaaacgatcatgctcagatgccattcatggaaggataaaccactagttaaggtgaccttcttccagaatggaaagtctcagaaattttcgcacctcgatcccacattcagcattccccaggccaatcatagccattccggcgattaccattgcactgggaacattggatacactctcttctcgtccaaacccgtcaccatcactgtccaagtcccctccatgggctcttcatcacctatgggcatcatcgtcgccgtggtaatcgctaccgccgttgctgcaatcgttgcagccgtggtggcactgatttattgtcgtaagaaaagaatatcagcaaacagcacagaccccgtcaaagccgcacagtttgaacctccaggcaggcagatgatagccatccgcaaacgccagcttgaagaaaccaataatgattacgaaaccgccgatgggggatacatgacccttaatcccagagccccaaccgacgatgacaagaatatctatctgaccctccctccaaatgatcatgtaaactctaacaactag

SEQ ID NO: 223089 - DNA, 951 bp, synthetic construct
  misc_feature 1..951: note = Description of Artificial Sequence: Synthetic coding sequence
  source 1..951: mol_type = other DNA
atgacaatggaaacgcagatgtcccagaatgtgtgtcctcgcaacctctggctgctgcaaccactgacagtcctgctcctgctcgccagcgctgactctcaggccgctcctccaaaagccgtattaaaactcgagcccccatggataaacgtgctgcaagaagatagcgtgaccctcacatgtcagggggcaaggtcaccagagtcagatagcatccaatggtttcacaacggcaacctaatccccacccacacacagccgtcttatcgattcaaggccaataataatgattctggcgagtacacttgccaaactgggcagacttccttatcggatcccgtacatctgacagttctgagtgagtggttggtcctccagacccctcatctcgagttccaagagggggagaccataatgctacggtgtcactcatggaaagataagcctctcgttaaggttaccttctttcaaaatggaaagagtcagaagttctcacatcttgatcctactttctcaattccccaagccaatcactcacattctggggactatcattgcacaggcaacatcggatataccctgttctcatcaaagccagtgaccataaccgtccaggtgccctccatgggctcaagtagtcccatgggcatcatcgtcgccgtagttatagctactgccgtagcagctatcgttgccgctgtcgtggctctaatatactgtcggaagaagcggatcagcgcgaattctaccgaccccgtaaaagctgctcagttcgagccccctgggaggcagatgatcgcaattaggaaacgacagctcgaagaaacaaataatgattacgaaaccgccgatggaggctacatgacccttaaccccagggctccgaccgatgatgacaagaacatttatttaaccctgcctccaaacgatcacgtgaatagcaacaactag

SEQ ID NO: 223090 - DNA, 876 bp, synthetic construct
  misc_feature 1..876: note = Description of Artificial Sequence: Synthetic coding sequence
  source 1..876: mol_type = other DNA
atgggcatcctgtcctttctgcctgtcctcgcgacggaatcggattgggcagactgtaaaagccctcaaccctgggggcacatgctcctatggacagcagttcttttcttagcgccagtggccggtactccggctgctcctcccaaagcagtgctgaagctcgaaccccagtggatcaatgtgttgcaagaggattcagtgacacttacatgcagggggacacactccccggaaagcgactcgatccagtggtttcataatgggaacctcattccaacacatacccagccatcttacaggtttaaagcgaacaacaatgactccggagagtacacctgccagacagggcagaccagcctctccgatcctgtgcacctgaccgtgctgtccgaatggctcgtcctgcaaacccctcatctggagttccaagaaggcgaaaccattgtgctccgctgccacagttggaaagacaagcctcttgtgaaagttacattcttccagaacgggaagtccaagaaattctcgaggtcagaccctaacttttccatcccccaggcaaatcacagtcactcaggtgactaccactgcaccggaaacatcggctataccctgtatagcagcaagccagttactataactgtgcaagcgcctagttcgtccccaatggggatcattgtcgcggtggttactggcatcgccgtagcagctatcgtggccgctgttgtggcattaatctactgccgtaagaagcggatcagcgctaatcccaccaatcctgatgaagccgataaggtgggggcagaaaacacaattacgtactctctgctgatgcaccccgacgcgcttgaagaaccagatgatcagaaccgaatttag

SEQ ID NO: 223091 - DNA, 933 bp, synthetic construct
  misc_feature 1..933: note = Description of Artificial Sequence: Synthetic coding sequence
  source 1..933: mol_type = other DNA
atgggtatcttgtcgttcctgcccgttctggccacagaaagtgactgggccgattgtaagtcaccccaaccatggggccacatgcttttgtggaccgcggtcctgtttttagctccagtggcaggtacgccagccgcacctccaaaggccgttttgaaacttgagccacaatggatcaacgtgctccaggaggactctgtcacacttacttgcagagggacgcacagtcccgagagtgattcaatccaatggttccataatggtaacctcattccaacccatacccaaccatcttatcgctttaaagccaacaacaatgattccggggagtatacctgccagacaggacagacttcactcagcgatcctgtacacctgaccgttcttagtgaatggctggtgttgcaaactcctcatctggaatttcaggaaggggagacaatcgttttacggtgccactcttggaaagacaaacctctggtaaaagtgacattctttcagaatgggaaaagcaagaagttctctaggagcgatccgaacttctcaattcctcaggctaaccattcacacagcggagactaccattgcaccgggaatataggctataccctgtattcatccaagccggtgactattactgtccaggcccctagttctagtccaatgggtatcatagttgccgtcgtcactgggattgcagttgcagccatcgtagccgctgtggttgctcttatctattgcaggaaaaaacgtatcagtgcacttcctggttaccccgaatgtagagaaatgggggagactttgccagaaaagccagcaaatcccaccaaccctgatgaggccgacaaagtgggcgctgaaaacaccattacctactctctgctgatgcaccccgacgccctggaggaacctgacgaccagaaccgaatatag

SEQ ID NO: 223092 - DNA, 912 bp, synthetic construct
  misc_feature 1..912: note = Description of Artificial Sequence: Synthetic coding sequence
  source 1..912: mol_type = other DNA
atgggtattctgagttttttgccagtgctggccaccgaaagtgactgggcagactgtaaatccccgcagccatggggccatatgctgctgtggactgccgtcctctttttggctgcccctcccaaggcagtgttaaagctggagccgcaatggatcaacgttcttcaggaggactctgtaacgttgacttgccggggtacacacagccctgaaagtgattcaatccagtggttccacaacgggaatctgattcccacgcacacgcaaccttcctataggttcaaagcaaataataatgactcgggggagtacacctgtcagactggccaaaccagcctctccgacccagtccacctgaccgtattgtctgagtggctcgtactgcagacccctcacctggagttccaggagggggagacaattgtcctgcggtgtcacagctggaaagacaagcccctcgtaaaggtaaccttttttcaaaacggcaaatcaaaaaagttctctagatctgaccctaacttttccattcctcaggcaaatcattctcacagcggagattatcattgtactgggaatatcgggtacactttatacagcagcaagcctgttactattactgtacaggcaccgagcagttcaccaatgggaattattgtggccgtggtaacagggatcgcagtggctgctatagtcgccgctgtcgtcgccctgatctactgccgcaaaaaaaggatttctgcgttaccaggatatccggagtgtagagaaatgggcgagacccttcccgagaaacccgcaaaccccacaaatcccgacgaggccgacaaagtgggcgctgagaatacgattacatacagtctcctgatgcaccccgacgctttggaggagcccgacgaccagaatcgtatctag

SEQ ID NO: 223093 - DNA, 912 bp, synthetic construct
  misc_feature 1..912: note = Description of Artificial Sequence: Synthetic coding sequence
  source 1..912: mol_type = other DNA
atgggaatcctgagctttttacccgttctggcaactgaatctgattgggcagactgcaaaagccctcagccatggggacacatgctgctgtggaccgccgtgcttttcctggctgccccacccaaggccgtgctgaagctggaaccccaatggatcaacgttcttcaggaggactctgtgactctcacctgtagagggacccatagtcccgaaagtgacagcatccaatggtttcacaacggcaatctgatcccaacgcatactcagccatcctaccggtttaaagccaacaataacgattctggcgagtatacctgtcagaccggacaaacctccctgagcgaccctgtgcacctcacagtcctgtctgagtggctcgtgcttcagactccgcatttggagttccaggagggcgagaccatcgtcctgcggtgccattcttggaaggacaaaccgctggtaaaggtgaccttcttccagaacgggaagtccaagaagttctcaaggtcagatccaaatttctccataccacaggcaaatcatagccacagtggcgattatcattgcaccggtaatatcggatacactctgtatagtagcaagccagttaccatcacggtgcaggcacccagcagttcccccatgggtattatagtcgccgtagtcacaggtattgctgtagccgctatcgtggccgcagtcgttgcactgatatattgcagaaagaagagaatcagcgctctgcccggttatccagagtgccgggaaatgggcgagacgcttccagaaaagcctgctaatcctaccaatccagacgaagcagataaggtgggcgctgaaaacactatcacttattctctgctgatgcatccagatgccttggaagagccagacgaccagaaccgaatttag

SEQ ID NO: 223094 - DNA, 933 bp, synthetic construct
  misc_feature 1..933: note = Description of Artificial Sequence: Synthetic coding sequence
  source 1..933: mol_type = other DNA
atggggatactgtccttcctcccggtcctggcaacagagtcggactgggctgactgtaaatctccacagccttgggggcacatgcttctctggactgcggtcctgtttttggcgccagtcgccggaacgccagctgctccacctaaagcagtgctcaagctcgaaccacaatggataaacgttcttcaagaagactcggttacactgacctgtcgaggcacgcacagccccgaaagtgattcgatacagtggttccacaacggcaacctgatcccgactcacacccagccgtcttatcgattcaaagctaacaataacgacagcggagagtatacatgccagaccggacagaccagcttgtcagaccctgtccacctgacagtgttgagtgagtggctggtgcttcagacaccccatctcgaatttcaagaaggagagactatcgttttaagatgtcattcctggaaggacaaacccttggtaaaagtgacattctttcaaaatggcaagtcaaagaaattttctagaagcgacccaaatttcagcatccctcaagccaaccatagccattctggcgactatcattgcacaggcaacatcggctacactctctacagctctaagccagtcaccatcaccgtgcaggcccctagcagctctcccatgggaatcattgttgcagtggtgacaggtatcgctgtggcagccatagtggctgctgtggtggccctgatctactgccgaaagaagcgtatcagtgccctgcctggttatcccgaatgcagagagatgggtgagaccctaccagaaaagcccgcaaaccctactaatcctgacgaggccgataaggttggtgccgagaacaccattacatatagtcttctgatgcaccctgatgccctagaagaaccagacgaccagaaccggatctag

SEQ ID NO: 223095 - DNA, 876 bp, synthetic construct
  misc_feature 1..876: note = Description of Artificial Sequence: Synthetic coding sequence
  source 1..876: mol_type = other DNA
atggggatactgtcctttcttcccgtgcttgcaactgagtccgactgggcggactgcaaaagcccccaaccgtgggggcatatgctgctgtggacggccgtgctgttcctggcccctgtcgccggtacacccgcagcccctcccaaagcggtgctgaaactcgagccacagtggatcaatgtgctccaagaggatagcgtcaccttgacgtgtcggggtactcactcccctgaatctgattccattcaatggttccacaacgggaacctgatccccacccatacccagccatcatatagatttaaggccaataacaacgactccggagaatacacatgccagaccggacagacctccctgagcgatccagtgcacctaacggtgttgtcagaatggttggtgctgcagaccccgcacttggaattccaggagggagagactattgtgctccggtgccattcatggaaagataagccgcttgtgaaagtgacattttttcagaatggcaaatcaaaaaagttctcgagaagtgatcccaatttcagcatccctcaagcgaaccacagccactcaggcgattaccattgcaccgggaacataggctacaccctgtattcttcaaagcccgtgacaattacggttcaggcaccatccagcagcccaatgggaatcatcgttgccgtggtcactgggatagctgtagcagccatcgttgctgcagtcgtggccctcatctactgccgaaaaaaacggatctcggcaaatcccacaaacccagacgaggcagataaagtgggcgcagaaaatactataacttactccttgctgatgcatcctgatgcactggaggaaccagacgatcaaaataggatatag

SEQ ID NO: 223096 - DNA, 705 bp, synthetic construct
  misc_feature 1..705: note = Description of Artificial Sequence: Synthetic coding sequence
  source 1..705: mol_type = other DNA
atgggcattctgtctttcttgcccgttcttgccactgaaagcgattgggccgattgcaagagccctcagccttggggccatatgctactctggacagccgtgctgttcttagcacccgttgcgggtacgccggctgccccaccaaaggcagtgctaaaattagagccccagtggattaacgtgttacaggaggatagtgtgacactcacatgccgaggcactcactcgcctgagagcgattctatccaatggttccacaatggtaatctaattcctactcatacacagccttcttaccgctttaaggcgaataacaatgacagtggggagtacacttgtcaaacaggtcagacatcattatccgatcctgtgcacctgaccgtgctgtcagagtggctggttctgcagacaccccacttagagttccaggaaggcgaaaccatcgttctcaggtgccactcatggaaggacaaaccactcgtgaaagtgacgttttttcagaacgggaaatctaaaaaattttcaaggtctgacccaaattttagtatcccccaggctaaccatagtcattccggtgattaccactgtaccggaaacataggatatacgctgtacagttcaaaacccgttacgatcaccgtgcagggcccacggctgaggactgcagcaaaacaaagttccctggtgggagctgaggtcccttag

SEQ ID NO: 223097 - DNA, 771 bp, synthetic construct
  misc_feature 1..771: note = Description of Artificial Sequence: Synthetic coding sequence
  source 1..771: mol_type = other DNA
atgggaatcctgtcgtttctcccagtactggcaactgaatccgattgggctgattgtaagagtccccagccctggggccacatgcttctgtggacagccgtactttttctgggggaaagtgggcctcctgccgcaccacccaaagcagtgttgaagctcgaaccacagtggattaacgtcctccaggaggactccgtcactctcacttgtcggggaactcatagcccggaaagcgattcaatacaatggttccacaacgggaacctgatacccactcacacgcagccaagttatcggttcaaggccaataacaatgattctggcgaatacacctgccagaccggccaaactagtctcagcgaccccgtgcacctgaccgtgctttctgaatggctagtgctccagaccccacatctggagttccaggaaggagaaactatcgtacttcggtgccactcttggaaagataaacctctcgtaaaggtgactttcttccagaacggcaaatccaagaagtttagccggagtgacccaaacttttccattccacaggcaaatcatagccacagcggagactatcattgcactggcaacattgggtacaccctgtactccagcaaacctgtgacaattactgtacaggctccatcgtccagcccaatgggaatcatcgtcgccgtcgtcaccgggattgctgtggcagcaatagtggcagcagttgttgcactcatctactgccgcaagaagcgtattagtgtgtctacctggtag

SEQ ID NO: 223098 - DNA, 765 bp, synthetic construct
  misc_feature 1..765: note = Description of Artificial Sequence: Synthetic coding sequence
  source 1..765: mol_type = other DNA
atgtggcagctcctgctccctacagcattattgctgctcgtgtctgccggaatgagaactgaggaccttcccaaggccgtagtgttcctggagccacaatggtaccgcgtgctcgaaaaggacagtgtgacactcaagtgtcagggtgcctactcaccagaggacaacagcacccagtggttccataacgagtcattaatcagcagccaggcctctagctatttcatcgacgcagcaaccgtggacgactccggggagtatagatgccaaaccaacttgagcacactgtccgacccagtccagcttgaagtccacatcggctggctgctgctccaggccccacgatgggttttcaaggaggaagatcctattcatctacgttgccatagctggaaaaacaccgcacttcataaggtgacgtacctacagaacggcaaagggagaaagtacttccatcataattcagatttctatatccccaaagcgaccttaaaggacagcgggtcatacttctgccggggactgtttggtagcaaaaatgtgagttctgagaccgttaatattaccattacccaggggttggcagtcagcaccataagttctttcttccccccaggctaccaggtttctttttgcctagtgatggtgctgttattcgcagtggataccgggctatacttcagcgtgaaaaccaacatcagatcgagtacgcgcgactggaaggaccataaattcaagtggagaaaggatccccaagataagtag

SEQ ID NO: 223099 - DNA, 873 bp, synthetic construct
  misc_feature 1..873: note = Description of Artificial Sequence: Synthetic coding sequence
  source 1..873: mol_type = other DNA
atgggcggaggtgcaggagagcgcctgtttacgagctcctgcctggtaggcctggtgcccctgggtctgcggatctcccttgtcacttgtccgctccagtgtggaatcatgtggcaactgctgctccctaccgccttgttgctgctcgtctccgccggaatgagaacagaagacttacctaaggctgtcgtgttcctcgagccccagtggtaccgcgtgctcgagaaagattccgttacactgaaatgccaaggtgcgtattctccggaggacaactccactcagtggtttcataacgaatctctaatttccagccaggcatctagctacttcatcgacgcagccaccgtggacgattctggggaatatcgctgtcaaaccaacctatctaccctgtcggatcccgttcagctagaggtgcatatcggttggttgctcctgcaggctccccgttgggttttcaaggaagaggatcccattcatctccggtgtcattcctggaagaatacggctcttcataaggtgacttacctacagaacggaaagggcagaaagtatttccaccacaattctgacttctatatcccgaaggccaccctgaaagactccggctcctacttctgtcgagggttattcggtagcaagaacgtgtcttccgagactgtcaacattaccattacccaaggactcgccgtgtcgacaattagctcattctttccacccggataccaagtgtcattttgtttggtcatggtccttctgttcgcggttgatacaggattatacttctccgtcaagacaaatatccgcagttccacacgggattggaaagaccacaagttcaagtggcggaaagatcctcaggataaatag

SEQ ID NO: 223100 - DNA, 816 bp, synthetic construct
  misc_feature 1..816: note = Description of Artificial Sequence: Synthetic coding sequence
  source 1..816: mol_type = other DNA
taaccactagggctccggatcagcctggtgacatgcccactgcagtgtggcatcatgtggcagctgttacttccaaccgccctccttcttctggtatctgctggtatgcggactgacctgccgaaggctgtggtcttcctggagcctcagtggtacagagtgctggaaaaagatagtgttacattgaagtgtcagggggcatatagtcctgaagacaatagtactcagtggttccataacgagagtctgatcagctcacaggcctcctcctatttcatagacgccgcaaccgtcgacgactcaggcgaataccgctgtcagaccaaccttagtaccctttctgatccagtgcagttagaggtgcatattggctggctgctgctccaagccccaaggtgggtgtttaaagaagaggaccctatccatttacgatgccactcatggaagaacaccgctttgcataaggtaacctatcttcagaacggtaaggggaggaagtactttcatcataactctgatttctatatacccaaggccacactcaaagattctggttcatacttctgccgcggtctgtttggctctaagaatgtcagctctgaaaccgttaacatcacaatcacccagggcctcgctgtatccactattagctcatttttccctccagggtatcaagtgtcattctgtttggtcatggttctgctgttcgctgttgacacgggcctctatttctctgtgaagaccaacattagatcatcaaccagggattggaaagaccacaaatttaagtggcggaaagatccacaggacaagtag

SEQ ID NO: 223101 - DNA, 765 bp, synthetic construct
  misc_feature 1..765: note = Description of Artificial Sequence: Synthetic coding sequence
  source 1..765: mol_type = other DNA
atgtggcagctgctccttcccactgcgctgctgctgttagtatccgcagggatgcggacagaggatctgccaaaggccgtggtgttcttagagcctcagtggtacagggttctggagaaggatagtgtaacactgaaatgccaaggggcttactcccctgaggacaactccacgcagtggtttcacaacgagagcttgatttcatcccaagccagcagctactttatagacgccgcaactgtggatgacagcggtgagtatcgctgccaaactaacctgtccacgctgagcgatcctgtccagcttgaggtccacataggctggctgttgcttcaggctccgcgttgggtgttcaaggaagaggatccaatccacttgagatgtcacagttggaagaatactgccctgcacaaagtgacctacctgcagaatggtaaggggcgaaagtattttcatcacaattccgacttctacatacctaaggccacacttaaagattctggctcttatttctgtaggggactgtttggaagtaagaatgtcagttctgagacagtgaacattacaatcacgcaaggtctggcggtttcgactattagctccttctttccgcctggctaccaagtgtctttttgcctggtcatggttctcctgtttgctgtcgatactggattgtactttagcgtaaagacaaacattagatcgagtaccagagactggaaggaccataagttcaaatggcgtaaagatccccaggacaaatag

SEQ ID NO: 223102 - DNA, 318 bp, synthetic construct
  misc_feature 1..318: note = Description of Artificial Sequence: Synthetic coding sequence
  source 1..318: mol_type = other DNA
atgtggcagctcctcttgcctactgccctcctgttgctggtctcagcgggtatgcgaacagacttgccaaaagctgttgtgttcctggagccccagtggtatcgcgtgttggagaaggatagcgtcactctcaagtgtcaaggagcttacagccccgaggataattcaactcagtggtttcacaacgagagtctgattagcagccaggcctcctcttacttcattgatgctgccaccgtggatgattctggcgagtacagatgtcagacgaacctgagtaccctgagcgatccagtacaactggaggtgcatatctag

SEQ ID NO: 223103 - DNA, 870 bp, synthetic construct
  misc_feature 1..870: note = Description of Artificial Sequence: Synthetic coding sequence
  source 1..870: mol_type = other DNA
atgggcggtggcgcaggcgagagacttttcacgtcttcctgtctcgttgggttggttcctctggggctgcggatttctctggtcacttgtcccctccaatgtggaattatgtggcagcttcttctccctacggccctgctcctgctggtcagcgccggaatgcgcactgacttacccaaggcagtggtcttcctggagcctcagtggtatcgcgtgttagagaaggactctgtgacacttaaatgtcagggcgcatattcgcctgaagataattctactcaatggttccataacgagtcgctgataagctcccaggcttctagctatttcattgatgcagctacagtagacgattccggcgagtacaggtgtcaaaccaacttatcaaccttgtcagatccagtccaacttgaggtacacatagggtggctgcttcttcaggctcccaggtgggtttttaaggaggaagatccaatccacctgcgatgtcattcctggaagaataccgccttacacaaagtgacctacctccagaatggaaaaggcagaaaatacttccatcacaactcagacttctacattccaaaagcgaccttgaaagactctgggtcttacttctgcagaggcctgttcggcagcaaaaatgtctcatctgagactgtgaatattacaatcacccagggtctggctgtctctacaattagcagtttctttccaccaggctaccaggtgtcattctgcctagtgatggtgctgctgttcgctgtagataccgggctgtacttctcagttaagactaacatccgcagctctactagagactggaaagaccataaatttaagtggagaaaagacccacaagataagtag

SEQ ID NO: 223104 - DNA, 765 bp, synthetic construct
  misc_feature 1..765: note = Description of Artificial Sequence: Synthetic coding sequence
  source 1..765: mol_type = other DNA
atgtggcagctgctcctgccaacggccttgttgttgttagttagcgccggaatgagaactgaggatctgccaaaggcagtcgtgtttctggaaccgcagtggtatcgggtgctcgaaaaagactcggtgacactgaagtgccagggcgcatacagtcccgaagacaacagcactcagtggtttcacaacgagtcacttatttcatctcaggcgagcagctacttcatcgatgcggcaacggtagatgattctggcgaataccgttgccagaccaacctgagtacactcagcgaccctgtgcagcttgaggttcatatcggatggctgttactgcaggccccaagatgggtgtttaaggaggaagatcccatacacctgcgttgtcacagctggaagaatacagcgctccacaaggtgacatacctccaaaatgggaaaggacggaaatatttccaccataactctgatttttacatcccaaaagccacacttaaagattctggctcttacttctgcagagggttgtttggctcaaagaacgtgagctccgagacagttaacatcacaataacccagggcctggcagtcagcactattagctcctttttccctcctggctaccaggtcagcttctgtctggtcatggtactgttattcgccgtggacacagggttgtatttttcagttaagactaatattagatcttcaaccagagattggaaagatcataagtttaaatggagaaaagatcctcaggacaagtag

SEQ ID NO: 223105 - DNA, 702 bp, synthetic construct
  misc_feature 1..702: note = Description of Artificial Sequence: Synthetic coding sequence
  source 1..702: mol_type = other DNA
atgtggcaactgctgcttcccactgccctcctactcttagttagcgctggcatgcggactgaggacctgccaaaagcggtagtgtttcttgagccacagtggtatagcgtgctggaaaaggattcggtgactctgaagtgccagggtgcgtactcgccagaggataactctacgcagtggttccataacgagaacctgatttctagccaagcatcctcatacttcattgacgccgctacggtgaacgattctggagagtatcgctgccagactaacctgtccactctgtctgaccccgtgcagctcgaagtgcatatcggatggctgctgcttcaggctcctcgctgggtattcaaagaggaggacccaatccacctgcgatgccactcatggaagaacacagccctgcataaggtcacttaccttcaaaacggaaaagacagaaagtacttccaccataattcggatttccacataccaaaggcaactctcaaggactctggttcttatttctgcaggggcctggtcgggagcaagaatgtgagttctgagactgtcaatatcactatcacgcaaggacttgccgtaagtaccatttcaagcttctccccacccggatatcaggtcagtttttgccttgtaatggtccttctattcgctgtggacacaggcttgtatttctccgttaagaccaacatctag

SEQ ID NO: 223106 - DNA, 702 bp, synthetic construct
  misc_feature 1..702: note = Description of Artificial Sequence: Synthetic coding sequence
  source 1..702: mol_type = other DNA
atgtggcagctcctgctacctaccgccctccttttgctggttagcgctggcatgaggaccgaggatctcccaaaagccgtcgttttcttagagccccaatggtacagcgtgctggagaaagactctgtgactctaaagtgccagggggcttactcgcctgaggataatagcacgcagtggtttcacaatgagaatcttatatcctctcaagcctcttcatacttcattgacgctgccaccgtcaacgactccggagaatatcgttgtcagaccaacctgagcaccctgtctgatccagtccagcttgaggttcacatcggctggctgctgctccaggcaccgcgatgggtctttaaggaggaggatcccatccacctgcggtgtcactcatggaagaacacggcactgcataaagtcacgtatctccagaatggcaaggaccgcaaatatttccatcacaatagcgattttcatatcccaaaggccactctgaaggatagcggctcttatttttgtcgaggcctggtcgggagtaagaatgtctcctccgaaactgtgaacattactatcacccagggtctcgctgttagcacaatttctagcttttccccacctggttaccaggtgagcttctgtctcgttatggtactgctgttcgcagttgatactggtttgtatttcagcgtgaagacgaatatatag

SEQ ID NO: 223107 - DNA, 2076 bp, synthetic construct
  misc_feature 1..2076: note = Description of Artificial Sequence: Synthetic coding sequence
  source 1..2076: mol_type = other DNA
atggaaattgcgcctcaggaagcgcctccagtccctggagccgatggagacattgaggaagcgccagccgaggctggatccccaagccccgctagccctcccgctgatggccgtttgaaggcagctgcaaagagggtaacttttcccagtgatgaagatattgtgtcaggcgctgtggaaccgaaagacccctggcggcacgctcagaacgtgaccgtcgatgaagtcatcggggcatacaagcaagcttgtcagaaacttaactgtcggcagattccaaaactgcttaggcagctccaggaattcacagaccttggacaccgcctggactgtctagatttgaagggagaaaagctggattacaagacctgtgaggcgctggaagaggtcttcaaacgcctccagttcaaagtggtggacctggagcagacaaacctggacgaagacggcgcttctgctctgtttgatatgatagagtattacgagagcgccactcacctaaatatttcctttaataagcacatcgggacacgcggatggcaggctgctgcccacatgatgcggaaaaccagctgtctgcagtaccttgacgcacggaatactccccttctggaccattctgccccattcgtagcgagggccctgaggattaggtccagtctggccgttctacacttggaaaatgcttctcttagtggcagaccactcatgctgctggccactgcgttaaagatgaatatgaacctgagggagctctacctggcggataataagctgaatggcctgcaggatagcgcacagctgggcaacctcctcaagtttaattgtagtctgcagatcctcgaccttagaaacaatcacgttctggacagcggcctagcctatatttgcgagggtttaaaagaacagcggaaaggattggtgacactggttctttggaacaatcagctcacgcatactggcatggcatttcttggcatgaccctgccacatacccagtctctggagactctcaatctggggcacaatcctatcggtaatgagggagtccggcatttaaagaatggactgataagtaatcgctctgtgctgaggctggggctcgcatcaaccaagctcacctgcgaaggagccgtggcagtggctgagtttatcgctgagagcccaagactccttcggttggatctccgggagaatgagataaagaccgggggactcatggccctttcactcgcattgaaggtaaaccactccctgctgcggctggatttagacagagaaccaaagaaggaagccgtcaagtcattcattgagacgcaaaaagctctcttggctgagatccagaacggttgcaagcgtaacttagtgctcgcccgagaaagagaggaaaaagaacagccaccccagctgagcgcttctatgcctgagacaacggccactgaaccgcagcctgacgacgagccagcggcaggcgtgcaaaacggcgctcctagccctgccccttccccagactctgattctgacagcgactcagatggcgaagaagaggaagaggaggagggcgagcgcgatgagactccctgccccgcactggttccccctactgactctcttggaccgggtgaccggagccccccaggctcgcctagtacgccaacagagcaaaggattagcgtgtctagtccaggcaggggccataaggtcttcgtagtaaccagagtggagagtccacctgaacgtgctgaacccccagcatcgccaacgcctccgtcccctccaccccctccctcccccccagccagcccctcgttgcctccggcaggtgccatcgatacccgagataccgggtcctcggaacctcagccgcctcctgagccccctaggtcaggccctcctctacctaatggacttaaaccagagtttgccctggcactccctcccgagcctccacccggtccggaggttaagggcggttcttgcggactggaacacgaacttagttgttctaagaacgagaaagagctggaagagctgctcctcgaagctagccaagaatcagggcaagaaactctgtag

SEQ ID NO: 223108 - DNA, 459 bp, synthetic construct
  misc_feature 1..459: note = Description of Artificial Sequence: Synthetic coding sequence
  source 1..459: mol_type = other DNA
atgggagttccacgaccgcagccttgggccctcggactccttctgttccttctgccaggctccctgggggctgagagccacctcagtctgctgtaccatcttactgccgtgtccagtccagcgccaggtacacctgcgttctgggtttccgggtggctcggtcctcaacagtatctaagttacaactcactgaggggggaagctgaaccatgcggcgcttgggtctgggaaaatcaagtgtcttggtactgggagaaggaaacaacagacctgcgcattaaagagaaattattcctggaggcatttaaggcactcggagggaagggaccctatactctgcagggtttgctcgggtgcgagcttggtcctgacaatacgtcagtacctacagcctgtggaagcacttggcgcggagcggctgaaacttggtccgggagatccccgcctccttgcgcatag

SEQ ID NO: 223109 - DNA, 1098 bp, synthetic construct
  misc_feature 1..1098: note = Description of Artificial Sequence: Synthetic coding sequence
  source 1..1098: mol_type = other DNA
atgggcgtgccgcgtcctcagccttgggccctagggctgctgctgtttctcctccctggctctttgggggcagagagtcatctgagtctgctgtaccatcttaccgctgtttcgtctcctgcgcctggcacgccggcattctgggtatctgggtggttgggaccccagcaatacctgagctataatagtctccggggagaagcagaaccgtgcggggcatgggtctgggagaatcaggtgagttggtactgggagaaagaaactacggatctgcgcattaaagaaaagttgttcttggaagccttcaaagcgttgggtgggaaaggcccttacacccttcagggactgctggggtgcgaactgggcccagataataccagcgtccctactgccaagtttgccttgaacggcgaagagttcatgaactttgatttgaagcagggtacttgggggggtgactggcctgaggcattagcgatttcgcagagatggcaacagcaagacaaagccgctaataaagagctgacatttctgttgtttagctgtccgcacaggctccgagaacacctggaacgcggacgcggaaacctggagtggaaagagccaccatccatgaggctaaaagctcgacccagtagtcccggattctctgttctgacctgttcagcctttagcttttatcctcccgagctgcagctgcggttcctcagaaacggcttagcagccggtaccggccaaggtgactttggcccaaacagcgacggatcttttcatgcctcctcatccctgaccgttaaatccggcgatgaacatcattattgttgcatcgtgcaacatgccggtcttgcacagcccctcagagtcgagttagagtccccagcgaagtccagcgtgcttgtcgtagggatcgtgataggggtgctgctgttgaccgcagcagccgtgggcggagctctactgtggagaaggatgcgctccggtctgccagctccatggatctctctaaggggtgacgatacgggagtgctcttacccacacctggagaggctcaggacgctgatctgaaagacgtgaacgtaattccagccacagcttag

SEQ ID NO: 223110 - DNA, 708 bp, synthetic construct
  misc_feature 1..708: note = Description of Artificial Sequence: Synthetic coding sequence
  source 1..708: mol_type = other DNA
atgggggtaccacggcctcagccgtgggcgttggggcttctcctattcctattgcccggaagcctaggtgcagaaagccatctaagtttgctctaccacttaacagcagtgagctctcccgcaccaggcacgccagccttctgggtttccggatggctcggcccacagcagtacctttcctataatagcttgcgtggggaggcagaaccgtgcggtgcatgggtctgggaaaatcaagttagttggtattgggaaaaagagactactgatttgcgaatcaaagagaagctttttctcgaggcgttcaaggcattaggaggcaagggcccatacactctccaaggtttgctgggctgcgaacttggcccagacaatacgtccgtgcctaccgccaaatttgcattgaatggagaggagttcatgaacttcgacctgaaacaaggaacctggggcggtgattggcccgaggccctggctattagccagcgttggcagcaacaggataaggccgcaaataaggagctgacttttctgctattttcctgtccacaccggctcagggagcaccttgaacgcggacgcggtaatctggaatggaaaggctgctggaccaagattgatacctcctggggctgcgctcagattttcattccttcagcaaccaaggaaaaactgaggctgaaccagagtccacccccttgcgcttag

SEQ ID NO: 223111 - DNA, 1734 bp, synthetic construct
  misc_feature 1..1734: note = Description of Artificial Sequence: Synthetic coding sequence
  source 1..1734: mol_type = other DNA
atggacggggaggctacggtgaagcctggcgaacaaaaggaagtcgtccgccgagggagagaagtggactattctcgcctgattgctgggacactgcctcagagccacgtgacatcccgtcgcgctggctggaagatgccgctttttctgattctgtgtctcttgcagggaagttcttttgcactgcctcagaaacgcccacatcccaggtggctgtgggagggtagcctgcctagccgcactcacctccgcgcaatgggcacgctgcggccttcttctcctctatgctggagagaagaatccagctttgccgctcccaattctctgaagggttctcggctcgtgtcaggcgagcccggaggcgcagttactattcagtgtcattatgcaccatctagcgtgaaccgtcaccagcgaaaatactggtgcaggctcggacctccacgctggatctgtcaaacaatagtgtccacgaatcagtacactcatcatagatatagagatagggttgcgctcaccgatttcccccagaggggcctgttcgttgtgcgattatcccagttgagtccagacgatatcggttgctatctttgcggaatcgggagtgagaataatatgctgttcttgtctatgaacctgaccatcagtgcgggtcccgctagcaccctcccaacggcaactcctgccgctggcgagctcacaatgcgcagctatggaaccgcaagtcccgtggctaaccggtggaccccaggcacaactcaaacattgggccagggaactgcttgggatactgtggcatctacgcccggaacgtcaaagaccaccgccagcgctgaaggcagaagaactccaggcgctaccagaccagctgctcctggcacagggtcctgggcagagggaagtgtgaaggcccctgctcccataccagagtccccaccatctaagagtaggtccatgtcgaacacgaccgagggggtgtgggagggaacccgttccagcgtgaccaatcgggctagggccagcaaagaccgtcgtgagatgacaactacaaaggctgaccgtcctcgagaggatatcgagggcgtgcggatcgcgctggatgcagccaagaaagtcttaggaacaataggtccacccgctctggttagtgagaccctcgcctgggagatcctgcctcaggcaactccggtcagcaagcagcagagccagggcagcatcggagaaacaacaccggctgcaggaatgtggactctggggactcctgctgccgatgtgtggattttgggcacccccgcagctgacgtatggacctccatggaagccgcaagtggtgagggttctgcggctggcgacctggatgctgcaacaggcgaccggggaccgcaggctactctgagtcagacgcctgctgtcggcccttggggacccccaggtaaggaatcgtctgtgaagaggacttttccagaagacgagagctcttccaggaccctcgcgccagtctctactatgctggctctcttcatgctcatggcattagtcctactgcagagaaagttgtggcgcagacgcacaagccaggaggctgaacgcgtgacactcatacagatgactcatttcctcgaagtgaatcctcaggccgatcagctgccacacgtagaaaggaagatgctgcaggacgatagtctgccggctggagccagcctgaccgctcccgagcggaacccgggaccatag

SEQ ID NO: 223112 - DNA, 1608 bp, synthetic construct
  misc_feature 1..1608: note = Description of Artificial Sequence: Synthetic coding sequence
  source 1..1608: mol_type = other DNA
atggatggagaagctactgtcaaacccggagagcagaaggtgccgctgtggacccacgggtggccgcctgatgaccctagtcccagcttcgctgctggcagttcgtttgccttgccgcaaaagcggccacatccccgttggctatgggagggatccctgcccagccgcacgcatttgcgagccatgggcacccttcgaccatccagcccattgtgctggcgcgaggaaagttcgtttgctgcacccaactccctgaagggtagccgcttagtgagcggcgaacccggtggggcagttactattcagtgtcactatgcaccatccagtgttaatagacaccaaagaaagtactggtgtcggcttgggcctcctcgatggatttgtcagaccatcgtttccaccaatcagtacacccaccaccggtacagagaccgggtcgctcttaccgacttcccccaaaggggtttattcgtggttcgccttagccagctgtcccctgatgacattggctgctatctatgcggcattggcagtgagaataacatgcttttcctgtccatgaacctgacaatttcagcagggccagcttcaactttgccaacagccactcccgctgcgggagagctgaccatgcggtcttacggtaccgcttcgcctgttgccaacaggtggacgcctgggaccacacaaaccttgggccagggcacagcatgggatacagtagcctcaacaccgggaaccagcaagacgaccgcttcagccgagggcaggcggaccccgggtgctaccaggccggcagcccctggcacgggaagctgggcagagggaagcgtgaaggcccctgccccaattcccgagtccccgccttcgaaaagccgctccatgtctaatacaaccgaaggggtgtgggaaggaactcggagttcagtcaccaaccgagcacgcgcaagcaaagacagaagggagatgacaaccaccaaagccgatcgaccaagggaagatatcgagggagtgaggatcgcactggacgccgctaagaaggtgctcgggactataggccctcctgctctagtgagtgagacgctcgcatgggagatacttcctcaggctactcctgtctctaagcaacaatcccagggcagcattggggaaacaacgccagcagccggaatgtggactttaggcacccccgcagcagacgtatggattactagcatggaggccgcttctggcgaggggtctgccgctggggacctggacgccgcaaccggagataggggccctcaggctacattgtctcaaaccccggcagttgggccttggggcccacccggaaaagaatcttcagtcaagcgcgcaacatgtccagggctgtccacactgaaagagatcaaggtgagtgcagtactgacgcaaaaccctcatagtctgttgtgtgtgtctgctgcccaagaagccgaacgcgtgacacttattcagatgacccacttcctggaagtgaatccccaggccgaccaactcccccacgtagagcggaaaatgctgcaggacgactctctacctgcaggcgcaagccttactgctcccgaacgtaatccaggaccctag

SEQ ID NO: 223113 - DNA, 798 bp, synthetic construct
  misc_feature 1..798: note = Description of Artificial Sequence: Synthetic coding sequence
  source 1..798: mol_type = other DNA
atggacggcgaggccaccgtgaagccgggtgagcagaaggaggtggtgcggagaggtcgggaggtggattactccaggttgattgccggaacactcccccagtcacatgtgacgtcccgacgggcaggctggaaaatgcctctgtttttgatcctgtgcctgcttcaaggaagcagttttgccctccctcagaagagaccacatccacgctggttgtgggaaggaagcctaccctcgcggacccacctgcgggcaatggggaccttacgcccaagtagtcctttatgttggagggaagagtcatccttcgccgcacccaatagccttaagggctccaggctggtctcaggggaaccgggaggcgctgtgacaatccagtgtcactacgccccaagtagtgtgaacaggcatcaaagaaagtattggtgtaggctcgggcctcctcggtggatctgtcagaccatcgttagtacgaatcaatacacacaccatcgttatagggacagggtggcattgacggattttcctcagcggggactgtttgtggtccgcctatcacagctcagccccgacgatatcggctgttacctgtgtggcatcggatccgagaataatatgttgttcctttccatgaacctgactatctcagctgtgctttttcagaaaatgaaagcggcactggggccatggctcctgtcacttccatgctggccatgcctctgcctatggttgtggttctattgcaaaggcagcagcggcgaaggtgggccactgaggcgtcagaagggcagtccatag

SEQ ID NO: 223114 - DNA, 798 bp, synthetic construct
  misc_feature 1..798: note = Description of Artificial Sequence: Synthetic coding sequence
  source 1..798: mol_type = other DNA
atggatggagaagccaccgtgaaacctggagaacaaaaggaggtggtgcgtagaggccgagaagttgactattctaggttgatagcgggaactctccctcaaagccacgttaccagtcgcagggctgggtggaaaatgccactatttttgatcttatgtctgctccagggatcttcttttgctttaccccaaaagaggccacaccctagatggctctgggagggaagtttacccagcaggacccatctgagagctatgggaacactccgtcccagcagccctctgtgttggcgtgaggagtcttcattcgccgctcctaattccctgaaaggaagtagacttgtgtctggcgagcctgggggtgcggtgactatccagtgccactacgctcccagcagcgtcaatcggcaccaacggaagtattggtgtcgtctgggtccccctagatggatctgccagaccatagtcagtactaaccaatacacccatcacaggtatagggatcgggtcgctttaacggatttcccacagcgtggcctatttgttgtgcgtctctcccagttaagtccagatgatatcggctgttatctgtgcggcatcggctccgagaacaacatgctcttcctctccatgaatttgacgattagtgccgttctgttccaaaaaatgaaagcagcgttaggaccatggctgctgtctctcccatgctggccctgcctgtgtctctggctgtggttttattgtaaaggctcaagcggagagggcggtccacttcggaggcagaagggatctccatag

SEQ ID NO: 223115 - DNA, 1101 bp, synthetic construct
  misc_feature 1..1101: note = Description of Artificial Sequence: Synthetic coding sequence
  source 1..1101: mol_type = other DNA
atgctgccgcgactgctgctgctcatttgtgctccattgtgcgaaccagcagaactattcttaatcgctagccctagccaccctaccgaagggtccccagttactctcacatgcaagatgccctttctccagagctcagacgcccaattccagttctgctttttccgcgatacacgtgctttgggcccagggtggtccagctctccaaagttacaaatagcagccatgtggaaagaagatacaggctcatattggtgtgaggcccagaccatggcatccaaagtcctgcgcagcagacgaagtcaaattaacgtccaccgggtgcctgttgcggacgtgtccctggagacacagccacccggagggcaggtcatggaaggagatcgcctggtgcttatctgtagcgtcgcgatgggcacaggagatataactttcctctggtacaagggcgctgtaggactgaaccttcagagtaagacgcagcggtcccttaccgctgaatacgaaattcccagcgtgcgtgaaagtgacgctgaacaatactactgtgtcgctgagaacggctatgggccaagtcccagcggactggtgagcatcaccgtgaggatcccggtgagtcggcctatcctgatgttgagagccccacgagcacaggctgccgtggaggacgtccttgagctccactgcgaggcattgagaggctcgcccccaattttatattggttttaccacgaggacattacactgggatcaagaagcgcgcctagcggtggcggagcatcgttcaacttatcccttaccgaagagcactccggcaactattcctgtgaggccaacaacggattaggagcccagaggtcagaagcagtcacactgaatttcactggtaggagaagcgcacgcgatcccctcaggagtttacccagtccactccctcaagagtttacctatctaaacagccctacccctggacaattgcagccaatctacgaaaacgagccgcgagagcagagcgtcgccgtgcacggcaggcaacagcacagttccgaacaaaaggctcagaagccatggggccacatctggaggactaggttcccgtag

SEQ ID NO: 223116 - DNA, 1290 bp, synthetic construct
  misc_feature 1..1290: note = Description of Artificial Sequence: Synthetic coding sequence
  source 1..1290: mol_type = other DNA
atgctgccaagactcctgctgctgatttgtgcacccctctgcgagcccgctgagttgtttttaatcgcatcaccttctcaccccacggagggctctccagtaaccctgacttgtaaaatgccattcttgcaaagcagtgatgcccaatttcagttctgcttcttccgcgacactagagcattagggcctggctggtcctcctccccgaagttgcagatcgcagccatgtggaaagaggatacaggcagttactggtgtgaagcccaaaccatggcaagcaaagtcctgagatcaagacggtcccagatcaatgtgcatagagtacccgtcgcggacgtatcactggagacccagccccctggtggccaggtcatggagggagatagacttgtcctgatttgtagcgtcgctatgggcacaggcgatattacatttctttggtacaaaggggcagttggactgaacctccagagcaagacgcagcgctccctgactgccgaatatgaaatcccctcagtccgtgagagcgatgccgaacagtactactgtgtggctgaaaatgggtacgggcctagtccctctggcttggttagtataaccgtaaggatacctgtgtcccggccaattctaatgttgagggcccctcgcgcacaagccgcagtggaagatgtattggagctgcactgtgaggccctaaggggctcccctccaatcctttactggttctaccatgaagacattacacttggcagtagatctgctccaagcgggggtggggcatcctttaatctgagtcttacggaggagcactctggaaattactcgtgcgaggcgaataacgggctgggcgcacaaagaagtgaggcagtaaccctgaattttacagttcctaccggtgcgagatctaaccatctgacaagtggagtgatcgaagggcttctgtctacactcggtcctgcaaccgtcgctctgctcttttgctacggtttgaagcggaagataggcagaagatccgctagggaccctcttaggagtctgccttctcccttgccacaggagtttacttatttgaactcacctactccaggccagctacagcccatctacgaaaatgtgaatgtagtttcgggtgatgaggtttattctctggcctactacaaccagccggaacaggagtcagttgccgctgaaactctcggaactcatatggaagataaggtgtccctggatatatactcaagacttaggaaggcgaatatcactgatgtggactacgaggatgcaatgtag

SEQ ID NO: 223117 - DNA, 1287 bp, synthetic construct
  misc_feature 1..1287: note = Description of Artificial Sequence: Synthetic coding sequence
  source 1..1287: mol_type = other DNA
atgctacctcgtctcctccttctgatatgtgcccctctgtgcgagccggcagaactgtttttgatcgcctcacccagccatcccacagaaggctcccctgttacacttacttgcaaaatgcccttcctgcagtcctctgatgcccagttccagttctgttttttccgagatactcgagcgctgggccctggatggagcagctctcccaagctgcagattgctgctatgtggaaggaagacaccgggtcctattggtgcgaggcacaaacaatggcctctaaagtgctgcgttcgcggcgatcccagatcaatgtgcacagagtccccgtggcggacgtgagtctggagacgcagccccctggcggacaggtaatggaaggcgatcggctggtcctgatttgctctgtggctatgggcaccggcgacatcacttttctgtggtacaagggggcagtgggcttgaatctccagagtaagacccaacggtccctcactgctgagtatgagatcccctcagtgagggagagtgacgcagagcagtattactgcgtggctgaaaacggctacggtccgagccccagtggcctggtgtcgattactgtcaggattcctgtcagtagacccattctgatgctgagagctccgagagcccaagcagccgtggaggacgtattggaactgcactgtgaggcactccggggtagccctccaatcctctactggttctatcacgaggacattacacttgggtcaaggtctgcacctagtggcggaggggcaagtttcaacctcagtcttaccgaagaacactctggtaattacagctgcgaagctaataacggcctgggcgcacagaggagcgaggccgttaccttgaattttacagtccccacaggagcgagatctaatcacctgacttctggggtgatagaaggtctcttgtctacgctggggcctgctaccgttgccctgctcttctgctatggcctcaagcgcaagatcgggaggcggtccgcccgtgatcctctgagaagcttgccaagcccgctgccccaggaatttacctatctcaacagtcctacaccagggcaactgcaaccaatctacgaaaatgtcaacgtggtttcaggggatgaggtctactctttagcttactacaatcaaccggagcaggaatccgtagctgaaacattgggaactcatatggaagacaaggtgtctttagatatttatagccggttacgaaaggctaatatcactgatgttgactatgaggacgccatgtag

SEQ ID NO: 223118 - DNA, 2670 bp, synthetic construct
  misc_feature 1..2670: note = Description of Artificial Sequence: Synthetic coding sequence
  source 1..2670: mol_type = other DNA
atgtcatactttggagagcatttctggggagagaagaaccacggtttcgaggtgctgtatcatagtgtgaaacaggggccaatcagcaccaaagagctggctgactttatcagggagcgggcaaccattgaggaaacatattcgaaggccatggcaaaactgtctaaattggccagtaatggcacccctatgggtactttcgctcctctgtgggaagttttccgcgtgtctagtgacaaactggccttgtgtcatctggagctcaccagaaagttgcaggacctcatcaaggacgttctacggtacggagaggagcagctgaaaactcacaaaaaatgtaaagaagaggtggtgagtacactggacgcggtgcaggtgctttccggcgtgagtcagctactgcctaaatctcgagaaaattacctcaatcgctgcatggaccaggagcgtctacggcgagagagtacctcccagaaagagatggacaaggcagagactaaaaccaagaaagcggcagaatctctgcgtcgcagtgtcgagaagtataactcagccagagcagacttcgagcagaaaatgctggattctgccttgaggtttcaggccatggaagagacgcacctgagacacatgaaagctttgttagggagttatgcgcacagcgttgaagacacacacgtgcagattgggcaggtccacgaagagttcaaacaaaacatcgaaaacgtgtctgttgagatgctgcttcgaaaattcgcagaatccaaggggacaggacgggagaagcccggaccactggattttgaggcctattcagctgccgctctgcaggaagctatgaagagattgcgaggggctaaggctttccgactgcctggactgtcccgacgggaaagggagcccgaaccccctgcggcagtcgactttttggagccagactcagggacctgccccgaggtggacgaggaggggtttaccgtgcgccctgatgtcacccaaaattcaaccgccgagccttccaggttctcttcctcagatagcgattttgatgatgaggagccgaggaaattctacgtgcatattaagcccgctcctgcaagagctcccgcttgttccccagaggccgcagctgctcagctgcgagctaccgctggcagtctcatccttccgcctggaccagggggaacaatgaagaggcactcatccagagatgccgcaggcaagccccagcgccctcgtagcgcacccaggacttccagttgcgcagagcgtcttcaaagcgaggaacaggttagcaagaatctgtttgggccacctttggaaagcgccttcgatcacgaagacttcacaggctcctcttccctggggtttacctctagccctagtccattttcttcgtcttcgccagagaatgtggaagacagcggtctggactctccctcacacgccgcacccggaccttcccctgattcgtgggtgcccaggcccggtaccccacagtcgccaccttcttgtcgagctccacctcctgaagccagaggaatacgcgctcctccactgcctgactcaccacagccgttagcttcctctcccggaccttgggggttggaggccctggctggtggcgacttgatgcccgctcctgcagatccaacagctagagaaggtctggccgcacccccacggagacttaggagcagaaaggtgtcctgcccgcttacacgttccaatggagacctatcccgtagcctcagcccatctcctctgggtagctcggccgcatcaacagcccttgagcggccatccttcttgtctcaaaccgggcatggcgtgtctcggggaccttcccctgtcgttttgggcagtcaggatgcccttcctattgcaaccgcctttactgaatatgttcatgcctatttcaggggacattcaccttcttgtctggccagagttactggcgaactgactatgacctttcccgcaggaatcgttcgagtgttcagcggcacccctccaccacccgtgctgtcctttcgcctggtgcacacaactgcgatagaacattttcagcctaatgccgatttactattttcagatccttctcagtctgatccggagacaaaggacttctggcttaatatggccgcactgaccgaggcattgcagcggcaggccgagcagaacccgacggcatcctattacaatgtggtgcttctgcggtatcagttcagccgtcctggtccacagtccgtgcccctgcagttgtcagcacattggcagtgcggggctacactgacgcaagtgtctgttgaatatggttaccgccctggagctacagccgtgcccaccccacttacaaatgtccagattctgttgcccgtcggcgaaccagttaccaacgtgcgactccagcctgctgccacctggaatctagaggaaaaaaggctgacttggagacttcctgatgtgagtgaagctggagggtctggacgtctcagcgcctcgtgggaaccactaagcggcccaagcacaccttctcctgttgccgctcagtttacctctgagggtacaacactgagcggggtggacctggaattagtgggcagcggctacaggatgtcgctggtaaagaggcgctttgcaactggtatgtatctggtctcctgctag

SEQ ID NO: 223119 - DNA, 2670 bp, synthetic construct
  misc_feature 1..2670: note = Description of Artificial Sequence: Synthetic coding sequence
  source 1..2670: mol_type = other DNA
atgtcatactttggagagcacttctggggtgagaagaaccatggcttcgaggtgctctaccactccgtgaagcaggggccaatatctacaaaagagctagccgacttcatacgcgagagggctacaattgaggaaacttatagtaaagcgatggctaagctatctaagctcgcctcaaacggtacacctatggggactttcgctcccctctgggaggtttttcgcgtttcatccgacaagctggctctctgtcacctagagcttacacggaaactccaggatttaattaaggatgttcttcgttatggggaagaacagctgaaaacccacaagaaatgtaaagaagaagtggtgtccaccctggatgccgtgcaagttttgtccggcgtatcccagctcctgcccaagtctcgggaaaactatcttaatcggtgcatggatcaggagcggttgcgccgagagagcacctctcagaaggagatggataaggccgagacaaagactaagaaggctgccgaatcattgaggcgcagcgtggagaaatacaatagcgcaagagcagatttcgaacagaagatgttagatagcgcactccgattccaggcaatggaagaaacccaccttcgccacatgaaggccctgttaggctcctacgcccattctgtcgaggatacacatgtgcaaattggccaagtgcacgaggaattcaagcagaatattgaaaacgtgtccgtggagatgcttcttcgaaagttcgctgagagcaaaggtacaggtcgcgagaaacctggccctctcgacttcgaagcctacagcgcagcggcattacaggaggccatgaaacgacttcgcggagccaaggcctttcggctgccaggactttcacggagggagagggagccagagcccccagctgccgttgatttcctggaacccgacagcggtacttgccctgaggtagacgaggaggggttcacagtgcggcctgatgtgactcaaaacagtaccgcagagccgagcaggttttcctcgtccgactctgatttcgatgatgaggagccgcgtaaattttacgtgcacatcaagccggctccagccagagccccagcatgttcccccgaagccgctgctgcccagctgcgggcaactgcagggagcctgattctgcctcctggacccggtggcaccatgaagcggcacagtagccgcgatgctgcagggaaaccacagagaccacggtctgccccacggacatctagctgcgctgagaggctgcagtccgaagaacaggtatccaagaacctgtttggtccaccactcgaatcagctttcgatcacgaggactttactggcagctcctctttaggatttacaagcagcccttcgccattcagcagctccagcccagagaacgtggaagattcaggcctggatagcccttctcatgcagctcccggaccttctcccgacagctgggtgccacggcctggaactccacagagcccaccctcctgccgcgctcctcctcctgaggctcggggtatccgtgcacctcctctgccagactctccccagcccttggcctcatctcctggtccatgggggctcgaagccctggccggaggcgacctgatgcctgctcctgctgaccctaccgcgagagaaggactcgcagcgccacctcgtaggcttagaagccgaaaggtgtcctgccctctgacccgctccaacggtgatctgagtaggtccttgagcccatctccgctcggatcgtccgcagcaagcaccgcactagaacgcccaagtttcctgtctcaaaccggccacggagtgtctagagggcctagccctgtggttttgggctcgcaggacgctttgccgatagctaccgcttttactgagtacgtgcatgcctactttcgcggacattctccatcgtgtctagcgcgtgtgaccggagagctcactatgacatttcccgctggtattgtaagagtcttttcaggtacaccacccccaccggtactctcctttagactggtgcacaccacggccattgagcactttcagcccaacgcagatttattattctccgaccccagccagagcgatccagagaccaaagacttctggctcaacatggcggctctaacagaggctttgcagagacaagccgagcagaatcccacagcaagctattacaacgtagtgctccttcgttatcagttcagtcgaccaggcccacaaagtgtccctctccagttgagtgcccactggcaatgcggggcaactctgacccaggtctctgtcgagtatggatacagaccaggggctacggcagtccccactcctctcaccaacgtgcagattttgttaccggttggcgagcctgtgacaaacgttaggctccagcccgctgctacttggaatctcgaggagaaaaggctgacttggcgactgccagatgtgtctgaagcaggaggctctggacgcctgagcgcctcctgggaacctttgagcggcccatctactccttctcctgtggctgctcaatttacctcagaaggaacaaccctgtccggagttgacttagagttagtgggatctggctaccggatgagtctggttaagcgtcgctttgccacaggcatgtatttggtcagttgttag

SEQ ID NO: 223120 - DNA, 2670 bp, synthetic construct
  misc_feature 1..2670: note = Description of Artificial Sequence: Synthetic coding sequence
  source 1..2670: mol_type = other DNA
atgagctactttggggagcacttttggggggagaaaaatcacggatttgaggtactgtatcattctgtcaaacaagggccaatctctacgaaggagcttgcagattttattagggagcgcgcaacaatcgaggagacctactcgaaagcaatggccaagctgtccaagctggccagcaatggtacacccatgggcacatttgctcctttgtgggaagtcttccgggtttcttccgacaagctggccctgtgtcacctcgaactaacacgtaagttacaagacttaattaaggatgttttaagatacggggaggagcagctgaagacacacaaaaagtgcaaagaggaagtggtcagcacacttgatgccgttcaggtgctgagtggcgtctcccagctactgccgaagtccagagagaactatctcaacaggtgcatggatcaagagagactgcggagagagagcacttctcagaaggagatggataaggctgaaaccaagacgaagaaggcagccgagagcctgcgaagaagcgtggagaaatataatagtgcacgcgctgactttgagcagaagatgttggactccgccctgaggttccaggccatggaggagacacacctcaggcacatgaaggctctgctgggatcgtatgctcacagcgtcgaagacacacacgtgcaaattggacaagtgcacgaggagttcaaacaaaatatcgagaacgtctccgtcgagatgctgcttagaaaattcgccgaatccaaaggcaccggtcgggagaagcccggtccacttgatttcgaggcatacagcgccgctgctctgcaggaggctatgaagcgactgaggggggcaaaagccttccgtctgcctggactgtcgagaagggagcgggagccagagccacccgctgctgtcgactttttggaacccgacagcggcacctgcccagaagtggacgaggagggcttcactgtccgcccagacgtgacacagaacagcaccgctgaacccagcaggttctcgtcgtccgactccgatttcgatgatgaagaaccgaggaagttttacgtccacatcaagcctgctccagccagggcaccagcatgtagtccggaggccgctgcagctcagcttcgagccacggcaggctcactgattctgccacctgggccaggcggaaccatgaagcgccactcctctagggacgctgccggtaaaccacaaaggccacgaagtgcccctcgcaccagctcctgcgctgagcggctgcagtccgaggagcaagtttccaaaaacctattcgggccacccttagagagtgcctttgaccacgaagatttcacaggcagctcatccttaggctttaccagctctcccagtccgttctctagcagcagccctgagaacgtggaagattctggcttagactccccctcacacgctgcaccgggaccttcaccagatagctgggtgccacggcctggcaccccacaatcgcccccatcgtgtcgggctcctccccctgaagccagaggaatccgggcacccccactgcctgattctccgcaaccactcgccagttcaccaggaccctggggccttgaagctctggctggtggcgatctgatgcccgctcctgctgaccctacggcgagagagggtctggccgctccaccgagaagactccggagtcgaaaggtctcatgtcccctaacacgcagtaacggggacctgtctcgctccttatccccttctccgctgggatcctccgcggcttcaacagcactagaaagaccgagctttctgtcacagacaggccacggtgtgtccagaggcccttctcccgtggtcctgggctcgcaagatgctcttcccattgcgacagctttcactgagtacgtgcacgcctactttcgaggccacagtccatcttgtttggccagagtgaccggcgagctgaccatgaccttccccgctgggatcgtgcgcgttttcagtggcacaccgcctccaccagtactgtcatttcgccttgtccacacgactgctattgaacattttcagcctaatgcggacttattgttcagcgacccttcacagtccgatcccgaaacaaaggacttttggctaaacatggcagccttgacggaggcactccagagacaagcggagcaaaacccaacagccagttactacaatgttgtgctcctgcgatatcagttttcacggcctgggccacagtccgtcccccttcagctgtcagcccattggcagtgcggggctaccctcacacaagtctccgttgaatatgggtataggccgggagccacagccgtcccaactcccctgactaacgtccagatcctcttaccagtaggtgagcctgtgacgaacgtgaggcttcagcccgcagctacatggaatctggaggaaaaaagactcacctggaggcttccagatgtcagcgaagccggagggtccggtaggctgagcgcctcttgggagccgctgtctggcccatccaccccctcccctgtcgcagcccagtttacatccgagggaactaccctgtcgggagtagatcttgagttggttggcagcggctaccggatgagtcttgtaaaacggagattcgccactggtatgtatctggtgtcctgttag

SEQ ID NO: 223121 - DNA, 2676 bp, synthetic construct
  misc_feature 1..2676: note = Description of Artificial Sequence: Synthetic coding sequence
  source 1..2676: mol_type = other DNA
atgagctattttggagagcatttctggggcgagaaaaatcacggattcgaggtcctctaccactctgtcaagcaggggccaatttcaacgaaggaactggcagacttcatacgtgagcgagctaccatcgaggagacctacagcaaggctatggcaaagctctcgaagctcgcctctaatggcactccgatgggcacgttcgcccctctgtgggaagtgttccgggtcagttccgacaaactggccctgtgtcacctcgaactgaccagaaagctgcaggacctcataaaggatgtgttgaggtacggagaagagcaattgaaaacccataagaaatgcaaagaagaggtcgtctctaccctggatgcggttcaggttctatctggagtgtcgcaacttctaccgaagtccagagagaactaccttaaccgatgtatggatcaagagcggctgaggcgtgagtcaacctcccaaaaagagatggacaaggccgaaacgaagacaaaaaaggccgcagaatcactgcgtcgatcagttgagaagtataactctgctagggctgactttgaacagaagatgcttgacagcgcccttcgattccaggccatggaagagacgcatctccggcacatgaaggccctcctgggaagctacgcacacagcgtggaagatacccacgtgcagattgggcaggtacacgaagagttcaaacagaacattgaaaacgtctctgtggaaatgcttctcagaaaattcgcagagagcaaaggaacagggagggagaagcctggtccccttgatttcgaagcctattctgcggctgccctacaggaggccatgaaacggctacgtggcgctaaagcttttcggctgccaggactttcccggcgtgaacgggagccagagccgccagccgctgtggacttcctcgagcccgattcaggcacgtgtcccgaggttgatgaggagggttttaccgtgagaccagatgtgacacagaatagtactgcggaaccctcaagattcagctcaagtgactctgactttgatgatgaggaacctaggaagttttatgttcatatcaagcccgctcccgctagagctcctgcttgtagcccagaagccgctgctgcccagctccgggctacagccggttctctgatcctccctcccggtccgggaggaaccatgaagcgccattctagtagagacgctgcgggtaaaccgcaaaggcccaggtcagctccccgaaccagtagttgtgcagagagacttcagtcagaagagcaggtgagtaagaacttatttgggcctccactggagtcagcattcgaccatgaagactttaccggttcaagtagtctgggattcacatctagcccctccccctttagctcttccagtccagagaacgttgaagacagtggcctcgattctccgtcccatgctgcacccggaccatcccccgatagttgggtgcctagaccagggacaccacagtcacccccttcatgcagagcacctcctcccgaggcacgaggaatcagggcgcctcccctgcctgattccccgcagccattagcttccagccctgggccatggggactggaggccctggccggaggcgacctgatgcctgcaccagccgaccccaccgcccgtgaggggctggcggctcctccaagaaggctgaggagtcggaaagtgtcttgtccactgactcgaagcaacggcgatctgtctcgctccctgtccccctctccattagggtcctctgccgcatcgacggccttggaacgtccatccttccttagtcaaacgggtcatggagtgtcgcgcggaccatctcccgtcgtgcttggatctcaagatgctctgcccatcgccactgcctttaccgaatacgtacacgcgtacttccggggtcactctccttcctgcttggcaagggtcacaggtgaattgaccatgaccttcccagccggtatcgtgagggttttttctggaaccccccctccccctgtgctgtcatttagactggtgcatacgaccgcgatcgagcactttcaacccaatgcagacctcctttttagtgacccaagccagagtgatcccgagacaaaagatttttggttaaatatggctgcattaaccgaagccttgcagcgtcaagccgaacagaatcctacagcgtcgtactataacgtcgttcttttgcgctatcagttttcccgacctggaccccagagtgttcctctgcagttatccgctcattggcagtgtggggcaacattaacgcaagtttctgttgagtacgggtacagacctggtgccacagccgttcctacccccctgacaaatgtacagatcctgctgcccgtcggcgaacctgttaccaacgtccgcctccaacctgccgcaacttggaatttggaagagaaaagactcacatggcggctcccagacgtgagcgaggctggaggttccggcagactttctgctagttgggaaccgctcagtgggccaagcactccttcccccgtggcggcacaatttacatccgaaggaacaacacttagtggcgtcgacctggagctggtggggagtggatacagaatgtccctggtgaaaagaaggtttgccaccgccgcaccaccccaggggtgtacttggtag

SEQ ID NO: 223122 - DNA, 2520 bp, synthetic construct
  misc_feature 1..2520: note = Description of Artificial Sequence: Synthetic coding sequence
  source 1..2520: mol_type = other DNA
atggcaaagctgagtaaacttgctagcaatggtacccccatgggcacttttgcacccctgtgggaagtgttcagggtctctagtgacaaattagccctgtgtcacctcgaactcactaggaagctccaggatctaattaaggacgtgctccgttacggcgaggagcagctgaagacccacaaaaagtgtaaagaagaggttgtgagtaccctagacgcagtacaggtgctgtcgggagtcagccagctactgccgaaatccagggaaaactacttgaaccggtgtatggaccaagagagactccgacgggaatcaactagccagaaagaaatggacaaggcagagaccaagacaaaaaaagccgctgagtcgctgagaaggagtgtagaaaagtataactccgccagagcagactttgaacagaagatgctcgacagtgccctgcgattccaggccatggaggaaactcatctcagacatatgaaggcgctcctcggcagctacgcacacagcgtcgaggacacacacgtgcagatcgggcaggtgcacgaagagttcaagcagaacatcgaaaacgtctccgtcgaaatgctgctgagaaaatttgctgagagcaaaggcacaggacgggagaagcctgggcctctagacttcgaggcctactcggccgctgctctccaggaagcaatgaaacgactccgcggagccaaggcattcagattgcctggccttagcagacgggagagagagcccgagcctcctgccgctgtggactttctggaacctgacagtggaacttgtccggaagtggacgaggaggggtttacagttcgccctgatgtgacgcagaatagtacggcagaaccgagcaggttctctagctccgactccgattttgatgacgaagaaccaaggaagttttacgttcacattaagccagctccagcacgcgcacctgcgtgctcgccggaggctgccgcagctcagttgagagctactgccggttctctcattctgccaccgggtccaggaggaaccatgaagcggcactcatctagggacgctgcaggaaagccacagcggccacgatcagccccacgtacctcctcatgtgcagaacgactccaatcggaagaacaagttagtaagaatctctttggaccgcctctggagagtgcatttgatcacgaagactttaccggatcttctagccttgggtttacttctagcccttcaccattttctagctcctctcctgagaacgtggaggattctggactggactcgccaagccatgctgctcccggtcctagtccggatagctgggtgcctcgccctggaactccccagtctccaccaagttgcagggcccctcccccagaagcgcgaggtatccgtgccccaccactgcctgatagccctcagcctctggcgtcatcccccggaccctggggcctggaggcactggccggtggtgatctgatgcccgcacccgcagatcccacagcacgcgagggactggccgcaccacccagacgtttgaggtcaagaaaagtatcatgcccactgactagatcaaatggtgacctttcccggtcactgagtccgtcccccctggggagctctgccgcttcaacggccttggagcgaccctccttcctgagccagaccggacacggcgtgagccgcggaccaagcccagtcgtccttggctctcaggacgccctgcctatcgccacagccttcactgagtatgttcatgcctattttagaggccattctccatcctgtctggcacgtgttactggagagctgacaatgacttttcccgctggtatcgtgcgggtttttagcggtacacctccacccccagtgttgagttttcgactggtccataccacagccattgaacacttccaaccgaacgctgatttgttgtttagtgaccccagccagagcgacccggagaccaaagacttttggttaaacatggccgctttgactgaggcactccagaggcaggccgaacagaaccccactgcaagttactacaatgtcgtgctgctgagatatcagtttagtcggcctggccctcagagtgttcctttacagctgagcgcacattggcagtgcggcgcaaccctgactcaggtcagcgtggagtatgggtatcgccctggcgctacagctgtacccaccccattgaccaacgtgcagatcctcctgcccgtgggagaacctgtaacgaacgtccgcctgcaaccagctgctacctggaacctagaggaaaagaggttgacttggcgcctacccgacgtgtccgaagccggaggctccgggcgactctccgcttcatgggaaccgctaagtggaccctccacaccaagtcccgttgctgctcagttcacgagcgagggcactactctgagcggtgtggatttggagctggtggggtccggatatcgcatgtccctcgtgaagcgtcgttttgctacgggaatgtatctggtgtcttgctag

SEQ ID NO: 223123 - DNA, 2670 bp, synthetic construct
  misc_feature 1..2670: note = Description of Artificial Sequence: Synthetic coding sequence
  source 1..2670: mol_type = other DNA
atgtcctacttcggtgaacacttttggggagagaaaaaccatggattcgaagtgctgtaccattctgtgaagcaggggcctatctcaaccaaagagctagccgattttataagagaacgggctaccatcgaggagacttatagtaaagctatggccaaactgagcaagctggctagtaatggaacacccatgggcaccttcgccccactgtgggaagtttttagagtgtcttcagacaagctggccctatgccacctggaactgacccgcaagctgcaggacttgataaaggatgttttaaggtacggagaagaacagctcaaaactcacaagaagtgcaaggaggaagttgttagtacgttagatgctgtacaggtcttgagtggagtgtctcaactcttgccaaagtccagggagaattacctcaaccggtgcatggaccaggagcggctcaggcgggagtcaacgagccaaaaggagatggacaaagcagaaacgaaaaccaagaaggccgctgaaagcctgcgtcggtctgtggaaaagtataactccgccagagccgatttcgagcaaaagatgcttgacagtgccctgcggttccaagccatggaggaaacacacttgcgccacatgaaggccctgctgggatcctacgcccattcagtagaagacacccacgtccagatcggccaggtacacgaggagtttaaacagaacatcgaaaatgtttccgtcgaaatgttgctgcgcaaatttgccgagtctaagggaaccggcagggaaaagccagggccactcgatttcgaggcctattctgcagctgcccttcaggaggctatgaaaagactgaggggggcaaaggccttccgactcccagggttaagtcgacgcgaacgggagcccgagccccctgccgctgtggactttctagagccggactccggcacttgccccgaggtggatgaggaaggatttactgtgcgaccagacgtgactcaaaattcaaccgcagaaccgtctaggttctcaagctctgattcggatttcgatgatgaggagcctcggaagttttacgtccacattaaacctgctcctgcccgagccccagcatgctcacccgaggccgctgctgctcagctgcgggctaccgccggatctctcatactgccccctggacctggcggtacgatgaagcggcacagttccagggacgctgccggtaagccacaacgccctcgttccgccccacgaacctcatcctgtgccgagcgcctgcagagcgaggaacaggtaagcaaaaatttgttcggtccccctctggagagcgccttcgaccacgaagatttcactggcagctcctctcttgggttcactagctcccctagtcccttttcctcttccagtccagaaaacgtcgaggattccgggcttgactccccctctcatgccgctccagggccatctccagactcatgggttccaagacccggaacccctcagtccccaccctcttgtcgcgctccaccccctgaggccagaggtatacgcgctcccccactgcctgattccccacagccacttgcgtcctcacctgggccttgggggttagaggctctggccggaggtgacttgatgcccgctccagctgacccaaccgcacgcgagggtttggccgctccaccacgacgcttgcgcagcaggaaagtcagctgccctctgacccgttccaatggtgatcttagccggtccttgtccccttctcctctcggctccagcgcggcaagtaccgccttggagcgaccctcttttctaagtcagacagggcacggcgtgtcacgagggccttctcccgtagtcttgggttcccaagacgcactccccatcgcaacggcgtttacagagtacgtccacgcctactttcggggacacagccccagctgtctcgcacgggtcactggagagctcacaatgactttcccggctgggattgttcgcgtgttcagcggcacgccccctcccccagtgctgtcattcaggctcgtacacaccaccgctatcgaacacttccaacccaatgccgacctgctgtttagtgacccatcacaatctgatcccgagaccaaagacttctggttgaacatggctgcattgaccgaggccctgcaacgacaggccgagcagaaccccacggcttcctactacaatgtggtccttctgaggtatcagtttagcagaccgggaccacagtccgtgcctcttcagcttagcgcacactggcaatgtggagccaccttgacacaggtgtctgttgaatatggctatcgtcccggagcgactgcagttcctacgccactgactaatgtgcagattctgctgcctgtcggcgagcccgttacgaacgtgaggctccagccagcagcgacctggaatctagaagagaagcgactgacatggagactgccggatgtgtcagaagccggaggctccggccgactgtcggcctcttgggagccactaagcggaccttctacacccagccccgtggcggctcaattcacctctgagggaacgaccctctccggcgtggacctggagctggttgggtctgggtaccgtatgtcactcgtgaagagaagattcgccacagggatgtacctggtgtcttgttag

SEQ ID NO: 223124 - DNA, 2670 bp, synthetic construct
  misc_feature 1..2670: note = Description of Artificial Sequence: Synthetic coding sequence
  source 1..2670: mol_type = other DNA
atgtcctacttcggggagcacttctggggagagaagaatcacgggttcgaggtactctaccatagcgttaagcaggggccaatcagtaccaaggaactcgcggattttataagggagcgcgctacaatcgaggagacgtattccaaagcaatggcaaagcttagcaaactcgcatctaacggaaccccgatgggaacttttgctcctctgtgggaggttttcagggtgtcctcagataagttggccctctgccacttggaattaacgagaaaactgcaggacctgattaaggacgtgttacgttatggtgaggagcagcttaaaactcacaaaaagtgcaaggaagaggtcgtctccacactggacgctgtgcaagttctgtctggggtgtcacagctcttacctaaatctcgggagaattatctgaatagatgcatggatcaggagagactgagaagggaatctacatcacaaaaggagatggataaagccgaaaccaagaccaagaaggctgccgagtcacttagaagatcggtggagaagtataattctgccagggccgatttcgagcagaagatgctcgacagcgccctacggtttcaggcgatggaagagacacacctacggcatatgaaggcactgttgggcagctacgctcacagcgtggaagatacccacgttcagattggtcaggtacacgaggagtttaagcagaacatagagaatgtatccgtcgagatgctgctgcggaaatttgcagaatccaagggcacaggcagagaaaaacccggaccactcgacttcgaggcttactctgctgccgctctccaagaggctatgaagagactacgtggggctaaagctttccggctgcctgggctctcccggcgagaaagggagcctgaaccgccagcggcagtggactttctggagcccgactcagggacatgtcccgaagtagacgaggaagggttcaccgtacgtcctgacgtcacacagaattcgaccgccgagccatccaggttttccagtagcgatagcgattttgacgatgaagaaccccgtaagttttatgtacacattaaaccagcaccagcgagagcaccagcttgttcccctgaagcagccgcagctcagctgagggctactgcaggatccctcatactgccacctggcccaggcggaacgatgaagagacatagtagccgagacgccgctgggaaaccccagcgcccacgcagcgcacctcgcacaagttcctgcgcagagagactccagtctgaagaacaggtgtccaaaaacctgtttggcccacccctggagagcgccttcgatcacgaagatttcacagggagctcttctctggggttcacttccagcccaagcccattctccagcagcagccccgagaatgtggaggactctggtttagacagccctagtcacgctgccccaggcccttcccccgattcctgggtgccccgtcctggtacaccccagagcccccctagttgcagggcacctcctccagaagccagaggcatccgggctccacccctgcccgattctcctcaaccactggccagttccccagggccatggggactcgaagcgttggccggaggagaccttatgcccgcaccagccgaccccacagcgagagagggactggcggctcccccaagacgcctgagatcccggaaggttagctgccctttaacccggtctaacggtgatcttagtagatcactgtcccccagtccgttgggtagttcagccgctagtaccgcactggagcgacctagttttttgagtcagaccggacacggcgtttcacgaggcccttctcctgttgtcctgggcagccaggatgccctgcctatcgctacggcctttacggaatacgttcatgcgtacttccgaggtcatagccccagctgcctcgctagggtgactggggagctaactatgacattccccgcaggaatcgtccgggtgttcagtggaacaccacctccccctgtgctcagcttccgactggtgcacactacagctattgaacatttccagccgaatgccgaccttcttttctctgacccaagccagagcgacccagagaccaaggacttttggctcaacatggctgctctaaccgaggcattacagcgccaggcagagcagaatcccaccgcctcgtattataacgtggtgctgctgcggtatcaattctcaaggccgggaccccagagcgtgccgttgcagctatccgctcactggcaatgcggcgcaacacttacacaagtcagtgtagagtacgggtatagacccggtgccactgcagtcccaaccccactgaccaatgttcaaattctgctgccagttggagaaccggtaactaacgtaagactccagcccgctgcgacatggaacttggaagagaaacggctgacatggaggttgccagatgtgtccgaagctggtggaagtggaagactttctgcctcatgggagcccttaagcggcccatctacaccgagtccagttgccgctcagtttacaagcgaaggcactacactcagcggagtggatctggaactagtgggctcgggctacagaatgtctctggttaaaagaagatttgctaccgggatgtacctagtcagctgctag

SEQ ID NO: 223125 - DNA, 1137 bp, synthetic construct
  misc_feature 1..1137: note = Description of Artificial Sequence: Synthetic coding sequence
  source 1..1137: mol_type = other DNA
atggtaatggcatatttcgtagaaaacttctggggagagaaaaactctggtttcgacgtcctttaccacaacatgaagcacggtcagatctctactaaggaactggctgattttgtaagggaacgggcaaccatcgaagaggcgtactctcgtagcatgacaaagctcgctaaatccgcatctaactattcacagctgggcactttcgccccagtgtgggacgtctttaagacctcaaccgagaagctggccaactgccatcttgatcttgtgaggaaactgcaggaactgatcaaggaggtgcagaagtatggggaggaacaggtgaagagccacaaaaagacaaaggaagaagttgcaggaaccttggaggctgttcaaacaatccagagtatcacccaggcactgcagaaatctaaggagaattacaacgccaagtgcgtagagcaggagcgtctgaaaaaagaaggcgctactcaacgtgaaatagagaaagccgctgtcaagtctaagaaggcaactgatacctacaagctctacgtggagaagtacgccttggctaaggcggattttgaacaaaagatgacggaaaccgctcagaaattccaagatatcgaggagacgcacctcatacatatcaaggagattatcggaagtctgagtaatgcgatcaaggagattcatttgcagatcgggcaggtccatgaggagtttattaacaacatggcaaatactacagtagagtccctgatccagaagtttgctgagtcaaaggggactggcaaggagagaccagggctaatcgaatttgaggaatgtgatactgcatccgccgtggagggcattaaacccagaaaacgtaagacgtttgcgctgcccggtattataaagaaagagaaagatgcagagtccgtgtggtcttttacagtggttgcccaggtaggcatgcagtggcgcgacctgggtttactccattcacctccacccagattcaaacgtttttcatcctatttgtcattgcctagcagctggaactacggggctcaccaccacatttggctcatcttctgcatcttctcaagagacagagtgtccccatactggccgggatggtctcgaacacctgatctcagatag

SEQ ID NO: 223126 - DNA, 2433 bp, synthetic construct
  misc_feature 1..2433: note = Description of Artificial Sequence: Synthetic coding sequence
  source 1..2433: mol_type = other DNA
atggtgatggcctacttcgtcgagaacttctggggcgaaaagaacagcggcttcgacgtgctgtatcataacatgaagcacggccagataagcaccaaggaactggcagactttgtgcgcgaaagggcaacgattgaggaagcttactcccggtcaatgactaagctggcaaagtctgctagcaactattcacagctgggcacctttgctcctgtttgggacgtattcaagactagcaccgaaaagcttgctaattgccacctagacctcgtgcggaaactgcaggagctgattaaagaggtgcagaaatacggagaggaacaagtgaagtcacataagaagacaaaagaagaagtggccggaaccctcgaggccgtccagactattcagagtatcacacaagccctccagaagagcaaagaaaattacaacgctaagtgcgttgaacaggagaggttgaagaaggagggggcaacgcagcgggaaatcgaaaaggccgcagtgaaatctaaaaaggctacagatacttataaactctacgtggagaaatacgctctggcgaaagctgattttgagcagaagatgactgagaccgctcagaagttccaggatatcgaggagacacatctgatacacatcaaggaaatcatcggtagcctaagcaatgcgatcaaagaaatacacctgcaaatcggccaagtgcacgaagagttcatcaacaatatggccaataccactgtggagtcactcattcagaagttcgccgaatccaaaggtaccggtaaagaaaggcctggtctgattgagttcgaagagtgtgacacggcctcagctgtggaaggcattaagcccaggaagagaaagacctttgcacttcccggtattattaaaaaagaaaaggacgcagaatccgtggaatgcccagacgcggattcgctgaacataccagacgtggacgaagaaggctactccatcaagcccgagaccaaccagaacgacactaaagaaaaccatttctattcgtcttctgactctgattccgaagacgaggaaccaaagaagtacagaatcgagattaagcctatgcacccaaataacagccaccatacgatggcttctctggacgagcttaaagtgtcgattggaaacatcactttgtctcctgccatttccgtttccactaacacacgcctcaaccgcaattttaatgacgaggaactcactaagagtaaaccatcagcacctccaaatgagaaggggacaagcgacttgctggcttgggatcccctgttcggcccatccctcgactccagcagctcgagttctctgacatcctcttccagcgcgagacctacgacacctctgagcgtgggaacaatcgtcccaccacctcggccagcatctcgaccaaaactgacctcaggtaaacttagcggcatcaatgaaatcccaagacccttttcgccgcctgtcacttcgaacacgagtcctccaccggcagccccactggccagggctgagtcctccagtagcatttcctcttccgccagcctgtccgccgcaaacacgcctaccgtgggggtcagcagaggtcctagccctgtgtcgctaggcaatcaggatactttgcccgtggcagtggccttaacagagagtgtgaacgcatactttaagggcgcagatcccacaaagtgcatcgtcaagatcacgggcgacatgactatgagcttccctagtgggataattaaagtcttcacaagcaacccgacacccgcagtgttatgtttcagagtcaagaacatctcccgcttggagcaaattttaccgaacgcacaacttgtattttctgacccaagccagtgcgatagcaacaccaaggacttttggatgaatatgcaggcggtgaccgtctacttgaaaaagctctccgaacagaatcctgccgcttcctattacaatgttgacgtcctgaagtatcaagtgtcatccaacggtatacaaagcactccccttaaccttgcaacttactggaagtgtagtgccagtactaccgatctcagggtggattacaaatacaatccagaagccatggtggctccaagtgtgctcagcaacatccaagtagtcgtcccagttgatggcggtgtcactaacatgcagtcactgccccctgccatttggaatgccgagcagatgaaggcattttggaaactcagcagtatttctgagaagagcgagaatggtggttcaggcagcctcagagctaaattcgatctcagtgaaggtccctccaaaccgacgaccctcgccgtccagttcctcagcgagggatccaccctgagtggagttgatttcgaactcgtggggaccggttaccgtctctcactcattaagaaaaggttcgctaccggtagatacctcgccgactgttag

SEQ ID NO: 223127 - DNA, 2433 bp, synthetic construct
  misc_feature 1..2433: note = Description of Artificial Sequence: Synthetic coding sequence
  source 1..2433: mol_type = other DNA
atggtgatggcatacttcgtggagaacttttggggcgagaagaacagcggcttcgacgttctgtatcacaatatgaaacatggtcagatcagcaccaaagagctcgctgatttcgttagagagagagcaaccattgaggaagcatacagccgaagcatgaccaagttagcaaagagtgctagtaattacagtcagttggggacatttgccccagtgtgggacgtatttaagaccagcaccgagaaactcgctaattgccatctggacctggtcaggaaattgcaggaactgataaaggaggttcaaaaatacggcgaggagcaggttaagtcgcataaaaaaacaaaagaggaagttgctgggacactggaggccgttcagaccattcagtcaatcacccaggctcttcagaagagcaaggaaaactataacgccaagtgtgtggagcaggaaagactgaagaaggaaggtgcaactcagcgagaaatcgaaaaggcagcagtgaaatctaagaaagctacagatacgtataagctgtatgtagagaaatacgcactggccaaagccgatttcgagcagaaaatgaccgagacggcccagaaattccaggacatcgaggagactcatctaatccatatcaaggaaatcattggatcgttatcgaacgcaatcaaggagatccatctccagattgggcaggtccacgaagagttcattaacaacatggctaacacaaccgtggaatcactcatccaaaagttcgccgaatccaagggtaccggtaaggagcgcccaggactgattgagttcgaagagtgtgatacagcaagtgctgtcgagggcattaaaccccgaaagagaaagaccttcgccctacctggaataatcaagaaggaaaaagacgcagagtctgtggagtgccctgacgccgactccctcaatatcccagatgttgatgaggaagggtactcaatcaaacccgaaaccaaccaaaatgacactaaagagaatcacttctactcttcaagtgacagtgatagcgaggacgaagaacccaagaagtatcgtattgagatcaaaccgatgcacccaaacaattctcaccatacgatggcatccttggacgagctgaaagtgtccattggcaatatcactttgtccccagccatttctcggcacagccctgtacagatgaaccggaacttatccaatgaggagcttactaaatctaagccaagcgcaccccctaatgagaaaggcacgtcagatctcctggcctgggacccgctgtttgggccatctcttgacagctccagctcctcctctcttacatcaagctcaagtgctcgtcctaccacacctttgtctgtcggaacgattgtgcccccacctcgccctgctagtcgacctaagctgactagcgggaagctctcaggcatcaatgagattcctcgccctttctcacctccggttacttctaacacttctcccccaccagccgcacccctggcacgcgcagagagtagttcatccatctcgtctagtgcgtcactcagcgcagccaacacaccaaccgtcggagtctcacgcggaccgtcccccgtctcacttggaaatcaggataccttacctgttgccgtagcgctgactgagtctgtgaatgcatacttcaaaggcgctgacccgaccaaatgcatcgtaaagatcaccggcgacatgaccatgtctttcccaagcggaataattaaggtcttcacaagcaatccaacacctgccgtcctgtgttttagggttaaaaacatttcacggcttgaacaaattctccctaatgctcagctcgtgttctccgacccttctcagtgcgatagcaataccaaagatttttggatgaatatgcaggcagtgactgtgtatctgaaaaagctgtcagagcaaaatcctgccgctagctattacaacgtggatgtcttgaaatatcaggtgagctccaatggcatccagagcactcctctcaacttagccacatattggaaatgttcagcatctactacagatctgcgggtcgattacaaatacaacccagaagctatggtggccccatccgtgctgtctaatatacaggtcgtagtacctgtggacgggggagtaaccaacatgcaaagcctgcctcctgcgatttggaatgctgagcaaatgaaggcgttctggaaactttcctcaatctctgagaagtccgaaaacgggggttccggttctctacgagccaaatttgatctgagtgagggtccttctaagccaaccacccttgcggttcagttcctgtcagaagggagcacattatcgggtgttgacttcgagcttgttggaaccgggtaccggctgtccctgatcaagaagaggttcgccaccggcagatatctcgccgactgttag

SEQ ID NO: 223128 - DNA, 2334 bp, synthetic construct
  misc_feature 1..2334: note = Description of Artificial Sequence: Synthetic coding sequence
  source 1..2334: mol_type = other DNA
atggtgatggcgtattttgtggaaaacttctggggagaaaaaaactcagggttcgatgtcctgtaccacaatatgaagcatggacaaataagtaccaaggagcttgccgattttgtacgagaacgggcaaccattgaggaggcctattccagatcaatgacaaaactcgctaagagcgcaagcaactacagccaactgggaacattcgctccagtgtgggacgtgtttaaaacatctaccgagaagctagctaactgtcatctggacctggtcaggaagctgcaggaactaataaaagaggtgcagaagtacggcgaggaacaggtaaagtcccataaaaaaaccaaggaggaagtggctggcacactggaagctgtgcagacgatccagtctattacccaagcactgcagaagtctaaagaaaattataacgccaagtgcgtcgagcaggagcggctgaaaaaagaaggcgctacacagcgagagattgaaaaggctgcagtgaaatcaaagaaggcaactgatacatacaaattgtatgttgagaagtatgctcttgctaaagctgacttcgaacagaaaatgaccgaaacagctcaggtacacgaagagttcatcaataatatggcaaatacgactgtggagtccctcatccagaagtttgccgaatctaaaggcacagggaaggagaggcctgggctgatcgagttcgaagagtgcgacacggcaagcgctgtggaaggcattaaaccgagaaagaggaagacatttgctctgcctgggattatcaagaaggaaaaagacgctgagtcagttgaatgtcctgacgctgactcactaaacatcccagacgtggacgaagaagggtactctatcaagccagagaccaaccaaaatgataccaaggaaaatcacttctattcctcgtctgacagcgactcagaagacgaagaacctaaaaaatatcgaatagagatcaagccgatgcacccaaataacagtcatcacaccatggcgtctctggacgaactgaaagtcagtataggaaatatcaccctgtctcctgcaatcagccggcacagtccagtgcagatgaacaggaatctttccaacgaggaacttactaaaagcaagccaagcgcccctccaaatgagaagggaaccagcgatctgctcgcatgggatcctctctttggtcccagcttggattcctccagctcttcgtccttgaccagctccagctctgctcggccaacaactcccctctccgtggggacaatcgtgccaccaccacgaccagcatcgcgcccaaagctaacaagcggaaagttgtcaggtattaatgagattccacggccatttagccccccagtgacaagcaatacatcgccaccacccgctgccccactggcacgcgcagaatcaagctccagcattagctcctccgctagcctctcagctgctaataccccgacagtgggagtctcaaggggaccttccccggtgtctctgggaaatcaggacacactgcctgtggcagtagctcttaccgaaagcgtgaatgcttacttcaagggggcagatcccaccaaatgtattgtgaagattacaggagacatgactatgagcttccctagtggcatcatcaaagtatttactagcaatcctacaccagctgtgctttgttttcgtgtcaagaatatcagtcgtctcgagcagatcctgcccaacgcccagctcgtcttttccgacccctcgcagtgcgactcaaataccaaggacttctggatgaatatgcaggcagtcacagtctacctgaagaagttgtctgaacagaatcccgctgcatcatactataacgttgatgtgctcaaatatcaggttagtagcaacgggatccaatctactccattaaacctggccacctactggaaatgtagtgcctcgaccaccgacctgcgggtggactataaatacaaccctgaagctatggtagctcccagcgtcctctctaatatccaggtggtggtcccagtggacggaggcgtgactaatatgcagtctctccctccagctatctggaacgccgagcaaatgaaggccttttggaaattaagctctattagcgagaagagtgagaatggcggatccggaagcctcagggctaagtttgacctgagcgagggcccatccaaacctactacactggccgtgcagttcctcagcgagggttctactctgagcggagttgacttcgagctggtcggtacggggtatcgcctcagcctgataaagaaacgctttgcgacagggaggtacctcgcagactgttag

SEQ ID NO: 223129 - DNA, 1668 bp, synthetic construct
  misc_feature 1..1668: note = Description of Artificial Sequence: Synthetic coding sequence
  source 1..1668: mol_type = other DNA
atggctcgccctgacgacgaggagggagccgctgtcgctccgggacaccccttggccaaaggttatttgcccttgcctcgcggagcacctgtgggcaaagaatccgtggagttgcagaatggacctaaggcaggaacctttcccgttaatggcgcaccccgagactccctcgcagctgcctccggcgtcctcggaggccctcagaccccccttgccccagaggaagagacccaggcgagactcctccccgctggggctggcgctgaaactcccggtgctgaatcctctccgttgccgctgaccgctctctcccctaggcgctttgtggttttgctgattttttctctatactccctcgtaaatgcattccagtggattcagtactccatcatttccaatgtcttcgaaggcttctatggcgtgacacttctgcacatcgactggttatctatggtgtacatgttggcttatgttcctctgattttccccgctacttggcttctggatactcgaggtcttaggctcaccgcgctcctgggctccggcctcaactgcctgggagcctggatcaaatgtgggtccgtgcagcaacatctgttctgggtgacaatgctgggacaatgcctgtgtagcgttgcacaggtgttcatcctcggcctgccaagccgcatcgctagcgtctggtttggacctaaagaagtgagcactgcatgcgctacagccgtattgggcaaccaactgggcaccgctgttggttttcttctgccccctgtgctggtgccaaacacccagaatgatacaaatctattggcctgtaatatctccactatgttctatggcaccagtgccgtcgcaaccctgctcttcattctgactgccatcgctttcaaggagaaaccacgttatcctccttcgcaggctcaggccgctctgcaggattccccccctgaggagtatagctacaaaaaaagcatccggaacctcttcaagaacataccatttgtgctgctcttgatcacatacgggataatgactggtgctttctactccgttagtaccctattaaaccaaatgatcctcacgtactatgagggagaggaagtgaatgcgggacggatcggtttaacattagtcgtcgccggtatggtcggaagcattctttgtggcctgtggctcgactatactaagacatataagcagacgaccctgattgtgtatatattgagctttatcggcatggtcatatttacatttaccctggatctgaggtacatcatcattgtgttcgttactggcggtgtgctcggcttttttatgacgggatacttgcctctgggctttgaattcgcagtggagattacctaccctgagagcgagggaacttctagcggacttctcaatgcctctgcgcaaatcttcggcatactttttactttagctcaaggcaagctgacctccgattatgggccaaaagctggaaacatttttctatgtgtgtggatgttcatcggcattatcttgaccgccctgatcaaaagcgacctccgtaggcataatattaacattggaataacaaatgtagacgtgaaagcgattcctgcggactcccctacagaccaggaacccaagaccgtgatgctgtctaaacagtccgagagtgcaatctag

SEQ ID NO: 223130 - DNA, 2469 bp, synthetic construct
  misc_feature 1..2469: note = Description of Artificial Sequence: Synthetic coding sequence
  source 1..2469: mol_type = other DNA
atgggctttggctcagatctgaagaattcccatgaagccgtgctcaaactgcaggactgggaacttcgcctgctagagactgttaaaaaattcatggccctgcgcataaaaagtgacaaagagtatgctagtactctgcagaatctgtgtaatcaggtggacaaggaaagcaccgtacagatgaactacgtgtccaacgtaagtaaatcatggctgctgatgattcagcagactgagcagctaagcaggatcatgaaaacccatgcggaggaccttaactccggaccacttcacagactgaccatgatgataaaggataaacaacaggtaaaaaagtcatatatcggggtgcatcagcaaatcgaagccgaaatgatcaaggttaccaaaacagagctggaaaagttgaagtgtagttaccgacagctgattaaggagatgaatagtgccaaggaaaaatataaggaggcacttgccaaaggcaaggagacggaaaaggctaaggaaaggtatgataaagcaacaatgaaactccacatgctgcacaaccagtacgtgttggccctgaaaggggcacagttacaccagaatcaatactacgatatcaccctgcccctgctgttagacagcctccagaagatgcaggaggaaatgatcaaagccctgaaggggatatttgatgagtattcgcagatcacatcactggtcacggaggaaatcgtcaatgtgcacaaggagattcagatgtctgtggaacagatcgacccaagtacagagtacaataatttcattgatgttcatcggacgactgccgctaaagaacaggagattgaatttgatacctcactgctggaggaaaacgagaacctgcaggccaacgagattatgtggaataacctgactgccgagagtctgcaggtgatgctcaagacgctggccgaagaactgatgcagacgcagcaaatgcttctgaacaaagaggaggcagtgctggagctcgagaagagaatagaagaatctagcgaaacatgtgagaagaagtcagacatcgtcttgctgcttagccagaagcaggctctggaagaactgaagcaatccgttcaacagctacggtgcactgaggcaaaattcagtgcccagaaggaacttctggaacagaaggtgcaggagaatgacggaaaggagcccccacctgtagttaattacgaagaggatgcacggtcagtgacatccatggagaggaaggagaggctgtcgaaattcgagtctattagacattctattgctggaatcattcgatcaccaaagagcgctttggggagtagcgctttgtctgacatgatctctatctccgaaaaacctttagctgaacaggactggtatcacggagccatccctcgtatcgaggcacaggaacttctcaagaaacaaggcgacttcctggtgcgtgaatctcatggcaaaccaggagagtacgttctttctgtttattccgatggccagaggcgacattttattattcagtacgtcgataatatgtatagattcgagggcacaggtttcagcaatatcccacagctcatagaccaccattacaccaccaagcaggtgattacaaaaaaatccggggtggtgctactgaatcctattccgaaagacaaaaaatggatattaagtcacgaggacgttatcctgggcgagctgttggggaaagggaacttcggggaggtgtacaagggaactctcaaggacaaaactagcgttgccgtcaagacctgtaaggaagatctcccccaggagctaaaaatcaagttcctgcaggaggccaaaattctcaagcaatacgatcaccccaacattgttaaactgattggtgtgtgcacccaacggcaaccagtctacatcattatggaattggtcagcggcggagacttcctcaccttcctgaggagaaagaaagacgagctgaaactgaaacagctggttaagttcagccttgatgcagctgccggtatgttgtacctcgaatccaaaaattgcatccatcgcgatctcgcggctagaaattgtctcgtgggagagaacaatgtgcttaagatctctgattttgggatgtctcgccaagaagatggcggtgtctattcttcaagcggccttaaacagattccaataaagtggacagcccctgaagcactgaattatgggaggtatagcagtgaaagtgacgtgtggagttttgggatcctgctctgggaaaccttctctctcggtgtctgcccatatccaggtatgactaaccagcaggctagagagcaggtcgagcggggataccgtatgagcgccccacagcactgtccggaagacattagcaaaatcatgatgaaatgctgggattacaagcccgaaaataggccaaaatttagcgagctccagaaggagctcaccataatcaagcgcaaacttacctag

SEQ ID NO: 223131 - DNA, 1944 bp, synthetic construct
  misc_feature 1..1944: note = Description of Artificial Sequence: Synthetic coding sequence
  source 1..1944: mol_type = other DNA
atgaagctacacatgctccataaccagtatgtacttgccttaaagggggcacagctccaccagaaccagtattacgacatcaccctgcctcttctcctcgattccctgcagaagatgcaggaggagatgattaaggcgctgaaggggatctttgacgagtacagccaaattacttccctggtgaccgaagagattgttaacgtccacaaggaaattcagatgtcagtcgagcaaatcgatccaagcacggaatataataattttattgacgtacaccggaccaccgccgcaaaagaacaggaaattgagtttgacactagtttactggaggagaacgaaaatctgcaggctaatgaaattatgtggaacaatttgaccgctgagtctttacaggtgatgctcaagactctggcggaagagctgatgcaaacacagcagatgctgctgaacaaggaagaagccgtgctggagttggagaaaagaatcgaagagtcaagcgaaacctgtgaaaaaaagtctgatatcgtgctgttactttcacagaaacaggctctggaagagcttaagcagtccgtgcagcaattgcgatgtactgaggcgaaattctcagcgcagaaggagctcctggagcagaaggttcaggagaatgacggaaaggaaccgcctcccgtggtaaattacgaggaggacgcgaggagcgtcacaagcatggaacgtaaagaacgattgtccaagtttgaaagtatccgccacagcattgccggaataatacggtctccaaaatctgccttaggctcatcagctctgagcgatatgatttcaatcagcgagaagcctcttgctgagcaggactggtatcacggcgcaattccaaggatcgaggctcaggagctactcaagaagcagggggattttcttgttcgggaatcacacggcaaacctggcgagtacgtactctccgtctacagcgatggccaacgcaggcacttcatcattcagtacgttgacaatatgtacaggttcgaaggaaccggtttctccaacatcccccagctgattgaccatcattataccaccaaacaggtcatcaccaagaaatccggcgtggtcttactcaatcctatcccaaaggacaagaaatggatccttagccatgaagatgtgattctcggcgagcttctcggaaaaggaaattttggtgaagtctataaggggactctgaaggacaaaacatcagtcgccgtgaagacttgcaaggaggatctcccgcaggaactgaagatcaagttcttgcaggaggcaaagatcctgaaacaatacgatcaccctaacatagttaagctgatcggtgtctgcactcagcgccagccagtgtatatcataatggagctggtgtctggcggagatttcctcacatttctgagacgaaaaaaagacgaacttaaactcaagcaacttgtaaagttctccttagatgccgcagccggtatgctgtacctggagagcaagaattgcattcaccgggacctggcggcacgcaactgcctggtgggggaaaacaacgtgttgaaaatttctgacttcggaatgtctcgtcaggaggacggcggagtgtattcttctagcggtctgaaacagattcctattaaatggactgccccagaggcactgaactacgggagatattcttccgaatccgacgtgtggtcctttggaatattattgtgggaaacgtttagcttgggcgtgtgcccgtaccctggcatgaccaatcagcaggctagagaacaggtggagcgaggctacagaatgtccgctccgcagcattgtcccgaggatatctccaaaataatgatgaagtgttgggattacaaaccagagaacagacctaaattttccgagctccaaaaggagctcaccattattaagaggaaactcacatag

SEQ ID NO: 223132 - DNA, 981 bp, synthetic construct
  misc_feature 1..981: note = Description of Artificial Sequence: Synthetic coding sequence
  source 1..981: mol_type = other DNA
atgggatttggtagtgatttgaagaattcacacgaagccgtgctgaaactgcaagattgggagctcaggctgctggagacagtgaagaagtttatggccctcaggattaaatccgacaaagagtacgctagcacactgcagaacctgtgtaatcaggtggacaaagagagtaccgtacaaatgaactatgtatccaacgtgtccaaatcttggctgcttatgatccaacaaacagagcagctttcccggattatgaagacacacgccgaagacttgaattcgggtcctctccataggttgaccatgatgatcaaggacaaacagcaggtgaagaaaagctacatcggggtccatcaacagattgaggccgaaatgatcaaggtgacaaaaaccgagttagagaagttaaagtgtagctaccgacagctcattaaggaaatgaacagcgcaaaagagaaatacaaggaagcgcttgccaaagggaaagagactgagaaagcgaaggagagatatgacaaggctactatgaagttgcacatgctgcataatcagtacgtactggcactaaagggcgcacaactccatcagaaccaatattatgacatcacattaccactcctcctggactccttgcagaagatgcaggaggagatgatcaaagccctcaagggcatatttgatgagtactctcagattacttcacttgtgactgaagaaatagtgaacgtacataaggagatccagatgtcggtggaacagattgatcccagtactgaatacaataactttattgacgtgcatcggaccaccgcagcaaaggagcaggagatcgaattcgacaccagccttctggaagaaaatgaaaacttacaggccaacgaaataatgtggaacaacctgactgcggagtccctgcaggtgatgaaagaaagacggggataccccaacctgaacctgttcgtaattcagctgctcgagtag

SEQ ID NO: 223133 - DNA, 3855 bp, synthetic construct
  misc_feature 1..3855: note = Description of Artificial Sequence: Synthetic coding sequence
  source 1..3855: mol_type = other DNA
atgcacgtgtttattgtcggaatgagcctgtcttccgtgaccctagcttccgcccttcaagtcagaggagaagccctgtccgaggaggagatttggagcctactatttcttgcggcagagcagctacttgaggatcttcgcaacgacagctctgactacgtagtgtgtccttggtctgccctgctttctgctgccggatcactctctttccaaggcagagtgagtcacatcgaagccgctcctttcaaagcccctgaactgctgcaggggcaaagcgaggacgagcaaccagatgcaagccagccgctccaactttgcgagccactacacagtatactattaaccatgtgtgaggatcagcctcacaggaggtgcactttacaaagcgttctggaagcctgccgggttcacgagaaagaggtctcagtttatcccgctcccgctggactgcatatccgcagactggtgggacttgtgctgggcaccatctctgaggtggaaaagcgtgtggtcgaggagagttcatccgtgcagcagaacagatcatacttactgagaaaacggttgagagggaccagctctgaatcacccgcagcccaagcccctgagtgtttgcatccttgcagggtgagcgagaggagcacagagactcagtcctcacctgagccgcattggagcaccttgactcactctcactgctctctgcttgtgaacagggccctaccaggagccgacccccaggaccagcaggccggtcgtcgcttgtcaagcggatccgtgcatagtgccgcagactcttcatggcctacaaccccatcacagagaggctttttacagcggaggtccaaattctcccgccctgagttcatcctgctcgccggtgaggcgcctatgacactgcatttgcctggcagtgtggttaccaaaaagggcaaatcctacctagccctgcgggacctctgcgtagtgcttttgaatggacaacacctcgaagtgaaatgcgatgtcgagagcacagtgggggctgtgtttaacgccgttaccagttttgcaaacctcgaggagctgacgtatttcggtcttgcgtacatgaagtccaaggagttctttttcctggattcagagacgcgactctgcaaaattgcaccagaaggttggcgcgagcagccgcagaaaacctccatgaatacatttacactcttcctgcgcattaagttttttgtcagccattatggcctgcttcaacactccctgacccggcaccagttttatcttcagctgcgcaaagacattttagaagagaggctgtattgtaatgaggagattcttctccagctcggcgtgcttgccctccaagctgaatttggtaattaccccaaagaggttgagagcaagccatactttcacgtagaagactacatccctgcctctctgattgagcgaatgacagccctccgcgtacaggtggaagtgagcgaaatgcaccggctctccagtgctctctggggagaggacgcagaattgaagttcctcagggtcacacagcagctccccgagtacggtgtacttgtgcatcaggtctttagcgaaaagcggcgacctgaggaggaaatggctctgggcatttgcgcaaaaggggtgatcgtgtatgaggtcaagaataactccaggatcgcaatgctacggtttcagtggagagaaacggggaaaattagcacctaccagaaaaagtttaccatcacctccagtgtgactggtaagaagcataccttcgtgacagactccgcaaaaacaagtaaataccttctggacctgtgcagcgcgcagcacggcttcaacgctcagatgggtagcggccagccatcgcatgtgctatttgaccatgacaagtttgttcaaatggccaacctatctcctgcccaccaagcaagaagcaaaccactgatctggatacaacggttgtcatgctccgagaatgaactgttcgtgtctcgcctgcaaggtgccgcagggggattgctgagtacaagtatggacaacttcaacgtggacggttctaaggaagcaggagctgaaggaatcggcagaagcccttgtaccggcagagaacagctgaagtcagcctgtgtaatccagaaaccaatgacctgggatagtcttagcgggccaccagtccagtctatgcatgccggatccaaaaacaatcggaggaaatcttttatagccgaaccaggcagagaaatcgtacgtgtaacgctgaaaagggatccccacagaggatttggattcgtcattaacgaaggagagtattcgggacaggccgaccccggtatctttatctcctctataatacctggtggcccagctgaaaaggccaaaaccattaagcccggaggacaaattttggcgctgaaccatattagcttggaaggctttacgtttaacatggcagttcgtatgatccaaaattctcctgacaacattgagcttatcatttctcagtctaagggggtcggtggcaacaatcctgacgaagagaagaattctacggccaactccggcgtgagtagcaccgatattctttcgttcggataccagggatccttgctgtcccatactcaggatcaggatcggaacaccgaagagctggatatggccggtgtgcaatctctggtccccaggctgaggcatcagctgtcctttctgccgctgaaaggtgctggttcctcctgcccaccgtcaccgcctgagatttccgctggcgaaatttatttcgtcgaactcgtgaaagaggatggcaccctggggtttagtgttaccggcggaattaatacgtctgtgccgtacggagggatttacgtgaaatccatagtacctggaggccctgctgccaaggaaggtcagatactgcagggcgatagacttttgcaggtcgatggcgtaattttatgcggcttgacccacaagcaagcggtgcaatgcttaaccggacctgggcaagtggctcgtctggtgctcgagcggcgagtgcccaggagcacccaacagtgcccatcggcgaatgattccatgggcgatgagcgcacggctgtgtctctggtgaccgccctgccgggtcgacctagttcttgtgtgagtgtgaccgacggacctaagtttgaggtcaaactcaagaaaaatgctaacggactcggattttcctttgtgcagatggaaaaagagagctgcagccacctcaagagcgatcttgtgcgcattaagaggctgttcccaggacagcccgctgaagaaaacggagccatcgcagccggtgacattatcttagcagtgaacggacggagtaccgaaggcctgatattccaggaagttttgcatctgctgcggggtgcccctcaggaggtgactctcctcctgtgcagacctcccccaggtgcactcccggaactggaacaggagtggcagacccctgagttgagcgccgacaaagaattcacgcgcgctacctgtactgacagttgtacctctccgattctagaccaggaggattcctggcgcgattctgcttcgcccgacgccggtgaaggcctaggtctaagaccagagagtagtcagaaggcaatccgggaagcacagtggggtcagaatcgcgagcgcccatgggcctcttccctcacacattccccagagtcccacccacacctctgtaaacttcaccaggaaagggatgaatcgactctggctactagcctcgaaaaggacgtacggcagaactgttatagtgtttgcgacattatgcggctcggcaggtactctttctcatctccccttacccgcttatcaactgatatcttttag

SEQ ID NO: 223134 - DNA, 3930 bp, synthetic construct
  misc_feature 1..3930: note = Description of Artificial Sequence: Synthetic coding sequence
  source 1..3930: mol_type = other DNA
atgcagccacttacaaaggatgccggaatgtccctctcctccgtcactttggcaagtgctctgcaagtgaggggcgaggccctgtcggaggaagaaatatggagcttgctcttcctggccgctgagcagctgcttgaagatctcagaaatgactcatccgactacgtcgtctgtccttggtccgccctgcttagtgcagcgggaagcctctctttccaggggagagtgtctcacatcgaggcagccccatttaaagctcccgagctactgcaagggcagtccgaagatgagcagcccgacgcctctcaaatgcatgtctattcactgggcatgaccctgtactggagcgccggattccatgtgccccctcaccaacctttacagttatgtgaacctcttcattcgattctgctgacaatgtgtgaagatcagccacaccgcaggtgcacactacaatctgtgctggaagcatgcagagtgcacgagaaagaggttagcgtgtacccagcgccagccggactccacattcgtcgactcgttggactcgttctaggtactatctccgaagtggaaaagcgggtagtggaagagagttcatcagtgcagcaaaatcgctcatacttactgcgcaaaaggcttcgcggaacctcatccgagtctccggcagctcaagccccagagtgtctgcacccgtgtcgtgtgtcagagaggtccacagaaactcaaagtagccctgagccacactggtcaacactgacccattctcactgtagcctcctggtcaatagagcgctgcctggggcagacccccaagaccagcaggccggaagacgactgtcctcaggctcagtccactccgccgctgattctagttggccaaccaccccatcacaacggggattcctgcagcgtagaagtaagttttcacggccagagttcattctccttgctggagaagcaccgatgacactccacctgcctggaagtgttgtcactaagaaaggcaagtcctaccttgccctgcgagatttgtgtgtggtcctcttgaatgggcagcatctagaggtgaagtgcgacgttgaaagcacggttggggctgtgtttaatgccgtcacaagctttgcaaacctggaagaactgacctactttggactggcttatatgaagtcaaaggagttttttttcttggactctgaaacgagactgtgtaagatagcacctgagggctggagggagcagcctcagaaaacctcaatgaacaccttcacactttttctgcggatcaaattcttcgtgagccactatgggttgctgcagcattccctgaccaggcaccagttctatttgcagttgagaaaggacatacttgaggagaggctctactgcaacgaggaaatcctgttgcaattaggcgtgctggctctgcaggctgaattcggtaattacccgaaagaacaggtcgagtcaaagccctacttccacgtcgaagactatatccccgctagtctgatcgaaaggatgacagcgcttcgggtgcaggttgaagtgagcgaaatgcatagactgtcaagtgccctgtggggcgaagacgctgaactgaagtttctgagagtgacacagcaactgcccgaatacggcgtgctggtgcaccaggtcttctcagaaaaacggcgaccggaggaggagatggccttgggaatctgtgcaaagggcgtcattgtgtatgaagtgaagaacaacagccggattgctatgctgcgattccaatggcgagaaaccgggaagatatcgacctaccaaaaaaagtttactatcaccagctccgtcacgggaaagaaacatacttttgtcaccgattcagccaagacctccaagtacttgctcgatctctgtagcgcgcaacatggctttaacgctcagatggggagcgggcaaccaagccatgtcctttttgatcacgacaaattcgtccagatggcaaacttgtccccagcacatcaagctcggtctaaaccgctcatttggatacaacgcttaagctgtagcgaaaatgagctgtttgtgtctcgactacagggcgcagcaggtgggctcctctccacctcgatggataactttaatgtggatggttccaaagaggcaggggctgagggtatcggacgttctccctgtactgggagagagcagctcaagtccgcgtgcgtgatacagaagcctatgacttgggactctctgagcggccctcctgtgcagtcaatgcatgctgggtcaaaaaataacagacgcaaaagctttatcgcagagccaggaagggagattgtccgggtcactttaaagagggatccccaccggggattcggtttcgtgatcaacgagggggagtactctggccaggctgatcctggcattttcatatcttccattattcctggcggacccgctgagaaagccaagacgatcaaaccagggggtcaaatcctggcactgaaccacatttctttagaaggctttactttcaacatggccgtgagaatgatacagaactctccagacaacattgaactgatcatatcgcagagcaagggcgtagggggtaacaaccctgatgaagaaaagaattctactgcgaacagcggtgtatcctctaccgatatattgtcctttggctaccaagggtcattactgtcccacacccaggaccaggacagaaatacagaagagctggatatggccggagtacagagcttggtaccgaggttgagacatcagttaagctttctgcccttaaagggagccggttcgtcgtgtccacctagcccgccagagatatccgcaggcgaaatttactttgtcgagcttgtgaaggaagatggaacccttggtttttcagtgacaggcggaattaatacatctgttccctacggcggaatatacgtgaaatctatagtgccagggggacctgccgcaaaagagggccagatcctccagggcgatagactgttgcaggtcgacggcgtcatattgtgtggtttaactcataaacaagcagtgcaatgcttaaccggccctgggcaggtggctcgactagtgttagagcggagggtccctcggagcacccagcaatgtccaagcgcgaacgactctatgggtgacgagagaacagccgtctctctggtcacggccttgcctggcagaccgtctagctgtgtctcagtgactgacggccctaagttcgaggtgaagttaaagaaaaatgccaatggcctaggatttagctttgtacagatggagaaagagtcttgcagccatctgaaatcagacctggtacgtattaagaggctttttccaggacagcctgctgaggaaaacggcgcaatcgccgcaggcgatatcatcctcgcagtaaacggcaggtccactgagggtttgattttccaggaggtcctccacctgcttaggggtgcgcctcaggaagtgacgcttctgctctgtagaccccctcccggagccctgcccgaactcgaacaggagtggcagactccagaactgtcagccgataaagagtttacccgcgctacatgcaccgatagttgcacgtctccgattcttgaccaggaggattcttggagggactccgcttctccagacgctggagaggggctgggtctccggccagaaagctcacagaaagccatacgcgaggcccagtggggtcaaaatagagagagaccatgggcttccagtcttacccattcccccgagtcccacccccatttatgcaagcttcaccaggaacgtgatgagtcgaccctggccacctcactggaaaaggatgtccgacagaattgttacagtgtttgtgatatcatgcgcctcgggaggtactctttcagttctccactgactagattgtcaactgatatcttctag

SEQ ID NO: 223135 - DNA, 3834 bp, synthetic construct
  misc_feature 1..3834: note = Description of Artificial Sequence: Synthetic coding sequence
  source 1..3834: mol_type = other DNA
atgtctttgagctcagtcacgcttgcttcagcgttacaggtgcggggtgaggcactttctgaggaagaaatctggagcttgctgttcctcgcagccgagcagctgttggaagatttacgcaacgacagcagtgattatgtcgtgtgtccttggtctgccctgctgtcagccgcaggttctctgtcctttcagggcagggtttcacacattgaagctgcaccctttaaggcccctgagctcctgcagggccagagtgaggacgaacagcctgatgcaagtcagccactccagctgtgcgaacccctgcactcaattctcctgactatgtgcgaggaccaaccacacaggcgttgtaccctgcagtcagtcctcgaggcttgccgagtccacgagaaggaagtctctgtctaccctgccccagcaggactgcatatccggagactggttggacttgtactgggcaccatcagcgaggtggagaagagggttgtcgaagagtcgtcatctgtgcagcagaacagatcctatctgctccggaagcgcctgcgaggcacctcatctgagagccccgctgcacaggctccagagtgtctacacccgtgccgtgtctctgagcgctcaaccgaaacacaatcatcgcctgagccgcactggagcacccttactcattcacactgctccctcttagtgaatcgcgctttgcccggtgctgatccccaggatcagcaggctggacgcaggttgagtagtggaagcgtgcatagcgctgctgattcaagttggcccactaccccttcccagcgaggcttcctgcaaaggagaagcaaattttcgcgaccagaatttatccttctggctggcgaagcccctatgacccttcacctacctgggtctgtggttactaagaagggaaagagttacctggctctgcgcgatctgtgtgtcgttctcttgaatgggcaacacttagaggtcaagtgtgacgtcgagagcaccgtgggggcagtgtttaatgccgtcacctctttcgctaatctggaagagctgacgtattttggtctggcatatatgaagagtaaggagttctttttcctggacagcgaaacgaggctgtgcaagatagcgcctgaagggtggcgtgagcagccccagaagacatctatgaacacctttactctgttcctgcggatcaagtttttcgtgagccactacgggctcctgcagcattcactgacaaggcaccagttttatctgcaactgagaaaggatatattagaagagcgcctgtattgtaacgaagagattttgcttcagctgggcgtattagcactccaagctgagttcggcaactatccaaaagaggtagagagtaagccttacttccacgtggaggactacattcccgcatccttgatcgaacggatgactgccctcagggtgcaggtggaggtttctgaaatgcataggctctccagtgccctatggggcgaggatgctgaactgaagtttttgcgcgtgacccagcagttaccagaatacggggtactggtgcaccaggtctttagcgaaaaacggcgaccggaggaagaaatggccctcggaatttgcgcaaaaggagtcattgtgtatgaggtgaagaataatagcagaatcgcgatgctgcgctttcagtggcgcgaaacggggaaaattagtacctaccaaaagaagttcaccatcacgtcctcggtgaccggtaagaagcatacgttcgtcactgattccgcgaagacctccaagtatcttctagatctttgttctgcccaacatggctttaatgcccagatgggctcaggacaaccgtcacacgttctgttcgatcacgacaaattcgtgcaaatggccaacttaagccctgctcaccaggctagatcgaaaccgcttatatggattcagaggcttagctgctcagagaacgaactgtttgtgagtcgtctgcaaggcgctgccggtggcttactgtcaacttccatggacaactttaatgtggacggtagcaaagaggccggagctgaaggaattgggagatcgccctgtacaggccgtgagcagctcaagtccgcttgtgttatacagaaacccatgacctgggattccctgagcgggccacccgttcagagtatgcacgcagggagcaagaacaaccgtcggaaaagcttcattgcggaacccggtagggagatcgtgagagtaacactgaagcgagatcctcaccggggatttgggttcgtgatcaatgaaggagagtatagcggccaagcagatccgggtatcttcatctcttctataattcctggagggccagcagaaaaggcgaagacaataaaacctggcggacagatcctggctttgaatcatatttctctagaagggtttacttttaacatggccgtgcggatgattcagaactccccagataacattgagctcattatctcccagagcaaaggagtggggggtaacaaccctgacgaggagaagaatagcacagcaaatagtggcgtaagctcaacagacattttgagctttgggtatcagggatctctgctaagccacacgcaggatcaggaccggaacacagaagagttggatatggccggagtccaaagcctggtgcccagactaaggcatcaactgagtttcctgcctctgaagggcgctggaagttcttgccctcccagccccccagagatctctgccggtgaaatttacttcgtagaattggtcaaggaagatggtacgctgggcttttcagtgactggaggtattaacacatccgtgccctacggtggtatttatgtgaaatccatcgtgcctggaggtcctgccgctaaagagggacagatattgcagggagaccgcctgctccaagttgatggcgtcatcttatgtggcctcacgcataagcaggctgtgcagtgtctcactgggccaggccaggttgccagactcgtcctggaaaggcgggtgccaaggtcaacacagcaatgccccagcgccaacgacagcatgggagatgaacgcacagccgtctcattggtgactgccctcccaggtaggccttcatcctgtgtctctgtgacggacggccctaaatttgaagtgaagctgaagaaaaacgctaacggcctgggattcagttttgtgcaaatggagaaggagtcctgctcacatctcaagtctgacctggttagaatcaagcgtctgtttccgggacagcctgcagaggaaaacggggcaatcgccgcaggggatatcatcctagctgtgaatggcaggagtaccgaaggcttaatcttccaagaggttctccaccttcttcgcggagctcctcaggaagtaacacttctgttatgtcgcccaccgccaggagcgttaccggagctggaacaagagtggcagactccggaactgagcgcagacaaggaatttacgagggccacttgcactgacagctgtacttcccccatcctggaccaggaggactcttggagagacagtgcctcccccgacgcgggagaagggctcggacttcggcctgaatccagccaaaaggccatcagagaagcacagtggggacagaatcgggagcgcccttgggcctcttcgctgacgcatagccccgaaagccacccccatctatgtaagctccatcaggaaagggatgaatccaccctggcgacaagcctggagaaggacgtccgccagaattgctacagcgtctgcgacataatgagacttggtcggtactccttcagctcccccctgaccaggctctctaccgacatcttttag

SEQ ID NO: 223136 - DNA, 786 bp, synthetic construct
  misc_feature 1..786: note = Description of Artificial Sequence: Synthetic coding sequence
  source 1..786: mol_type = other DNA
atgggagatgagcgaactgctgtctctctggttacagccctaccaggcaggcccagctcgtgtgtcagcgtgactgatgggcctaagttcgaggtaaagctcaaaaagaatgcaaacggacttgggttttctttcgtgcagatggaaaaagaaagctgctctcacttgaaaagtgacctggtgcggattaaacgcctatttccaggacagcctgccgaagagaacggcgcaatcgctgctggagacataattcttgccgtaaatggcagatcgacagaaggactgatctttcaggaggtgttgcacctcctgaggggtgcgcctcaggaagtcactctgctgctgtgccgacctcctcctggcgctctccctgaactcgagcaggagtggcaaacacctgagctcagtgctgacaaagaatttactcgcgcaacatgcaccgacagctgtaccagccccattctggatcaagaggactcctggcgtgacagcgcatccccggatgcaggagaggggttggggctccgaccagagtcctcccagaaggcaatcagggaggctcagtgggggcaaaaccgagagaggccatgggcttccagtctgactcatagtcctgaatcgcacccgcatctttgcaaactgcaccaggagcgggatgagtcaacactggctaccagcctggagaaagatgtgcggcagaattgttattctgtgtgtgacattatgcgcttaggcagatacagcttttcctcccctcttacccggctgagcacagatattttctag

SEQ ID NO: 223137 - DNA, 3936 bp, synthetic construct
  misc_feature 1..3936: note = Description of Artificial Sequence: Synthetic coding sequence
  source 1..3936: mol_type = other DNA
ttttcatcacataggacaaagtcttctggttggcccccaccgagtggcacgtgggggctgtctcaggtgcctccatacggatgggagatgaccgcaaacagagatggtagagactatttcataaaccacatgactcaggccataccatttgatgatccccgtttagagtcgtgtcaaatcatcccgcctgcccctcggaaggtagaaatgcggagggatcctgtattgggctttggattcgtggccggtagcgagaagcccgtggtcgtacgctcagtgactcccggagggcctagcgaagggaagcttattccgggtgaccaaatagttatgattaatgatgaaccggtctcagccgctcccagagagcgcgtgatcgacctcgtgcgcagctgcaaagagagtatccttctcactgtgatacaaccgtaccctagtccgaaatcagcctttataagtgccgctaagaaggctagactgaaatccaatccagttaaggtgagattttcggaggaggtaataatcaacggacaggtatccgagacagtgaaggataattctctgctgtttatgcctaatgtgctgaaagtttaccttgagaacggccagacgaagagcttcaggttcgactgttctaccagcatcaaagatgtgatcttgacactgcaggagaagctgagtataaagggaattgaacattttagtttgatgctggaacagagaaccgagggcgctgggactaagctcctgctgctccacgaacaggagacgctgacccaggtaactcaacgcccttcaagccacaaaatgcgctgcctgttccgtatcagtttcgtgcccaaggatcccatcgatctactgagacgcgaccctgtggcttttgagtacctgtatgtgcagagttgcaacgacgtcgtgcaggagcgtttcggaccggaactgaagtatgacatagctctcaggctggccgctttgcagatgtatatagcaacagtgaccactaaacagacacagaagatctcgctgaagtatattgaaaaagagtggggccttgagacctttttgccaagcgccgtgctccaatcgatgaaagagaaaaatataaagaaagccctatcccatctcgtgaaagcgaatcagaatttagtacctccaggtaagaagctttccgcgctgcaggccaaggtccactatttgaagttcttgtctgacctgcgactctatggaggcagagtgtttaaagctactctggttcaggccgaaaagcgttctgaggtgaccctgctggttgggcctcggtacgggattagtcacgtgattaacactaagacaaacctggtggccctcctggccgacttttctcacgtgaatcgtatcgagatgttttctgaagaggagagcctggtaagagtggagctgcatgtgttggacgttaagcccattaccctcctgatggagtcctccgacgccatgaatctcgcgtgcctgacggcaggctactaccggctgctggtggattcacggaggagcatctttaatatggcaaataaaaaaaacacagccactcaggaaactggcccagagaataagggcaagcacaacctgctgggtcccgactggaactgtatccctcaaatgacaaccttcatcggcgaaggggagcaagaggcccaaatcacatacatagacagcaagcagaagacagtggagatcaccgattcgactatgtgccctaaagagcaccgacatctgtacattgacaatgcttacagcagcgacggactgaaccagcagttatctcagcctggcgaggctccatgcgaagctgactatcggtcccttgcgcagcgttcattgttgaccctgagcggacccgagactctgaagaaggcccaggagtctcctagaggcgcaaaggtatcgtttatcttcggcgacttcgctctggacgatggcattagccccccaactctgggttatgaaaccctgctcgacgaggggccagaaatgctggagaagcaacgcaacctgtacatcgggtccgctaacgatatgaaggggctggacctcacccctgaggcagaagggatccagtttgtggagaactctgtgtatgctaacatcggtgacgtaaagagtttccaggcagccgaggggattgaagagcccctgctgcacgacatttgttacgccgagaatacagacgatgctgaggacgaggacgaggtgtcatgcgaggaggacctggtagtgggcgagatgaatcagccggctatcctgaatctttccggctcatccgacgacattattgatttgacttccctcccccctccagaaggagacgataacgaagacgacttcctactgaggagtctgaacatggcaatcgctgccccaccacccggatttcgcgacagctccgatgaggaggactctcagtcccaggccgctagttttccggaggataaggagaaaggatcgagccttcagaatgatgaaatcccagtgtccctgatcgacgccgtgcccacctccgcggaagggaaatgcgagaagggcttagataacgcagtggtcagcaccctcggggctttagaagctctcagcgtgagtgaggaacagcagacaagtgataactctggagttgcaatcctgcgagcgtactcccccgaaagtagttctgatagcggtaatgaaactaattcttccgaaatgaccgagtccagcgaacttgccaccgcccagaaacagagcgagaacctctccaggatgttcctcgccactcacgaggggtaccacccattagccgaagaacagacagagttcccggcatctaaaacccccgcagggggattgccccctaagagcagtcatgctcttgccgctcgaccagctacggatctcccaccaaaggtggtcccatctaaacagctgctccattctgatcacatggaaatggagcctgaaaccatggagactaagtccgtgaccgattattttagcaagctgcacatgggtagtgtggcatattcatgcaccagcaagaggaagagtaaactcgctgatggtgaaggcaaggcacccccaaatggcaacacaaccggaaaaaaacagcagggaaccaaaacggcagaaatggaggaggaagcaagcggaaaatttggaacagtgtcgagtcgagatagccagcacctgagtaccttcaacttggagcgtaccgccttccggaaggacagtcagcggtggtatgtggcaacggaagggggaatggccgagaagagcgggctcgaggcggcaaccgggaagacctttccaagggcctcaggtctgggagcacgggaagccgaggggaaggaggagggggcaccagacggtgagacaagcgatggcagtggactcggtcagggcgatcggtttctgaccgacgtgacttgtgcttctagcgccaaggacttggacaatcccgaagatgcagattcttctacctgcgaccatccctctaaactgccggaggccgacgagtctgtggctcgcctgtgcgattatcatctggctaagaggatgagttcactgcagtccgagggacacttttccctgcaatcctctcaggggagttcagtggacgctgggtgcggtacaggaagcagtggctcggcatgcgccactccagtcgagagtcctttgtgtcccagcctagggaagcacctcatccccgacgccagcgggaaaggagtgaactacattccgagcgaggagagggcacccggactgcctaaccatggggctacatttaaagagctgcacccacagacggagggaatgtgtcctcgtatgacggtccctgcgctccacacggccatcaataccgagcccttatttggcacacttagagatgggtgccaccggctgcctaaaattaaagagaccacagtgtag

SEQ ID NO: 223138 - DNA, 3969 bp, synthetic construct
  misc_feature 1..3969: note = Description of Artificial Sequence: Synthetic coding sequence
  source 1..3969: mol_type = other DNA
atggacgtgtttagtttcgtcaaaatagctaagctgtctagccacagaacgaagtcatccggctggcctcccccaagtggaacttgggggctgagccaggtgccaccttacggttgggaaatgacagcgaaccgtgatggccgtgactacttcatcaaccatatgactcaggctatcccttttgatgatccacggctggaatcgtgtcagattattccgcctgcccctcgtaaagtggaaatgaggcgagatcccgtcctcggcttcggtttcgtggctggctctgaaaaaccagtggtggtcaggagcgtgactcctggagggccttctgagggtaagctcattcccggagaccaaattgtaatgatcaacgatgagccagtgagtgcagcacccagggagcgcgttattgatctggttagatcatgtaaagaatcaatcctcttgacagtgatacaaccctatcctagcccgaaatcggcattcatttcggccgctaaaaaggctaggctcaaatcaaaccctgtcaaggttaggttttccgaggaggttatcatcaacggtcaggtcagcgaaacagtgaaggataactctctcctgttcatgccaaacgttcttaaggtctatctagaaaacgggcagaccaagtcctttaggtttgattgtagcaccagtatcaaagacgttattctcaccctgcaggagaaactgtccatcaagggaattgagcatttttcactgatgctagagcaacggaccgagggtgccggaactaagcttttacttttacacgaacaggagacactaactcaggtgacccagcgaccaagctctcataaaatgaggtgccttttccggatcagcttcgtcccaaaagatcctatcgacctgctgaggagggatcccgtggccttcgaatacctttacgttcagtcttgcaatgacgtcgtgcaggagaggttcggccctgagctcaagtacgacattgccctgcggctcgccgcactccaaatgtatattgccacggtcacaaccaagcaaactcaaaagatctccctgaaatacatcgagaaagagtggggacttgagacgtttcttcccagcgcggtgctgcagtccatgaaagagaaaaacatcaagaaggccctgtctcatcttgtgaaagcaaaccaaaaccttgtgcccccagggaagaaattatctgctttgcaggcaaaagttcactatttaaagtttttgagtgacctgcgcctatacggagggagggtgttcaaggccacactcgtacaggcagagaagcgctctgaggtaaccctcctcgtcggacctcgctatggaatttcccatgtgatcaataccaagacaaatttagtcgcactcctggccgacttttcccatgtgaacagaatcgagatgttcagcgaggaggaatccttggtccgtgtggagctgcacgtattagacgttaaacctatcaccctgctgatggagtcatcagatgcgatgaacctggcatgcctgacagcaggctactatagactgctagtcgatagccgcagatccatctttaatatggctaacaaaaaaaatactgctacacaggaaacaggacccgagaacaagggaaaacacaatctgctaggccctgattggaattgtatcccacagatgaccacctttattggggaaggagagcaggaggcacaaatcacatacatcgactctaagcaaaagacagttgaaataactgacagcaccatgtgcccaaaggagcatagacacttatacattgataatgcatattcctctgacgggttgaatcagcagctctcccagccaggtgaagccccatgtgaggccgactatagaagcctagcacagaggtccctcctaaccctatctggtcctgagactctgaaaaaggcccaggaaagtcctcgcggagccaaggtgagctttatattcggcgattttgctttggacgatggcatttccccacccacattggggtatgaaactctcttagacgagggtcctgaaatgctagaaaagcaaagaaatctatatatcggtagtgccaatgacatgaaagggttagacctgactcccgaggccgagggcatccagtttgtggagaatagtgtgtatgcaaacatcggtgacgttaagagttttcaggctgctgaaggaatcgaagaacctctactacatgatatctgctacgcagagaatacagacgatgcggaggatgaggacgaagtgtcttgcgaggaggacctggtcgtgggcgaaatgaatcagccagcaatacttaatttatctggctcctccgacgacatcatcgacctgacatcccttccaccacccgagggcgatgacaatgaggatgatttcctcctgaggagtctcaacatggccatcgcggcacctcctcccggatttagagacagcagcgatgaggaagacagtcaatcccaggctgctagcttcccagaggataaggagaagggctcatccctacagaacgacgagatacctgtgagcctgattgacgctgttccgacgtccgctgaagggaaatgcgagaaggggctggacaatgccgtagtgtctacactgggagcacttgaggccttaagcgttagtgaggagcagcagacctccgacaattccggcgtggccatcctgcgggcttattccccagagtctagctccgatagtggcaacgaaacaaactcttcagaaatgactgaatcaagtgaacttgcaacagcccaaaaacagtcagaaaacctgtctcgcatgtttcttgccacacacgagggttatcatcctctggcggaagagcagacagaatttcctgccagcaaaacaccagctggaggacttccaccgaagagcagtcacgccctcgccgcaaggcccgctactgacctaccgcctaaagtggtgccgtctaagcagctgctgcactccgaccacatggagatggaacctgaaacgatggagaccaaatccgtcactgactacttctctaaattgcatatggggtcagttgcttattcctgtacaagcaaacgcaagagcaagctcgccgacggcgaagggaaggcgcctccaaatgggaatacaactggaaaaaaacaacagggtacgaaaactgcagagatggaggaagaggccagcggcaagttcggcacagtcagtagcagggacagtcaacacctgagcacatttaatctggagcgtactgctttccgcaaagactcccaaagatggtatgtggccacggaggggggaatggctgaaaaatccggcttagaagccgctactggtaaaaccttccctagggcttcaggcctgggcgctcgggaggccgaagggaaagaagagggcgctccagacggagagacctccgatgggagcggattaggccagggcgacaggtttctgacggacgtcacctgtgcaagttccgctaaggatttggacaacccggaggatgcggacagctccacttgcgaccatcccagcaagttacccgaggccgatgagtctgttgccagattatgtgactatcaccttgcgaagcggatgagcagcctccagagtgaaggccacttctcactccaaagcagtcaaggctcctctgtggatgcaggctgcggcacaggctcatcaggcagcgcgtgtgctaccccagtggagagcccactgtgcccttctctgggaaagcatctgatccctgatgcctcaggaaaaggagttaattacatcccatcagaggaaagagctccaggcctaccaaaccacggggcaaccttcaaggaactgcatccccaaacggagggaatgtgccctaggatgaccgtgccggctcttcacaccgctattaatactgaacctctgtttggaactctcagagacggctgccaccgcctaccaaagatcaaagagacgactgtctag

SEQ ID NO: 223139 - DNA, 3942 bp, synthetic construct
  misc_feature 1..3942: note = Description of Artificial Sequence: Synthetic coding sequence
  source 1..3942: mol_type = other DNA
aagtctcacagcccacaccggacaaagagttctggatggccccctccatctggaacctggggattgagccaggtccctccatacggttgggagatgacagccaatagagatggcagagattactttatcaaccacatgactcaggccatccccttcgacgaccccaggctggagagttgtcaaataatacctccggctccgagaaaggttgaaatgaggcgagaccctgtactcgggtttggttttgttgcaggctccgagaagcccgtggtggtcagatccgtgaccccgggaggcccatccgagggaaagttaatccccggtgaccagattgttatgatcaatgacgaaccagtgtcggctgctccacgggagagggtaatcgatctagtaaggagctgcaaagagtcaatcttgctgaccgtcatccagccatatcccagccccaagtcagcctttattagcgctgctaagaaggcaagactaaagtccaaccctgtaaaggttagatttagtgaggaagtgatcatcaatggccaggtgagtgagacggtgaaggacaattccctgctgtttatgccaaacgttctcaaagtttatctggaaaacggtcaaactaagagttttcggtttgactgcagtacttcaatcaaagacgtcatcctcaccttacaagagaagctgtcaatcaaggggatagagcacttctccctgatgttggaacagaggacagaaggcgctggcaccaagctcctgcttctccatgaacaagagactttgacccaagttacccagagaccttcttctcacaaaatgcgctgtctgtttcgaatttccttcgtaccaaaagaccccatcgacctgcttcgcagggaccccgtggccttcgagtacttatatgtccagagttgtaatgatgttgtccaggaaaggttcggacccgagctgaagtacgatatcgccctgcgcttagccgcacttcagatgtacatcgcaaccgtcactacgaagcagacccaaaagattagcctgaaatacatcgagaaggaatgggggcttgagacatttctgccctctgctgtgttacagtcaatgaaagagaaaaatatcaagaaggccctgtcccacttagtaaaagccaatcagaacttggtacctcccggaaagaagctgagcgctctgcaagcaaaggtgcactatttgaaattcctttcagacctccgtctgtatggcggtagggtctttaaggctacactcgtgcaggccgaaaagcgaagtgaagtaacactgctcgtgggtccacgctatggaataagtcacgtgatcaataccaagaccaatctggtggccctgctggctgatttctcgcatgtaaaccgaattgagatgttcagtgaagaggagagtctggtgagggtggagttgcacgtcctggacgtgaaaccaattactctgttgatggagagcagtgatgccatgaacctggcgtgcctaaccgcaggctactataggctcctggttgacagcagacgcagtatattcaacatggcaaacaagaagaacactgccacccaggagaccggacctgagaataagggaaagcacaatctgctcggtccagactggaactgcatacctcaaatgactacatttatcggcgagggcgagcaggaggctcaaatcacttacattgactcaaaacagaagacggtggagatcactgactcaacaatgtgccctaaagagcataggcatctgtacatcgataacgcttatagctccgacggccttaaccaacaactctcccagcctggcgaggcaccctgcgaagccgactaccggagcttggcccagcggagcctcttgacactcagcggtcccgagacgttgaagaaggcccaggagagtccacggggagccaaggtgagctttatttttggagatttcgccctggatgatggtattagccctccaactctgggctacgagactcttctggacgaggggcctgagatgctggagaagcaaaggaatctgtacatagggtctgctaatgatatgaagggccttgacctaacccccgaggcagaaggcattcagttcgttgaaaatagcgtctatgctaacattggagatgtgaaatcgttccaggccgctgaaggaattgaggaacccctgctgcacgatatttgttacgctgagaatactgacgatgccgaagacgaagatgaggtgtcatgcgaagaagatctagtggtgggcgagatgaatcaacctgccattctgaacttgtccggttcttctgatgacattatcgatctcaccagcctgcctcccccagaaggtgatgacaacgaagacgattttcttttgaggtcactgaacatggccatcgccgcaccgcctcctgggttccgggatagttctgatgaagaagatagtcaaagtcaggccgcttcattcccggaagataaagagaagggcagtagcctgcagaatgacgagattccagtcagcctgattgatgccgttcctacgtcagccgaggggaaatgcgaaaagggcctggataatgcagtcgttagtaccttgggcgcactcgaagctctgagtgtttctgaggagcagcaaacttccgacaattccggggtggctattctgagagcctattcacccgagtcttctagcgacagtggtaatgagaccaacagttctgaaatgacggagagcagtgagctagccacagcgcagaaacaaagcgagaatcttagtaggatgttcctggcaacgcacgaaggttaccatccgctcgctgaggagcagaccgagtttcccgcttcaaaaacccctgcagggggactgccgcctaagtcttcccacgcactcgccgcaagacccgctaccgacctgcccccaaaggtggtgccatctaaacagctgttgcattccgatcatatggaaatggaacccgaaacaatggaaacgaaaagtgtcacggactattttagcaagctccacatggggagcgttgcatacagctgcaccagtaagcgcaaaagtaagctcgcagatggcgaaggtaaagccccacctaatggcaacactaccggcaaaaagcagcagggaactaagactgctgagatggaggaagaagccagtggcaaattcgggacggtaagctcgagagactctcaacacctgtcaacatttaatctggagcgcactgctttccgaaaggacagtcagagatggtatgtggcaaccgagggagggatggcggaaaaaagcggattggaagccgctaccgggaagaccttcccacgagcatccggcttgggcgctcgtgaagccgagggtaaagaggaaggcgcacccgatggcgagacctctgatggatccggacttggacagggcgatcgctttttaacagatgtgacttgtgccagttccgccaaggacttagacaatcccgaagacgcagactcctccacctgtgaccatcccagcaaattgccagaggctgacgagtccgtggcaaggctgtgcgattatcacttagctaaaagaatgagcagtctgcagagcgagggacacttctcgttgcaaagctcacaaggtagttctgtggatgctgggtgtgggacagggtcttccggttcggcatgcgcgacacccgtcgagtcaccattgtgtcctagtctgggaaaacacctcatccccgatgcttcaggcaaaggcgtaaactatatccccagcgaggaaagggcacccggactgcctaatcacggcgctaccttcaaagaattacaccctcaaaccgaaggcatgtgtcctagaatgaccgtgcccgcactgcataccgcaattaacacagaacctctcttcggtaccctacgagacggctgccaccgccttccaaagattaaggagacaactggttag

SEQ ID NO: 223140 - DNA, 1794 bp, synthetic construct
  misc_feature 1..1794: note = Description of Artificial Sequence: Synthetic coding sequence
  source 1..1794: mol_type = other DNA
atgtttgcctcatgccactgtgtccccagagggagaaggactatgaaaatgatccacttccggtcttcatctgtgaaatcgctgtcccaggagatgcgatgtactatccgcctgttggatgactcggaaatttcatgtcatattcaacgcgagacaaagggccagtttctgattgatcacatttgcaactactactccctgctcgaaaaagattacttcggtatccgctacgtggaccctgagaaacagcgccattggctggagcctaacaaaagcatctttaaacagatgaaaacccaccccccttatactatgtgttttagagtaaaattctatccacatgaaccactcaaaattaaagaagagttaacacggtatctgctctatctgcagatcaaaagagacatttttcacgggagacttctgtgcagtttttccgacgctgcttacctgggagcctgcatcgttcaggcagaattgggagactatgaccctgatgaacaccctgagaattacatcagtgagttcgagatcttccccaaacagtcccagaagctcgagaggaaaattgtggaaatccataaaaacgagctgcgtggccagagccctccagtagccgagtttaacctccttctcaaggcccacacactggagacctacggtgtcgacccccacccatgtaaggatagtactggtacaacaaccttcctaggcttcacagccgctggttttgtggttttccagggaaacaaacggatccatctgattaagtggcccgacgtgtgcaagctgaaattcgaaggcaaaacattctatgttatcggtacgcagaaggagaaaaaggccatgctggcgtttcacacctccacaccagccgcttgcaagcatctttggaagtgtggcgtggagaatcaggctttttacaaatacgcgaagtcttcacagattaaaactgtgtcaagttctaagatctttttcaaaggttccagatttaggtacagtggcaaagtagcaaaggaggtggtcgaagcttcgtctaagatacagagggagccaccagaggtgcacagggccaatatcacccagtctcgaagctcacatagtcttaacaaacagctgattataaacatggaaccgctccagcctctgctgcccagcccatctgagcaggaagaggaactgccgctgggggaaggggtgcccctgcccaaggaggaaaatattagcgctcctctgatcagcagctcccctgtcaaggccgctagagagtacgaagaccccccaagtgaagaggaggataagattaaggaggaacctcttaccatttccgaactcgtgtacaaccccagcgccagcctactgcccacaccggtggacgatgatgaaatcgacatgctgtttgattgcccctcgaggcttgaattggagagggaggacaccgattccttcgaggacctggaagccgacgagaacgcgttcttgatcgccgaggaggaggagctgaaggaggctcgacgtgccttaagctggtcctatgacattcttactggtcatatacgcgtgaatcctctggtgaagtctttttctcggctgctcgttgtggggctgggcctgctgctttttgttttccccctgctgctactgttgttggaatctggtattgaccttagttttctttgcgaaattaggcaaacacctgagtttgagcagtttcattatgagtactactgccccctgaaggagtgggtggcgggaaaggtgcacctgattctctacatgcttggatgtagttag

SEQ ID NO: 223141 - DNA, 642 bp, synthetic construct
  misc_feature 1..642: note = Description of Artificial Sequence: Synthetic coding sequence
  source 1..642: mol_type = other DNA
atgcaggccgaggagacaaaaggaattggaattacatcaatggccaagtgtttggttaagattcagactcgacgatctctccaattacacatggtaaatcattgtaatagcaacgttttcgtgcgcctcctgaggctggggagcaaggtgactgccagaaacactggcgttccgctccctaaggaagaaaacatttctgcaccattaatctcgtcgagtccagtcaaggcggctcgcgagtatgaagacccaccgagtgaagaagaagataaaataaaggaagagcccctaaccatatctgagctggtgtacaacccttcggccagtctccttcccactccagtggacgacgatgaaattgacatgctgttcgattgccctagccggttggagcttgagcgtgaggacactgattctttcgaagacctggaagcggacgaaaatgctttccttattgcggaggaggaagagctgaaagaagccaggagggctctgagctggagttatgacatactgacgggacatatccgtgtaaacccgttggtgaagtcattcagccgactcctcgttgtaggtctcgggcttctactgttcgtgtttccgctgctgctactcctcctcgaatcggtttctatgcagtag

SEQ ID NO: 223142 - DNA, 804 bp, synthetic construct
  misc_feature 1..804: note = Description of Artificial Sequence: Synthetic coding sequence
  source 1..804: mol_type = other DNA
atgtgcttcagagttaagttctacccccacgagccgctgaagatcaaggaagagctgacacgatatctgctttacctccaaatcaaaagagacatatttcacggcaggctcctgtgtagcttttcagatgcagcatatctgggcgcatgtattgtgcaggctgagctgggggattacgacccagatgagcaccccgaaaattacatcagcgagtttgaaatatttcccaagcagtcccagaaactggagcgcaaaattgtggaaatacataagaacgaactccgaggccagtcccctccagtggctgagtttaatctactcctgaaggcccatactttggaaacatatggagtggaccctcacccatgcaaggatagtacaggcaccacaacgtttcttggctttactgccgctggtttcgtggtcttccaggggaataagcgtattcatcttataaaatggcctgatgtctgtaagttgaaatttgaaggcaagactttttacgtgatcggtacccaaaaagaaaagaaagcaatgctggcctttcatacttcaactcctgccgcttgtaaacatctctggaaatgtggtgtggaaaaccaggccttctacaagtacgccaaaagttcccagataaaaaccgtttccagtagcaagatcttttttaagggttctcggttcaggtactcagggaaagtggcaaaagaagtggtggaggccagcagcaaaattcagagagagccaccagaggtccaccgatgcgttcaaaagaagatctgttcatgtttcggcgtcacatggtag

SEQ ID NO: 223143 - DNA, 1089 bp, synthetic construct
  misc_feature 1..1089: note = Description of Artificial Sequence: Synthetic coding sequence
  source 1..1089: mol_type = other DNA
atggtttttaggcgaggacagtccccacctgttgctgagttcaatctgcttctcaaggcccacacccttgagacttacggcgtcgacccccacccctgcaaggatagcaccggaacgacaactttcctcggctttaccgccgcaggattcgtggtctttcagggcaataaacgcatccacctgatcaagtggccagacgtctgcaaactgaagttcgaaggaaagaccttctacgtcatcggcacccaaaaagagaagaaagccatgcttgcttttcacactagcactcctgcagcatgtaagcatctgtggaagtgcggcgttgaaaaccaggctttctacaaatacgctaaatcttcccaaatcaagactgtgagctcatctaaaatttttttcaaagggtcccgatttcgatatagtggcaaagtggccaaagaggtggtcgaagcaagctcaaagatccagagagaaccccctgaggtgcatcgcgctaacattacccagagtcgttcctcacacagtttaaacaaacaactgatcatcaacatggagccgctgcagcccttactcccgtcccctagcgagcaggaagaggagctgcctctgggcgaaggtgtgccactgcccaaagaagaaaatatctctgctcccctcatttcctcttcccccgtgaaagcagctagagagtatgaagaccccccaagtgaagaggaggataaaatcaaggaggagccgcttactatctccgagctggtgtacaacccgtcagcttcccttttacccactcctgtggacgatgacgaaattgacatgctatttgactgtcctagtcggctggaactggagcgcgaagatactgattcattcgaggaccttgaagctgacgagaacgcattcttaattgctgaggaagaagaacttaaggaggccagaagggccctttcctggtcatatgacatcctgaccgggcatattcgggtgaatcccctcgtcaaaagctttagtagactccttgtagtagggctggggttgctgctgtttgtgttccctcttctcctgttgctgttggaatcagtctcgatgcaatag

SEQ ID NO: 223144 - DNA, 1671 bp, synthetic construct
  misc_feature 1..1671: note = Description of Artificial Sequence: Synthetic coding sequence
  source 1..1671: mol_type = other DNA
atgttcgcttcctgtcactgcgtcccacgtgggcgtcggaccatgaagatgatccacttcagatctagctccgtcaagagcctttcccaggagatgcggtgcactatcagactgcttgatgactcggagatctcttgccatatccagcgtgagacaaaaggtcagttcctgatcgatcatatctgcaactattattctctactggagaaggattacttcggcattaggtatgtggatcccgaaaaacagaggcactggttagaacccaataaatctatcttcaaacagatgaaaacacatcccccttatacgatgtgcttcagggtgaagttctaccctcatgagccattgaagatcaaggaagagctgacccgttacttactgtacctccagataaagagagatattttccacggacggctgctgtgtagctttagtgatgcggcttatctcggggcttgtatcgtgcaggccgaattgggcgactatgacccagacgagcaccctgaaaattacatctcagagttcgaaatcttcccaaagcaaagccaaaagctagagcgaaagattgtagaaattcataagaacgagctgcggggtcagtccccaccagtggcagagttcaaccttcttctgaaagcacacacactagaaacatacggggtggacccacacccctgtaaagacagcactggcacgactacatttctcggattcaccgcagcagggtttgtcgtcttccaggggaataaacggatccatctgattaaatggcccgatgtgtgcaagctgaagtttgagggtaaaaccttttatgtgattggcacacagaaagagaagaaggcgatgctagcttttcacacgagcactccagctgcctgcaaacacctctggaaatgtggggttgagaatcaagctttttataaatatgctaaaagtagtcaaatcaagaccgtgtctagctcaaagatcttcttcaagggatcgagattccggtattcagggaaagttgccaaagaggttgtggaggccagcagtaagattcagcgtgagccccctgaagtccaccgagcaaatataacccagtcaaggtcctcacattcgctgaataagcaattgatcatcaacatggagcctctgcagccattgctgccgtccccctcagagcaggaggaggaactacccttaggagaaggtgtgcctctgcctaaggaagaaaacatcagcgcaccattgatctctagctcaccagtgaaggctgcacgagagtatgaagaccctccctcagaagaggaggacaagattaaagaagaacctcttacaatcagcgaactcgtgtataacccttcagcctccttgttacccacccccgtagatgacgacgagattgacatgctgttcgactgcccaagcagactcgaattggagagggaggacaccgactccttcgaggacctggaggcggatgaaaacgccttcctgattgccgaggaagaggaactgaaggaggccaggcgtgctctttcgtggtcgtatgacattttgacaggacatatcagagttaacccactagtgaaatccttcagcaggcttctggttgtcgggctcgggctgctcctgtttgtctttcccttacttctgttattactggagagcgtgtcaatgcagtag

SEQ ID NO: 223145 - DNA, 423 bp, synthetic construct
  misc_feature 1..423: note = Description of Artificial Sequence: Synthetic coding sequence
  source 1..423: mol_type = other DNA
ggcactactacatttttaggcttcaccgccgcaggttttgtggtctttcaggggaataaaagaatacatctgattaagtggccggatgtctgcaaactgaagttcgaagggaaaacattttacgtcatcggtactcaaaaagagaaaaaggcgatgctggcctttcacaccagcacccctgcagcatgtaagcacttatggaagtgcggagttgagaatcaagcattctataaatatgcaaaatcttctcaaataaaaaccgtgtcctctagtaagatatttttcaaaggctctcgatttaggtacagcggtaaagtcgccaaagaagtggtcgaggcatcatcaaaaatacaaagggaacccccagaggtccaccgatgcgtacaaaagaagatctgctcatgtttcggggtgacatggtag

SEQ ID NO: 223146 - DNA, 2145 bp, synthetic construct
  misc_feature 1..2145: note = Description of Artificial Sequence: Synthetic coding sequence
  source 1..2145: mol_type = other DNA
atgctccatctgaaggtccaattcctcgatgacagccagaaaatctttgttgtcgatcagaagagcagtggcaaagcgctcttcaacctgagctgtagccaccttaatctggctgagaaagaatacttcggactagagttctgcagccatagcggaaacaatgtgtggttggagttgctgaagccaatcacaaaacaggtcaagaatcccaaggagattgtgttcaagttcatggtgaaatttttccctgtggaccccggacaccttcgagaagaactgactcgctacctgttcaccctgcagattaagaaagacctggcgctgggcaggctgccttgtagcgataattgtaccgccctcatggtgtctcacattttacagtccgaactgggtgatttccacgaggagaccgaccggaaacatctggctcagactcgttacctacctaatcaggattgcctggaggggaagattatgcactttcatcagaagcatattggaaggtcccctgctgagagcgatatactgttgttagacatcgcgagaaagttggatatgtatggcatcaggccacaccccgcatccgatggcgaaggcatgcaaattcatctggcagtggcacatatgggagtgctggtgctcagagggaatacaaaaattaacacctttaactgggctaagattcggaagctgtcatttaaaaggaagcactttctgattaagcttcatgctaacattctggtgctgtgcaaagataccctagaattcacaatggccagccgagacgcctgtaaggctttctggaagacgtgtgtggaataccacgccttctttagactgagtgaggagccgaagtctaagcctaagaccttgctgtgcagtaaggggagttcctttcgatattccgggcgaacacaacggcaactgttggaatacggcagaaagggtaggctcaagagtctgccatttgaacggaaacattatccttcccagtatcatgagcggcagtgtcgtagcagcccagaccttctgtccgacgtgagtaagcaggtggaggaccttcgtctggcttacggagggggatattatcaaaatgtaaatggcgtccatgctagcgaacctgtgctggaaagtcggaggagaaattctgcccttgaggtgactttcgccacagagttagaacactccaagcccgaggcagatccgacgttattgcaccaatcacagtctagctcaagctttccgttcatttatatggacccagtattcaacaccgaacccaatcctaatccggaccctagagatatcttttcagagcgctctagcctgtccagcttccagaccagctgtaagttctcagggaaccatatgtccatttactctggccttaccagcaaggtgcggccagctaaacaacttacatacaccgatgtgccctatatcccctgcacaggacaacaagttggcatcatgcccccacaggtgttcttctacgtcgataagcccccacaagtgccacgctggtcgccaattagagcagaggaacgaacctcaccacactcttacgtggaacccaccgctatgaaacccgctgagcgcagccccagaaacattcgaatgaaatcatttcagcaagatctccaggttctgcaagaggccattgcaagaaccagtggccgatcaaatattaacgtcgggcttgaggaagaggatcccaatttagaggacgccttcgtgtgtaacatccaggagcaaacccctaagaggtcacaaagtcaatcagatatgaagaccatccgattccctttcggctctgagtttagaccacttggaccctgtcccgcactctcacataaggcagacttgttcaccgacatgttcgctgaacaggagctgcctgccgttctcatggatcagtctaccgctgagcggtacgtcgccagtgagtccagcgattcagagtcagagattctgaaacctgattactacgccctctacggtaaggaaatcagaagcccgatggccaggatccgactttcatcgggatccctccagttggatgaagaagacgaggatgcatactttaatacccctacagccgaggatcgcaccagtttgaaaccctgcaattacttcttagcttag

SEQ ID NO: 223147 - DNA, 1785 bp, synthetic construct
  misc_feature 1..1785: note = Description of Artificial Sequence: Synthetic coding sequence
  source 1..1785: mol_type = other DNA
atggtgtctcatattctccagtcagagctaggggattttcacgaagagactgacaggaagcacttggcacaaaccaggtacctgccaaaccaggactgccttgagggaaaaatcatgcacttccatcagaaacacattggtaggagtcctgctgagtccgatatcctgctgttggacatagcccgtaaacttgacatgtatgggatccgtccccacccggcttccgacggggagggtatgcaaatacacttggcagtggcacatatgggagtgctggtgcttcgcggtaataccaaaataaatactttcaattgggcgaaaatccggaagctgtcattcaaacggaagcactttttgattaagcttcacgctaatatcctcgttctgtgtaaggacaccctggaatttaccatggcctcccgagacgcctgcaaggccttctggaaaacctgcgtcgaataccacgccttttttcgcctctctgaagagccaaaatccaaaccaaaaactcttctgtgtagtaagggatcctcctttagatattcaggcaggactcaaaggcagttgctagaatacggacgcaaaggtcgcctaaagagtctgcctttcgaacggaaacattacccttcccagtaccacgagcggcagtgtcggtcgtcccctgacctcttgagcgatgtgagtaagcaagtggaggacctgcgcctggcctacgggggtggctattatcagaacgtaaacggggtccacgctagcgagcctgttttggagagtagacgaagaaattccgcactggaagttacattcgcaaccgaattagagcacagtaaaccagaggccgatcccactctgctgcatcagtctcagtctagttcttcatttccgttcatctacatggaccccgtgttcaacacagaaccaaatccgaatcccgacccccgtgatatctttagtgagaggtccagcttgagttccttccaaacgagctgcaaatttagcggcaatcacatgagcatatatagtggcctaacctccaaggtacgcccagcaaagcagctcacttataccgacgttccctacattccttgtaccggccaacaagtcggtataatgccacctcaggtatttttctacgtggacaaaccccctcaagtacctcgatggtctcccatccgcgcagaggaacggactagtcctcactcttacgtggagcccactgccatgaagccagccgagcgaagcccacgcaacattaggatgaagtccttccagcaggatctgcaggttttacaggaggcgattgcgaggacttcgggtcggagtaacattaacgtcggacttgaggaggaagatccaaatctggaagatgctttcgtttgcaatattcaagagcagacacccaagaggtctcagtctcagtctgacatgaagactattaggttcccattcggatccgaatttcgccctctgggaccctgcccagccctgtcccataaagcagacctcttcactgatatgttcgccgaacaggaactgccggctgtgctgatggaccagagtaccgcagaacgttacgtggccagcgagtctagcgactctgaatcagagatcctaaaaccagactactatgccttgtatgggaaggaaatacgatccccaatggcccgtattcggctgtcaagtggatctctgcagttggacgaggaggacgaggatgcctatttcaacacaccaacagccgaggatagaacctctcttaagccctgcaactatttcttggcctag

SEQ ID NO: 223148 - DNA, 2043 bp, synthetic construct
  misc_feature 1..2043: note = Description of Artificial Sequence: Synthetic coding sequence
  source 1..2043: mol_type = other DNA
atggccctcgatggaatacgaatgcctgacgggtgttacgccgatgggacctgggagttatctgtccacgtcaccgatctcaacagagacgtaaccctacgggtcacaggagaggtgcatatcgggggtgtcatgctcaagttggtggaaaagctggacgtgaagaaagactggtccgaccatgccctgtggtgggagaaaaagcgtacctggctgctgaagacacattggactctggacaagtatggcattcaggccgatgcaaaactgcagttcacccctcaacacaaactcctgcgacttcagctacctaacatgaaatatgtcaaggttaaagtaaatttttctgacagggtgtttaaagccgtgtctgacatttgcaaaacttttaacataaggcatcctgaggagctatccttacttaaaaaacctagggatccaacgaagaagaaaaaaaaaaaactcgacgatcagagcgaggacgaagcgctggagttggagggccctttgatcactcctggaagtgggtctatttactcttcacctggtctctactctaagaccatgacaccgacctacgacgcacatgacgggtcaccactgtcccctacgagtgcctggttcggggacagcgccctaagcgaaggaaaccctggcatcctggcggtctcccaaccaataacctctcccgaaattctcgccaaaatgttcaagcctcaagctctcctcgacaaagccaagattaatcagggatggctcgactctagcaggagcttaatggagcaggatgttaaagagaacgaggctctgcttcttaggtttaagtattatagcttttttgatctaaatccgaagtatgacgccatccgcatcaatcagctgtacgaacaggcaaagtgggccatcctgcttgaagagattgagtgtacggaggaggaaatgatgatgttcgctgcccttcagtaccatattaacaagctctcaataatgacatctgaaaaccacctcaacaatagcgacaaagaagtggatgaggtggatgctgcccttagcgatcttgagatcaccctcgaaggcggaaagacttccacaattctcggcgatattacctctattccggagctcgctgactatatcaaggtgttcaaaccaaaaaagctgacactcaaaggctataaacaatattggtgtaccttcaaggatacctcaatctcatgctacaaatctaaggaggagtccagtggcacccctgcccatcagatgaatctgcgtggctgcgaagtcacccccgacgtgaacattagtggtcagaagtttaacatcaaacttctcatcccggtggctgaaggaatgaacgagatttggctgcgttgcgacaatgagaagcaatacgctcattggatggcagcctgcagactcgcttcaaaagggaagactatggctgattccagctacaacctggaggtgcagaacatcctgagttttctgaagatgcaacatctgaacccggatccccaattgatacccgagcaaataaccactgatatcacaccagagtgtctcgtcagccccagatatcttaagaagtacaagaataagcagatcacagctcgcatccttgaagcccaccagaatgtagcccagatgtctctgatcgaagcgaagatgcgatttatccaggcctggcagagcctgccggagtttggaataacgcatttcattgcgcgttttcagggaggcaagaaggaagaacttatcgggatcgcctataacaggctgatcaggatggacgcctctacaggggacgcaataaagacttggaggttcagcaacatgaagcagtggaatgtcaactgggagatcaagatggtaactgtagagttcgccgacgaagttagactgtcctttatttgcacggaagtcgattgtaaggtggtgcatgagttcataggagggtacatctttcttagtaccagggcaaaggatcagaatgagtctctggacgaggagatgttttacaagctgactagcggctgggtctag

SEQ ID NO: 223149 - DNA, 2064 bp, synthetic construct
  misc_feature 1..2064: note = Description of Artificial Sequence: Synthetic coding sequence
  source 1..2064: mol_type = other DNA
atggcccttgacggcattagaatgcccgatggctgttatgctgacggcacctgggagctatctgtgcacgtgacggaccttaatcgcgatgttaccctcagagttacaggggaggtccacatcgggggtgtgatgctcaaactcgtggagaagctggatgtgaaaaaagattggtcagaccatgccctctggtgggagaagaagcgcacttggctgctgaagacccattggaccctggacaaatacggtatccaagccgacgcaaagctccagttcacaccccagcataagctgctacgccttcaactgcctaacatgaaatacgtgaaagttaaagtgaacttctccgaccgggtgtttaaagccgtgtctgacatatgtaagactttcaatatccgtcatcccgaggaattgtccctgctgaagaagccgagggacccaactaagaagaaaaaaaagaagctggacgaccagtctgaggacgaagctctggagttggagggcccattaatcactcccggttccggcagcatctactcctctccaggcttgtattcaaaaaccatgacacccacctacgatgctcatgatggcagtccactttcccctacttctgcttggttcggtgactcagccctaagtgagggcaatcccggaattctcgctgtgtctcagcctataactagcccagaaattctggcgaaaatgtttaagccccaggccctgttagacaaggcaaagattaaccagggctggttagactctagccgctctcttatggagcaagacgtgaaggagaacgaggctctacttctgcgattcaaatattactcattcttcgatttaaacccaaagtacgacgcgatcagaatcaaccagctgtatgaacaggctaaatgggccattctgctagaggaaatcgagtgcacagaggaggagatgatgatgtttgcagctctacaataccatatcaacaaactgagcatcatgacctccgaaaatcacctgaataattcggataaggaggttgacgaagtggatgccgctttaagtgaccttgagattactctggaggggggaaagacctccacaattttaggggatattacgtccatccccgaactggccgactacatcaaagtcttcaagccgaagaaactgacactgaagggttacaaacaatattggtgtactttcaaggacacctctatcagctgttacaaaagcaaggaggaatcatcagggacccccgctcaccagatgaatctgcgcggatgtgaggtcacccccgacgtgaatatcagcggccagaaattcaacattaagctgctgatcccggtggctgaggggatgaacgagatctggctccgctgtgacaatgagaagcaatacgcacattggatggccgcttgtcgcctggcgagcaagggaaagacaatggcagacagctcatacaacctggaagttcaaaatattctgagtttcctgaaaatgcaacacctgaaccccgatccccagctgatccccgaacagattacgacagacatcacccccgaatgtctggtcagtccacgttacctgaagaaatataagaacaagcaaccagggtatatcagggatctgattaccgcgaggattttagaagctcatcaaaatgtcgctcagatgtctctgatcgaagcaaaaatgcgctttatacaggcctggcagtccctgccagagttcggaattacccacttcatcgcaagatttcaggggggtaagaaggaggagctaatagggatagcctacaaccgccttatccggatggacgcctctactggtgatgccatcaaaacatggcggttttcgaacatgaaacagtggaatgtgaactgggagataaagatggtcaccgtagaatttgccgacgaggtgcgactttctttcatttgtacagaggtcgactgcaaagtagtgcacgaatttatagggggatatatttttctaagcaccagagcaaaggaccagaatgagtccctcgatgaagagatgttctataagttgacgtcaggctgggtctag

SEQ ID NO: 223150 - DNA, 2043 bp, synthetic construct
  misc_feature 1..2043: note = Description of Artificial Sequence: Synthetic coding sequence
  source 1..2043: mol_type = other DNA
atggcgttggatggtatccgaatgcccgacggctgctatgccgacggcacatgggagctgtccgtacacgtgactgatttgaaccgcgacgtcaccctgagggtgacaggtgaagtccacatcgggggagtcatgctcaaacttgtggagaaactggatgtgaaaaaggattggtccgatcacgcattgtggtgggagaaaaaacggacttggcttctgaagactcattggacactcgacaaatacggcatccaagccgatgccaagctacagttcaccccccagcacaaacttctgcgcctccagctgcctaatatgaaatacgtcaaagtaaaagtgaacttttctgaccgcgttttcaaagccgttagtgacatctgtaagacatttaacattagacatccggaggaactctctctgctcaagaagccccgtgacccaaccaaaaaaaaaaagaagaaactggatgatcagtccgaagatgaagcgctggagctggaagggcctttaatcacccctgggtccggctccatctattcttccccaggcctgtatagcaagaccatgaccccaacctatgacgcccatgatggctctcccctttcccctacaagtgcatggttcggggactctgccctgtccgaaggaaatccaggcattctggcagtctcccagcctatcacctctccggagattctagccaaaatgtttaaaccccaggctcttttagacaaggctaagatcaatcaaggctggctggattcatctagatccctcatggagcaggacgttaaggaaaatgaggcactgcttctgcggtttaagtattactccttcttcgacttaaatccaaaatacgatgccattaggatcaatcaactgtacgagcaggccaagtgggcaatactgctagaagagattgaatgtacagaagaggagatgatgatgttcgccgcactgcaatatcatataaacaaattgtcaatcatgacatcggaaaaccacctgaacaacagcgacaaagaggtggatgaggtcgatgctgccctgtcggatctggaaataactctggaaggcggtaaaaccagcaccattctgggggacatcacatcaatcccagagctggcagattacattaaagtcttcaagccaaagaaactgaccttaaagggctacaagcagtactggtgtaccttcaaggacacatctataagctgctacaagagcaaggaggagagctcaggtacgcccgcacaccagatgaacctccggggatgcgaggtaacaccggatgttaacattagtggacagaagtttaacataaagctgctcatccccgtcgcagagggcatgaacgagatatggctaaggtgcgacaacgagaagcaatacgctcactggatggcagcttgtaggctggctagtaaaggcaaaaccatggccgattcttcgtacaacctggaagttcagaacatactgagcttccttaagatgcaacatttgaatcccgacccccagctcatcccagaacagattactaccgatataacacctgaatgcctggtctcacctaggtacttgaagaagtataaaaacaagcagattaccgccaggatactggaagctcatcagaacgtagcccaaatgtctttgatcgaggccaaaatgcgtttcatccaggcatggcaaagccttccggaatttgggatcacacactttatcgctaggtttcagggtggcaagaaggaagagcttatcggcatcgcgtacaatcgcctgatcaggatggatgcttctactggggacgccatcaaaacctggagattctcaaatatgaagcagtggaatgtgaactgggaaatcaagatggtgacggtcgagttcgcagacgaggtcagactgtcatttatttgtactgaggtggattgtaaagtggtgcacgagttcattggagggtacatctttcttagcacacgggctaaagaccagaacgagtcgctcgacgaggagatgttctataaactgaccagtggctgggtgtag

SEQ ID NO: 223151 - DNA, 1902 bp, synthetic construct
  misc_feature 1..1902: note = Description of Artificial Sequence: Synthetic coding sequence
  source 1..1902: mol_type = other DNA
atggcgctggacggcattagaatgccagacggttgctacgctgacggaacctgggagctgagcgttcatgtaacagacttaaatagggatgtcaccctcagggtgaccggagaggttcatattggtggggtgatgttaaagttagtggagaaactggatgtcaagaaggattggagtgaccacgctctgtggtgggagaagaaaaggacatggctgctgaagacacactggactctggataagtatggcatccaggccgacgcaaaattgcaattcacgccacaacacaagctgctaagactgcagctgcctaatatgaagtatgtgaaagtcaaagtgaactttagcgaccgcgtcttcaaggccgtaagtgatatttgtaaaactttcaacataaggcatccagaagagctgtcattgttgaaaaaaccacgggatcctactaagaaaaagaaaaagaaactggacgaccaatctgaagatgaggcattagagctggagggtcccctgatcactcctggttcgggcagcatctactcctcaccgggactgtacagcaaaacgatgacacctacatacgacgcacatgatggctctccgctgtctccaacctccgcctggttcggagattctgcactcagcgaggggaatccagggattttggcggtgtctcaacctataaccagtcctgagatcttggcaaagatgtttaagccccaagccctacttgataaagccaaaatcaaccagggctggctggactcttcgaggagtctgatggaacaggatgtcaaggagaatgaagctcttctcctgcgcttcaaatactattccttcttcgacctgaaccctaagtatgacgcgattcgtattaatcagctctatgaacaagccaaatgggccatcctgctggaggagattgaatgtacggaggaagagatgatgatgtttgccgctctgcagtaccacattaacaaattgagcataatgacaagcgagaaccacctgaacaattcagacaaggaggtggatgaggtggatgccgcactttctgacctggaaattaccctggagggcggtaagacctcaaccattttgggtgacataacctctatccctgagctggccgactatataaaggtgttcaaaccaaaaaaactgaccttgaaagggtataagcaatactggtgcacctttaaggatacatccatcagctgttacaagagcaaggaggaatcctctggcactcctgcccatcagatgaatctccggggttgcgaggtgacccccgatgtgaatatctccggccagaaattcaatatcaagttattaattccagtggcagaaggcatgaacgagatctggctgaggtgcgacaacgagaaacagtacgcacattggatggcggcttgtagactggccagtaagggtaaaacaatggccgatagctcttacaacctcgaggtgcaaaacattctctctttcctcaaaatgcagcatctcaatcctgatccacaactgatcccagagcagatcacaacggacatcacacccgaatgtctcgtgtctcctcggtacttgaaaaaatataagaataagcaaccagggtacatccgcgacctcattacggctcgcatcctggaagcccatcagaatgtcgcacagatgtccttgatcgaggccaagatgcgcttcatccaagcatggcagtctctcccagaatttggcatcactcatttcatcgctcgctttcaggggggtaaaaaggaggagctaattggaattgcctacaatagacttatcaggatggatgcttccacgggtgacgccatcaagacatggcgattctcaaacatgaaacagtggaacgtcaattgggagatcaaaatggtgaatagctag

SEQ ID NO: 223152 - DNA, 2064 bp, synthetic construct
  misc_feature 1..2064: note = Description of Artificial Sequence: Synthetic coding sequence
  source 1..2064: mol_type = other DNA
atggccctcgacggtatacgtatgccagatgggtgttatgccgatggaacatgggaactgtccgtgcatgtcaccgacctcaaccgcgacgtaaccctgagggtgacgggcgaggtgcatataggcggagtaatgttgaaactggtggagaaattggacgtaaagaaagactggtcagaccacgcactctggtgggagaaaaagaggacgtggctacttaagacacattggaccctagacaaatacggcatccaagctgacgctaagctgcagttcaccccacaacacaagctgctacggctccagcttcccaacatgaagtatgtgaaagtaaaggtgaattttagcgaccgagtgtttaaggccgtgtcagacatatgcaaaactttcaacatacgtcacccagaagaactgtctctccttaaaaaaccacgcgaccctactaagaagaagaaaaaaaagctggatgaccagagcgaggacgaagcattggagttggagggccctctaatcacccccggtagtggtagtatatactccagtccagggctgtattctaaaaccatgacaccgacatatgacgcacatgatggctcccccctgtccccaaccagcgcttggttcggcgattccgccctcagcgaagggaatccgggaatcctggctgtctctcagccaatcacctcgcccgagatactggcaaagatgtttaagcctcaggcgctgctggataaggccaagatcaatcagggctggctggattcttcccgatcactgatggagcaggacgtgaaagaaaatgaagccctgctcctgcgttttaagtactacagttttttcgacttgaacccgaagtatgatgcaatcaggatcaatcagctgtatgagcaggcgaagtgggccatcctgctggaagagattgaatgtaccgaggaggagatgatgatgttcgctgcgctgcagtatcacatcaataaactgtccataatgacctccgagaatcacttgaacaactccgataaggaggttgacgaagtggacgccgcactgtccgacttagaaatcacactagaggggggaaaaaccagtaccatactgggcgatattacaagtatcccagagctcgcggactatattaaggtctttaagcccaaaaaattgacgctgaaagggtataaacaatactggtgtactttcaaggatacatccataagctgttataagtcgaaggaagaaagtagcggcacacccgcacaccagatgaacctccggggttgcgaggtcacacccgacgtgaatatttcaggtcaaaaatttaacataaagctactgatacccgtcgcggaggggatgaatgagatatggctcagatgcgataatgagaaacagtacgctcactggatggctgcctgccgactagcgagtaagggaaaaacaatggccgactctagttataacctcgaggtccagaatatcctgtcttttctcaagatgcagcacctgaatcctgatccccaattgatccctgaacagatcacaacagacatcacaccagagtgtttagtgagtcccagatatctgaagaagtacaaaaataagcaacctggctacatccgagatctgattacagcaagaattctcgaggcccaccagaacgtggcgcagatgtctctaatcgaggccaagatgaggttcattcaagcctggcagtccctgcctgagtttgggattacccatttcatcgcccgttttcaaggagggaagaaagaggaactaataggaatagcttacaacaggctgatacggatggacgcgagcacaggagatgctatcaaaacttggcggtttagtaacatgaaacagtggaatgtcaattgggagatcaaaatggtgaccgtggaattcgctgacgaagtccgcttgagctttatttgcactgaagtagattgcaaagtggtccacgagtttatcggcggttatattttcctgagtactcgtgccaaagaccaaaacgagagcttagacgaagagatgttctataaactaacatccggctgggtgtag

SEQ ID NO: 223153 - DNA, 462 bp, synthetic construct
  misc_feature 1..462: note = Description of Artificial Sequence: Synthetic coding sequence
  source 1..462: mol_type = other DNA
atggctttggacggcattcgcatgcctgacgggtgttacgcagatggcacatgggagttgtctgtccatgtgacggatcttaatagagatgtgactctgagagtgacaggcgaggttcatattggcggagtgatgctgaaactcgtggagaaactggacgtgaagaaagactggagcgaccacgccctctggtgggagaaaaagagaacatggctgctgaaaacccactggaccctggacaagtatggaatccaagccgacgccaagctgcagtttactccccagcataaacttctgcggttacagttgcctaacatgaaatacgtgaaggtgaaagtcaacttcagtgacagagtctttaaggctgtgagtgacatatgcaagaccttcaacattcgccatcctgaggaattgtcattactgaagaaaccacgggatccaactaaaaagaaaaaaaaatag

SEQ ID NO: 223154 - DNA, 2004 bp, synthetic construct
  misc_feature 1..2004: note = Description of Artificial Sequence: Synthetic coding sequence
  source 1..2004: mol_type = other DNA
atggccggtatgaagacggcctcaggagactacatcgactctagttgggagctcagggtgttcgttggggaggaagaccccgaggcagagtcagtgacgttgagagtgactggggagtcccacattggcggtgttcttctgaaaatcgtggagcagataaatcggaaacaggattggtctgaccatgccatctggtgggagcagaagaggcagtggctgctgcagactcattggacgttggataaatacggaatactggctgatgcacggctgttcttcggacctcagcaccgacctgtcattctgcggctgcccaatcgacgagcacttagactgcgtgcttcattttctcagccgctgtttcaagccgtagcagccatctgtaggctactgtcaatccggcacccagaggaacttagtttgctgcgcgcaccggaaaaaaaagaaaaaaagaagaaagaaaaggagcccgaagaggaactctacgatcttagtaaggtagtgctcgccggaggcgttgcccctgctctgtttcggggaatgcccgcacatttcagtgactccgcccagactgaagcatgttatcacatgctcagccgtcctcagccaccacctgatccactcctgctgcagcgtctgcccaggccttcttcactaagcgataagactcagctgcacagccgctggcttgacagtagcaggtgtctgatgcagcaagggataaaagctggcgatgccctctggctccgcttcaagtactactcgtttttcgacttggacccaaaaactgatcccgttaggcttacgcagctgtacgagcaagctcggtgggatttattactcgaagaaattgactgtacggaggaggaaatgatggtgttcgccgctctgcagtaccacattaataagctgagccaatccggcgaggtcggggagcccgcaggcaccgaccctggtctggatgacttggacgtagccctgagtaatctcgaggttaaattagaaggctccgcaccaaccgacgttcttgacagcctcaccacgatccccgaactgaaagatcacttgcgtatcttcagaattcccagaagacccaggaagttaactttgaaaggctacagacagcactgggtcgtgtttaaggagaccaccctgagttactataagtcccaagacgaggcacccggtgatcccattcagcagctcaatctgaaaggatgcgaagtggtgcccgacgtgaatgtgtctggccagaagttttgcattaaactgctggtgccgagcccagaggggatgagcgagatctacctacgctgccaggatgaacaacaatacgctcgatggatggctggctgtcggttggcgtcgaaagggagaaccatggccgactcctcttataccagtgaggttcaggccattctagcctttctaagtctccagaggaccggctccggaggaccagggaaccacccccacggacctgatgcttccgcggaaggactcaatccttacggcttagtcgctcctaggtttcagagaaagttcaaagcgaaacagcttaccccgagaatcctcgaagcccaccagaatgttgcccaattaagtttggccgaagcacaactccgattcatccaggcgtggcaaagcctgccagacttcggtatatcgtacgttatggtccgcttcaaggggtctcgcaaggacgagatccttggcattgcaaacaatcgactcattcgcatagacttagcagtcggagatgtggtgaagacgtggagattttccaatatgcggcagtggaacgttaattgggatataagacaggtggccattgagttcgacgaacacattaatgttgccttctcatgcgttagcgcatcctgtcgcattgtccacgaatatatcggcggatacatttttttgagcacacgggagagagcccgaggtgaagaactggatgaggatttgtttctgcaactgacaggcggacatgaggccttctag

SEQ ID NO: 223155 - DNA, 1992 bp, synthetic construct
  misc_feature 1..1992: note = Description of Artificial Sequence: Synthetic coding sequence
  source 1..1992: mol_type = other DNA
atggcgggtatgaaaacagcttctggggactacattgacagttcgtgggaacttagagtgttcgtcggagaagaagaccccgaagcagagagtgtgacactgcgggttaccggggagtcgcacattggtggggtcttactgaagatcgtagagcagattaacaggaagcaggattggtcagatcacgcaatctggtgggaacagaaaagacagtggttgctgcagacacactggacactcgacaaatacgggatcctcgcagatgctcggctcttcttcgggcctcagcataggcctgtgatactgcggcttcccaatcgcagagccctgcggctgcgagccagctttagccagccactttttcaagccgtcgccgctatctgcagactcctgtctatacggcatcccgaggaactgagcctgctgagggcaccagagaagaaggagaaaaaaaagaaggaaaaagaaccagaagaggaattgtatgacctgtcaaaggttgtcctggcaggcggagtggctcccgcactctttagggggatgccggctcacttctcggatagcgctcagacagaagcatgctaccatatgcttagccgccctcaaccacccccagaccctctgttgctgcagagattgccaagaccttcttctctttctgataagacacagcttcacagcaggtggctggactcttcccggtgtctgatgcagcaaggaatcaaggctggagacgctctatggctaaggttcaagtattactcatttttcgatctcgatcctaagacagatcccgtcaggctgacccagttgtatgaacaggcgaggtgggatctgctgcttgaggagatcgattgtactgaggaagaaatgatggttttcgcagccttacaataccatattaacaagctttcacagagcggagaggtgggggagcctgctggaactgacccaggtttggacgacttagatgttgctctatccaacctagaggtgaagctcgaggggagcgccccaaccgacgttcttgacagtctgacaactatacctgaattgaaggaccatctaagaatctttaggccacgtaagctgacactgaagggctataggcagcactgggtggtttttaaagagaccacactctcttattataaatctcaggatgaggcacccggtgatccgatccagcagctcaacctcaagggatgtgaagtggtccctgacgtaaatgtgtcggggcagaagttttgcattaagctgctggtccccagtccagagggaatgtctgaaatctacctaaggtgccaggatgagcagcaatatgcacggtggatggcaggctgccggctcgcctccaaagggaggaccatggcggactcatcctacacaagtgaggtacaagccatcctcgcatttctctctttgcaaaggacagggtccggagggcctggcaaccacccccatgggccagacgcgagcgctgagggcttgaatccttacggacttgttgcaccacgcttccagagaaagtttaaagcaaaacagttgactccacgcattctcgaggcgcaccagaacgtggcccagctgagtctggctgaagcccaacttaggttcatccaagcatggcaaagtttacccgatttcggcatttcatacgtaatggtccggtttaaggggtctcggaaagatgaaatcctgggtattgctaataacaggttaatacgcattgacctggccgtcggtgatgtggttaaaacttggagattctcaaatatgcgccagtggaacgtcaactgggatataaggcaagtagccattgaatttgatgagcacataaatgtagcttttagttgtgtgtctgcatcttgtcggatcgttcatgaatatatcgggggttacatcttcttatctaccagagaaagggcaagaggcgaagaactggatgaggatctgttcctgcaactcactgggggacacgaagctttttag

SEQ ID NO: 223156 - DNA, 861 bp, synthetic construct
  misc_feature 1..861: note = Description of Artificial Sequence: Synthetic coding sequence
  source 1..861: mol_type = other DNA
atggctggcatgaagaccgctagtggcgactatattgactcctcctgggaattgcgcgtgttcgttggggaggaggacccagaggccgagtctgtaacacttcgggtgaccggtgagagccacattggaggtgttctgctgaaaatcgtggaacagatcaacaggaagcaggattggagcgatcatgcaatttggtgggagcagaagcggcaatggctcctccagactcattggactctggacaaatacggaatcctggccgacgcccgactgtttttcggcccacagcacagacctgtaattctgcgtctccctaaccggcgtgctcttagactgagagcctctttcagtcagcctcttttccaggctgtcgcagctatttgcaggttgctttctatcagacacccggaagagttgagtctgttgagggctccggaaaaaaaagagaagaagaagaaggagaaggagcccgaggaggagctgtacgacctttccaaggtcgtcctggcgggaggtgtcgcgcctgctctgttccggggaatgcctgcacactttagtgactcagcccagactgaggcctgctatcacatgctgagtcgaccacagccacccccagacccattactgctgcagcgcctacctcgacccagcagcctgtcggacaaaacacagttgcactcccgctggttggacagcagcagatgtctcatgcagcagggaatcaaagcaggggacgcattatggctgcgttttaagtactactctttcttcgacctggacccaaagacagatcccgttcggttgactcaactctacgaacaggccaggtgggacttgttgctggaggaaatcgattgctag

SEQ ID NO: 223157 - DNA, 555 bp, synthetic construct
  misc_feature 1..555: note = Description of Artificial Sequence: Synthetic coding sequence
  source 1..555: mol_type = other DNA
atggccgcagctggcggtgcccgactactgcgggcagcctcagccgtgttagggggtcccgctggcagatggctacatcacgcgggatccagagctgggtccagcgggcttctaaggaaccgcggacctggcggtagcgccgaggcttcacggtcactgtctgtcagcgctagagctcgttctagttcagaggacaagatcacagttcacttcatcaaccgagacggggagacgctaacaacgaaaggtaaggtcggagactctttgctggacgtggtagtggagaataacctcgatattgacgggttcggagcctgtgaagggacgctcgcatgctctacctgtcacctgatctttgaggatcacatctatgagaagctcgacgcgattacggacgaagagaacgatatgctggatttagcgtacggactcaccgatcgatcccggttgggatgtcagatttgcttgacaaaaagtatggacaatatgactgtgcgtgtgcctgagactgtggcagacgctcgccagagcatcgatgttgggaagacaagctag

SEQ ID NO: 223158 - DNA, 1494 bp, synthetic construct
  misc_feature 1..1494: note = Description of Artificial Sequence: Synthetic coding sequence
  source 1..1494: mol_type = other DNA
atggctagtagatgctggagatggtggggttggtcagcctggccgagaacaaggctccccccagcaggcagcaccccaagcttttgtcatcatttttcaactcaagagaagacacctcagatttgtgtggttgggagtggacccgcagggttttacacagcccaacatctcctgaagcatccgcaggctcacgtggatatttacgaaaaacaaccggtgcccttcggcctggtccgttttggcgtcgcccctgaccacccagaggtgaagaatgtgataaatacattcacacagacggcccactctggccgttgtgccttttggggcaacgtggaagtgggtagggatgtgacggtacccgaacttcgcgaggcctatcatgctgtggtgctcagctacggagccgaggatcatcgcgcactcgagattcctggagaggaattgcccggtgtatgttccgcccgagcctttgtcggctggtataacggactgcccgaaaatcaagagctcgaacctgacctatcctgcgacaccgcggtgattttgggccagggaaatgtcgcccttgacgtggctaggatcctcctgacccctcccgagcacctcgaagccctgctcctatgtcagaggacggatatcaccaaggctgccctgggagtgcttagacagagtagggtgaagacagtatggctcgtgggaagacgcggacctcttcaggtggcttttactatcaaggagttgcgagagatgatacagctgcctggggctcggcctattctcgaccccgtggacttcctgggactgcaggacaaaataaaagaggtccccaggcccagaaagcgcctgactgaactgctcttgagaaccgccaccgagaagcccggtcctgcagaagcagccaggcaggcatccgcaagcagagcttggggcctgaggttttttcggtcacctcagcaggtgctcccctctcccgacggaagaagagcagcaggcgtgcgtctcgcggttaccagacttgaaggggtggatgaagctacccgcgctgtccctacgggcgatatggaggatttaccgtgtggtctcgtgctgtccagcatcggctataagagtcgacccgtggatccatcagtgccttttgactccaagctcggtgttatcccaaatgtggaaggcagagtgatggacgtcccaggcctctactgctccggttgggtgaagcggggaccaacaggcgttatcgcaactacgatgacagactcttttctgacaggccagatgcttctgcaggatctcaaagctgggctgcttcctagcggccctcggcctggatacgcagctattcaagctctgctatcatccaggggagtgcgacccgtgtcattctcagactgggagaagttagatgccgaagaggtggcccgtggccagggtacaggcaagccccgtgaaaaactcgtggaccctcaggagatgctgcgtcttttgggacactag

SEQ ID NO: 223159 - DNA, 1569 bp, synthetic construct
  misc_feature 1..1569: note = Description of Artificial Sequence: Synthetic coding sequence
  source 1..1569: mol_type = other DNA
atggcaagccggtgttggcgatggtgggggtggagtgcatggcccaggaccaggctaccgcctgcgggtagcaccccgaccttcgggggatcggacgaggtccgggacccagctaacgctaaggctctacgtaataagaggaggcgaatgcaggtgcgagttaaactcggtaagttccagctgcttctggatatacaggaaaaaacaccgcagatctgcgtcgttggaagcggacctgctggcttttacacggctcaacacctgttgaagcatccacaggcacacgtggacatctacgaaaaacagcctgttccattcgggttagttcggttcggagtcgctcccgatcacccagaggtgaaaaacgttattaatacctttacacaaactgcacactcggggagatgcgcgttctggggtaacgtggaggtgggcagggatgtaacagttcccgaactgcgggaggcttaccatgctgtcgtgctgagctacggtgccgaggatcatagggctttggagatcccaggagaggaattgcctggagtgtgcagcgctagggcttttgttggttggtacaacggactgcctgaaaatcaggagctggagcccgacctctcttgtgacactgcagttattctagggcaggggaatgtggcattagacgtggctagaatcttgctgaccccgcctgagcacctcgagcgaacggatatcacgaaagccgctttaggagttctgaggcagtcgagagtgaaaacagtgtggctggtgggacggaggggacccctccaggtggcattcaccatcaaagaacttcgcgagatgatccagctccctggtgctaggcctatattggacccagttgacttcctgggattacaggacaaaatcaaagaggtgcccagacccaggaagagactgaccgagcttctgttgcggactgccacagagaaaccgggaccagccgaagctgctaggcaagcaagtgcctctcgagcgtggggactgcgtttctttcggagtcctcagcaggtcctgccctctcccgacgggaggcgggcagccggagtgagattggctgtgactaggctggagggcgtggatgaggctacccgcgcagttcccactggagatatggaggacctaccttgtggcctggtcctgagtagcatcggctataagtctcgcccagttgacccgagcgttccttttgatagcaaactgggagtaattcccaatgttgagggacgcgtcatggatgtaccaggattgtactgcagcggttgggtgaagaggggccctaccggcgtgatcgcgactaccatgactgattcctttttgaccggccaaatgcttttgcaagatctcaaagctggattattaccatcagggcctaggcccggatatgcagctatccaagcacttctttctagccggggtgtccgtcctgtctccttcagtgattgggaaaaactcgacgctgaagaagtcgcaaggggacaggggaccggcaagcctcgggagaaactggtcgatccccaggaaatgcttagacttctgggacactag

SEQ ID NO: 223160 - DNA, 1356 bp, synthetic construct
  misc_feature 1..1356: note = Description of Artificial Sequence: Synthetic coding sequence
  source 1..1356: mol_type = other DNA
atggcctcacgatgctggagatggtggggttggtctgcctggcctcgtaccagactgccaccagctggatccacccctagcttctgtcatcattttagcacccaggagaagaccccacaaatttgcgtcgtggggtctgggccagcaggattttacaccgcacaacatcttcttaaacagcacccccaggcacacgtggatatctacgaaaaacaaccagttccctttgggctggtgaggttcggcgtagcccctgaccacccagaggttaagtcatacggggctgaggaccatagggctttagagataccaggcgaagagttgcccggagtatgtagcgcacgggcatttgtgggatggtataatgggctgcctgaaaaccaggaacttgaaccggacctgagctgtgacacagcagtgatcctgggtcaggggaacgtggccctggacgtggctcgtattttgctgacacctcctgagcacctcgaaagaaccgacattacgaaagcggcactcggagtattgagacaatctagagtgaagaccgtctggttggtcggacggagaggccctcttcaggtagctttcaccatcaaagagctccgagaaatgatacaactccctggtgctcggccaatcctggaccccgtggatttcctgggccttcaagacaagattaaggaagtcccccgtcctaggaagcggctgactgaactgctcctgagaactgccactgagaaacccggacccgcagaggctgccagacaagcttctgcatcgcgggcatggggactgaggttctttcggagtccacagcaagttctgccgtcccccgacgggaggagagccgcaggcgtgcggttggccgtgacccgattggagggggtggatgaggccacccgcgcagtgccaactggcgacatggaagatctcccgtgtgggctggttctgagcagtatcggctataagtcaagaccagtggatcctagcgtgccattcgactccaagctcggggtgatccctaacgtggaaggtcgagttatggatgtgccaggcctctattgcagcggatgggtgaagcggggacctaccggggtgattgcaaccacaatgacagattccttcctaaccggccagatgctgctccaggatctcaaggcgggtctgttgccatccgggcctaggcctggttacgctgctattcaggctcttttgagttctcggggagtgagaccagtgagcttctcagactgggagaagctcgatgctgaagaggttgccagaggccagggcaccgggaagccccgagaaaaactggtggatccccaggagatgttacgtctgttagggcattag

SEQ ID NO: 223161 - DNA, 1605 bp, synthetic construct
  misc_feature 1..1605: note = Description of Artificial Sequence: Synthetic coding sequence
  source 1..1605: mol_type = other DNA
atggcctcaagatgctggagatggtggggttggtctgcgtggcctcggacccgtttgccccctgcaggttccactcctagcttctgccatcacttcagcacgcaagagaaaacacctcagatctgcgtagtggggagcggacctgccggattttacaccgcacagcatttgctcaagcgggttgaggctctttgctctcagcccagggttctgaattccccagccctttcgggcgaaggcgaggatctcggagctagtcagcccctgtcgctggacccaacaagctgccatcccgtaccccaacaacacccacaggcccatgtggacatctacgagaagcagcccgtgcccttcggactagtgaggtttggtgttgcacccgaccacccggaagtgaaaaatgtgataaacaccttcacccagaccgctcattcagggagatgtgctttctggggaaatgttgaagtaggacgtgatgtcacggtaccagagctacgtgaggcataccacgcggtcgtgctgtcttatggggcagaggaccacagagccctggaaattcccggagaggagctgccaggggtctgcagtgctcgcgctttcgtcgggtggtataatggcctccctgagaaccaagaattggaacctgatttgagttgcgatacagcagtgattcttgggcaggggaatgttgcccttgatgttgccagaattctgctgacacctcccgagcacttggaaaggacagatataacaaaagccgctctgggcgtgctgaggcagtccagggtgaagaccgtttggctcgtgggccgtcgtggtcctctgcaggtggcattcaccattaaggaacttcgggagatgatccagctcccgggagcccgaccgattttggaccctgtggactttctgggcctgcaggacaagatcaaggaggtgccaagacccaggaaacggctcacggagcttctgctccggacagccaccgagaaaccaggcccagctgaggcagcccgacaggcctctgcaagcagggcctgggggcttcggttctttaggtccccccagcaggttctcccatctcctgatggacggagagccgctggtgtgagactggcagtgaccaggctggaaggcgtggacgaggccactagagccgtgcccacaggcgacatggaggacctaccatgtgggctggtactgtctagcatcggctacaaatcccggcctgtggacccgagcgttccctttgatagcaagctcggagtgattcctaacgtcgaaggcagagtgatggacgtccccggactttactgctccggatgggtaaagagagggcctaccggggtgatcgccactacgatgaccgatagctttctgacgggtcaaatgcttttgcaggacctgaaggccggtcttctgccaagcggcccaagacccggttacgctgccattcaggcgctgctttcgtcccggggtgtaagacccgtcagttttagcgactgggagaaactagatgctgaagaggtcgctcggggacagggaactggaaagccaagggagaaactcgtcgatccacaggagatgttacgactactcggacactag

SEQ ID NO: 223162 - DNA, 1146 bp, synthetic construct
  misc_feature 1..1146: note = Description of Artificial Sequence: Synthetic coding sequence
  source 1..1146: mol_type = other DNA
atgaccacttgtaaagcaggtgtggttccattggcttctcaacagcacccgcaggcccatgtagacatctatgagaaacaaccagtgcctttcggcttggtgcgctttggggtagctcccgaccacccggaggtcaagaacgttattaatacgtttacccagacagcccactctggcagatgcgccttctggggtaacgtcgaggtcggccgagatgtgaccgtgcctgagctcagagaagcataccatgccgtggttctgagttatggggcagaggaccaccgcgcactggaaattcctggagaagagctcccgggtgtatgctctgcacgagcttttgtcggctggtataatgggctccccgaaaatcaggagttggaaccagatctgtcgtgcgatactgcggtaattctggggcagggtaacgtcgccctggatgtggcgcgaatcctgctgacgccaccagaacacctagagagaaccgacatcaccaaagcagcccttggagttctcaggcaaagtcgcgtcaagactgtgtggctggttggcaggaggggcccacttcaagtggcttttactatcaaggaactgagggagatgatccagcttccaggagcacggcctatcctggatccagtagatttcctgggtctccaggacaaaatcaaagaggtgccaaggccaagaaagcgtctaacagagttgttactgcgcaccgccacggagaaacctgggcctgcagaggccgctcgccaggcaagcgctagccgcgcatggggtttaagattcttcaggagtccgcaacaggtgctgccgtcacccgacggccgaagagctgcaggcgtgcgactggccgtgacaaggctcgaggtgtccttgatgttcctcaaggatactcccttcccaggtctgtgccatcccccaggggtggcacacaccctgcctaacagagtatcaatgcgcccaccagtgcagtgtccaagagagacatggaaaacctctctggtgggttggtgttctgccgcattgggcattcgtgctgcgttatcaacgcaagcctgtccactgaccccctcactggggtcctcgcctatgtggagagccggtctgtggatgtgtcaagcttctacggccgcagcagggtag

SEQ ID NO: 223163 - DNA, 1320 bp, synthetic construct
  misc_feature 1..1320: note = Description of Artificial Sequence: Synthetic coding sequence
  source 1..1320: mol_type = other DNA
atggaggacaaagatcgagagcatcctcaggcgcatgtcgatatctatgaaaaacagcctgtgccttttggtcttgtgcgattcggggtcgcaccggatcaccctgaggtgaagaacgtcatcaatacatttacacagacggctcacagcggaagatgtgccttctggggaaacgtggaggtcggcagagacgtgaccgttcctgagttgcgcgaggcataccacgctgttgtgctttcgtacggagcggaggaccaccgtgcactggaaattccaggagaggagctgcctggtgtttgctcagctcgggctttcgtgggctggtacaatgggctgcctgaaaaccaagagttggagcctgatctgagctgtgatacggcagtgatcctaggtcagggcaatgtcgccctcgacgtcgcgaggatcctgttgacaccacctgaacacctggagcggacggacataacaaaagctgccctgggcgtgcttaggcaatccagagtaaagaccgtgtggctcgtgggtcgtcgcggtcccctgcaggtggccttcactattaaggagcttcgagagatgatacagctgcccggtgcccgaccgattctcgacccagtggattttttgggactccaggacaagattaaagaggtgccacgcccaaggaagcgactcactgagttgctgttgcgaaccgcaaccgaaaagccgggacctgccgaagccgctcgacaagctagcgcctctagggcatgggggctcaggttcttcagaagcccccagcaagtactgccctcccccgatggtcgccgagcagccggtgttaggctggccgtaacacgcctggagggagtggatgaagccacccgcgcagtaccgacaggggacatggaagatctaccatgtggccttgtgctgagctcaattggatacaaaagcagaccagtggaccctagcgtgccttttgacagtaaactgggagtcattcctaacgtcgagggtcgggtcatggatgtgcccggattatactgctccggatgggtgaaacgaggccctaccggagtgatagccactactatgactgactcatttctgactgggcagatgctgttgcaagacctgaaagccggtctgttgcccagtgggcctcgacctggttacgcggctattcaggcactgctctcatctcgaggcgtccggcctgtgagtttctccgattgggaaaagttggacgccgaagaagtggctaggggacagggaactgggaagccccgagagaagctagtggatccccaggaaatgctacgactgcttgggcattag

SEQ ID NO: 223164 - DNA, 1494 bp, synthetic construct
  misc_feature 1..1494: note = Description of Artificial Sequence: Synthetic coding sequence
  source 1..1494: mol_type = other DNA
atggcatcccggtgttggcggtggtggggctggtccgcttggcctcgtactcggcttcctccagccggttcaacacccagtttctgccaccacttctcgacccaggaaaaaactccccagatttgtgtcgtgggttctgggcctgccggattttacacagcacaacatctgttaaagcaccctcaagctcacgtcgacatatatgaaaaacagcctgtaccgttcggcctggtccgcttcggagttgctccagatcaccctgaagtgaagaacgtgattaacaccttcacacagaccgcacattccgggagatgtgctttttggggcaatgtggaggtggggagagacgtcactgtccccgaactccgcgaagcgtatcatgcagtggtgttaagctatggcgctgaggatcaccgcgcactggaaatacctggagaagaactgcccggtgtatgctctgctcgagcctttgtaggatggtacaacggcttaccggagaaccaggaattggagcccgacctgagctgcgataccgccgtgatcctgggccagggaaatgtggccctggatgtggctcggatcctgctcacaccccctgaacatctcgaggcactactgctatgtcaacgcaccgatatcacgaaagctgcactcggggtgctcagacagagtcgggtgaagaccgtctggttagttggtcggcgaggcccactgcaggttgcttttacaatcaaggaattgcgcgagatgattcaactgccaggcgcacgcccaatcctcgacccagtcgatttcctcgggttacaagataagataaaagaagtacccagacctcggaagcggcttacagagctgttattgaggaccgctaccgaaaagcctggacctgcggaagctgctaggcaagcctctgcttcaagggcttggggactccggtttttccgatctccacaacaggtccttccatctccagacggcagaagggctgccggtgtgcgcctggctgttaccaggctagaaggagtggacgaagccacaagggccgtgcccaccggcgatatggaggacttgccctgcggccttgttctgagcagcatagggtacaaaagcagacctgttgacccatcagtaccttttgattctaagctgggggtgattcccaacgtggagggcagagtcatggatgtacccggactctactgttccggctgggtgaagcgtggccctacaggggtaatcgcgactactatgactgattccttcctaaccggccagatgctgctccaagacttgaaggctgggctgctccccagtggcccaagacctgggtacgccgcaatccaggcattgctgagctctagaggagttcgtcccgtgagcttttccgattgggaaaagctggatgccgaagaggtggcgcgtggacagggcaccggcaaacccagggagaaactagtcgatccccaggaaatgcttcggttacttggacattag

SEQ ID NO: 223165 - DNA, 1452 bp, synthetic construct
  misc_feature 1..1452: note = Description of Artificial Sequence: Synthetic coding sequence
  source 1..1452: mol_type = other DNA
atggcttctcgctgttggcgatggtggggatggtctgcctggcccaggacacgactgccgcctgctggtagcaccccgagcttttgccaccactttagcactcaggagaaaaccccccagatctgtgtggtgggaagtggcccagcagggttctacaccgcccaacacctacttaagcacccccaggcccatgtggacatctatgagaagcagccagtgccgttcggtctggtgcgctttggggtggcacctgatcacccagaggtgaagacggcacacagcgggagatgtgccttttggggcaatgttgaagtgggacgggacgtaacagtcccagagctgcgtgaggcctatcatgcagtcgtcctttcatatggcgctgaagatcacagagctttggagattcctggtgaggagctccctggtgtgtgctccgcgagggctttcgttgggtggtacaatggcctcccagaaaaccaggagctcgagcccgacctttcctgcgatacagctgtgattcttggccagggtaatgtagcattggacgtcgctcgaatcctgttgaccccccctgagcacctggagcgcactgacattacaaaggccgcactgggcgtacttcggcagtccagggtgaagacagtctggctggtggggcgtaggggtcccctgcaagtcgcctttacaattaaggaactgcgagagatgatccagctgcctggggctaggcccatactggatcctgtagattttctcggcctccaggataaaatcaaagaggtgccacgccctcggaaacgtctgaccgagctgttgctacgtactgccacagagaagccgggacccgcagaagcagctcggcaggcatcggcatcccgggcatggggtctcagattcttccgatctcctcagcaagtcctgcccagtccagatggacggagagccgcaggagttaggcttgcagtcacacgcctggaaggcgtggatgaagccaccagggccgtgccaacaggagacatggaagaccttccttgcggtctcgtgctgtcgagtataggatacaaatcacgccctgtggacccttcggtacccttcgacagcaaacttggagtgattcctaacgttgagggacgcgtcatggacgtgcccggtctctactgttctggatgggtgaagaggggacccactggcgtaatcgccaccactatgacggattctttcctgaccggacagatgttgctccaggatcttaaagcaggcctgttgccttccgggcctcggccagggtacgctgctatccaggccctcctctcttcaaggggcgtgcgcccagtttcgttttccgattgggagaagttggacgcggaagaggtcgccaggggacagggcacagggaaaccccgagagaagttagtggacccccaggagatgctgaggctgttgggacattag

SEQ ID NO: 223166 - DNA, 1881 bp, synthetic construct
  misc_feature 1..1881: note = Description of Artificial Sequence: Synthetic coding sequence
  source 1..1881: mol_type = other DNA
atggcagtgtccggctttaccttaggtacctgcatcttgctgctccacatcagctacgtagcaaattatcccaatgggaaggtgactcagagctgtcacggtatgattcccgaacacggtcacagcccacagtcagtgccagtgcacgacatttatgtgtcccaaatgaccttccgccctggggaccaaatcgaagttaccttgtccggtcacccatttaagggttttctgctggaagcgaggaacgccgaagatcttaatggtcccccaattggaagttttacattaattgacagcgaagtgtcacagctcctgacatgcgaggacatccaaggctccgctgtgtctcataggtcggccagcaaaaagacggagatcaaggtctattggaacgcgccttcctctgcacccaaccatacgcagttcttagtcaccgttgttgagaagtataagatctactgggtgaagattccgggtcctattataagccaaccaaatgctttcccctttacaaccccgaaagccacagtcgtgccactccctaccctgccacctgtgagccacctgaccaagccctttagcgcctctgattgcgggaataagaaattctgtatccgtagtcctcttaactgtgaccccgagaaagaagcatcatgtgtgttcctgtcattcacaagggatgatcagagcgtcatggtggaaatgagtggtccaagcaaaggctacctgtcattcgcattgtcccacgaccagtggatgggtgacgacgacgcctatttatgtatccatgaagatcaaactgtctacatacaaccatctcacctgacaggacgctcccaccctgtcatggattcaagagataccctcgaagatatggcctggcgcctggctgacggcgtgatgcagtgtagttttcgtcgcaatatcaccctgccaggtgtgaaaaatcgctttgacctgaataccagttactatatcttcctcgcagatggtgccgcaaatgatggcaggatctacaagcatagtcaacagccactcatcacctatgaaaagtacgacgttactgattcccccaaaaatatagggggttctcatagcgttctcctcctgaaggttcacggggctcttatgtttgtggcatggatgaccacagtttcgatcggcgttttagtcgctcggttctttaagccagtgtggagtaaagcgttcctgcttggagaagccgcatggtttcaggtgcatcggatgctgatgtttactacgactgtgctgacctgtatcgcattcgtcatgccctttatctacaggggcggatggtcccgccatgccggataccacccttacctggggtgcatcgttatgacactggcagttctgcagcctttactcgctgttttccgccctccacttcacgaccccaggcgccagatgtttaattggacccattggtccatggggacagccgcaagaattatcgcggtggctgccatgttcttaggtatggaccttcctggcttgaatctaccggatagttggaaaacctatgcaatgactggcttcgttgcctggcacgttggcacagaagtggtccttgaactgaaatattggatgatgacggagttccggtctttttctcatctccttcagtggaaacagcgcgtgatgctcctgaagaggcagtgttggcaatttatgtcagtaggtatgctgctgttctctagttacttttatcttcagtccacgatctacgaacaggcaaagaccctggcttttgcaggacaggtgatcatcattattaagccaaagaagttggaggcatgccctgattgcctggaacacatctgcgagttttccttggggaggttgggatcatgcctgtag

SEQ ID NO: 223167 - DNA, 1779 bp, synthetic construct
  misc_feature 1..1779: note = Description of Artificial Sequence: Synthetic coding sequence
  source 1..1779: mol_type = other DNA
atggccgtgtccgggttcaccctcggaacttgtatactccttcttcatatttcctatgtggctaactaccccaatggaaaggtaacccagagctgccacggaatgattccggagcacgggcactctccgcagtctgtgcccgtacatgatatatatgtgtcccagatgactttccgtcccggagaccagatagaggttacgctatcaggacacccgttcaaaggcttcctgcttgaagcaaggaatgcagaagatctgaatggacctcccatcggctctttcaccctgatcgattccgaagtgtcgcagctgctcacatgcgaagacattcaaggaagcgcagtaagccaccggagtgcgagcaagaagacagaaattaaagtctactggaatgccccaagttccgctcccaatcacacccagttcctggtcactgttgtggaaaagtacaagatatactgggtcaagatcccgggaccaataatatctcagcctaacgccttcccatttactactcctaaggcaactgtggtgccacttccaaccctcccgcctgtctcacacctgactaaaccgtttagcgctagtgactgcggcaacaagaagttctgcattaggtcccctctcaactgcgacccggagaaggaggcaagctgcgtgttcctaagctttacccgcgacgaccagtctgtcatggtagaaatgtctggtccttccaaaggatacctgtcttttgccctcagccatgaccaatggatgggagacgatgatgcatacctctgtattcacgaggaccaaaccgtgtatattcagccatcccacctgacaggccgaagccatcctgttatggattcccgcgacactcttgaagacatggcgtggaggttagccgatggggtaatgcagtgttcatttaggcgaaatataaccttaccaggcgtcaaaaacaggttcgaccttaatacttcctactacatctttctggcggacggcgcagcaaacgatggccgaatctacaagcattcacagcaacctctcattacctacgaaaagtacgatgtgacggacagcccaaagaatatagggggaagccactctgtgctcctgctgaaagtacacggagcgcttatgttcgtggcatggatgaccaccgtctccataggtgtgctcgttgccaggttttttaagcccgtttggtctaaggccttcctgctaggggaagctgcgtggttccaggtgcaccgcatgctcatgttcactaccactgtgcttacttgcatcgcatttgtgatgccattcatttaccggggagggtggagccggcacgcaggctatcatccttatcttggttgtattgtgatgacattggctgttttacagcctttgttggccgtgttccgccctcccctccacgacccgaggcgtcagatgttcaactggactcactggtctatgggtacggccgctcgcatcattgcagttgctgccatgttcttgggaatggatctgccaggcttgaatctgcccgacagctggaagacatacgctatgactggcttcgtggcgtggcacgtcggcacggaggttgtgctggaagtccacgcctatcgtctatctcgcaaggtagagattttggacgatgatagaatccagatcctacagtcttttacagcggtggaaacagagggccacgcgtttaagaaggccgttctggcaatttatgtttgtggaaacgtgactttcctgatcatttttctttcagccatcaaccacctctag

SEQ ID NO: 223168 - DNA, 729 bp, synthetic construct
  misc_feature 1..729: note = Description of Artificial Sequence: Synthetic coding sequence
  source 1..729: mol_type = other DNA
atgctctcctgctttaggctgctctccaggcacatcagtccctctcttgcatcactcagacctgtgcggtgctgcttcgccttacctctgcgctgggccccaggcagaccgctcgatccccgtcagattgctccacgccgacccctggctgcagctgcatcatcacgcgaccctactggccctgcggcaggaccctcgagggtgagacaaaattttcacccggactccgaggctgccattaaccggcagattaatctcgagctgtacgccagctacgtgtatctgtcaatggcctattacttttctcgggacgacgtggctttaaataacttctctcgctatttcttacaccagtccagagaggagaccgagcacgccgagaagctgatgcgactgcagaatcagcgagggggtcggattaggttgcaggatattaagaagcctgagcaggatgattgggaatcaggactccacgcaatggagtgcgctctcctgctcgaaaagaacgtgaaccagtcacttcttgagctgcacgctttagcctctgataagggagacccacatctgtgcgattttctggaaacctactacctgaatgaacaggttaagtccattaaggaactgggcgatcacgtgcacaacctagtgaaaatgggtgctcccgacgcagggctcgccgagtatttgtttgacacccacacccttggaaacgagaacaagcagaactag

SEQ ID NO: 223169 - DNA, 552 bp, synthetic construct
  misc_feature 1..552: note = Description of Artificial Sequence: Synthetic coding sequence
  source 1..552: mol_type = other DNA
atgactaccgctagtacttcacaggtcaggcaaaactaccatcaggacagtgaagcagcgataaatcgccagatcaacctagagctctacgcctcttacgtgtacctatcaatgtcctattactttgacagagacgatgtggctctgaagaactttgccaaatatttccttcatcagtcacacgaagaacgggaacatgctgaaaagctgatgaaactgcaaaaccaacgcggaggacgaattttcctgcaagatataaagaagccagactgtgatgactgggaaagcggattgaatgccatggagtgtgcactccatttggagaaaaacgtaaatcaatccctgctcgagcttcacaagttggcgacggataagaacgatccacatttgtgtgacttcattgaaacgcactatctgaacgagcaggtcaaggccatcaaggagctgggcgatcatgtgaccaaccttcgaaagatgggcgcacccgagagcggattggctgagtacctgtttgacaaacacaccctgggagacagcgataacgaatcctag

SEQ ID NO: 223170 - DNA, 699 bp, synthetic construct
  misc_feature 1..699: note = Description of Artificial Sequence: Synthetic coding sequence
  source 1..699: mol_type = other DNA
tctggattcccagctagtaccgtcttaggaaggaatcccgctttagttcctcacccaggaaggcctcctatcgcaagtccaccgagccccctccaccgcactctcgggctgcctcagggtccgaggagactgtctctagttgccgctatgacgaccgccagcactagccaggtgagacagaattaccaccaggactctgaggctgcaatcaatcgccagattaacctcgagctctatgcatcctatgtatacctatctatgtcctattattttgatcgcgacgatgtagcccttaagaattttgctaagtattttcttcatcagtcccatgaagaaagggagcacgccgagaaactgatgaaactgcagaaccagaggggaggccgtattttccttcaggacattaagaagccagactgcgacgattgggagtctgggctaaatgcaatggagtgcgccctacacctggaaaagaacgtgaaccagtctctgctagaactccacaagctggcaaccgataagaacgatccccacctgtgcgacttcatcgaaactcattacctgaatgaacaggtcaaggctattaaagagctgggagatcatgtgaccaacctgcgcaaaatgggcgctccagaaagcggattagctgaatatcttttcgacaaacataccctcggtgactctgataacgaaagttag

SEQ ID NO: 223171 - DNA, 462 bp, synthetic construct
  misc_feature 1..462: note = Description of Artificial Sequence: Synthetic coding sequence
  source 1..462: mol_type = other DNA
atgaccaccgcttctacatcccagagttattacttcgatcgagatgacgtggctttgaagaattttgccaagtacttcctccatcaatctcacgaagaacgtgagcatgctgaaaagctcatgaagctccagaaccagagagggggaaggattttcctgcaggacataaagaaacctgattgcgatgattgggagagcgggctgaatgccatggaatgcgcgctgcacctagagaaaaatgtcaatcagtctctcctggaactgcataagttggccacagataagaatgaccctcacctgtgcgattttatcgagacccactacctgaatgagcaagtcaaggccatcaaagaacttggggatcatgtgacgaaccttcggaagatgggagcaccagagagtggtcttgctgaatacctttttgacaaacatacactgggcgactcagacaatgaatcttag

SEQ ID NO: 223172 - DNA, 552 bp, synthetic construct
  misc_feature 1..552: note = Description of Artificial Sequence: Synthetic coding sequence
  source 1..552: mol_type = other DNA
atggcgacagctcagcccagccaggtgagacaaaaatatgatacgaactgtgatgccgctatcaattcccacattaccctggagttgtacacctcatatctctatctgtctatggccttctatttcaatagggatgatgtcgcactcgaaaatttcttccgatattttcttaggttaagtgatgacaagatggaacacgctcagaaactcatgagactccagaatcttagaggcggacatatctgtctccacgacattcgaaagccagaatgtcagggctgggagtctgggctagtagccatggagagtgcatttcaccttgagaaaaatgtcaaccagagcctactcgatctgtaccagctggcagtcgaaaagggagacccgcagctttgccacttcctggaaagccactatctgcacgagcaggtgaaaaccattaaggaattggggggttacgtcagcaacttacggaagatctgctctcctgaagccggtctggcagagtacctgttcgataagctgacattgggtggcagagtaaaggagacctag

SEQ ID NO: 223173 - DNA, 528 bp, synthetic construct
  misc_feature 1..528: note = Description of Artificial Sequence: Synthetic coding sequence
  source 1..528: mol_type = other DNA
atgtccagtcagatccggcaaaactactctacagacgtcgaagcagccgtgaattcactagtgaatctgtacctgcaggcgtcatacacctatctgagtctggggttttatttcgacagggatgacgtcgccttggagggagtgagccatttcttcagggaactagctgaagaaaagcgcgaaggctatgaaagactcctcaaaatgcagaaccaaaggggtggacgtgcgctgttccaggacatcaaaaagccagcggaagatgagtggggcaaaacacctgacgcaatgaaagccgctatggctctcgagaagaagttgaatcaggctctcctcgatcttcacgccttagggagcgctagaactgatccacatctctgcgatttcttagagacccacttcctagacgaagaggtaaagctgatcaagaagatgggggaccacttgactaatctccaccgcctcggagggcctgaggctggattgggcgagtatcttttcgagaggctaacgctgaaacacgactag

SEQ ID NO: 223174 - DNA, 573 bp, synthetic construct
  misc_feature 1..573: note = Description of Artificial Sequence: Synthetic coding sequence
  source 1..573: mol_type = other DNA
atgtcctcacagataaggcaaaactacagtacggatgtggaggctgctgtaaattccctcgtgaatctctatttacaggcctcctacacctacttatcacttggcttctattttgatcgagacgatgtcgccctggagggggttagccatttcttcagagaactggcggaggagaagcgtgaaggatatgagcgcctgctgaagatgcagaaccaaaggggcggacgagccctgtttcaggatatcaaaaagcccgctgaggacgagtgggggaaaacaccagacgctatgaaagctgctatggccctggaaaagaagttaaaccaggctctcctggaccttcacgccctggggtctgccaggactgatcctcatctgtgcgactttctcgagacacactttcttgatgaggaggtcaaattaatcaaaaagatgggcgaccacctgaccaacctgcaccgacttggcggaccggaggccggactgggagaatacctctctaagggctctctgagcagcacaaccaagtcccttctttctcccgcaaccagcgaagggccattagccaagtag

SEQ ID NO: 223175 - DNA, 1272 bp, synthetic construct
  misc_feature 1..1272: note = Description of Artificial Sequence: Synthetic coding sequence
  source 1..1272: mol_type = other DNA
atgagatccctcggtgctaacatggccgctgcattgcgcgctgctggtgttctactgcgagatcctctggctagctctagttggagggtgtgccagccttggcggtggaagagcggtgctgctgccgcagccgtcaccaccgagactgcacagcatgctcaaggcgcaaaacctcaggtgcagccgcagaagcgaaagcctaaaaccgggatactcatgctcaatatgggagggccagaaacactcggagatgttcatgactttcttctgcgtctttttctcgatagggacttaatgaccttacccatccaaaataagctggcaccatttatcgcaaaacggcgaacccccaaaattcaggagcaatatagacggataggcggtggatctccaatcaagatttggacctctaaacagggggagggaatggtgaaactgcttgacgagctttctcctaacacagcaccccacaaatactacattggctttcgctatgtgcaccccttgaccgaagaagccatcgaggaaatggaacgggatggacttgagagagcaatcgccttcacacaataccctcagtacagttgcagcaccacaggtagtagcctgaacgcaatctataggtactataatcaggtcggacgcaagcccacaatgaagtggagcaccattgacaggtggcccacacaccacttgctcattcagtgtttcgccgaccacatccttaaggagctggatcactttcccctggaaaagaggagcgaagtcgtcattctattctccgctcactccttacccatgagtgtcgttaaccgtggagatccctacccccaagaggttagtgccacagtgcagaaggtaatggagcgtttggaatactgcaatccttaccgattggtgtggcaaagtaaggtgggacctatgccatggctgggtcctcaaaccgacgagtctattaagggtctgtgcgagaggggcagaaaaaacattctgttggttccgatagccttcacctccgaccatattgaaacactgtatgaactggacattgaatacagccaagtcttggcaaaggaatgcggcgttgagaacatcagacgggcagaaagcctgaacgggaaccctctcttttcgaaggcacttgcagacttagtgcacagccatattcaaagcaatgagctctgcagcaaacagctcaccctgtcatgtcctctgtgcgtgaaccctgtttgccgagagacaaagtcttttttcacctctcagcagctctag

SEQ ID NO: 223176 - DNA, 1290 bp, synthetic construct
  misc_feature 1..1290: note = Description of Artificial Sequence: Synthetic coding sequence
  source 1..1290: mol_type = other DNA
atgagaagtcttggagcgaacatggctgctgctttaagggcagcaggggtgctcttacgcgatcctttggctagtagctcatggcgggtatgtcagccgtggcgttggaagtccggggctgcagctgcagcagtaaccaccgagacagcccaacatgctcagggagccaaaccacaggtgcagcctcagaagcgatacgaatccaatatcaggaaacccaagactggaatccttatgctcaacatgggaggtccagagaccctgggcgatgtccacgactttctcctgaggctttttctggaccgagacctcatgaccttacctattcagaacaagctggctcccttcatagctaagcgccgtacccccaaaattcaggaacagtaccggaggattggcggtggctctcctatcaaaatctggacatcgaagcaaggcgagggaatggtgaagttgctcgatgagttgtcacccaatacggcaccacacaagtattatattgggttcaggtacgtccacccgcttaccgaggaagctattgaggagatggaacgggacggcctcgaacgggcaatagcttttacgcaatacccgcagtacagttgtagcacaactggaagcagcctgaacgctatctatcgatactacaaccaggtggggcgtaagcctacaatgaagtggagcacaattgatcggtggccgactcaccaccttctcatccagtgctttgctgaccacatcctgaaagaattggatcactttcccctggagaagcggtccgaggtcgtcatcctgttttctgcgcattcgctgcctatgtccgtggtgaataggggcgatccctacccacaagaggtatcagctactgtgcagaaggtgatggagcgcttagaatattgtaacccataccggctcgtttggcagtctaaagtgggaccgatgccatggctcgggcctcagaccgatgagtcgattaagggattatgcgagagaggtcgaaagaatatcctactggtgcccattgccttcacaagcgatcatatagagacattgtacgagctggatatcgagtactcccaagtcctggcaaaggaatgcggcgtagagaatattaggcgggctgagtccctgaacggcaatcccctattctccaaggccttggctgatttggttcactcccatattcagtccaatgagctatgcagtaaacagcttacactaagttgtcctctttgcgtaaatccggtatgtcgcgagacaaaatctttcttcactagccagcagctctag

SEQ ID NO: 223177 - DNA, 1149 bp, synthetic construct
  misc_feature 1..1149: note = Description of Artificial Sequence: Synthetic coding sequence
  source 1..1149: mol_type = other DNA
atgggcctcttgctgcctctggccctgtgcatcctggtcctttgctgtggggctatgtccccccctcagctggccctcaacccgtctgccctcctttcacggggatgtaatgattctgacgtactggccgtggcaggttttgctctgagagatatcaacaaagatcggaaagatggatatgtgctgcgactcaaccgggtcaatgatgcccaggaatacaggcgaggaggattaggcagcctgttctatctcactttagacgtcctagagacggactgccacgtacttcggaaaaaggcatggcaggattgtgggatgcgaatcttcttcgagtccgtgtatgggcaatgtaaggccatcttctacatgaacaacccaagccgggtgctatatctcgccgcatataattgcaccttgcgtccagtgtcaaagaaaaagatctacatgacgtgccctgattgcccatcctccattccgaccgactcaagtaaccaccaagtgctcgaggcagcaacggagagcctggccaagtacaacaatgagaatacatctaaacagtactcgctctttaaagtcaccagagcctcctcgcagtgggtggtggggcctagttatttcgttgaatacttaatcaaggagagcccttgcactaagagtcaggcatcctcatgtagtttacaatcctccgactctgttcccgtggggttgtgcaaaggaagcctgacgcgtactcactgggaaaaatttgtatccgtcacttgtgacttctttgaatctcaggcacctgctaccggttctgaaaactctgcagtcaatcagaagcctacaaacctcccaaaggtcgaggaatcccagcaaaagaacaccccaccgaccgacagccccagtaaggctgggccacgcggatcagttcagtatttgcctgacctcgacgacaaaaactcacaggagaaggggcctcaggaggcattccccgtgcatctggatctcacaaccaatccgcagggagaaacgctcgacatatctttcctctttcttgagcctatggaagaaaagctggtggtcctacctttcccaaaggagaaggcacgaacagccgagtgtcctgggccagctcagaatgcctcccccctggtgctcccgccatag

SEQ ID NO: 223178 - DNA, 1149 bp, synthetic construct
  misc_feature 1..1149: note = Description of Artificial Sequence: Synthetic coding sequence
  source 1..1149: mol_type = other DNA
atgggtttgttgctgccgttggccctctgtatcctcgtgttgtgttgcggagcgatgagccctccccaacttgctcttaacccctcagcactgctgtcccggggttgcaacgattctgacgtgttggccgtagccggtttcgctctgcgggacatcaacaaggatcggaaagatggctacgttctgaggcttaaccgagtgaacgatgctcaggaatatcgcagagggggtctcggctccctgttttacctgacattggacgtgcttgaaaccgactgccatgttttgcggaaaaaagcatggcaagactgcggcatgcggatcttcttcgagagcgtttacggtcagtgcaaggctattttctacatgaataaccccagccgcgttctgtaccttgctgcttacaactgcactctgcggccagtgagtaaaaaaaagatttacatgacatgtcccgattgcccctccagcatcccaacggatagtagtaaccaccaggtgctcgaggctgctaccgagtctctggccaaatacaacaacgagaacacctccaagcagtatagtctttttaaagtgactagggctagctctcagtgggtggtcggtccctcttattttgtcgagtatttgataaaggaatcgccttgcaccaagtctcaagcaagctcatgcagcctgcagtcatcagacagtgtgccggtgggtctgtgcaaagggagtcttactagaacacactgggagaaatttgtctccgtgacttgcgatttctttgaatcgcaagctccagccaccggatctgaaaactctgcggtgaatcagaagcccacaaacctgccaaaagtggaggagagtcaacaaaagaacactcccccaacagattcacccagcaaggccggaccgagaggatcagttcagtacctgcctgatctcgacgataagaattctcaggaaaaggggcctcaagaggcctttcccgttcacctggacttgaccacgaacccacagggcgaaaccctggatatctcattcctgtttttagagcccatggaagagaagctggtggtgcttcctttccccaaagaaaaagccagaaccgctgagtgccccggtcccgctcaaaacgccagccctctggtgctgcctccttag

SEQ ID NO: 223179 - DNA, 705 bp, synthetic construct
  misc_feature 1..705: note = Description of Artificial Sequence: Synthetic coding sequence
  source 1..705: mol_type = other DNA
atgacttgccccgactgcccaagctctataccgacagactcatcaaaccatcaggtgctcgaagctgctacggaatccttggctaagtacaataacgagaacacttccaaacaatactccctgttcaaggtcacacgcgcttcctctcagtgggtcgtgggtcccagctactttgtcgaatacctgattaaggagtcaccgtgtaccaaatcacaggcaagctcctgcagtctgcagagttccgactctgttcctgtgggtttgtgtaagggctctctgacgagaacacattgggagaaattcgtgtctgtaacttgtgactttttcgagagtcaggcccctgctaccggatccgagaattccgccgtgaatcagaagcccacaaatctaccaaaggtggaggagagccaacagaagaacacccctccgactgactcgcctagtaaagcgggaccaagaggctctgtgcagtacctccccgacctcgacgataagaacagtcaagaaaagggtcctcaggaggcatttcccgtgcatctggacctgacaaccaacccacagggcgagacccttgacatctccttcctttttctcgagcctatggaagagaagcttgtcgtgctgccttttccaaaggagaaagcacgcactgccgaatgcccagggccagctcagaacgcttctcctcttgtgctgccgccttag

SEQ ID NO: 223180 - DNA, 717 bp, synthetic construct
  misc_feature 1..717: note = Description of Artificial Sequence: Synthetic coding sequence
  source 1..717: mol_type = other DNA
atgaggcagtcaggcgcaagccaacctttattgatcaacatgtatctgccagacccagtgggcgacggcctcttcaaagacggtaagaatccatcctggggacccctctcgcccgcagttcagaaaggctcagggcaaatccagttatggcagtttctccttgaattactagctgaccgagcaaacgccggttgcattgcctgggagggtggtcacggtgagttcaaactgaccgatcccgatgaggtcgcgagacgctggggagaacgcaaatcaaaaccaaatatgaattatgacaaactctcaagagcgttgcggtattactacgataagaacatcatgtcaaaggttcatggaaagaggtatgcctaccggtttgactttcaaggcttggcacaggcctgccagccccctccagcacatgctcacgctgccgctgctgccgctgccgcagcggcagccgcacaagacggcgctctttacaaactccctgcaggcctcgccccactgcccttccccggactgtccaagctgaatctgatggctgcctccgctggagtggctccggctggattctcttactggcctggcccaggcccagccgctaccgctgctgccgcaactgcggcactgtacccttctccttcccttcaaccacccccaggcccatttggagctgtggctgccgcatcccatctgggcggacattaccactag

SEQ ID NO: 223181 - DNA, 1416 bp, synthetic construct
  misc_feature 1..1416: note = Description of Artificial Sequence: Synthetic coding sequence
  source 1..1416: mol_type = other DNA
atggactcgtcctgtcataatgctaccaccaagatgcttgctactgcgccagcccgaggtaatatgatgtcgacttctaagccgctggcatttagcattgaaagaattatggccagaacccctgaacctaaagccctgcccgttccacacttcctgcagggagctctgccaaagggcgagcctaagcactccttgcatttgaacagtagcattccatgtatgatccccttcgtgcctgttgcttatgatacgtcacctaaggcaggagtgaccggcagtgagcctaggaaggctagtctggaagctccagcagctccagcggctgtcccttcagcccctgcatttagctgtagtgatctgctaaactgtgcactgagcctgaagggcgatctggctcgggatgcacttcctctgcagcaatataaactggtgaggccccgagtcgtaaaccactcatccttccacgccatgggggcactgtgctatctcaatcgcggagatggaccgtgtcacccagcggctggcgtcaacattcatccggtagcaagctacttcctctcatcccccctccatccccaaccaaagacatatctggccgaaagaaataaattggtggtgcccgcagtggagaagtatccaagcggagtagcctttaaggacctcagtcaggcccagttacaacactatatgaaggagtctgcacagcttctctccgagaagatagcctttaagaccagtgacttctctcgcggttcccctaacgccaaaccgaaggtgttcacatgtgaagtgttcaatgcccattacaacctaacaaggcatatgcctgtccataccggggctcgaccattcgtctgtaaagtatgcggtaagggttttaggcaggccagcactctgtgtcgccataagattatccacacccaggagaagccgcacaaatgcaatcagtgtggcaaggcttttaatcggtcatctaccctgaacactcatacacgaattcatgccggttacaagcctttcgtatgcgaattctgtggcaagggcttccatcagaaggggaattacaaaaatcataaactgacccatagcggagagaaacagtttaagtgcaacatctgtaataaggccttccaccaggtatataacctgaccttccacatgcacacccataatgacaaaaagccttttacatgtcccacttgcgggaaaggattttgtcgaaacttcgatctaaagaaacacgtccgcaaactgcacgatagcagcttaggccttgcccgtactcccgcaggggaaccaggcacggaaccgccaccacctttacctcagcaaccacccatgacactgcccccactgcagccaccccttcccacgcccggacctcttcaacctggcctccatcaaggtcaccagtag

SEQ ID NO: 223182 - DNA, 108 bp, synthetic construct
  misc_feature 1..108: note = Description of Artificial Sequence: Synthetic coding sequence
  source 1..108: mol_type = other DNA
atggactcatcttgccataatgctaccaccaagatgcttgcgactgctcctgctaggggcaacatgatgtcgaccagcaagccactggctttcagcattgagcgatag

SEQ ID NO: 223183 - DNA, 1278 bp, synthetic construct
  misc_feature 1..1278: note = Description of Artificial Sequence: Synthetic coding sequence
  source 1..1278: mol_type = other DNA
atggactcctcatgtcacaatgccactacaaaaatgttggccaccgcaccggctaggggaaatatgatgtccacttccaagccattagcatttagtatcgaacgtattatggccaggacccctgagcccaaggctctgccagttccacacttcctacagggggctctgcccaagggtgagcccaaacactctctgcacttgaatagcagcatcccttgtatgatccccttcgtgcctgtggcatacgacacctcacccaaagctggagtgactggatcagagccccgtaaggcttcattggaggcgcctgccgctcccgctgctgtgccatcggcgcctgccttcagttgctccgatctgctgaattgcgccctctctttgaaaggagatctggcaagggacgctttaccactacagcagtacaagctcccaaaaacctaccttgctgaacgcaataaattggtcgtgccagcagtggagaagtatcctagcggagtcgcctttaaagatctgagtcaggcacagttacagcactatatgaaagaatccgctcagctgctctccgaaaaaattgcttttaaaaccagcgacttttcccggggatcacccaacgcaaaaccgaaggtgtttacctgcgaagtttgtggcaaggtattcaatgcacattacaacctgacaagacacatgcccgtccacactggggctcgcccatttgtctgcaaggtttgcggcaagggattcagacaggcttcgactctgtgtcgacacaagattattcacacccaagaaaagccccataagtgcaatcagtgcggcaaagcttttaatcggtcctcaacactgaatactcacacccggattcatgctggctataaaccttttgtgtgcgagttctgtgggaagggctttcatcaaaagggaaattataagaatcataaactgactcactctggtgagaaacaattcaagtgcaatatctgtaataaagctttccaccaggtgtataacctgacatttcatatgcatacacacaatgataagaagccatttacatgccccacatgcggcaaaggtttttgccgtaattttgaccttaaaaagcacgtgcgtaagctccatgacagctctctcgggctcgcaagaacgcctgccggagaaccgggaactgaaccaccacctcctttgccgcagcagcctcccatgaccctgcctcctttgcagcctcccctgcccacgccaggtccgctgcagccaggtctacatcagggccaccaatag

SEQ ID NO: 223184 - DNA, 1428 bp, synthetic construct
  misc_feature 1..1428: note = Description of Artificial Sequence: Synthetic coding sequence
  source 1..1428: mol_type = other DNA
atggattccagctgccataacgctaccacaaagatgctggctaccgcacccgctaggggaaatatgatgtccacctccaagccacttgctttctctattgaacgcatcatggcccgtacacctgaacccaaagcactgcccgtcccacactttttacagggggcacttcctaaaggtgagcccaagcactctttacacctgaactcatcgattccttgcatgatcccattcgtgcccgtggcttacgacacttcccccaaggccggagtcactggtagtgaaccacgcaaggcgtcacttgaagccccagctgctccagccgcagttccttccgctccagcattttcatgcagtgatctactcaactgcgccctgtcgctgaagggagacctagcgagagacgccctgcctttgcaacagtacaaacttgtccgaccacgcgttgtcaaccattctagcttccatgccatgggcgcactgtgctatttgaatcgcggagatgggccttgccaccctgccgctggtgtgaacatacatccagtggcatcatacttcctgtcatccccactacatcctcagcccaagacctacctggcagaaagaaacaagcttgttgtgcctgcagtggagaagtacccttccggagtcgcgtttaaagatttatcccaggcccaactgcagcactacatgaaagagtccgcgcagcttctgagcgagaagatcgccttcaagaccagtgacttctctcgcggatctccaaacgcgaagcccaaggtgtttacttgcgaagtttgcggtaaggtctttaacgcccactacaacctcacacgacatatgcccgtccacaccggcgctcgccctttcgtttgcaaggtatgcggaaaggggtttcggcaggcttccactctgtgccgccacaaaataatccatacacaagaaaaaccacataagtgtaatcagtgtggaaaagcattcaatagaagcagcacacttaatacacatacacgtattcacgctggctataaaccattcgtttgcgaattttgtgggaagggatttcaccagaaaggaaactataagaatcacaagctcacacacagtggagaaaagcagttcaaatgtaatatttgtaacaaggctttccatcaggtatacaatctgacatttcatatgcatacccacaatgataagaaacccttcacttgcccaacttgtggtaaaggattctgccggaacttcgacctgaagaaacatgttcgcaaattgcatgattccagccttggcctggctagaactccagccggagagcctggcaccgaacctcctcccccactccctcagcagccaccaatgactctgccgcctctgcagccgccacttcccacacccggacctctccagccaggtctgcaccaaggtcatcaatag

SEQ ID NO: 223185 - DNA, 1380 bp, synthetic construct
  misc_feature 1..1380: note = Description of Artificial Sequence: Synthetic coding sequence
  source 1..1380: mol_type = other DNA
atggcttcatctgcctcactggaaactatggttccaccagcttgccctcgagctggcgcttctcctgccacctccaagacacttgccttctcaatcgagcggattatggctaaaaccagcgaacccagggccccttttgagccgcgtcccggagccctggaggccgacggatctcaaggcaaaaaattactcaatctatgtagccccctgccctgtatgatcccactccaaccactggggtatgaagtgcctagcaaaacacttttgtcttattctgaactgtggaagtcaagcctacgcgctggtgggggagggggaggtggcggaggcggaggaggaggcggtggcggtgcaccggtatgcggtgccagcggcttatgtaaaaccaattgcggtgtttgctgtaaagctgagcttggcctggccccatcggcactgcccgctggaagagtgataaaacctcaggttatcaaccaggctgtcggactgccagcctctgggtctctctactactttaactacctcgacagcaccgcctaccctccttccgagttactgtctggtcaccttttcccctcaggactgctgaatgcccaggcccctgccgcactcgccgctcacccaaaattgttcctgctcgagaatgctaagcttgctggactggctgccgacaaattcccacacccggcaccctatccacataaggagcgcctgccagcccctcttgagcaggtgttgaaagagaattccgccctgactgcagaaagaggcggagtaaaaggtcattctaagctccctgggggaagtgcagacggcaagccgaagaactttacctgcgaggtttgtggcaaagtgtttaatgcccactacaatctgactagacatatgccagtgcacaccggcgcacgaccttttgtgtgtaaagtctgtggcaagggctttaggcaagcaagtaccctctgccgtcataagatcattcatacccaggaaaagccacataaatgtaatcagtgtggaaaggcctttaacaggtcgtctacattaaatactcacattaggattcacgcaggttacaagccctttgtctgtgagttttgcggaaagggctttcaccagaagggcaattataagaatcacaagttaactcatagtggcgaaaagcagtacaagtgcaccatctgcaacaaagcctttcatcaggtctacaacctcacattccatatgcacactcacaatgacaaaaagccgttcacatgcgccacatgcgggaaggggttctgtcgtaatttcgacctgaaaaaacacgtcagaaagctgcatgatagcgtgggtccggcagccccatcagccaaagatcttacccgaactgtacagagctag

SEQ ID NO: 223186 - DNA, 1380 bp, synthetic construct
  misc_feature 1..1380: note = Description of Artificial Sequence: Synthetic coding sequence
  source 1..1380: mol_type = other DNA
atggcgtcttccgcctcgctggaaacaatggtccctccagcctgtccacgagcaggagccagcccggcaacttcaaagacactggctttctccatcgaaagaatcatggctaaaactagtgaaccaagagccccttttgaaccacgcccaggcgctttggaggccgatggcagccagggaaagaagctgttaaatctctgcagcccgcttccatgtatgattccactgcagcctctcggctatgaggtcccatcaaagacgctactcagttacagtgagctgtggaaaagcagcctgagggcaggcggaggtggcggaggcggaggtggaggaggcggtggcggagggggagctcccgtctgtggggcttcaggactgtgtaaaaccaattgtggagtctgttgcaaagccgaattaggtctcgccccaagcgcgctccctgccggacgcgtgatcaaaccccaagtgatcaaccaggctgtgggactgcccgcaagtggctccctatactacttcaattacctagatagcacagcctaccccccttcggaactgctgagtggtcatctatttccttctggcctgttaaatgcacaggcaccagccgcattagctgcccaccccaaactctttctattggaaaatgctaaactcgcgggtttggcggcagacaaatttccccatcccgcaccttatccgcataaagaacgactgcctgctccactggagcaagtgctcaaagagaactctgcactaacggcggagaggggaggtgtcaaaggccatagcaaactgccaggcggatctgccgatggtaagcccaaaaactttacctgcgaagtgtgtggcaaggtctttaacgcccactataatctgacccgccacatgccagttcacaccggggctaggccattcgtgtgcaaggtatgcggtaaaggcttccggcaggcctccacactttgtcgccataaaataatccatacccaggaaaagcctcataaatgcaatcagtgtggcaaggccttcaacaggagttccacactcaacacccacatacgcattcacgctggatacaagcccttcgtttgcgagttctgcgggaaagggtttcaccagaaaggaaattataaaaatcacaaactcacacattcaggcgaaaaacagtataagtgtactatatgtaacaaggcctttcatcaggtgtataatctgactttccacatgcacacccataacgacaagaaaccattcacctgcgcaacttgtggcaaaggtttctgcagaaacttcgacttgaaaaaacacgttagaaaattacacgatagcgttggcccagccgcacccagcgcgaaggatttgactaggacggttcagtcttag

SEQ ID NO: 223187 - DNA, 1380 bp, synthetic construct
  misc_feature 1..1380: note = Description of Artificial Sequence: Synthetic coding sequence
  source 1..1380: mol_type = other DNA
atggcctctagtgcttccctagagactatggttccaccggcttgccctagggccggtgcttcccctgctacttctaagactttagctttctctatagaaaggatcatggcgaagacttctgaaccacgcgcaccgttcgagccaagacctggagcgctggaggccgacggatcgcaggggaaaaaactcctgaatttatgtagtccccttccttgtatgatccccctgcagccgctcggttacgaagtgccgagcaaaaccctcctgagctactcggaactgtggaagtcttccctgcgagccggtggaggtggtggcggtggcggaggaggtggagggggaggtggcggtgccccagtgtgcggggcttcaggcctgtgcaaaaccaattgcggggtctgctgcaaggcggaactgggcctagcaccatccgctctacccgcaggcagagtcatcaagccccaggtgataaatcaggccgtgggactcccggcttccggaagcctctactactttaactacctcgactccactgcttacccgcctagcgaactgctgagcggacacttgttcccaagtggcctcctgaacgcacaggccccagctgcgctcgccgctcaccccaagctgttcctgcttgaaaacgcaaaactggctggcctggcagcagacaagttcccacaccccgctccctacccacataaggagaggctccctgcgcctctggagcaagtgctgaaagaaaattcagcactgacggccgagcggggtggggtcaagggccactctaagctgcctggaggtagcgccgacgggaaacctaagaactttacttgtgaagtttgtggcaaagtgtttaacgcccactacaatctgacacgccacatgcccgttcataccggagcacggccattcgtgtgcaaggtctgcggaaaaggctttcgccaagcatccacactgtgccgtcacaagatcattcatactcaggagaagcctcacaagtgcaaccagtgcgggaaggccttcaaccggagctctaccctgaacacacacatcagaattcatgctggatataaaccattcgtgtgcgagttctgcggcaagggcttccatcagaagggaaattacaagaatcataagctcacgcactccggagagaaacaatataagtgtacgatctgtaacaaagcattccaccaagtttacaatctgacgttccacatgcacactcacaatgacaagaaaccgtttacctgcgcaacctgcggcaagggattttgccgcaattttgacctgaagaagcatgttcgtaagctgcacgacagcgttggcccagcggctccctcagccaaggacttaacgaggaccgtccaaagttag

SEQ ID NO: 223188 - DNA, 1140 bp, synthetic construct
  misc_feature 1..1140: note = Description of Artificial Sequence: Synthetic coding sequence
  source 1..1140: mol_type = other DNA
atggccgctacggccgctgcggtggtagctgaagaggatacggaacttagggatctgctggttcaaacacttgagaattctggagtcctgaatcgcatcaaggctgagctgagagccgctgtcttcttggccctggaggagcaggaaaaggtggagaacaaaacgcctctggtgaacgagtctctgaaaaaatttctgaatacgaaagacgggagactggtggcttctctggtggcggagtttttgcagttttttaacctggattttaccctcgccgttttccaaccagagacctccacgctgcaaggcttggaaggacgtgaaaacctggctagggacctgggaataatcgaggccgagggcacagtaggcggtcctcttctgctggaggtgattcggaggtgccagcaaaaggagaaggggcctactacaggcgagggggcattagacctgagcgacgtccattcaccccctaagagtccagaggggaagacttctgcacaaactactcccagtaagaaagcaaacgacgaggctaatcagagtgacacttcagtgtccctctccgaacctaaaagcaaaagctcactgcacttgctcagtcatgaaaccaaaataggtagtttcctatctaaccgtaccctagacggtaaagacaaagctggcctctgtccggatgaagacgacatggaaggcgacagcttcttcgatgacccaatcccaaaaccagagaaaacttacgggctgaggaaagaaccacgaaaacaggccggaagccttgctagcctgtcagatgcccctccccttaaaagcgggttgtctagcctggccggagctccttcccttaaagactccgagtccaagagaggcaacaccgtgcttaaagacctgaagctaatttcagataagataggctcactcggcctgggaaccggcgaggatgacgactacgtagatgattttaactccacatcacaccgtagcgaaaaatctgaaatttccatcggagaggaaattgaagaggacttgagcgtcgaaatcgatgacattaacactagcgataagctagatgatttaactcaggacctgacagtgtctcagctatccgacgtggccgactacctggaggacgtggcgtag

SEQ ID NO: 223189 - DNA, 1200 bp, synthetic construct
  misc_feature 1..1200: note = Description of Artificial Sequence: Synthetic coding sequence
  source 1..1200: mol_type = other DNA
atggcagccacggctgccgcagttgtggccgaagaggatactgaactgcgggatctgctggtgcagaccctggagaattctggcgtgttgaaccggatcaaggccgagttgcgggctgccgtgttcctggctcttgaggagcaagaaaaagtggagaacaagacgcctctggtaaatgagtcgttgaagaagttcctgaataccaaggacggacgcctcgtggcctctctggtcgccgagtttcttcagttcttcaacctcgacttcacgctggcagtgttccaacctgaaacttctaccctgcagggtttagaagggagggagaacctggccagagatctgggtatcatcgaagctgaaggtaccgtgggcggacccctacttctcgaagtgattaggcgttgtcagcagaaggagaaaggccctacgacaggagaaggcgctttagatctcagcgacgtccattcacccccaaagtccccagaggggaagacttcagctcagaccaccccctcgaagattcccaggtacaagggacagggtaaaaagaagacatctggacagaaggctggggataaaaaggcgaacgacgaagcaaaccaatcagacaccagcgtctccctgtctgagccaaaaagtaagtccagtttgcatttgttgtctcatgagaccaagataggttcatttctgtctaatcggaccctggacggaaaagacaaggctggactctgccccgatgaagacgatatggaaggagactctttctttgacgaccccatacctaaacctgaaaagacatatggattacgtaaagagccacgtaagcaggccggatccctcgcgagtctgtccgatgctcctcctttaaagtctggactctcctcattggcgggagctccttcattgaaggattccgaatctaagcgtggcaacactgtgctcaaggatctgaaattgattagcgacaaaattggcagtctgggcctggggacaggggaagacgacgactatgtggacgactttaattctacatcgcatcggtcagagaagagcgagatctccatcggcgaagaaatcgaggaggatctgtcagtggagattgatgacattaatacttccgataagctcgacgacttaacacaggatctgactgtgagtcagctgtctgacgtggccgactacctagaggacgtggcatag

SEQ ID NO: 223190 - DNA, 1095 bp, synthetic construct
  misc_feature 1..1095: note = Description of Artificial Sequence: Synthetic coding sequence
  source 1..1095: mol_type = other DNA
atggctgccactgcagccgcagtggtggcagaagaggacacagaactacgggatttgctcgtgcagactctagagaactctggtgtgcttaatcgtataaaggcagagctccgagccgcagtgttcctcgctcttgaggaacaggaaaaggtcgagaacaagaccccgctcgtcaatgaatctctcaaaaagttcctcaataccaaggatggaagacttgttgcctccttagtggccgaattcttgcagttttttaatctcgattttacactagccgtatttcagccggagacatcaaccttgcaaggtttggaagggagggagaacctggcccgagatctgggaatcattgaagcagagggcacagtgggaggacccttgctactagaggtgatccgaagatgtcagcagaaagaaaaaggccctactactggtgaaaaagccaatgatgaggccaatcagtcagataccagtgtgagcctgtccgagccgaaatccaaatcttccctgcacctgcttagccatgagaccaagattgggtccttcctttcaaaccggacactggacggaaaagacaaggctggactttgtcctgacgaagatgacatggagggagacagcttctttgacgatcccatccccaagccagagaagacatatggcctgcggaaagagccgagaaaacaggccggtagtctggcatcgttgtccgatgcgcctcccctgaaaagtggcttgtcttcattagcaggcgcacccagcctgaaagattcggaatccaagagaggcaataccgttttaaaggatctgaagttgatttcggataaaattggtagtctgggactggggaccggggaagatgacgactacgtagacgattttaatagcacctcacaccgtagtgagaaaagtgagatatctattggcgaagagatcgaggaggaccttagcgttgagatcgacgatattaatacttcggacaagacgattactcagcttgaatgtctcctctccatcggagccctgcattttaaaaacaccgcagacattttcaaagtgatcttcatcctactcaacaagatcctcccaatctag

SEQ ID NO: 223191 - DNA, 420 bp, synthetic construct
  misc_feature 1..420: note = Description of Artificial Sequence: Synthetic coding sequence
  source 1..420: mol_type = other DNA
atgagttctcttcctgtcccatataagctgcctgtctctttgagcgtgggatcttgcgtaatcatcaaaggaactccaatccattcatttatcaacgaccctcagctgcaggttgacttttacacagacatggatgaggattcggatattgctttccggtttagagtccattttggaaaccacgttgtcatgaaccgcagagagttcgggatatggatgctggaggaaaccaccgactacgtaccttttgaagacggtaagcagttcgaactgtgtatctacgtccactataacgaatatgagattaaagtgaatggcatccggatctacggctttgtccaccgtatccctccatcattcgttaagatggtgcaagtgagccgagatattagtttaacctctgtctgcgtgtgcaattag

SEQ ID NO: 223192 - DNA, 8615 bp, synthetic construct
  misc_feature 1..8615: note = Description of Artificial Sequence: Synthetic coding sequence
  source 1..8615: mol_type = other DNA
atgcgcagagggaggctgttggaaattgctttagggttcactgtgctgctggcctcttatacgtcccatggcgcagacgcgaatcttgaggccggtaatgttaaagagactagagcttcccgcgctaaacgtcgcggtgggggaggacacgacgcccttaagggacctaacgtgtgtggcagcagatacaatgcttactgctgccctgggtggaagacactgccgggtggcaatcagtgcatcgtccctatttgccgtcacagctgcggcgacggtttttgcagtagaccgaatatgtgcacctgcccctccggacaaatcgctccatcatgtggatcccgcagtatccagcattgtaacatccggtgcatgaacgggggaagctgttctgatgatcactgtttatgtcagaaggggtatatcggaacacactgcggccaacctgtatgtgagtccggctgcctaaacgggggtcggtgcgttgctcctaaccggtgcgcttgcacctatggattcactggtccccagtgcgagcgggactatcgcacaggaccctgtttcaccgttatcagtaaccaaatgtgccaagggcaattaagtggaattgtgtgtaccaagaccctgtgctgcgccaccgtgggtagagcctggggacacccatgtgagatgtgccccgcacagccccatccctgcagaaggggtttcattcctaacatacggactggagcttgccaagatgtcgacgagtgtcaagcaatccccggactgtgccaggggggaaattgtattaacacagtggggagtttcgagtgcaagtgtccggctggccataagttaaatgaggtgtcccagaagtgcgaggatattgatgaatgcagcaccattccaggtatttgtgaggggggtgagtgtaccaacaccgtgagctcatacttttgtaaatgtcccccaggcttttacacaagtcccgatggtaccagatgtatagatgttcgccctgggtattgctacacagcactcaccaacggtagatgtagcaaccagttgccccagagtatcaccaaaatgcagtgctgttgtgacgcgggaaggtgttggtctcccggagtcaccgtggcaccagaaatgtgtcccatccgggcaactgaggattttaataaattgtgttccgtgccaatggtgatcccgggtaggcccgagtatcccccacccccactcggacctattcctccggtgctgcccgttcctccagggtttccccctggacctcagatcccagtgcctcgacctccggtcgaatatctctatccttcacgggagcccccacgggtgctacccgtgaacgtcacagactattgccagctggtcagatacctatgccaaaatggaagatgcatcccgactccaggctcttgtagatgtgagtgcaataaaggctttcaacttgacttgcggggtgagtgtatcgatgtggacgaatgtgagaaaaatccctgcgcagggggtgaatgtattaacaaccagggtagttacacctgtcagtgcagggccggataccagagcaccctgaccaggacagagtgtcgggatatagacgagtgtctacaaaatggccgaatctgcaacaacggaaggtgcattaatactgacgggagctttcactgtgtatgtaatgcagggtttcatgtgacaagggacggaaaaaactgtgaggacatggacgaatgctcaatcaggaatatgtgcctgaatggaatgtgcattaacgaggacggttcctttaaatgcatttgcaagcccggtttccagctggcctctgacggtcgttattgtaaggacatcaatgagtgtgaaactccgggtatttgtatgaacggtcgttgtgtgaataccgacgggtcctatagatgtgagtgttttccaggtctggccgtcggcttggatggcagagtgtgcgtggacacccacatgagatccacatgttacgggggatacaagcggggacaatgtattaaacctctttttggcgcagtgacaaagtcagaatgctgttgtgcaagcactgagtacgcgtttggcgaaccatgccagccatgtccggctcagaattccgcggaataccaggccctgtgcagctccggcccaggaatgaccagtgcaggcagcgatatcaacgaatgcgccctggatcctgacatctgccctaatgggatttgtgagaacctgagaggaacctataagtgcatatgcaactccggttatgaggtagattcgactggaaaaaattgtgtcgatattaacgaatgtgtgctcaacagtttgctgtgtgataatgggcagtgccgcaatactcccggttcctttgtgtgcacatgtcccaagggattcatttataaaccagatctgaagacatgcgaagatattgatgaatgcgaatctagtccatgcatcaacggggtctgcaagaacagtccaggaagtttcatctgcgagtgctcttcagaaagcaccttagatcctacgaagaccatttgcattgagaccattaaggggacatgctggcagactgtcatagatggtcggtgcgagattaacattaacggtgccactctgaagagccagtgctgctcctctctgggcgctgcatggggctcaccatgcacactctgccaggtggatcccatttgtggcaagggctatagccggattaaaggtacccagtgtgaagacatcgatgaatgcgaggtgtttccaggcgtgtgtaaaaatggactgtgtgtaaatacccgtggcagttttaagtgtcaatgcccttcgggcatgacactcgatgccaccgggcgtatttgtctggacattaggttggaaacctgttttttgcgctacgaggatgaagaatgcacgctccccatcgccggacgccacaggatggatgcttgttgctgtagcgtaggagccgcatggggtaccgaggaatgcgaagagtgtccgatgaggaataccccagagtacgaggaactttgcccaagaggcccaggttttgcaacgaaggagatcaccaatggaaaacctttcttcaaagacattaatgaatgcaaaatgatcccgagcctttgtacccacggaaaatgccggaacacaatcgggagcttcaaatgtcggtgcgactccggatttgccctggacagcgaggaaaggaactgcaccgatatcgatgagtgccgcataagcccagatctctgtgggaggggtcaatgtgtgaatactcccggtgatttcgagtgtaaatgcgacgaggggtacgaaagtgggttcatgatgatgaagaactgtatggacattgatgagtgccagcgcgatccgctcttgtgccggggaggggtgtgccacaacaccgagggcagctacaggtgcgagtgtcctccaggtcaccagttgagccctaacatctcagcctgcattgacatcaatgaatgcgaactctctgcacatctgtgtcctaatggccgatgcgtaaacctcattggaaagtatcagtgtgcgtgtaacccaggctatcattcaacccccgatcggctgttctgcgtggacatcgacgagtgtagtattatgaatggcggttgcgaaactttctgtacaaattccgaaggttcttacgaatgttcttgtcagcccggattcgccctgatgcccgatcaacgcagctgtacggatatcgacgagtgcgaggacaatcctaatatttgcgatgggggtcagtgcactaatatcccaggggaatatagatgtctttgctacgacgggtttatggcaagtgaggatatgaaaacctgcgtagatgtgaacgaatgtgacctcaacccaaatatctgcctcagcggaacttgcgagaacacgaaagggtctttcatttgtcactgtgatatgggctactccggcaaaaagggaaagactgggtgcactgacatcaacgaatgcgagattggcgctcacaattgcggtaaacacgcagtctgcaccaatactgcaggcagttttaaatgcagctgttctcccggatggattggcgacggaattaagtgcaccgacctggacgagtgctcaaatggaacccacatgtgtagccagcatgcagactgcaaaaatactatgggatcttatcgatgcctgtgcaaagaaggatacacaggtgacggatttacatgtactgatctggacgagtgttcagagaatttaaatctgtgcggcaatggacaatgcctgaatgctccaggcggatatcgatgcgagtgcgacatgggttttgtgccgagtgcggacggcaaggcttgtgaagatatcgacgagtgcagccttcctaacatctgcgtgtttggaacttgccacaacctccccggactgtttcggtgtgagtgcgaaatcggctacgagctggatagatccggagggaattgtacagacgtgaatgaatgcctagatcccacaacatgcatttcagggaattgcgtaaacacccccggttcttacatatgtgactgcccacctgacttcgagctgaatccaaccagggtggggtgtgtcgatacccgctctggcaactgctatctggacatcaggcctcggggagacaatggagacacagcctgtagcaacgaaatcggcgtgggggtgtctaaagcctcttgttgttgcagcctaggcaaggcctggggtaccccttgtgaaatgtgtccagcggtgaacactagcgaatacaagattctgtgcccgggaggggagggtttcaggccgaatccaattacggtcattcttgaagacatcgacgagtgccaagaactccctggcctatgtcagggaggaaagtgcatcaatactttcgggagtttccagtgtcgatgccctactggttactatctgaatgaagacacaagagtttgtgatgatgttaacgaatgcgagacccccggaatatgtgggcctgggacatgctacaacactgtgggtaattacacctgtatctgcccccctgactacatgcaggtgaacggaggtaataactgcatggacatgagacgcagtctgtgttacaggaactattatgctgataatcagacttgcgacggcgagctcctgtttaacatgactaagaaaatgtgctgttgcagttacaacatcggcagggcctggaacaagccttgcgagcaatgtccaatcccatccacggatgagttcgcaaccctttgtgggtcacagaggcccggttttgttatagacatctacaccgggctccccgttgatattgacgagtgtagggagatccctggagtgtgcgagaatggggtctgcatcaacatggtgggttcttttcggtgcgagtgccctgtcggcttcttctacaacgataaactcttggtgtgtgaagatatagacgagtgccagaacgggccagtgtgtcagaggaatgcagaatgcatcaacaccgccggttcataccggtgcgattgcaaacctgggtaccggttcacttccaccgggcagtgcaacgaccggaacgagtgccaggagatccctaacatttgtagtcacggacaatgtatcgacacagtgggtagcttctattgtttatgtcacacaggattcaaaacaaacgacgaccagaccatgtgtttggacatcaacgagtgcgaacgggatgcttgtggcaatggaacttgtcggaatactatcggatcatttaattgtcgctgcaaccatggcttcatactgtcgcataataacgattgtattgacgtcgatgagtgtgcatccgggaacggaaacctctgtagaaacggacagtgcatcaacactgtgggctcctttcagtgccaatgtaacgaggggtacgaagtggcgcctgacggtagaacttgtgtcgatatcaatgaatgccttctcgagccaaggaagtgtgcccctggaacctgccagaacctcgatggatcctacagatgcatttgtccacccggatatagtctgcagaatgagaaatgtgaggatattgatgaatgtgtggaggaacctgagatctgtgcattgggaacctgcagtaacactgagggttcctttaaatgcctgtgtcccgaaggattcagtctcagcagctctggaagaaggtgccaggatctccggatgtcctactgctacgcaaaatttgagggaggaaaatgtagttcaccaaaaagccggaaccatagtaagcaggagtgctgttgtgcgctgaaaggcgaagggtggggtgacccctgcgaactatgcccaaccgagcccgacgaagcctttcgtcagatatgcccctatgggtctggtataatcgttggcccagatgattctgccgttgatatggatgagtgcaaagagcctgatgtctgtaagcatgggcagtgcattaataccgacggctcatacaggtgtgagtgcccattcggatacattttagccggaaatgagtgcgtcgacaccgacgagtgcagtgtggggaatccttgcgggaacgggacctgcaaaaatgtaattgggggttttgaatgtacatgtgaagagggcttcgagccagggcctatgatgacctgtgaagacatcaatgagtgtgcacagaacccccttctctgcgcattcaggtgtgtgaatacttatggtagctacgaatgcaaatgtccggtaggctatgtgctgcgagaggatcggcgtatgtgcaaggacgaggatgaatgcgaagagggcaaacatgactgtaccgaaaagcaaatggagtgcaagaatctgatcgggacatacatgtgcatctgcggccctggctatcagagaagacccgacggtgaaggctgcgtggatgagaacgaatgtcaaactaagccgggtatctgcgaaaatggcagatgtctgaacacccggggttcatatacttgcgagtgtaatgatgggtttactgccagtcctaatcaggacgaatgcctggataatcgggagggctattgctttaccgaagtgctgcagaacatgtgccagatcggcagttccaacagaaacccggttaccaagtcagagtgctgttgtgacggaggacggggttggggccctcactgtgagatttgtccttttcagggcaccgtcgcttttaaaaagttgtgccctcatgggagaggattcatgacaaatggtgccgacattgatgagtgcaaagtgattcatgatgtgtgccggaatggggagtgtgtgaacgacagaggttcatatcattgcatctgcaaaacaggttacaccccagatattacaggaacatcctgcgtcgatctgaatgaatgtaaccaggcccctaagccgtgcaactttatctgtaagaataccgaaggctcttatcagtgttcatgtcccaaggggtacatactgcaagaggacggacggtcctgtaaggacctagatgaatgtgccactaaacagcacaattgccaatttctgtgcgtgaacacgatcgggggttttacctgcaaatgccctcctgggtttacccagcaccatacctcctgtatcgacaacaatgaatgcacatccgacattaatctgtgtgggtccaaaggcatctgccaaaataccccaggttctttcacatgtgaatgccagaggggcttttctctagatcagactggtagcagttgtgaagatgttgacgagtgcgagggcaaccatagatgtcaacacggctgccagaatattattggtgggtataggtgctcttgtccccagggatatttgcagcactatcagtggaaccaatgcgtggatgaaaacgagtgcctttcagcccacatctgcggcggtgcctcctgccataacactctgggttcttacaaatgcatgtgtcccgctggcttccaatatgaacagttctcagggggatgtcaagacataaacgaatgtggcagcgctcaagcaccatgttcttacggctgttctaacacggaaggtggctatctgtgtgggtgtccccctgggtatttcagaattggccaaggacactgtgtgtctggtatgggcatgggtcggggaaaccctgagccccctgtctctggcgagatggacgacaacagcctctcacctgaggcgtgttatgaatgtaaaattaatggatatcccaaaaggggacgaaagcggcgaagcaccaatgagacagacgccagcaatatcgaggatcagtccgaaaccgaagctaacgtttcccttgccagctgggatgtggaaaaaacagccatctttgcttttaacatctcccatgttagcaataaggtccgcatcttagagcttctccccgctctcacaactctgacaaaccacaatcgctacttaatcgagtctggaaacgaagacgggtttttcaaaattaatcagaaagagggaatcagctacttacactttacaaaaaaaaagcctgtagcaggaacctattcacttcaaatctcgagcactcctctgtataagaagaaagagcttaaccagttagaggataaatatgacaaggactatctgtccggggaattgggggataacctcaagatgaaaatccaggtactactgcacta

SEQ ID NO: 223193 - DNA, 2958 bp, synthetic construct
  misc_feature 1..2958: note = Description of Artificial Sequence: Synthetic coding sequence
  source 1..2958: mol_type = other DNA
atggggtttgtgcctagcgccgatggcaaggcatgcgaagacattgatgaatgtagtctgcccaacatatgcgtgttcggaacttgtcacaacttgcctggtctatttagatgcgagtgcgagattgggtacgaacttgatcgcagtggaggcaactgtactgacgtgaatgaatgtttagaccctacaacctgcatctcaggaaactgcgtgaacacacccggatcttatatctgcgattgcccgcctgacttcgaacttaaccccacccgcgtgggttgcgtggatactcggtcgggtaattgctatctggacatccgaccgcgtggcgataatggtgacacagcttgctctaacgaaataggcgttggcgtctctaaagctagttgctgttgttccctgggcaaggcatggggcaccccttgcgaaatgtgccctgcagtcaacacctccgagtacaaaattctgtgtcctggtggggaaggattcaggcctaacccgataactgtcattctggaggatattgatgaatgtcaggagctgcctggcctgtgtcagggagggaagtgcatcaatacatttggctccttccaatgtaggtgccctaccggatactacctcaacgaagatacacgcgtgtgcgacgacgtcaatgagtgcgaaaccccaggcatctgcggcccaggcacgtgttataacaccgtgggcaactatacctgtatatgtcctcccgattatatgcaggtcaatgggggaaacaattgcatggatatgcgtcggtcactgtgctatcgcaattactatgctgacaaccagacctgcgacggggaacttctgttcaatatgaccaaaaaaatgtgttgttgcagttacaacataggtagagcctggaacaagccttgtgagcaatgtcccatacctagcacagacgagttcgcgacactttgtggttcacaacgaccaggctttgtaattgatatttacacaggtctgcctgtagatatcgatgaatgccgcgagattccaggcgtatgtgagaatggagtttgtataaatatggtgggatcttttcggtgtgaatgcccagtgggattcttttacaacgacaagctgctggtgtgtgaggatatcgacgaatgccagaacgggcctgtgtgccagagaaacgccgaatgtataaatacggccggatcttaccgctgtgattgcaaaccaggttaccggttcacttccacgggccagtgcaatgatcgcaatgaatgtcaagaaatccctaacatttgttctcacggacagtgcattgatacagtcggctctttctattgtctgtgccatacagggttcaagaccaatgacgaccagactatgtgcctggatattaatgagtgtgagagggacgcctgcggtaatggcacttgccggaataccattggctccttcaattgtaggtgcaaccatggtttcattctctctcacaataatgattgtatagacgtggacgagtgcgcgtccgggaacgggaacctttgtcggaacggccagtgtataaatactgttggaagttttcaatgtcagtgtaacgaaggctacgaggtggctcccgacggacgtacatgcgttgacatcaacgaatgcctcctggagcctagaaagtgtgcccctggcacatgccaaaacctggatggaagctaccgctgcatatgccctccagggtacagtctgcagaacgaaaaatgcgaagatatcgatgaatgcgttgaggagcccgaaatatgcgccctgggtacttgtagcaataccgaggggagtttcaaatgcttatgtccagagggattttcactgtcatcttctggtcgtagatgccaggatcttagaatgtcctattgttacgctaaattcgaaggaggcaaatgctctagtcctaagagcagaaaccatagcaagcaggagtgctgctgcgccctgaaaggggaggggtggggagatccctgcgagctttgcccaacagagcctgacgaagccttcagacaaatctgcccatatggctcaggtattattgttggtccagatgactccgcggtggatatggacgagtgtaaagagcccgacgtttgtaagcatgggcagtgcataaataccgatgggtcataccgctgcgagtgcccctttggctatattcttgcagggaatgagtgtgtcgatactgacgagtgctctgtaggtaacccatgcggcaatgggacctgtaaaaatgtgatcgggggtttcgagtgtacttgtgaggaagggtttgagcccggtccaatgatgacgtgtgaggacatcaacgagtgcgcacaaaaccctctcctatgcgcttttcgctgtgtgaacacgtacggtagctacgagtgcaagtgccctgtaggatatgtcctccgggaggatagaagaatgtgcaaagatgaggacgagtgcgaggagggtaagcacgactgtacggaaaagcaaatggagtgcaagaacctgattggaacttacatgtgcatatgtgggcctggataccagagacgcccagatggagagggttgtgttgatgagaacgagtgtcagaccaagcccggaatctgcgagaatggcagatgtttgaacacccggggatcctacacctgtgagtgtaatgacgggtttacagcctccccgaatcaggatgagtgcctcgacgtgatcctcagcctgctactccttagcccggctttcccctcatgctttttctccccaagaaccatcgggaagggaaccgcctcacagagatgctataaaacatgcgtgcgctcagctcccgcaacaggcacaccatctcccaaccgcaacgctgctgtcacggagggtgaggcgggtgtgccgactgtccgtagtgcacttagtcggggattgtggctttcaaggaattcagtgccaatggccgaggatagttag

SEQ ID NO: 223194 - DNA, 3450 bp, synthetic construct
  misc_feature 1..3450: note = Description of Artificial Sequence: Synthetic coding sequence
  source 1..3450: mol_type = other DNA
atgaggcgaggacgcctgcttgaaatcgctttaggatttacagtgctgctggcctcctacaccagccatggggcagatgccaacctggaagccggtaatgtcaaagagaccagggctagccgggctaaacgcagaggtggcggagggcacgatgcactcaagggtcccaacgtatgcggctcccgatacaacgcctattgttgccctgggtggaaaacgctccccggtggcaatcagtgcattgtccctatctgtcggcattcctgtggagatggattttgctcgcgccctaacatgtgtacctgtccttccggccagattgcaccaagttgcggatcgaggagcattcagcactgcaatattaggtgtatgaacggagggtcttgttcagatgatcactgtctttgccagaagggatatatcgggacacattgtggtcagccagtatgcgagtccggttgcctcaatggcggaaggtgtgtcgctcctaacaggtgtgcatgtacatacggcttcaccggccctcagtgcgagcgggattaccgtacaggcccttgtttcacggtaattagcaatcaaatgtgccaagggcagctttcaggtattgtctgtacaaagaccctctgttgcacatacattaatgagtgcgaaatcggcgcacataactgtggaaaacacgcagtgtgtactaataccgccggatcattcaagtgcagttgctctccaggctggattggagacggaattaagtgcaccgacttggacgaatgtagtaatgggacacacatgtgctcacaacacgcagattgtaaaaatacaatgggcagctaccggtgtctgtgtaaagaagggtatacaggggatggatttacctgcacagacctcgacgagtgctcagaaaacctgaacctgtgtggtaatgggcaatgcctcaatgcacccggtggctacaggtgcgagtgtgacatgggttttgtccccagtgccgacgggaaggcttgtgaagatatcgatgagtgttccctgccaaatatttgtgtcttcgggacctgtcacaacctaccgggtctgttcaggtgtgaatgcgaaattgggtatgagctggacaggagtggtggcaactgtaccgatgtgaacgagtgcctggatcccaccacatgcatctccgggaactgtgttaacacccccggttcatatatttgcgactgcccacccgattttgagctgaatcccaccagagtgggttgtgtggacactagaagcggcaactgttacttagacataaggcccagaggcgacaacggtgataccgcctgttcaaatgagatcggagtgggagtttccaaggcctcatgttgctgctcattagggaaagcctggggcacaccttgcgagatgtgtcctgcggttaacacgtcagaatacaaaattctgtgccccggaggagaagggttccgcccaaaccctataactgtgatactagaggatattgatgagtgtcaggaactccccggactttgtcagggtggtaaatgcattaatacctttggctcctttcagtgtagatgccctaccggctattatctgaatgaagatactcgtgtgtgcgatgatgtcaatgagtgcgagactcccggaatctgcgggcctggaacctgctataacacagttggaaattatacatgtatctgccccccagattatatgcaggtcaatggcggaaataactgcatggatatgcgcaggagcttgtgctatcggaattattacgcggacaaccagacgtgtgatggcgaactcctgttcaacatgactaaaaagatgtgctgctgttcatacaacataggacgagcatggaataagccctgtgagcagtgcccgattccatctaccgatgagtttgccaccctctgtggcagtcagcgccctggatttgtgatcgatatctatacaggtttgcctgtggatatagacgagtgcagggaaatccctggcgtgtgcgaaaatggtgtgtgcatcaatatggtgggttcctttaggtgtgaatgcccagtcggattcttttataatgacaaacttctggtctgcgaagatatagacgaatgtcaaaacggtcctgtgtgtcaaaggaatgcggagtgtattaatactgctggcagttataggtgcgactgcaagccaggatataggttcacaagcactgggcaatgcaacgataggaacgagtgtcaggagattccgaacatatgttcgcacggtcagtgcatcgataccgttggaagcttctactgcttatgtcatacaggtttcaagacaaacgacgatcagacgatgtgtctggatattaatgagtgtgaaagggatgcttgtggcaatggcacttgccggaacacaatcggttccttcaattgcagatgtaaccacggcttcatattaagtcacaacaacgactgtattgatgtcgatgagtgcgcctccggaaatggtaacctttgcaggaatggccagtgtatcaacaccgtcggtagtttccagtgccagtgtaacgagggatatgaagtagctcccgatggtcgcacatgtgttgacatcaacgagtgtctcctggaacccaggaagtgcgctcccggtacatgtcagaacctcgacggcagctacaggtgcatctgtcctcctgggtatagtttgcagaatgagaagtgtgaggacatcgatgagtgtgtggaggagcccgaaatatgtgctctgggaacgtgctccaacactgaaggctcatttaagtgcctgtgtccagaaggtttctccctttctagttcgggcaggcgctgtcaggacctgaggatgtcttattgttatgccaaattcgagggagggaagtgctcttctccgaaaagccgtaaccactccaagcaggagtgctgctgcgcactcaagggagagggctggggggacccttgcgaattgtgccccacagaaccagacgaggcttttcgccagatttgcccatacggatctggcattattgtgggacctgatgatagtgccgttgacatggatgaatgtaaggaaccggatgtctgcaaacatggacagtgtatcaacacagatggtagctatcggtgcgagtgcccattcggttacatcctggctggcaacgaatgcgtggacacagatgagtgctctgttggcaacccctgtggtaacgggacatgcaagaatgtgatagggggattcgaatgtacgtgtgaggaaggattcgagcctggacctatgatgacttgcgaagatatcaatgagtgtgctcagaaccccctgttgtgcgcctttaggtgcgtgaatacctatgggtcttacgagtgcaaatgtcccgtggggtacgtactgagggaagaccgccgaatgtgcaaagatgaggacgagtgcgaggaaggtaagcatgattgcacttag

SEQ ID NO: 223195 - DNA, 8739 bp, synthetic construct
  misc_feature 1..8739: note = Description of Artificial Sequence: Synthetic coding sequence
  source 1..8739: mol_type = other DNA
atgggaagacggcgacgactgtgtctccagctctattttctgtggttggggtgcgttgtgctgtgggctcagggcacagccggtcagccacaaccaccacctcctaagccccctaggccacagccaccccctcagcaggtgagatctgcgacggcgggtagcgaggggggttttctcgccccagaatacagagaagagggcgcagctgtggcttcccgggttagacgcagaggtcagcaggacgttcttcggggtcctaacgtgtgtggctctcgtttccatagttactgctgtcctggctggaagacacttccgggaggcaatcagtgtatcgtgccaatctgccgcaactcatgcggtgacggcttttgctcaaggccaaacatgtgtacctgctcttctgggcagattagctcaacatgcggttccaaaagtatccagcagtgttcagttcgctgtatgaatggaggtacctgtgcagacgatcactgccagtgtcagaaggggtatattggaacctactgtggccagccggtgtgtgagaacggctgccagaatggcggacggtgcatcggcccaaatcggtgcgcatgcgtgtacggctttacaggtccgcagtgtgagagggattacagaactggcccttgttttacacaagtaaataatcagatgtgtcagggccagctgaccggcatcgtgtgtacgaagactttatgctgtgccacaatcggacgggcatggggtcatccatgtgaaatgtgccccgctcagccgcagccctgcagacggggattcataccaaacatcagaacgggtgcctgtcaggacgtcgacgaatgtcaagctatccccggtatttgccagggtggcaattgtatcaataccgtagggagtttcgagtgccgatgcccagcaggacacaaacagtcagagacaacccagaaatgcgaagatatagacgagtgttccattattccgggaatttgcgagactggtgagtgctccaacactgttgggtcctatttttgtgtttgcccacgcggatacgtgaccagtacagacgggtctcgctgtatcgatcagagaaccggcatgtgtttctccgggctggtcaatgggagatgtgcacaggaacttcctggacgaatgaccaaaatgcaatgttgctgcgaacccggacgatgttgggggataggcacaatccccgaggcatgccccgtgcgaggatccgaagagtacaggaggctgtgcatggatggcctgccgatgggaggaatacctggtagtgccggaagccgcccaggcggaacagggggaaatggcttcgctcccagcggcaacggtaatgggtatgggcctggtggaaccggatttatccccattcctggagggaacgggttcagccccggtgtgggcggagctggcgtgggggcaggtggccaaggccctatcattacggggcttaccattctcaaccagaccatcgacatctgcaagcatcatgccaatctgtgcctcaacggccgatgtattcccaccgttagtagctatcgctgtgaatgtaacatgggctacaagcaggacgctaacggcgattgtattgatgttgacgaatgtacgtcaaacccttgcactaacggtgactgcgtgaacactcctggcagttattactgcaaatgtcacgccggattccagagaacccctacaaaacaggcttgcatagatatcgacgagtgcatccagaatggggtgctgtgcaagaatggccgttgcgtcaataccgatggaagcttccagtgtatttgcaatgccggtttcgaactgaccacggacgggaagaactgtgtggatcatgacgagtgtacaaccacaaacatgtgccttaacggcatgtgcattaacgaggatggttcgtttaaatgtatttgtaagccgggattcgtgctggcgcctaacgggaggtactgcaccgatgtcgacgaatgccagacgcctggaatctgcatgaatggacattgtatcaacagcgagggctcctttaggtgtgactgccctcctgggctggccgtggggatggatggaagggtgtgtgtggatacccacatgcgctccacctgttatggtgggattaagaaaggagtatgcgtgaggccctttccaggggctgtcacgaagtctgaatgctgttgcgctaatcccgactatgggtttggagagccttgccagccctgtcccgctaagaactccgcggaattccacggtctatgctcctcaggagtcggaataaccgtcgacggtcgagacattaacgagtgcgcacttgatcccgacatctgtgcgaacgggatatgtgaaaatcttagggggtcctaccgatgcaactgcaactctgggtacgagcccgatgcttcagggcgaaactgcatcgatatcgatgagtgcttggtaaatcgattgctctgcgacaacggcttgtgcagaaacacccctggcagctatagctgcacgtgcccccctggctatgtgtttcggacagagacggagacctgtgaagacatcaacgagtgcgagtccaatccgtgcgtgaatggtgcctgcaggaataatctgggctctttcaactgcgagtgttcacccggaagtaaattgtcctccaccgggctgatttgcatagactctctgaaagggacttgttggcttaatatccaggactcccgttgcgaagtcaacatcaacggtgcaacactcaaatcagagtgttgcgcgaccctaggtgctgcctggggctcaccttgtgagcggtgcgagcttgatacggcatgcccaagaggcctggccaggattaaaggggtgacttgcgaggatgtgaacgagtgtgaggtattccctggggtgtgccccaacggaaggtgtgtgaattccaaaggatcatttcattgtgagtgccctgaaggcctgactctggatggtaccggacgagtctgtctcgatatcaggatggagcaatgttacctgaaatgggatgaagacgagtgcattcatcctgtccccggaaagtttcgaatggatgcctgttgctgtgccgtgggcgcagcatggggaacagagtgtgaagagtgtccaaaacccggtacgaaggaatacgagactctctgccctcgcggagccggttttgccaatcggggagacgtgcttaccggacggccattctacaaggatattaatgaatgtaaggcctttcccggtatgtgtacgtacggcaaatgccgaaacactatcggctcattcaaatgtaggtgtaattccggcttcgcactggacatggaagaaaggaattgcaccgatatcgatgagtgtcggatttctcctgatctgtgtgggtcaggcatatgtgtgaacacgcctgggtccttcgagtgtgagtgctttgagggatatgagtccggattcatgatgatgaagaattgtatggatatcgatgagtgcgagcgtaatccactcctttgcaggggaggtacatgtgtgaacacagaagggagcttccagtgcgattgccctttaggacatgaacttagcccaagccgagaggactgtgttgatattaacgagtgctccctgagcgataacctatgtcgcaacggaaaatgtgtgaacatgatcggtacctatcagtgctcttgcaatccgggttatcaggcaacgcctgaccgccaaggatgcactgatatcgacgaatgtatgatcatgaacggcggatgcgatacccagtgcactaactcagagggttcgtatgagtgcagctgctccgagggctacgctttgatgcccgatgggagatcttgcgcggacatagacgaatgtgagaataaccctgacatttgcgatggcggtcagtgcacaaacatcccaggggagtatcgttgcctgtgctatgacggctttatggccagtatggatatgaaaacttgcatcgatgtcaacgaatgcgacttgaattcgaacatatgtatgttcggagagtgtgaaaatacaaagggatccttcatctgccattgtcaattgggctatagcgtgaagaaggggacaaccggctgcactgacgtggacgagtgcgagatcggcgcacataattgtgacatgcatgcatcatgcctgaatatccctggcagctttaaatgcagttgccgagagggctggattggcaatgggatcaagtgcatcgatctggatgagtgcagtaacggtacgcaccagtgctccatcaacgctcaatgcgttaatacccccggttcttatcggtgtgcttgctccgagggcttcaccggcgatggtttcacatgctctgacgtggatgagtgtgcagaaaacatcaatctttgcgaaaacggccagtgcttaaatgtacctggagcatatagatgcgagtgcgaaatgggtttcacccccgcatcggactcccgatcatgccaggacatcgacgaatgttcattccagaacatctgcgtcttcggcacctgcaataatcttcctggcatgttccactgtatttgcgatgatggctacgagttagatagaacaggtggtaactgtactgatatcgacgaatgtgctgatcccattaattgcgtgaatgggctgtgcgttaataccccgggacgttatgagtgtaattgcccccctgactttcagctcaaccccaccggtgtggggtgcgtggataatagggtagggaactgttatctgaaatttgggccaagaggggatggttccctcagctgcaacactgagatcggagtgggagtgtcccgaagctcttgttgttgttccctgggaaaagcttgggggaacccctgtgagacctgcccccctgtgaattccacggagtattatacgctgtgccccggaggtgaagggttccgcccaaacccaatcaccatcatactggaggatattgacgaatgccaagagctgcccggtctgtgtcagggtggcaattgtataaacacttttggctcgttccagtgtgaatgtcctcagggatactatctgtctgaagatacccggatttgtgaggacatagacgagtgttttgcacatccaggtgtttgtggaccaggtacgtgctacaacacactcggcaattacacctgcatctgtcccccagagtacatgcaggtcaatgggggtcataattgtatggatatgcggaaaagtttttgctaccgtagttacaacggcactacatgcgagaacgagcttccatttaacgtgactaagcgcatgtgctgctgtacctacaacgtgggaaaagcatggaacaaaccctgcgagccctgcccgactccaggaaccgcggacttcaaaactatttgtgggaatattcctgggttcacgtttgatatacacacggggaaagccgtggatattgacgagtgtaaggaaatccccggaatctgtgctaacggcgtgtgtataaatcagattgggtccttcaggtgcgagtgcccaacgggattctcctacaatgacctgctactggtgtgtgaggacatagatgaatgctccaacggcgataacctttgccagcggaacgctgactgcatcaattcaccaggatcataccggtgtgaatgcgccgcaggcttcaagctctcccctaacggcgcttgtgtcgaccgcaacgagtgcctggaaatcccaaacgtctgcagtcacggcctgtgtgtggacttacagggatcctatcaatgtatatgccacaacggctttaaggcttctcaggaccagaccatgtgtatggacgtcgacgaatgcgagcgccacccatgcgggaacgggacatgtaagaacaccgtcggatcctacaattgcctgtgttacccaggttttgagctaacccacaataatgattgtctcgatatagatgagtgctctagcttctttggccaggtgtgtcggaacggacggtgttttaatgaaatcggtagttttaaatgcctttgcaacgagggttatgagctgacaccggatggaaagaattgtatcgataccaatgagtgcgtggccctgccgggaagttgctcaccaggcacctgccaaaatctagaaggaagcttccgttgcatttgtcctcccggttacgaagtgaagagtgaaaactgtattgatatcaacgaatgcgatgaagaccccaatatttgcctgtttgggtcatgcacgaacaccccaggcggttttcagtgcctgtgtccaccaggcttcgtcctgtctgacaacgggaggcgttgcttcgatacacgacagagcttctgttttaccaacttcgaaaacgggaaatgctcagttcctaaagcattcaacactaccaaggctaagtgttgctgtagcaagatgcctggcgagggctggggcgatccatgtgagctatgcccaaaggatgacgaggtggcattccaggatctctgtccatatgggcacggtaccgttccatctctccacgatactcgcgaagatgtaaacgagtgcctggagagccccggtatctgttcaaatggccagtgcattaatacagacggaagcttccggtgcgaatgccccatgggctataacttggattataccggcgtgcgctgcgtcgataccgatgagtgctccattgggaacccatgcggcaacggcacgtgcaccaatgtgatcggttcctttgagtgtaactgcaacgagggattcgagcccggaccgatgatgaattgcgaggacattaatgagtgcgcacagaatccgcttctgtgtgcctttcgctgcatgaatacctttggcagttatgagtgtacttgccctatcggttacgccctgagagaagaccaaaagatgtgtaaagacctggatgaatgcgctgagggactgcacgattgtgagtctagggggatgatgtgcaagaaccttatcgggaccttcatgtgtatatgccccccaggtatggccaggagacctgatggggaaggatgcgtcgatgagaacgagtgcaggactaaaccaggtatttgtgaaaacggccgatgtgtaaacattataggatcctacaggtgtgagtgtaatgagggtttccagtcgagtagcagtggcaccgagtgccttgacaatagacaggggctctgcttcgctgaggtcctccaaacgatctgtcaaatggcatcatctagccgcaatctcgtcacaaaaagcgaatgctgttgcgacggtggacggggttgggggcatcagtgcgaactgtgtccgctgccaggtacagcccagtataagaaaatatgtcctcacgggcctggatataccaccgatggacgcgacatcgacgagtgtaaggttatgcctaacttgtgtaccaatggccagtgcattaataccatgggctctttccgatgtttctgtaaggtcggatacaccaccgatatttcaggaacatcttgcatcgatctcgatgaatgttcacagagtcccaaaccttgcaattatatttgcaaaaataccgagggaagttaccagtgctcctgcccacgaggctacgtgctgcaagaagacggtaaaacgtgtaaagatcttgacgagtgtcagactaaacaacacaactgccagtttctttgcgtgaacacactggggggtttcacatgtaagtgccctcccggattcactcagcatcacaccgcctgcatagataataatgagtgtgggtcccaaccttccctctgcggggctaaaggaatttgccaaaacactcccggaagcttcagctgtgagtgtcagagaggctttagcctcgatgcaacagggttaaactgcgaagacgttgacgaatgtgatggcaaccaccgctgtcagcatggttgtcagaacatcctggggggataccgctgcggatgcccacaaggatacatacagcattaccagtggaatcagtgtgtagacgagaatgagtgcagcaatccaaatgcatgtgggtccgcctcctgttataatactctcgggtcctataagtgtgcgtgtccttccggtttctcttttgaccagttctcttccgcgtgccacgatgttaacgagtgttcttcgagcaaaaatccctgcaattacggctgtagcaacacagagggcggttatctgtgcggatgtccacctgggtattaccgagtcgggcagggacactgcgtcagcgggatgggattcaataaaggtcagtacctgagtctagatacagaggttgatgaagagaatgctctgtcaccagaagcgtgctacgagtgcaagatcaatggttatagcaagaaagactcccgacagaaaaggagtattcacgaaccagatcccaccgccgtcgaacagatttcccttgagagcgtggacatggattcacccgtaaacatgaaatttaacctgtctcatcttggttccaaggagcatatcctcgagctccggccagccatacagcccctgaataaccacataagatacgtgataagccagggcaacgacgattcagtgtttcggattcaccagcgaaatgggctgagttacctccacactgcaaagaaaaaactaatgcccggtacatacacactggagataacctccatccccctgtacaagaaaaaggagctgaagaaattggaggagagcaatgaggatgattatctcctcggagagctgggggaggccctacgcatgcgtctgcagattcagctttactat

SEQ ID NO: 223196 - DNA, 8738 bp, synthetic construct
  misc_feature 1..8738: note = Description of Artificial Sequence: Synthetic coding sequence
  source 1..8738: mol_type = other DNA
atgggcaggaggcgacgtctgtgcctccagctctattttctatggctgggttgcgtggtcttgtgggcccagggcactgcaggccagcctcagcctccccctcctaaacccccaagacctcaaccgcctccccagcaggtccggagcgcaacagctggttcagagggtgggtttctggcgcctgaatatcgggaagaaggcgcagctgtggctagccgtgtacgacggagaggtcagcaggacgtgttgaggggcccaaacgtgtgtggaagcagattccatagctactgctgccccggatggaagaccctcccaggcggaaaccaatgcattgtgcctatttgcaggaatagttgtggagatggattttgttcccggcctaatatgtgcacatgctcatctggccagatcagttccacttgcggtagtaagtccatccagcaatgcagtgtccggtgcatgaacgggggaacatgcgccgacgaccactgtcagtgccagaaaggctacatcggaacttactgtggccagcccgtatgtgagaatggctgccagaacggcggacggtgtatcgggcctaaccggtgcgcctgtgtctatggttttaccggccctcagtgtgagagagactaccgcacgggtccctgcttcacgcaggtgaataatcagatgtgccaggggcagttgacgggcatcgtttgtaccaaaaccttatgttgtgccacgattggcagagcctggggacacccttgcgaaatgtgccccgctcagccccagccatgccggaggggattcatcccaaacatccgcactggcgcatgtcaggatgtggacgaatgtcaggctatcccgggtatttgtcagggaggcaattgtatcaatactgtggggtcttttgaatgtcgatgccctgcagggcataagcaaagcgaaaccacccaaaaatgcgaggacatcgatgagtgctcaataatcccaggcatctgtgaaaccggggaatgcagcaataccgtagggtcttatttttgcgtctgccccaggggatatgttaccagcactgatggcagcaggtgtattgatcagcgtactggaatgtgcttttctggactggttaacgggcgatgtgcgcaagaactccctggaagaatgacaaaaatgcagtgttgttgcgaaccagggaggtgttgggggatcggtacgattcctgaagcctgtccagtgaggggcagcgaggaatacagaagattgtgtatggatggcctccctatgggcggtattcccggttccgcaggttcaaggccgggtgggacagggggtaacggatttgccccatccggcaacggcaacggttatggacccggaggcacgggctttatcccgatcccgggtggcaacgggttcagccccggagtcggcggtgctggcgtcggtgccggagggcagggtccgatcattaccgggctgactattctgaaccagaccatagacatctgtaaacaccacgctaatttatgtctgaatggacgctgcataccgactgtgtcatcataccggtgtgaatgtaacatggggtataagcaagacgcaaacggtgactgcattgatgtagacgagtgtactagtaacccctgtacaaacggtgattgcgtgaacacacccggatcctactactgtaagtgtcacgcgggatttcagaggacacctacgaagcaggcatgcatcgacattgatgagtgcattcaaaatggcgtgctctgcaaaaatggcaggtgcgtgaacaccgatggatcatttcagtgtatatgtaacgctggtttcgagttaacaaccgatggaaagaactgtgtggaccacgacgagtgcacaactacaaacatgtgtctaaatggcatgtgcattaatgaggacggtagctttaaatgcatctgtaagccaggatttgtgctggccccaaatggccgatattgcaccgacgtggacgagtgccagactccagggatttgcatgaacggtcactgcataaacagcgagggctcctttagatgtgactgcccgccaggcttggcagtcggaatggatggacgtgtctgcgtggacactcacatgcgctccacttgctatggcggaattaagaaaggcgtttgtgtaagaccttttcctggagccgttactaaaagcgagtgctgctgcgcgaatcctgactacgggttcggggaaccgtgccagccgtgccctgcgaagaacagtgccgaatttcacggcttatgtagctccggcgtggggatcactgtcgacggaagggacataaatgaatgtgccctcgacccagatatatgcgccaatggaatctgcgaaaacctgcggggatcttatcgttgcaattgtaacagcggatatgaacccgacgcctccggaagaaattgcatcgacatcgatgaatgtcttgtcaaccgcctattatgtgacaatggactgtgccggaacacacctggctcttactcctgtacttgccctcctggttacgtgtttcgcactgagaccgaaacatgtgaggacattaatgagtgcgagtctaatccctgcgttaatggagcctgcagaaacaaccttggaagtttcaattgtgaatgttctccagggagcaaactctctagcacaggcctcatctgcatcgatagcctgaaaggtacatgttggctgaatatccaagactcgcggtgtgaggtgaacatcaacggggctacactgaagagcgagtgctgtgctactttaggcgctgcctggggatctccctgtgaacgatgtgaactggataccgcatgtccacgaggccttgcacgtatcaaaggcgtcacatgcgaggacgtgaacgaatgtgaggtcttcccgggagtgtgtcccaacggaagatgtgtgaactcaaaaggatcattccattgtgagtgcccagagggcctgaccctcgacggaactggcagggtctgcctggatatccggatggaacagtgctaccttaaatgggacgaggatgagtgcatccatcccgtccctggcaaattcagaatggatgcctgttgctgcgccgtcggcgcagcatgggggacagaatgcgaggaatgtccgaagcctgggacgaaggagtatgagaccttgtgcccccgtggcgctggatttgctaaccgcggagatgtgctcactggacgcccattttacaaggatatcaacgagtgcaaagcttttccagggatgtgtacgtatgggaagtgtcgaaatacaattggcagctttaaatgccggtgtaactcgggattcgcgctagacatggaagagagaaactgtacagacattgatgagtgccgcatttctccggatctgtgcgggtcagggatttgcgttaacacacctggctcttttgaatgcgaatgctttgagggctacgagtctggctttatgatgatgaagaactgcatggacatcgatgagtgtgagagaaacccacttttatgtcgcggaggtacttgcgtgaacactgaagggtccttccagtgcgactgcccattaggccatgagctatcccctagcagggaagactgcgtggacataaacgagtgttcgctctctgataacttgtgcagaaatgggaaatgcgtgaacatgatcggtacctaccagtgctcatgtaaccccggataccaggccactcccgaccgacaagggtgcaccgatattgatgagtgcatgattatgaatggcggttgtgacacacagtgcactaatagcgaaggctcttacgagtgcagctgttctgagggctacgctttgatgccggatggcaggagctgcgctgacatcgacgagtgcgagaacaacccggacatttgtgacggcggtcagtgtaccaatatccctggggagtacagatgtctgtgttacgatggcttcatggcctcgatggatatgaagacttgcatcgatgtgaacgagtgcgatctcaactctaacatttgtatgtttggggaatgcgagaacaccaagggctcattcatctgtcactgccaactcggctattccgtgaagaagggaacgactgggtgcaccgatgtggatgaatgtgagattggcgcacataattgtgacatgcacgcatcttgcctcaacattccaggcagctttaagtgcagttgtagagagggatggataggcaatgggatcaagtgtatcgaccttgacgagtgtagcaacggcacccaccagtgttctatcaatgcacaatgtgttaacacgcctgggagctacaggtgcgcgtgctctgaaggctttacaggcgatggcttcacctgtagtgatgttgacgaatgcgccgagaacattaatctgtgtgagaatgggcagtgcctgaatgtacccggtgcgtatcggtgtgaatgcgaaatgggttttacaccagcctctgactcacggtcatgtcaagatattgatgagtgcagctttcagaacatttgcgtgttcggcacctgtaacaatcttcccggaatgttccactgcatatgcgacgacggatacgaattggaccgcacaggagggaactgcaccgacatcgacgaatgcgccgatccaattaactgtgtgaatggcctgtgcgtgaatactccagggcgatacgagtgcaattgtcctcccgacttccaactgaatcccactggcgtgggttgtgtcgataatagagtggggaattgttatctgaaatttggtccgcgtggagacgggtcactgagttgcaacactgagattggagtgggtgtgtctagatcttcttgttgttgtagcctcgggaaagcatgggggaacccttgtgaaacgtgtccccctgttaacagtacggagtactacaccttgtgtcctggtggcgaaggattccgccctaacccgattaccatcatcttggaggatattgatgaatgccaggaactgcctgggctctgccaaggcggaaattgtatcaacaccttcggctcattccaatgtgagtgcccacagggctattatctgagtgaagatacaagaatttgcgaagatattgacgagtgtttcgcccatcctggtgtctgtggaccgggaacatgctacaatacccttggcaattacacatgcatttgccctcccgaatacatgcaagtgaatgggggtcacaactgtatggacatgcggaagtcattttgctatcgttcctacaatgggactacctgtgaaaacgaactgccctttaacgtgaccaagcgaatgtgctgctgtacttacaatgtcggaaaggcatggaacaagccctgcgaaccatgtcctacccccggaaccgcggatttcaaaaccatttgcggaaatattccagggtttacattcgacattcacacggggaaggctgtcgacattgatgaatgtaaggaaatcccaggaatttgtgctaatggcgtgtgtattaaccagattggtagtttccgttgtgagtgtccaacaggcttctcatacaacgatctgttgctcgtatgcgaggatatagacgagtgctcaaatggcgacaatctttgtcagagaaacgccgattgcattaattctcctgggtcctatcggtgcgagtgtgctgctggttttaagcttagccccaatggtgcctgcgttgatcgaaacgagtgcctggaaataccgaacgtttgttcccatggattatgtgttgatctccagggctcataccagtgcatttgccataacggcttcaaagctagtcaggaccagaccatgtgtatggacgtggacgaatgtgagcgccatccctgtgggaacgggacctgtaaaaacacggtgggcagttacaattgcctgtgttacccaggtttcgaactgacacacaacaatgactgtctagatatcgacgagtgttcatctttctttgggcaggtttgtagaaatgggaggtgtttcaacgagatcggctcctttaagtgtctgtgtaatgaggggtacgaacttactcctgacggcaaaaattgcatcgataccaacgagtgcgtagcactgccaggctcctgtagtcccggtacttgtcaaaacctggaaggcagcttccgttgcatttgtccccctggctatgaagtgaagagtgaaaattgtatcgatataaacgagtgtgacgaagatccaaacatctgtctcttcggttcctgtactaacacccctgggggatttcagtgcctctgccccccaggctttgtgctaagtgacaatggcagaagatgtttcgatacaagacaatcattttgctttacaaacttcgaaaatggtaagtgctcagtgcctaaggcatttaacactaccaaggctaagtgctgttgtagcaagatgcccggagaaggatggggggatccatgcgaactgtgtccgaaagacgatgaagtcgcctttcaggacttgtgcccatatggacacggaaccgttccatccctgcacgatactcgggaggacgttaacgagtgcctagaatctcctgggatatgtagcaacgggcagtgcattaacaccgatggctccttccgctgcgagtgccctatgggttacaacctggactacaccggagtgcgctgcgtggacaccgacgagtgctccatcgggaacccctgtggcaatggtacttgtaccaatgtgataggctcttttgagtgcaactgcaatgaggggtttgagccaggtccaatgatgaactgtgaagacattaatgagtgtgctcagaaccctctactctgtgcctttcgatgtatgaacaccttcggctcctatgagtgcacttgtccaattggctatgcattgagagaagatcagaagatgtgtaaagaccttgacgaatgcgctgaaggcttacatgactgcgaatcccgcggaatgatgtgtaagaatctgataggtaccttcatgtgcatctgccccccaggaatggcccgaaggccggatggcgaaggttgtgtggacgagaacgaatgccggaccaaacccggtatctgtgaaaatggtcggtgtgtgaatatcatcggctcctacagatgcgaatgtaacgaagggtttcaaagtagctccagtggaacagaatgcctcgacaaccgtcagggcctgtgctttgccgaagtccttcagaccatctgccagatggcatcctcaagcaggaatctggtgacgaagtctgaatgttgctgtgatggtgggaggggatggggacatcaatgcgagctgtgtcctctgccaggcacagctcagtacaaaaagatttgccctcatggacccggatatactaccgatggaagagatattgatgagtgcaaagtgatgccaaatctgtgtaccaacggccaatgtatcaacaccatggggagcttcaggtgcttttgtaaggtcgggtacaccaccgacatttccggcacgtcatgcattgacctggacgaatgttcacagtcccccaagccatgtaattatatttgcaaaaataccgagggctcttaccagtgtagctgtcctcgtggctatgtcctgcaagaagatggcaagacctgcaaagacctggacgagtgtcaaaccaagcaacataattgccaattcctatgcgtcaacaccctgggaggctttacatgcaagtgcccccctggctttacccagcaccataccgcgtgtatcgataacaatgagtgtgggagccaaccgagcctttgcggcgcaaagggcatatgtcagaatacccccggatcattctcctgtgagtgtcaacgcggattcagtctggatgccacaggcctgaactgtgaagacgtggatgaatgtgatgggaatcacaggtgccagcatggttgccagaacatcttaggcggatatcggtgcggttgtccccagggatatattcagcactatcaatggaatcagtgcgtggacgagaatgaatgttcaaatccgaacgcttgcggaagcgctagctgttacaataccttaggctcatacaagtgcgcctgtccatcggggttctctttcgatcaattttccagtgcctgccatgacgtgaacgaatgcagttcttcgaaaaatccatgtaattacggctgctcgaacactgaaggtggctacctgtgtggttgtcctccaggctattatagggtgggtcagggccactgcgtctcaggaatgggcttcaacaagggacagtacctttccctggatactgaagttgacgaagaaaacgccctgtccccagaagcatgctacgaatgtaaaatcaatggctattctaaaaaggatagcagacaaaaaaggtcaatccacgaaccggacccaactgctgtggagcagatttctcttgagagtgtggacatggatagcccagtgaacatgaagtttaacctaagccacttgggcagcaaggaacacatactagaactgcgccctgcaattcagccactcaacaaccacatcaggtacgtcatcagccaggggaatgatgattcagtgtttcgcattcaccagcgcaatggcctcagctacctgcatacggctaagaaaaaattgatgccgggaacctacacccttgagatcacttccatcccactgtataagaaaaaggaacttaagaagttggaagagtcaaacgaagacgactacctgctgggagagctgggagaggccctaaggatgaggctgcagatacagctatatta

SEQ ID NO: 223197 - DNA, 597 bp, synthetic construct
  misc_feature 1..597: note = Description of Artificial Sequence: Synthetic coding sequence
  source 1..597: mol_type = other DNA
atgggactgcggaaaggacacgggaccctcggacagggtctgagtgcgctgcaatccgaacaaggcaggcttatccaactcttgtccgagtctcaaggtcatatggcccatttggtcaactccgttagtgatatccttgacgctctacagcgcgacagaggattgggacggcctcgcaataaagctgaccttcagagagccccagcccgtgggacccgacccaggggctgtgccactgggtcacgtccacgcgactgtctcgacgtcctcctatctgggcagcaagacgatggcgtatactctgttttccctactcactaccctgccggatttcaggtgtattgtgatatgcgcacagacggcggtggctggaccgtctttcagaggcgcgaagatggtagtgtgaattttttcagaggatgggacgcttatagggacggcttcggcaggcttaccggggagcattggctcggcccattagactggtgcactctgtctctcgcgttactggtgcctgtggctccaagccccactcctccgcacagtttcgttaacgtcctgcatccgccagtgcctggaggacctaccctgcagtag

SEQ ID NO: 223198 - DNA, 912 bp, synthetic construct
  misc_feature 1..912: note = Description of Artificial Sequence: Synthetic coding sequence
  source 1..912: mol_type = other DNA
atgggtttgcgcaaggggcacggcacgctggggcagggactgtctgcgctgcaatctgagcaaggacggctcatccagctgctgtcagaatcccaaggccacatggctcaccttgtgaactccgtgtcagatatcctagatgctctgcagcgcgacaggggcctgggaaggcccaggaataaggctgatcttcaacgggcaccagcgaggggtacacgtcctagaggatgtgctactgggtcccggccaagggactgtctggacgttctactgtctggccagcaggacgacggtgtctatagtgtgttccctacgcattaccctgcgggattccaggtctattgtgacatgagaacagacggaggtggatggaccgtgtttcagaggagagaggacggaagtgtgaacttcttcagaggctgggatgcttacagagacggctttggcagactcacaggcgagcattggcttgggctgaagcgaatccatgcattgacaacacaggcagcgtacgaactgcacgttgatctcgaagacttcgagaatggaacagcctatgcccgttacggtagcttcggggtgggcttatttagcgtcgaccccgaggaagatgggtatcccctcactgtggccgattattctggcaccgccggagactcacttcttaagcactctggtatgagattcaccacgaaggacagggatagcgaccactccgagaataactgcgccgcattttataggggagcttggtggtacaggaattgccatactagcaaccttaacgggcaatacttgcgtggggctcatgctagctacgccgacggtgttgagtggagctcctggactggatggcagtacagcctgaaattcagcgaaatgaagatccgaccagtgcgggaagatagatag

SEQ ID NO: 223199 - DNA, 1386 bp, synthetic construct
  misc_feature 1..1386: note = Description of Artificial Sequence: Synthetic coding sequence
  source 1..1386: mol_type = other DNA
atggtgaacgatcgttggaagaccatgggcggtgctgcccaacttgaagatcggccacgggataaaccacaaaggccatcttgcggctacgtcctatgcaccgttctgttggcactcgctgtgctactggctgttgccgtcactggggctgtcctcttcctcaaccacgcccatgctcctggcactgcccctcctccagttgtgtcaacgggcgcagccagcgccaactccgccctagtaaccgtggagagggcagattcttcacacctgagcatccttattgatcccagatgccccgatctgacagacagtttcgcaagattggaaagtgcacaagcgagcgtcctccaggcgcttactgaacatcaagcacagcccagactggtgggcgatcaggaacaggaattgctcgatacacttgccgatcagcttccaaggttgctggcaagggcgagcgaacttcagaccgagtgtatggggttgcgcaaaggccacggcacccttgggcagggcctctcggcactgcaatcagaacaggggagactcatccaactcctctcagagtcgcagggccacatggcccacctcgtgaattccgtctccgacatcctcgatgccttacagcgcgatagagggctgggcagacctaggaacaaggctgacctccagagagcaccggctcgcggaacaagacccaggggatgcgctacagggtctaggcccagagactgtttggatgtcctgctttcaggacaacaggatgacggcgtttatagcgtctttcccacgcattatccggcagggtttcaagtgtattgtgatatgagaacagacggcggaggctggacggtttttcaaagaagagaggatggatccgtcaacttctttcgcggatgggacgcgtatcgagacggctttggacgcctgactggtgaacactggctggggctcaagcggatccacgctctcacaacacaggcagcttatgagctccatgtggatctggaggactttgaaaatggaacggcctacgcacggtatgggtcttttggggtaggactttttagcgttgacccagaggaggatgggtacccattgaccgtcgccgactactctggcaccgccggagattctcttcttaagcacagcggcatgagattcaccactaaggaccgcgacagcgaccacagtgaaaataactgcgccgcattctaccggggagcatggtggtatcgaaattgtcatacctccaatttgaacggccagtaccttcgcggagcgcacgccagctacgccgatggagttgagtggtcatcttggaccggatggcagtactctctgaaattttcagagatgaaaatcaggccggtccgggaagacagatag

SEQ ID NO: 223200 - DNA, 933 bp, synthetic construct
  misc_feature 1..933: note = Description of Artificial Sequence: Synthetic coding sequence
  source 1..933: mol_type = other DNA
tgaactggcgcagttctgtttctgaaccacgcccacgcccctggtactgcccctccacctgtcgtgtccacaggagccgcatcagctaactcagcattagtcactgtggaaagggccgattcttcacatttatctatcttgattgatcccagatgtcctgatttgacagacagcttcgccagactcgaatccgcccaggcttccgtcctgcaggccttaacggaacaccaggcacaaccgcgactcgtaggcgatcaagagcaggaattgttggataccctagctgatcagctacctagactgttggctcgagctagcgaactgcagaccgagtgtatgggtctgcgtaaaggacatgggactcttggccagggactctccgccttacagtctgagcagggaagactgatccaattgttaagcgagtcccaaggccacatggcacacttggtgaactccgtgtctgatattcttgacgccctgcagagagacaggggcctcggtcgccctcggaacaaagcagatctgcagagagctcccgcacgaggaactagacccaggggttgcgctacaggctccagaccgagagactgtctggacgttctcttaagtggacagcaagatgatggtgtatacagcgtcttcccaacccattatcccgcagggttccaggtgtattgtgacatgaggactgacgggggaggatggactgtgttccaaaggagagaggacggctccgtaaacttttttagagggtgggacgcttatcgcgacgggtttggaaggttgacaggagaacactggctaggtccattggattggtgtacactgagcctcgccctgctggtcccggtggccccttcccctacgccaccgcactcctttgttaatgtgctacatccacctgtccctggcggaccaaccttgcaatag

SEQ ID NO: 223201 - DNA, 1386 bp, synthetic construct
  misc_feature 1..1386: note = Description of Artificial Sequence: Synthetic coding sequence
  source 1..1386: mol_type = other DNA
atggtcaatgaccggtggaagactatgggcggagcagcccagcttgaggatagacctagagataagccacagcgcccaagctgcggctatgtattatgtacagtgctgcttgccttagcagttctcctagccgtggccgtcacaggggctgtcctgtttctcaaccacgcccacgcacctggcacagcaccacccccagtggtgagcacgggtgccgcttcggccaacagtgcactggttacagtcgaacgcgctgactcgagccacctctccattcttatcgacccgaggtgtccagacctcaccgacagctttgccagactggagtctgctcaggcatcagtcctacaggcattaacggaacatcaagcccagccacggctcgtgggagaccaggaacaggaattgttggacactctagcagatcagctgccaagactgctggccagagccagtgaactccagacagaatgcatgggtctgagaaaaggccatggcacgcttggccagggactctctgccctccagagcgagcaaggcagacttatccagttgctgtctgagagtcagggtcatatggcccaccttgtcaacagcgtgagcgatatcctggacgcgttgcaacgggacagagggctgggacgtcctcggaacaaggcagacctgcagagagccccagcccgaggaaccaggccaaggggctgcgcaacaggcagccgccctcgcgactgtctcgatgtgctcctgtctggccagcaggatgacggcgtttactccgtttttcccacccactacccagccggatttcaagtctattgcgatatgcgaactgatggaggtgggtggacagtgtttcagagacgagaagacgggtcagttaatttctttagggggtgggatgcctaccgcgatgggtttggaaggctgaccggggagcactggctcggtcttaagcgcattcacgccctgactactcaggcagcttacgaactgcacgtggacttggaggacttcgagaatggaaccgcatacgcgagatacgggagttttggggtgggtcttttcagcgtggaccccgaagaggacggataccctctcaccgtggccgattacagtggcaccgccggagacagcctactgaagcattctggcatgcgctttaccacgaaggatcgcgacagcgatcacagtgagaataactgcgccgctttctatcgcggagcatggtggtatcgtaattgccacactagtaatctcaatggccagtatctgaggggagcccacgcgtcctatgctgatggagtggagtggagctcctggacggggtggcagtactctttgaagttctcagagatgaagatcagacccgttagagaggaccgttag

SEQ ID NO: 223202 - DNA, 870 bp, synthetic construct
  misc_feature 1..870: note = Description of Artificial Sequence: Synthetic coding sequence
  source 1..870: mol_type = other DNA
atggtgaatgatcggtggaaaaccatgggaggagccgctcagctggaggatcggcctagagacaagccgcagcgaccctcttgcggctacgtgctgtgcaccgtactacttgctctcgccgtgctgcttgcagtggccgtgacaggagctgtactgtttctgaaccatgctcatgcccctggcacagctcctccaccggttgttagcactggcgcagcttccgcgaatagcgctctcgttacagtagagcgcgctgactcctcacacctgagcatcctgatagatccccgatgtcctgacttgaccgactcattcgcgaggctcgaatcagcccaagcttctgtcctccaggccctcaccgagcatcaagcacagccccgtcttgtaggagaccaggaacaggaactcctcgatactctggccgatcagcttccgagattgttagccagagcctccgaacttcagacagagtgtatgggcctgcggaaaggccatggcactttgggccaggggttaagcgccctgcaaagtgagcagggtaggctaatacaattactctccgagagccaggggcatatggcccatttggtgaacagtgtgtccgatattctcgacgcgttacagagggatagagggctgggcagacctcggaataaggccgacttgcagcgggctcccgctagggggacacgaccccgtggatgcgctactgggtctcgaccacgggattgcctagacgttctgttatccgggcaacaggacgatggcgtatattccgtatttccgacccattatcctgcgggattccaggtgtattgcgacatgcgcacagacggcggaggttggaccgtgttccagcgcagggaatag

SEQ ID NO: 223203 - DNA, 540 bp, synthetic construct
  misc_feature 1..540: note = Description of Artificial Sequence: Synthetic coding sequence
  source 1..540: mol_type = other DNA
atggtgaacgaccggtggaaaactatggggggagccgctcagcttgaggatcggcctcgcgacaagccccaggctcgtaagctgcgattaagagagaggccaagttgtggttacgttctctgtacggtgctgctagccctggccgtgctgctggctgtggcagtgactggtgctgtcttattcctgaaccacgcacacgcgccagggaccgcccctccacctgtcgtgtctaccggcgcagcaagcgccaattcagctctcgtgacggttgagagagccgattccagtcatctcagcattctgatagacccgagatgtccagatctgacagactcgttcgctcgactggaatccgcccaagccagcgtcctccaagcactgaccgaacatcaggcgcaacctcggctcgtgggcgaccaggagcaggagctgctcgacacattggccgatcagcttccacgcctgctggctagagccagtgaattgcagaccgaatgcatgggtctccggaagggtcatggcactcttggtcagggatag

SEQ ID NO: 223204 - DNA, 1170 bp, synthetic construct
  misc_feature 1..1170: note = Description of Artificial Sequence: Synthetic coding sequence
  source 1..1170: mol_type = other DNA
atgaggagagtgactctctttctgaacggctctccaaagaacgggaaagtggtagccgtgtatggcactcttagcgacttgctgtccgtagcgtcttccaagttggggatcaaggcaactagcgtttataacgggaaggggggtttgatcgatgacatcgcactaatcagagacgacgacgtcttgtttgtctgcgagggtgaaccattcattgacccacagactgattccaaacccccagagggcctgctcgggttccacacggactggctgaccctcaatgtaggtggcaggtatttcacaactactcggtcaactctggtaaacaaggaaccagattccatgttagctcatatgttcaaggacaagggcgtgtggggaaacaaacaggatcacagaggtgcttttctcatcgaccgctcacctgagtacttcgaacccatcctcaactaccttaggcacggccaactgatcgtcaatgatggtattaacctcttgggagtcctggaagaggccagattcttcggcatcgactctctgatagaacacttggaggtcgcgattaaaaactcccaaccacctgaggatcatagtcctatatccaggaaagaatttgtcagattcctgcttgccacaccgactaaaagtgaactgaggtgtcaagggctgaacttctcaggggcagacctgagtcggctagatttacgctatattaatttcaaaatggcaaatctgagccgttgtaaccttgcgcatgccaatctctgttgtgccaatttggaaagggccgacctttctggttccgtgctggattgtgctaatttgcagggggttaaaatgctttgttcgaatgctgagggagctagtcttaaattgtgcaattttgaagacccttccgggctgaaagccaacctggagggtgctaacttaaagggcgtagacatggaggggtctcagatgacaggcataaatctccgcgtggctaccctgaagaacgcaaagctgaagaattgtaatctgcgtggagccacactggctggaacagacctagaaaactgtgacctcagcggatgcgacctgcaagaggcaaacttgcgaggatcaaacgtgaagggggcaatctttgaggagatgctcaccccactgcacatgtcacagtctgtgaggtag

SEQ ID NO: 223205 - DNA, 939 bp, synthetic construct
  misc_feature 1..939: note = Description of Artificial Sequence: Synthetic coding sequence
  source 1..939: mol_type = other DNA
atggcgaaggtttttagtttcatcctcgtcacaacggcattgaccatgggaagggagatctctgcgcttgaagattgcgcccaggaacagatgagactgcgagcacaggttcggctcctcgagaccagggtgaaacagcagcaagtcaagatcaaacaactgctccaggagaacgaggtccaattcctcgacaagggggacgagaataccgtcatcgatctggggtccaagaggcagtatgctgattgctccgagattttcaacgacggctacaagctcagtggattctataaaattaaaccacttcagagtccagctgagtttagtgtctactgcgatatgagcgatggcggaggctggactgtaattcaacgaagatcagacggctccgagaacttcaatcgcggatggaaagattacgaaaatggctttggcaatttcgtgcagaaacatggtgagtactggctgggcaataaaaatttgcattttctgacaacgcaggaggattacactctcaaaatcgatttggcagatttcgaaaaaaattcaaggtacgctcaatacaaaaacttcaaggtcggcgacgagaagaatttctacgaactgaacattggcgaatactccggcacagcaggggacagtctggccggtaacttccacccagaggtgcaatggtgggccagccaccagagaatgaagtttagcacctgggaccgagatcacgataactacgagggcaactgtgctgaagaggaccagtcaggttggtggttcaacaggtgtcattctgccaatttgaacggcgtctactatagcgggccatacaccgcaaagacagataatggcattgtgtggtatacttggcacggctggtggtactctctcaaatccgtcgtgatgaagattcggccaaacgatttcattcccaacgtcatctag

SEQ ID NO: 223206 - DNA, 939 bp, synthetic construct
  misc_feature 1..939: note = Description of Artificial Sequence: Synthetic coding sequence
  source 1..939: mol_type = other DNA
atggccaaggtctttagctttattctggtgacaacagccctgactatgggcagagagatatcagcattagaagattgtgcccaggagcagatgcggttgcgcgctcaagtgcggctcttggagacacgcgtgaagcagcagcaggtgaaaataaaacagctgttacaggaaaatgaagtccagtttctggataaaggcgatgagaatactgtgattgatctggggtcgaaaaggcagtatgcagattgctcagagattttcaacgatgggtacaaattgagcggcttctataaaatcaaacccctccagtctccagcagagttctccgtatactgcgacatgtctgacggcggaggatggactgtcattcagaggcggtcggacggcagcgaaaatttcaacagagggtggaaggactacgagaatggcttcgggaatttcgtgcagaagcacggtgagtattggcttgggaacaagaacctgcacttcttgacgactcaagaagactacactttgaaaattgacttagccgatttcgaaaaaaattctcggtatgcacagtataagaatttcaaggtcggggacgaaaagaatttttatgagctaaacatcggggagtacagtggcacagctggtgactctctcgcgggaaactttcaccctgaggtccagtggtgggcttcccatcagagaatgaaattcagtacatgggacagagaccacgacaactacgaaggcaattgcgcggaagaggaccaatccggatggtggtttaatcgatgccatagcgccaatttaaatggagtgtactactcaggaccctataccgccaagaccgacaacggcattgtgtggtatacatggcatgggtggtggtactcactcaaaagcgtggtcatgaaaattcgccctaacgactttattccgaatgtaatttag

SEQ ID NO: 223207 - DNA, 939 bp, synthetic construct
  misc_feature 1..939: note = Description of Artificial Sequence: Synthetic coding sequence
  source 1..939: mol_type = other DNA
atggccaaggtattcagtttcatactggtaactaccgcattaaccatgggcagagagatcagcgcactcgaagactgcgctcaggagcagatgagacttcgcgctcaagtacgtctcctggaaacccgcgtgaaacaacagcaggtaaaaatcaaacagttgctccaggagaatgaagtgcagtttctggacaagggcgatgagaataccgtgatagaccttggatcaaaacgccagtatgccgactgctccgaaatcttcaatgatggatacaagcttagcggcttctacaaaataaagccactgcagtccccggcagaattcagcgtttattgcgacatgagcgacggagggggttggaccgtcatacaacgcaggtcggatggaagcgagaattttaaccggggatggaaagactatgaaaatgggtttggcaactttgttcaaaaacatggggagtactggctgggaaataaaaatctccatttcctgacaacgcaggaagactacacattaaagatagatctggccgactttgaaaagaactctaggtacgcccagtataagaatttcaaggtgggtgacgaaaaaaacttttatgaactaaacatcggtgaatatagtggaactgctggcgattctttagcaggcaactttcaccccgaggtgcagtggtgggcttcccatcaaaggatgaagttctcaacctgggaccgcgaccatgataattacgagggcaactgtgccgaggaggatcagagcgggtggtggtttaaccgttgccattccgccaatttgaacggggtatactactccgggccatacactgccaagaccgataatggaattgtctggtacacttggcacggatggtggtacagtctcaaatctgttgtgatgaagataagacctaacgacttcatccctaatgtcatttag

SEQ ID NO: 223208 - DNA, 939 bp, synthetic construct
  misc_feature 1..939: note = Description of Artificial Sequence: Synthetic coding sequence
  source 1..939: mol_type = other DNA
atggccaaggtcttctcatttattctggtgaccactgccctcactatgggaagagagatcagtgccctagaagattgtgcacaggagcaaatgaggttaagagctcaggtccggttgttggagactagggtgaagcagcagcaggtgaagattaagcagcttctgcaggagaacgaagtgcaatttctggacaagggcgacgagaacacggttattgacctaggatccaaaagacagtatgcggattgctccgagatctttaacgacggttataaactaagtggtttctataagattaagcctttacaaagtcctgcggaattctctgtatactgtgatatgagtgatggaggaggatggacagtaatacagcgacgttctgatgggtctgaaaatttcaatagaggatggaaagattacgaaaatgggtttggaaactttgtgcaaaagcatggcgagtactggctgggcaataagaacttgcactttttgacaacccaggaagactatactctgaaaatcgacctggccgacttcgagaagaactcccggtacgcccaatataagaattttaaggtcggagacgagaagaacttttacgaacttaacatcggcgagtacagcggaaccgctggcgactccctggcaggcaactttcaccccgaggtgcagtggtgggcctctcatcaacggatgaaatttagtacatgggatagagaccacgacaattatgaagggaactgcgctgaggaggaccaaagtggctggtggttcaatcggtgccatagcgcaaatcttaacggggtgtattactcaggcccatatactgctaaaacagacaacggaattgtctggtatacctggcacgggtggtggtactctctcaagtccgtggttatgaagatccggccaaacgacttcattcccaatgtcatatag

SEQ ID NO: 223209 - DNA, 939 bp, synthetic construct
  misc_feature 1..939: note = Description of Artificial Sequence: Synthetic coding sequence
  source 1..939: mol_type = other DNA
atggcaaaggtcttctcttttatcctggtgacaaccgctcttactatgggtcgcgagatttccgctctggaggattgtgcccaggaacagatgcggctccgcgcacaggtgagattgctcgagacgagagttaaacagcagcaggttaaaataaaacagctgctgcaagaaaacgaagtacaattcttagacaaaggcgatgagaacaccgtgatcgatctgggctctaagcgccagtacgctgactgttcagaaatcttcaacgacggatataagctctccggcttctataagatcaaacccctgcaatctcccgctgagttctccgtgtactgtgatatgtccgatggagggggttggacagtcattcagcgcagaagcgacgggagcgaaaacttcaaccgtgggtggaaagactatgaaaatggttttggcaatttcgtgcaaaagcacggcgagtactggctcggaaacaagaatctacattttctgacaacgcaggaggactatactcttaagatcgacctggccgacttcgagaagaattccaggtacgcacagtacaaaaattttaaggtgggagatgagaagaatttttatgaactcaatattggcgaatacagtggcacggctggagactctctggctggtaattttcacccagaggtgcagtggtgggcgtcacatcaacgcatgaagtttagtacatgggaccgggaccacgataattacgaaggaaattgtgcagaagaagatcaaagtggctggtggtttaataggtgccactccgcaaacttaaatggcgtgtactacagcgggccttacaccgctaaaaccgataacgggattgtgtggtacacctggcatggctggtggtactctctcaagagtgtcgtcatgaaaatccggcctaacgacttcatacccaacgtcatctag

SEQ ID NO: 223210 - DNA, 939 bp, synthetic construct
  misc_feature 1..939: note = Description of Artificial Sequence: Synthetic coding sequence
  source 1..939: mol_type = other DNA
atggccaaagtgttcagttttatattagtgacgactgccctcacgatgggtcgcgagatctccgctcttgaagactgcgctcaggaacagatgcggctgagggcccaggtcaggctgttggaaactagagtgaaacaacagcaggttaagatcaagcagctcctccaagagaatgaggtccaatttttggataagggggacgagaatactgtgatcgatctagggtctaagaggcaatacgctgactgttctgaaatctttaatgacggctacaagctgtcgggcttctacaaaattaagccactgcagtctcctgcagagttcagtgtatactgcgacatgtctgatggagggggttggacagtcattcagcggcgaagtgacggctcagaaaactttaacagggggtggaaagattacgagaacggatttggtaacttcgtgcagaaacatggggagtactggttgggcaataagaacctgcactttctgacaacccaggaggactacactctaaagatcgatctggcggatttcgaaaagaactcaaggtatgcgcagtataagaactttaaagtgggcgacgagaaaaatttttacgaactgaacattggcgagtattccggaaccgcgggtgattctctcgcaggaaacttccatccagaggtccagtggtgggcaagtcatcagcgcatgaagttctccacatgggacagggaccatgataactatgaaggaaactgtgcggaggaggaccagagtggttggtggtttaatagatgccactcggctaacctgaacggagtatattacagcggtccctataccgccaaaaccgataacggcattgtgtggtacacgtggcacgggtggtggtactccctgaagagcgtggtgatgaaaataagaccaaacgatttcattcctaatgttatttag

SEQ ID NO: 223211 - DNA, 849 bp, synthetic construct
  misc_feature 1..849: note = Description of Artificial Sequence: Synthetic coding sequence
  source 1..849: mol_type = other DNA
atgaggttgcgcgctcaagtgcggctgttagaaaccagggtgaaacagcaacaagttaaaatcaagcagttactgcaagaaaatgaagtccagttcttggacaagggagatgaaaatacagtgattgacttaggatctaagcggcaatatgccgattgcagtgaaatcttcaatgacggctataaactgtccgggttctacaaaataaagccacttcagagtccagctgagttctcagtgtattgcgatatgtctgacgggggtgggtggactgtgatccaacgtcgaagcgacgggagtgagaattttaaccgcggttggaaagattacgaaaatggcttcggcaatttcgtgcaaaagcatggcgaatactggcttggcaataagaacctgcattttcttacaacgcaggaggattatacacttaagatagatcttgccgattttgaaaaaaatagtaggtatgcccaatacaaaaactttaaagtgggagatgagaaaaacttctacgagctgaatattggcgagtacagtgggacggccggtgacagtctggccggaaactttcaccccgaggtacagtggtgggctagtcaccagaggatgaaattctcaacttgggatagagaccatgataattacgagggcaattgtgccgaggaagatcaatccggctggtggtttaaccgatgtcactcagctaacttaaatggcgtttactattcaggcccatacaccgcgaaaacagacaatggaattgtgtggtatacatggcacggatggtggtacagcctaaaaagtgtggttatgaagatacgcccaaatgactttatcccaaacgtaatctag

SEQ ID NO: 223212 - DNA, 939 bp, synthetic construct
  misc_feature 1..939: note = Description of Artificial Sequence: Synthetic coding sequence
  source 1..939: mol_type = other DNA
atggcgaaagtgttttcatttatactggtgaccaccgccctgacaatggggcgtgaaattagtgcccttgaggactgtgcgcaagaacagatgcgtcttcgcgcacaggttcgactgctcgaaacccgagtcaaacagcaacaggtcaaaataaagcagctgctccaggagaatgaagtgcagtttctggacaagggggacgagaataccgtaatcgacctgggctctaagcgccagtacgccgattgttctgaaattttcaatgacggctacaagctctccggcttctataaaatcaaacccctgcaaagccctgctgagttctccgtgtactgtgatatgtcagacggtggcggttggactgtcatacagcgacggtcagacggaagcgagaactttaatagaggttggaaagactacgaaaatggcttcggtaatttcgtacagaagcacggggaatactggctgggaaataaaaacctccattttctgacaacccaggaggattacacgctaaaaatcgacctggctgactttgagaagaattccaggtatgctcagtataaaaatttcaaggtaggtgatgagaagaatttttatgagcttaacattggggagtacagtgggactgccggagattcactcgcagggaattttcatccagaagtgcaatggtgggcttcccatcagagaatgaagttttcaacctgggatcgggatcatgataattacgaaggcaactgcgccgaggaggaccagagtggttggtggttcaatagatgtcactccgctaaccttaatggagtatactatagtggaccgtatacagcgaaaactgacaatgggatcgtgtggtatacgtggcatggatggtggtattccctgaagtccgttgtgatgaaaattcgcccaaacgactttattcccaacgtgatctag

SEQ ID NO: 223213 - DNA, 1320 bp, synthetic construct
  misc_feature 1..1320: note = Description of Artificial Sequence: Synthetic coding sequence
  source 1..1320: mol_type = other DNA
atgaagctcgctaattggtactggctaagctcagctgtgttggcaacctacggcttcctggtggtggccaataatgagacagaggaaatcaaggatgagcgcgctaaggatgtctgtcccgtgcgcctggaatcgcgaggtaagtgcgaagaggcgggagagtgtccctatcaagtgagcctccccccactgactatacagcttccaaagcaattttcaagaatcgaggaggtgttcaaagaggtgcagaatctgaaggagatcgtcaattctctgaagaagtcttgtcaggactgtaagctccaagctgatgataacggtgatcctggacgcaatggtctccttctgccgtccaccggcgcaccgggtgaagtaggagacaatcgcgtgagagagctggagtctgaagtgaataaacttagctctgagctaaaaaatgccaaggaagagattaacgtgctccacggacgtctggaaaagctcaacctggtgaatatgaataacattgaaaactacgtcgatagcaaagtcgccaacctcaccttcgtggtgaacagtctggacggtaagtgtagcaagtgcccaagccaagagcaaatacagagcagacccgtccagcacctgatctacaaagactgtagtgactactatgccatcgggaagagaagttcagaaacttacagagtgacacccgatcccaagaatagctcgtttgaagtgtactgcgatatggagacaatgggcggtggttggaccgttttgcaggccaggctggatggttcgaccaatttcactcgcacctggcaggactataaggccggttttggaaatctgagaagggagttctggttgggtaatgataagattcacctgctgactaaatctaaggaaatgatactgcggattgatcttgaagattttaatggagtggaactgtacgctctctacgaccagttttatgttgcgaatgaattccttaaatatagattacacgtggggaattacaacgggaccgccggagatgccctaaggttcaacaagcactacaaccacgatctaaagttttttacaactcctgataaggacaacgataggtatccttcaggcaactgcggtttgtactacagctcgggttggtggtttgacgcctgtcttagtgcaaacctcaatggaaaatactaccaccaaaagtaccggggagtccggaacggcatcttctggggcacctggcccggagtatctgaagcacacccgggtggctacaaaagctcattcaaagaggccaaaatgatgatccgtccaaaacactttaaaccctag

SEQ ID NO: 223214 - DNA, 1095 bp, synthetic construct
  misc_feature 1..1095: note = Description of Artificial Sequence: Synthetic coding sequence
  source 1..1095: mol_type = other DNA
atgacctctgaacttgacatttttgtgggcaacactaccctcatcgacgaggacgtctataggctatggctggatggctattctgtcacggacgcagtggcgcttcgcgtccggtctggtatcttggaacagaccggcgcaaccgctgcagtgctccagagcgacactatggatcactatcgcacgtttcatatgctcgagagactcctccacgccccaccgaagctgctgcaccaacttatctttcagatcccaccatcccgacaggccctgctgatagagcgctactacgcgttcgatgaggcgtttgtcagagaggttctcgggaaaaagctctctaagggaaccaaaaaagatcttgatgacattagtaccaagacagggattacattaaaatcatgccggagacagtttgataattttaagcgggtattcaaagtggttgaggagatgagaggaagtttagtcgataacatccaacagcacttcctgctttctgataggctcgccagggactatgccgcaattgtgttttttgccaacaatcgatttgaaacgggaaaaaagaaattgcagtacctaagcttcggcgattttgccttttgcgcagaactcatgattcagaactggactttaggagccgtgggggaagctcccacggaccctgattcacagatggacgacatggacatggacctggacaaggagttcctgcaagatctcaaggagctaaaagtgttggtggccgataaggatttgcttgatttgcataagagcttggtgtgtacagctctcagaggtaagttgggggtattcagtgaaatggaggccaatttcaaaaatctatccaggggactcgtgaacgtcgccgctaaacttacccacaacaaggatgtacgtgatctgttcgttgatctggtggagaaattcgttgaaccctgccggagcgaccactggcccctaagtgacgtcaggttttttctgaatcagtactcggcctcagtgcactctctggatggattcaggcaccaggccttgtgggacaggtacatgggcacccttagaggatgtctgctcaggctttaccacgactag

SEQ ID NO: 223215 - DNA, 1074 bp, synthetic construct
  misc_feature 1..1074: note = Description of Artificial Sequence: Synthetic coding sequence
  source 1..1074: mol_type = other DNA
atgacctctgagctggacatcttcgtgggcaacaccacactgatagatgaagacgtctacagactgtggctggacggctattcggtaacagacgcagtggccctgcgggttcggtcaggcattctcgagcagactggcgcaactgcggctgtgcttcaaagcgatactatggaccattaccgcacattccacatgctggaaaggctgctccacgctccgccaaagcttctgcatcagctgatcttccagatccccccatctaggcaggctctcctcatcgaacggtattacgcattcgatgaggcgttcgtgcgcgaagtgctggggaagaaactttcgaagggtaccaaaaaggacctggatgatattagcactaagaccggaattacgctaaagagttgccgccgacaatttgacaatttcaaacgcgtgtttaaggtcgtagaggaaatgcgcggtagccttgtggacaacatccagcagcatttcctgctgagcgacaggctggccagagattatgcagcgatcgtgttttttgcaaacaaccggtttgagaccggcaaaaagaagttgcaatatttaagcttcggggatttcgcgttctgcgccgaactgatgattcagaactggacgctcggtgccgtcgattcacagatggatgacatggatatggacctggacaaagagttcctgcaggatctcaaagaactgaaggttctagttgcagataaagaccttctcgatctgcataaaagccttgtctgcacagcgcttcgcggaaaactcggcgtgttctctgaaatggaagccaacttcaaaaatctgagccgaggactcgttaatgtggctgcaaagttgacacacaacaaagacgtccgggatctgttcgtggacttagtagaaaaattcgttgaaccttgtcggtccgaccactggccactcagtgacgtaagattcttcttgaatcagtacagcgcctctgttcactccctcgatggttttcgccatcaggcactgtgggaccggtacatgggcactctccgcggatgtctgctgaggctgtatcatgactag

SEQ ID NO: 223216 - DNA, 1989 bp, synthetic construct
  misc_feature 1..1989: note = Description of Artificial Sequence: Synthetic coding sequence
  source 1..1989: mol_type = other DNA
atgtggagctggaaatgcctgctattctgggctgtccttgttaccgccacactgtgcaccgctcgcccaagtcccacactgccggaacaggcccagccttggggagccccagtggaggtggaatcatttctggtccatccgggagaccttctgcagctccgctgtcgtctccgggacgatgtgcagtccataaactggctaagggacggagtgcagttagctgagtctaatcggacgcgaattactggggaagaagtggaagttcaagactccgtgccggctgactccggtctgtacgcatgtgttactagtagcccctcagggtccgatactacttacttttcagtcaacgtgtccgacgccctgccatcttctgaggacgatgatgacgatgacgacagtagcagcgaggagaaggagaccgataacacgaagcccaatcggatgcctgtggccccatactggacatcacccgagaagatggagaagaagctgcacgccgtacccgctgccaagactgtcaagtttaaatgcccatcttccggaactcctaaccccacactgagatggctgaaaaatggtaaagagttcaagcctgatcatcggatcggcggttataaggtgagatatgccacttggagcataattatggacagtgttgtcccctcagacaaaggcaactacacatgcatagtggaaaatgaatatggaagtatcaaccacacgtaccagctggacgttgtggagcgttctccacacagaccaattctgcaggctggcttgcctgcgaataaaactgtggcacttgggtctaacgttgagttcatgtgtaaagtctatagcgatcctcagccccacatccagtggcttaagcacatcgaggttaacggttcaaagatcggccctgataacttaccgtacgttcagattttgaaaaccgctggtgttaatactaccgataaagagatggaagtgcttcatttgagaaacgtaagcttcgaggatgccggtgagtatacctgtctagccggaaacagcattgggcttagccatcacagcgcatggttgactgttttagaagccttggaggaacgcccagccgtcatgacatcacctttgtatttagagataataatttactgcacaggcgcttttctgatatcctgcatggtaggatctgtgatcgtgtataaaatgaagtcaggcacgaaaaaaagcgacttccactcccagatggccgtccataaacttgccaaatccattccgttgcgccgacaggttaccgtgtctgctgactcgtccgcttctatgaacagcggagtcctgctcgtacggccttccaggctctcttccagtgggactccaatgctcgccggagtaagcgagtacgagctgcctgaggatcctaggtgggaactccctagagatcgcctggtactgggcaagcccctgggagaaggctgtttcggacaggtggttctggctgaagctataggcctcgacaaggacaagccaaaccgggtcaccaaagtcgcggtcaagatgctgaagtctgatgccacagagaaggatttaagcgacctaatcagcgaaatggagatgatgaagatgatagggaagcacaagaacatcataaacctactcggagcctgcacacaggacggccctctgtatgttatcgtggaatatgcaagtaagggcaacctccgtgaatatctgcaggcccgacgccctccaggactcgagtactgctacaatccatctcacaatcctgaggagcaactttctagtaaagatttagtgtcttgcgcttatcaggttgcacgaggaatggaatatctggccagtaagaaagtgtggaatcttaaggcacctttagtacacaccccaagacccggatctcaggaatgtccgggtgatcgaggtcagtgcgatgaggactcccggctgtggcctcgaacagggcatagcccacatagactgctgtag

SEQ ID NO: 223217 - DNA, 1104 bp, synthetic construct
  misc_feature 1..1104: note = Description of Artificial Sequence: Synthetic coding sequence
  source 1..1104: mol_type = other DNA
atgtggagctggaagtgcctcctgttttgggcagtactcgtgacagccacattatgtacagctaggccatcaccaaccttaccggaacaggcacagccctggggtgccccagtcgaggtggagtcttttctggtgcatcctggtgacctgctgcagctgcgctgcaggctgagagatgatgtgcagagtattaattggctgcgggatggtgtgcagctcgccgagagtaacaggacccggatcacaggggaagaggtggaagtgcaagactccgtgcccgctgactcaggcctgtatgcctgtgttacaagctccccctctggaagcgacacaacctactttagcgtgaacgtgtcagtcccaatcgatgcgttacctagcagcgaggacgacgacgatgacgacgactcgagttcggaggaaaaggagaccgacaatacaaagccgaaccccgttgccccatattggaccagccctgagaaaatggagaagaaactgcacgcagtgcctgcagcaaagactgtaaaatttaagtgtcctagctccgggaccccgaaccctactctcagatggttgaaaaacggaaaagagttcaaacctgaccaccgcattggtggatacaaggtgcggtatgctacctggtccataatcatggacagcgttgtgccatccgataagggaaactacacatgtatcgtggaaaatgagtatggcagtatcaatcacacttaccagctggacgtagtcgagagatctccgcatcgaccaattcttcaggccggtctgcccgctaataagactgtggctttaggcagcaacgttgagttcatgtgcaaggtctattccgacccgcagcctcacatacagtggctgaaacatatagaagtaaatgggagtaagattggtcctgacaaccttccttatgttcagattctgaagcactcaggaattaattcttcggacgcagaagtgctaaccctcttcaatgtgaccgaggcacagtcgggggaatacgtgtgtaaggtcagtaactacatcggggaagctaaccagtccgcgtggctcactgtgacgagacctgttgccaaggattgctggagctag

SEQ ID NO: 223218 - DNA, 2196 bp, synthetic construct
  misc_feature 1..2196: note = Description of Artificial Sequence: Synthetic coding sequence
  source 1..2196: mol_type = other DNA
atgtggagctggaaatgcttgcttttctgggctgtgctggtcactgctacactctgtactgcacggccttctccaacactgcccgagcaagatgccctgcccagctctgaggacgacgacgatgatgatgattccagcagcgaagagaaggagactgacaacaccaaaccgaatccggtggccccttactggaccagtcccgagaaaatggagaaaaaactgcacgccgtgccggcagccaaaacggtgaagttcaagtgcccatctagcgggactccaaatcccactctcagatggttaaagaacggtaaggagttcaagcctgaccacaggattggaggctataaggtgcgatacgcgacctggtcaatcatcatggactctgtggtcccgtcagataaggggaactacacgtgcatagttgagaacgaatacggaagtataaaccacacttaccagcttgatgtcgttgagcggtccccgcacaggcccatcttacaggccggtctgcccgctaataagacggtggccctcgggtctaacgtggagtttatgtgcaaggtgtactcagatccgcagcctcatatccagtggctcaaacacattgaagtgaatgggagcaagatcgggcctgataacttgccgtacgtgcaaatccttaagacagcaggggttaacaccaccgataaagaaatggaagttctgcatcttcggaatgtatcgttcgaggatgcaggagaatatacttgtctggctggcaacagcatcggtttaagccaccacagcgcttggctgacagtactcgaagcccttgaggaaagacccgctgtaatgacctccccgctgtacctagaaattattatatactgtacgggcgcttttctgatcagttgcatggtggggtccgtgattgtatacaaaatgaagtccggaactaagaaatccgacttccactcacagatggctgtccacaagctcgccaagtcaataccactgagacggcaggtaaccgtctccgctgactcctccgcctcaatgaatagcggagtgctgctggtccggcctagcagactcagtagctctggcacaccaatgctggctggagtaagcgagtatgagttgcctgaggacccaaggtgggagctgcctcgggatcgccttgtcttaggtaagccactgggcgaagggtgttttggacaggttgttctcgctgaggccattgggctcgataaagataagcccaacagggtgacaaaggtggccgtaaagatgcttaagagcgacgcaacagagaaggacttaagcgaccttatcagcgagatggaaatgatgaagatgattggcaaacacaaaaatataatcaatttgttgggtgcctgtactcaggatggccctctgtatgtgattgttgagtatgccagtaagggaaacctgagggagtatttacaggcccgtcgcccacctggactcgagtattgttacaatccttcccataaccccgaggaacagcttagcagcaaggatctagttagctgcgcgtatcaggtggccagaggcatggagtacctcgcatcaaagaagtgcatacaccgtgacctggccgctagaaatgtgctggtcacagaggacaatgtaatgaagatcgcagatttcgggctggctcgtgatatacaccacatcgactattataagaagactacaaacgggaggctgccggttaagtggatggcacccgaggctctgtttgacaggatctacacccaccaaagcgacgtgtggtcgtttggggtgctattgtgggagatttttacactgggaggtagcccctatcccggagtaccagtcgaagaactgttcaagctactgaaggagggacacaggatggataaaccttctaactgtaccaacgaattgtacatgatgatgagagattgctggcacgccgttccctcccaaagacccactttcaaacagctggtggaggatttagaccgcatcgtggcgctgacatccaatcaggaatacttagacttaagcatgcctctcgaccaatacagtcccagcttcccagacacgcggtcctcaacttgctcttccggagaagactctgtgttcagccatgagccattgcccgaggaaccgtgccttccccgacacccggcacaacttgctaatggaggacttaagaggcgctag

SEQ ID NO: 223219 - DNA, 2439 bp, synthetic construct
  misc_feature 1..2439: note = Description of Artificial Sequence: Synthetic coding sequence
  source 1..2439: mol_type = other DNA
atggcggctgtcacacgcgatttcggagagatgttgctgcatagcgggagagttttgccagccgaggctcagccatggggggctcccgtggaagtggagagcttcttagttcacccaggagacctgcttcagctgagatgtcgtctgcgtgatgacgtgcagagtataaactggctgagagatggcgtgcagcttgccgagtccaaccggacacgcatcaccggagaggaggtagaggtccaggacagtgtgccagctgattctggcttatacgcatgtgttacgtcttctcctagtggcagcgataccacatacttctcagtgaacgtcagtgacgccctgcccagtagcgaagacgatgacgacgatgatgactctagcagcgaagagaaggaaaccgacaacacaaaacccaatcgcatgcccgtcgccccatattggacctctcctgagaagatggaaaagaaactgcacgccgtgcctgccgctaaaaccgtaaaattcaagtgtccatcgtccgggaccccaaatcctacacttcggtggcttaaaaatggtaaggagtttaaacctgaccacagaattggaggctacaaagtccggtacgcaacgtggagtattataatggactcagttgtcccgtctgataaaggcaactacacctgcatcgtggagaacgagtatggcagtatcaaccacacctatcagctggatgtggtcgaacggtctccccatcggcctatactgcaggccggtctacccgctaataaaacagttgcactggggtcaaatgtcgagtttatgtgtaaggtttactccgatcctcagccacacattcagtggctgaagcatattgaggtaaacgggtctaagatcggccctgacaacctcccgtatgtgcagatactgaaaaccgccggagttaatacgaccgataaagaaatggaggtgctacacttgcgtaacgtcagcttcgaggacgctggcgaatacacctgcttggctggcaattcgatcggactttcacaccacagtgcctggttaacggtcttggaggctctcgaagagcgaccagctgtgatgaccagtcccctttacttggagataatcatttactgcacaggggctttcttgatttcgtgcatggtggggagcgttattgtgtacaaaatgaagtctggcacgaagaagagtgactttcactcgcagatggctgtgcataagctggctaagtccatcccactcaggcggcaggtctccgcggactcttcagcgtctatgaattctggcgtactccttgttcgaccctctcggctgtcctccagcgggacaccgatgctggctggtgtatcagaatatgagctccccgaggatcctaggtgggagctgcccagagatcggctggtgctgggcaagcccctaggagaggggtgttttggacaagttgtgctggctgaagccatcggactagataaggacaaacctaatagagtaacaaaggtcgccgtgaaaatgcttaagtccgacgcaaccgagaaggatctgtctgatctgatatccgagatggagatgatgaagatgattggaaagcataaaaacatcatcaacctactgggagcatgcactcaggacggccctctatatgtcatcgttgagtacgctagtaagggcaatttacgcgaatacctgcaggctagaagacccccaggactagaatattgttacaatccttcacacaatcccgaggagcaactgtcatctaaagatctggtgagttgcgcctatcaggttgctcggggaatggagtacctggccagcaaaaagtgcattcatcgggatctagccgctaggaatgtgttggtgactgaggataatgtgatgaagatcgctgatttcggactggccagggacatccaccatatcgattattataaaaagactacaaatggacgcctccccgttaagtggatggctcccgaggctctgttcgacagaatttacacacatcagtctgatgtttggtcatttggggtacttttatgggagattttcacacttggcggttccccctatcccggagtgccagtggaggaactgttcaagctgcttaaggagggccatagaatggataagccctccaactgcacaaatgagttatacatgatgatgcgcgattgttggcatgcagtgccctcgcagcgtccaaccttcaagcagctggtggaggacttggaccgaatagtggcccttaccagcaatcaggagtaccttgacctttctatgcctcttgatcaatattctccctctttcccagacacccggtcaagcacttgctcaagcggggaggacagtgtcttctcgcacgaaccccttcccgaggaaccgtgcctccccagacatcctgcccagctggcaaatggaggccttaagcgtagatag

SEQ ID NO: 223220 - DNA, 2469 bp, synthetic construct
  misc_feature 1..2469: note = Description of Artificial Sequence: Synthetic coding sequence
  source 1..2469: mol_type = other DNA
atgtggtcatggaaatgcctcttattttgggctgtcctagtcactgcaactttgtgtacagccaggccttcacccactctgcccgagcaagcccagccctggggagctccagttgaggtggagagcttcctcgtgcaccccggagacttgctgcagctgagatgcaggcttagagacgatgtccagagcattaattggttgagggacggagtgcagctcgcagaatctaacagaactcggattaccggcgaagaagtggaggtacaggactccgtccccgcagattcgggcttatacgcatgtgtcacttcctccccatcaggatccgataccacatatttttccgtcaatgttagcgtcccaatcgacgcccttccctctagtgaagacgacgacgatgatgacgatagtagctcagaggagaaagaaaccgataacactaagccaaaccccgtggcaccctattggacaagccctgagaaaatggaaaagaagctgcatgcagtgccggcagctaagactgtgaagtttaagtgtcccagctcgggaacccccaaccccactctgagatggctgaaaaatggcaaagaatttaagccagatcaccgcatcggcggatataaagtccggtatgccacctggtcaattattatggactccgtcgtaccttctgataagggaaactacacatgcatcgtcgagaatgaatacggttctatcaaccatacctatcagcttgacgtcgtggagcggtccccccatagaccaatcctccaagctggtctccctgccaacaaaacagtggcccttggctctaacgtggagtttatgtgtaaagtgtattccgatccacagccacatatccaatggctgaaacacattgaggtcaacggctcaaagatcggcccagacaatctaccttatgtgcagatcctgaagcattctgggattaactcatcagatgcagaggtgctcacgttgttcaatgtcaccgaagctcaatcaggtgagtatgtttgcaaagtttccaactacatcggggaggcaaaccaaagcgcatggctgacggtgacacgaccagtgctagaggaaaggcctgcagtaatgacttcacccctttatctcgaaataattatctattgtactggtgctttcctaatttcttgtatggtgggctctgttatcgtctataaaatgaagagtggaacaaagaaaagtgatttccactctcagatggccgtgcacaagcttgcaaaatccattcccttaaggcgccaagtcactgtgtcagcagacagctccgcatctatgaactccggggtcctgctggtcagaccctcccgcttgtcatcttctggtactcccatgcttgctggagtgtcggagtatgagctgcccgaggatccccgttgggagttaccgagagaccgactcgtacttggtaaacccttgggggagggatgctttggtcaggtcgtgctggccgaggccattggactggacaaggacaagccaaacagagtcaccaaagtggcggtcaagatgctcaaaagtgatgccacagagaaagacctgagcgacttgatctcagagatggaaatgatgaagatgatcggcaagcacaaaaacattattaatctccttggagcttgcacacaggacggacccctgtatgtgatcgtcgagtacgcctctaagggaaacctgcgtgagtacttacaggcccgtagacctccaggcctggagtactgctataatccaagtcacaaccctgaggaacagttatcttccaaggatttagtgtcttgcgcctaccaggtggcaagaggtatggaataccttgcttccaagaaatgcatccaccgtgatctggctgcgaggaacgtcctggtgactgaggataatgtgatgaagatcgctgattttggtctcgccagggacatccaccacattgattattataagaaaactacaaacggacgcctcccagtaaagtggatggcacccgaggccctatttgacagaatttacacccaccagagcgacgtctggtctttcggcgtgctcctgtgggaaattttcactctcgggggaagcccatatcccggagtgccagttgaggagctgttcaagctccttaaggaggggcaccgcatggacaagccctctaattgcaccaatgagctgtacatgatgatgcgtgattgctggcacgccgtcccaagccagagaccaacttttaaacaactggtggaggatctcgacagaatcgttgccctgacctcaaatcaggagtatctggacttgtccatgccgctggaccaatattctcccagcttccctgacacgagaagctccacatgcagcagtggcgaggattccgttttcagtcatgagcctctgcccgaagaaccatgtctgccacgccatcctgcccagctggcaaatggcggattgaaacggaggtag

SEQ ID NO: 223221 - DNA, 2202 bp, synthetic construct
  misc_feature 1..2202: note = Description of Artificial Sequence: Synthetic coding sequence
  source 1..2202: mol_type = other DNA
atgtggtcttggaagtgcctgctgttctgggccgtactggtcaccgcaaccctgtgcacagcacgcccatcgcccaccctgcccgagcaggacgccctcccttcctcagaagacgatgatgacgacgatgatagttcaagcgaagagaaagaaacagacaacactaaaccgaatcggatgcctgtggccccatattggactagccccgagaagatggagaaaaagctgcacgctgttcccgctgccaaaacagtgaaattcaaatgtccgtcaagcgggacgccaaatcctaccctgagatggctgaagaacggcaaggaattcaaaccagatcaccgtatcggtggatacaaagtccgctacgccacttggagcattataatggacagtgtagtcccaagcgataaaggaaattacacatgcatagtcgaaaatgagtatggttccattaaccacacctatcagctcgatgtcgtggaacgctctccgcatcgtccgatcttacaggcgggtctgccggcaaataagacagttgccttagggtctaatgtggagttcatgtgtaaggtctactccgacccacagcctcacatacagtggctgaaacacatcgaagtgaacgggagtaagattgggcctgataatctaccttacgttcaaatacttaagactgctggcgtaaacaccaccgataaggagatggaggtgttgcacctgaggaatgtgtccttcgaggatgcaggtgagtacacatgcctggccggaaatagcataggtctctctcatcatagcgcctggctcaccgtgttggaggcccttgaagagaggccagccgttatgactagtcccctgtacctggaaattatcatttattgcaccggcgcattcctgatttcttgcatggttggctccgtgatcgtctataagatgaagagtgggacaaaaaagtccgattttcattctcagatggctgtccacaagttggctaagagtattcctttgaggcggcaggtcactgtaagcgcggattcctcggcctccatgaatagtggcgtacttctcgtgagaccctcccgactttcatccagtggtaccccaatgttagccggtgtctccgagtacgaactgccagaggatccccgttgggagctaccacgagatcgcctcgttctagggaaacccctgggcgagggctgctttggccaggtggtactggctgaagccatcggcctggataaagacaagcctaatagggtcacaaaagtagcggttaaaatgttgaaatctgatgccactgagaaggatttgtccgatctgatctctgaaatggagatgatgaagatgatcggcaagcacaaaaatattatcaatttgctaggagcatgcacacaagatggacctctctacgttattgtggaatacgccagtaagggtaatctaagggagtatttacaagcacgtaggccacccggactcgagtactgctacaatccatcccataatccagaagagcagctgagtagcaaagatctggtcagctgcgcctaccaagtggcccgtggcatggagtacttggccagtaaaaagtgcatccaccgcgatctcgccgctaggaacgttctggtgacagaggacaacgtgatgaagattgctgactttggactggctagagatatccaccacatcgactactataagaagactactaacggacgtttgcctgtgaaatggatggccccagaagctctctttgatcggatttacacacaccagtccgatgtctggtctttcggtgtcctcctgtgggagatctttacacttgggggaagtccatatcccggagtacccgtggaggagctatttaagctgttaaaggaagggcaccggatggacaagccatcaaactgtaccaacgaactgtacatgatgatgagagattgctggcatgcagtgccatcgcagaggccaaccttcaagcagcttgtcgaggacttggaccgcatcgtggctcttacatcaaaccaggagtatctcgatctgagtatgcctttggaccagtactcaccttcgtttcccgacacaagatctagtacttgttcctccggggaggacagcgtgttttcccatgaacctctgccagaggagccatgtctccctcgccacccagcgcagctggctaacgggggtctgaaacggaggtag

SEQ ID NO: 223222 - DNA, 2463 bp, synthetic construct
  misc_feature 1..2463: note = Description of Artificial Sequence: Synthetic coding sequence
  source 1..2463: mol_type = other DNA
atgtggagttggaagtgtctgctattctgggccgtcttggtgactgctactctgtgcactgcaaggccgtccccgactctgcccgagcaagcccaaccctggggtgcccctgtggaggtggaatcatttctggtgcatcctggggatctcctccagctccgctgcagactgagggacgacgtgcagtccatcaattggctgcgcgacggcgtccagttagcagaaagcaatcgcactagaatcacaggggaagaggttgaggtgcaggactccgtgccggcagattcaggcctttacgcatgcgttacctccagccccagtggatccgacactacttactttagcgtgaatgtcagcgatgccctaccgagcagcgaggacgacgacgatgacgacgactctagctcagaggagaaggaaaccgacaacaccaagccgaaccctgtggcgccatattggactagcccagagaagatggagaaaaagcttcacgcagttccagctgccaagaccgttaagttcaaatgtccctcttcagggacacctaatcccacactgagatggctgaaaaacggcaaggaattcaagcccgaccaccgcatcggtggctacaaggtcaggtacgctacatggtcaatcattatggactctgtcgtgccgagtgacaaaggcaattacacatgcatcgtggagaacgagtatggctccatcaatcacacctaccaactggatgtagtcgagcggagccctcacaggcctattctgcaggctggactgccagccaacaagaccgtggccctgggatccaatgtggaatttatgtgtaaagtctattccgacccccagccccatatccagtggctgaaacatattgaggtgaatggatccaagatcggcccagataatctcccttatgtgcagatacttaagaccgccggagtgaacaccaccgacaaagaaatggaggtgttacatctcagaaacgtgagctttgaggacgcaggtgaatatacatgcctcgcaggcaacagcattgggctgtcacaccactctgcttggctaacggtcttagaggctctggaggaaaggcccgctgtaatgacctcaccactataccttgaaatcattatttactgcaccggcgcattccttatttcttgtatggttggctccgtgattgtgtacaaaatgaagtcaggaaccaagaaatccgactttcattctcagatggccgtgcacaaactggccaagagtattccactcaggcgccaagtgactgtctccgccgatagctccgcaagcatgaattccggggttctactggtgcggccatctagactgtccagctccggcacgccaatgctcgctggggtgtcggaatacgaattgccagaagacccgaggtgggaactaccacgcgacagactggtgctggggaagcccctcggcgaagggtgttttgggcaggtcgtgctggctgaggcaattgggctcgataaggacaagcccaaccgagtgaccaaggtcgcggtaaagatgctgaaatccgatgccaccgagaaagacctctccgacctcatctctgagatggagatgatgaagatgatcggcaagcacaagaacattataaatctcctgggcgcttgcacccaggacggacccctgtatgtgatagttgagtacgctagcaagggcaacctgagagagtatttacaagcgcgtaggcctccaggccttgaatactgctacaatcccagccataatccagaagaacaactttcaagtaaagacctggtctcatgcgcttaccaagtggctcggggaatggagtacctagcctccaaaaaatgtatacaccgggatcttgccgctagaaacgtccttgtgacagaggataatgtaatgaaaatagctgatttcggcttagcacgagacatccatcacatagactactataaaaagaccacaaatgggagactgcctgtaaagtggatggctccagaggctctgttcgacagaatctacacccatcaatctgacgtttggtctttcggagtgttactttgggaaatcttcacactgggtggcagcccttaccctggggttcctgtcgaggaactgttcaagttgctgaaggaggggcatcggatggacaaaccgtctaactgcaccaatgaactgtatatgatgatgcgggattgttggcatgctgtcccctcccagaggcctactttcaagcagttagttgaagatctggacaggattgtggcactgacatccaatcaggaatatctcgacctctctatgcccctcgaccagtattccccctctttcccagatacccgtagcagtacctgtagctccggcgaagacagcgttttctcacatgaacctcttccggaggagccttgcctgcccaggcaccccgctcaactggctaacggaggactgaagcgacgctag

SEQ ID NO: 223223 - DNA, 2202 bp, synthetic construct
  misc_feature 1..2202: note = Description of Artificial Sequence: Synthetic coding sequence
  source 1..2202: mol_type = other DNA
atgtggtcttggaagtgcctactgttctgggcagtgctcgtgaccgctaccctttgtacagcccgaccgtcgccgaccctacctgagcaggatgctctgcccagctccgaagatgatgatgacgatgacgacagtagtagcgaggagaaagagactgataacactaaaccaaacccggtggcgccttactggacttcccctgagaagatggagaagaagctgcacgccgtccccgcagccaagacggtgaagttcaagtgtccatcttccggtacacccaaccctaccttgagatggctcaaaaacggcaaggaattcaagcctgatcaccgcattgggggatataaagttaggtacgccacttggagcattatcatggactctgtggttccctccgataaggggaactatacttgtatcgttgagaatgagtacggcagtattaaccatacgtatcagctggatgttgtggagagaagcccccacagaccaatcctgcaggctgggctgcctgctaacaagaccgttgcacttggttctaacgtggaattcatgtgcaaggtgtacagcgatcctcagccccatatccagtggctgaaacatatcgaggtgaacgggagcaagatcgggccagacaacttgccgtacgtacagatcttgaaacactccgggatcaattctagcgacgctgaggtcttaactctgtttaatgtgaccgaggcacaaagcggcgaatacgtatgtaaggtttctaactatatcggagaagctaaccagtccgcatggctgaccgttacgaggcccgtggcaaaagccctggaggaacggccagctgtcatgaccagtcctttatacttggaaatcatcatctactgcactggggcttttctaatcagctgtatggtcggatccgtcatcgtgtacaagatgaaatctggcacaaaaaaaagtgacttccattcccagatggctgtccacaaactggctaagtcaatccccctacgcaggcaagtgacggtcagcgccgactcttcagccagcatgaactccggcgtactgctggtacggccatctcgcctctcgagctctgggactccaatgcttgccggtgtctcggagtatgagctgcccgaggaccctagatgggagttacccagggaccgactagtcctcggcaagccacttggagagggttgcttcggacaagtcgtgctagccgaagcaatcggcttggacaaagacaaacctaaccgcgtgaccaaagttgcagtgaaaatgctgaagtccgacgccaccgaaaaagacctcagtgacctgataagcgaaatggagatgatgaagatgataggcaaacacaaaaatataataaacctcctcggtgcatgcacccaggacggccctctgtatgttatcgtggaatacgctagcaagggcaacttaagggagtatttgcaggctaggaggccccctggcttagagtactgctataatccttcgcataacccagaggagcaattgtcatccaaagatctagtgagctgtgcctatcaggtggcaaggggaatggaatatctggccagtaaaaaatgtatacatagggatctggccgcaagaaatgttctcgtgaccgaagacaatgtgatgaaaattgccgatttcggtctggcacgggatatccaccacattgactactacaagaaaaccacgaatgggcgtctgccagtgaagtggatggcacccgaagccctctttgatcggatttacacacaccaatctgacgtctggtcattcggggttctgctgtgggaaatctttactctgggtggcagcccctacccaggagtgccagtggaggaactgttcaagctccttaaggagggccatcgaatggacaaaccttcaaactgcaccaacgaactgtatatgatgatgagggattgctggcacgccgtccctagtcagaggccaacattcaagcagttggtggaggacctcgatcgcattgtggctcttacaagtaaccaggagtacctcgatctcagcatgcccctggaccagtacagtccctcctttccagacacacggagcagtacatgctcatcaggcgaggattcggtcttctctcacgagccactgcccgaagagccgtgccttcccaggcaccctgctcagctggctaacgggggtttaaagcgccgttag

SEQ ID NO: 223224 - DNA, 2463 bp, synthetic construct
  misc_feature 1..2463: note = Description of Artificial Sequence: Synthetic coding sequence
  source 1..2463: mol_type = other DNA
atgtggtcctggaaatgcctactgttctgggccgttctggtgactgcgactctgtgcactgcacgaccctctccaaccctgccggagcaagcacagccttggggggcacccgtggaggtggaaagtttcctcgttcaccctggcgatctgctccaactcaggtgcaggctcagggacgatgtacagagtattaactggcttagagatggagttcagttggcagaatcaaaccggacacggattaccggcgaggaagttgaggtacaggactctgttccagccgatagtgggttatacgcctgcgtaacaagcagcccgtccgggtctgacacgacctatttttccgtgaatgtgagcgacgccttgccttcctccgaagatgatgatgatgatgatgatagtagctcagaagagaaggagaccgataacaccaagccaaaccccgtggcgccttactggacatcaccagagaaaatggagaaaaaactccacgccgttccagccgcaaagactgtgaaatttaagtgcccgtccagtggcactcctaatccaactctccgatggctgaagaacgggaaagaattcaaacctgatcaccgtatcggcggatacaaagtcagatacgctacgtggagtattatcatggacagtgtggtgccttctgataagggcaattacacctgtatcgtcgagaatgagtatggatctataaaccacacctatcagcttgatgtggttgagagatctccacatagacccattttacaggccggactcccagccaataaaaccgttgcgcttggttccaatgtcgagttcatgtgcaaggtctacagcgatcctcagcctcatatccaatggctcaaacatatcgaggttaatgggagtaagattgggcctgataatctcccatacgtacagatccttaagactgccggagtcaatacgacagacaaggagatggaggttctccacctacggaatgtcagcttcgaggatgcgggagaatatacctgtcttgctgggaattcgatcgggttaagtcatcattcggcctggctaacagtgctggaagccctagaggaacggcctgcagttatgacctcccccctgtacttagagatcatcatttactgtacaggcgctttccttatctcctgcatggtggggtctgtgatcgtgtacaaaatgaaatctggcaccaaaaagagcgattttcacagccagatggccgtgcataaactggcaaagtcaattcccctgaggcgccaggtgaccgtgagtgcggattcatctgcgagtatgaactcaggcgttcttctggttaggccctcccgactctcatcctcaggaactcctatgttggccggtgtgtctgaatacgagctgcctgaggacccgaggtgggaactgcccagggacaggttggtgctagggaagcccctcggggaggggtgcttcggacaggttgttttagcagaggctattggactggataaagacaagccaaatagggttaccaaagtggcagtgaagatgctgaaatccgatgccacagagaaagacctcagcgacctgattagtgagatggaaatgatgaagatgatcggaaagcacaaaaatatcatcaatctgcttggcgcttgtacccaggacggtcccctctacgtaatcgtggaatacgctagtaaggggaatttgagagaatatctgcaggcacgccgaccgccaggtctcgaatactgctataaccccagccacaatcccgaagaacaactgagcagcaaggatctcgtatcttgtgcgtaccaggtagcacgcggaatggagtatcttgcaagcaaaaagtgtatccatcgggatcttgcagctagaaacgtgctggttacagaggataacgtgatgaagatcgctgatttcggactggctcgcgacatccaccacattgactactataagaaaacaacaaacggaagacttcctgttaagtggatggcacccgaggccctgttcgatcgaatctacacccatcagtcagatgtgtggagctttggcgttctgctgtgggagatttttacactagggggttcaccataccctggcgtcccggttgaggaactgttcaaattgctcaaggagggccatcgtatggataagccttccaactgtactaacgagttatatatgatgatgagagattgctggcatgccgtgccctctcagcggcctactttcaagcaactggttgaggatctcgaccgaatcgtcgcgctgacatccaaccaggaatacctggacctgtcaatgcccctggaccagtattcacctagttttcctgacacgcgatcatcaacgtgtagctctggcgaggattccgtcttcagtcatgagcctctgccagaggagccttgcctccctaggcaccccgctcagctcgccaacggaggcctgaagaggagatag

SEQ ID NO: 223225 - DNA, 2463 bp, synthetic construct
  misc_feature 1..2463: note = Description of Artificial Sequence: Synthetic coding sequence
  source 1..2463: mol_type = other DNA
atgtggtcatggaagtgcctcttattctgggccgtgttggtgaccgctaccttatgcaccgcccgaccaagtcctactttgcccgagcaggcccaaccctggggggcaccagtggaagtggagagctttctcgttcaccccggtgatctgctccagctgcgatgcagactgagggatgatgtgcagagcattaattggctgcgtgacggcgtccagcttgcagaaagcaatagaactcggatcactggcgaagaagttgaggtccaggattccgtccccgcagatagcgggctttatgcctgcgtgactagttcgcccagcgggagcgacaccacatacttttcagtgaacgtgtcggacgcccttccttcttccgaagacgacgacgacgacgacgactctagctcagaggagaaagagaccgacaatacaaaaccaaacccagttgcaccttactggaccagcccagagaagatggaaaagaaacttcatgccgtgccagccgcaaaaacggtcaaatttaaatgccccagctccgggactcccaatcccaccctccgctggctgaagaacgggaaagagttcaaaccagatcataggattggagggtataaggttcgatatgctacatggtctattatcatggacagtgttgttcctagtgataagggaaactacacttgcatcgtggagaatgaatatgggtccattaatcacacataccagttggacgtagtggaaaggagcccgcatcgcccaatcctgcaggcagggctgcccgctaataagacagtcgctttgggctcaaacgtggaattcatgtgcaaagtctattccgaccctcagccacacatccaatggttgaagcacattgaggtaaatggatccaaaatcggtcctgataacttgccctacgttcagatcttgaaaactgctggagtcaacacaaccgataaggaaatggaggtgctccacctgagaaatgtttcgttcgaagacgccggagaatacacttgcctggctgggaatagcatcggactttctcaccattccgcctggctgacagtgttagaagcactggaggagaggccagccgtcatgacctcacccctgtacttggaaattattatctattgtactggcgcattcctgatttcatgcatggtaggcagcgtcatcgtgtacaaaatgaagtccgggaccaaaaaaagcgatttccactcccagatggccgttcacaagctggctaaatccatcccgctcaggagacaggttacagtgtctgccgactcctcagcaagcatgaattccggcgtcctgctcgttcgcccttcgaggctctcgagctccggcactcctatgctggccggtgtgtcagagtacgagctccccgaagatccccgttgggagctgcctagggaccgcctcgtgctcggcaaaccactgggcgaggggtgctttggccaggtcgtgctggccgaagcaattgggctggacaaagacaagccaaacagggtgaccaaggtggccgtgaagatgttgaagagcgatgccacagaaaaagatctgagtgacctgatctcagagatggaaatgatgaaaatgataggcaagcataaaaacataatcaatttactaggggcttgcacccaggatggccctttatatgtcatcgtggaatacgccagtaaggggaacctccgagaatatctccaggccagaaggccgcctggtttggagtattgttacaacccatctcacaaccccgaagagcaactcagctccaaggatctggtatcctgcgcctaccaagttgcacgcggtatggaatatttggcgtcgaagaaatgtatccatcgagaccttgccgcaagaaacgtgctggtgaccgaggataatgtgatgaagattgctgacttcgggctggcccgagacattcatcatatcgactattacaagaagaccaccaacggcaggctcccggttaaatggatggccccagaagccctatttgacaggatctacacgcaccaatcagacgtctggtcctttggcgtgttactgtgggagattttcactctgggtggctcaccataccctggtgtgcctgtggaggagctcttcaaactcttaaaggaggggcacagaatggacaagcctagcaactgcaccaatgaactgtacatgatgatgagggactgctggcacgctgtgcccagccagagacctactttcaaacaactggttgaggatctggatagaatcgttgcgctgacaagcaaccaagagtatctggacctgtctatgccactggatcagtattctccgtctttccctgatactaggtcatccacatgttcttccggcgaagactctgtgttttcacacgaacccctgcccgaggagccctgtctgccccgtcaccctgcacagctcgcaaacggtggactgaagcgacgctag

SEQ ID NO: 223226 - DNA, 324 bp, synthetic construct
  misc_feature 1..324: note = Description of Artificial Sequence: Synthetic coding sequence
  source 1..324: mol_type = other DNA
atgtggagttggaagtgcctcctcttttgggccgtgttggtgacagcaacactgtgcaccgctaggccttcccccaccttgcccgaacaggcccagccatggggcgcaccggtcgaggtcgagagtttcctcgttcatccaggtgatctgcttcagttaagatgtaggctgcgagatgatgtgcagtccatcaattggctcagagacggcgtgcagctggctgagagcaaccggactagaatcaccggcgaggaagtggaagtgcaggactctgtaccagctgactctggattgtacgcatgcgtcaccagctccccatcatag

SEQ ID NO: 223227 - DNA, 2562 bp, synthetic construct
  misc_feature 1..2562: note = Description of Artificial Sequence: Synthetic coding sequence
  source 1..2562: mol_type = other DNA
atggaagcccgagtgtctctgaaacgcaggatcgagctgaccgtggagtatccttggcgctgtggagccctatcccctaccagcaactgccggacaggaatgtggtcttggaagtgcctgctgttctgggccgttcttgtcaccgccactctctgtaccgcccgacccagcccgactttgccagaacaggcgcaaccatggggagctccagtcgaggtggagtcgttcctggttcaccccggtgacctgctgcagctgaggtgtcgactgcgcgatgacgtccagagcatcaactggctgcgagatggagtacagcttgctgagtctaacagaacaaggataacgggtgaggaagtggaagtccaggactctgtgccagccgacagcggcctgtatgcctgtgtgacatccagtccctccggctccgatacgacatattttagtgtaaacgtctccgacgctttgccaagttccgaagatgatgacgatgacgacgacagttcttccgaggagaaagaaaccgataatactaagccaaaccccgttgctccatactggacaagtccagaaaagatggagaagaagcttcacgcggtgccagctgcaaaaacagtaaagttcaagtgcccttcaagtggaacacctaatcccaccttgcggtggctgaaaaatgggaaggaattcaagccagaccataggatcgggggatacaaagtacgctacgctacctggtcaattattatggacagtgtggtcccatcagacaagggaaattatacatgcattgtggaaaacgagtacggctcaatcaaccacacatatcagcttgacgtggttgaacgctctccacacaggcccatcctgcaggccggattgcctgctaacaagacagtcgcgctgggctcgaacgtagagtttatgtgtaaggtctactcagatcctcagccacacatccagtggcttaaacatattgaggtgaacggctcgaagatcggacctgacaacctgccatatgtgcagattctgaaaactgcaggtgtaaacaccactgacaaggaaatggaggtgctccacctgcgcaacgtcagctttgaggacgctggggagtatacgtgcttagctggaaattcaattggcctctctcaccattctgcctggctgaccgtcctagaagcattggaggaaaggcctgcagttatgacgtcaccactgtacctcgagatcatcatttattgtacgggggctttccttatttcgtgcatggtagggagcgttattgtgtacaaaatgaagtcaggcactaagaaatccgactttcattctcaaatggccgtccacaagcttgccaaatcaatcccgctccgaagacaagtcaccgtgagtgctgattcaagcgcctcaatgaactctggcgtgctcctggttcgtccctcgcggctgtccagctccggtacaccgatgttggcaggggttagcgagtatgagctaccagaagatcccaggtgggagctgccacgggatagattagtactgggcaagcccctcggggaagggtgcttcgggcaagtggttctcgcagaagccatagggttggataaagacaaacccaatcgcgtgactaaggtggccgtaaagatgctgaagtctgatgctacggaaaaggatctttctgacctgatcagtgaaatggaaatgatgaaaatgatcgggaagcacaaaaatatcattaatttattgggcgcttgtacacaggacggaccactgtacgtgatagtggaatatgcttccaaagggaatctcagggagtaccttcaggcaagacggcctccaggtctggagtactgttacaatcctagccacaacccagaggaacaacttagtagcaaggatcttgtctcctgcgcctaccaggtggctagggggatggagtatttggcctcaaagaagtgtattcaccgggatctcgccgctcgcaacgtcctggtgacggaagacaacgtcatgaaaatcgccgacttcggtctggctcgcgatatccaccacatagattattataagaagacaaccaatggtaggttaccagtgaaatggatggccccagaggcactcttcgaccgtatttatacgcatcagtctgatgtgtggtccttcggcgtgctgttatgggagatcttcacgttgggcggatcaccgtatccaggcgttccggtcgaggaactgttcaaactgctgaaggagggccatcggatggacaagccctccaactgcacaaatgagctgtatatgatgatgcgcgactgctggcacgccgtcccctcccagcgcccaacctttaaacagcttgtcgaggatctggaccgaatagtggcactgacaagtaaccaagagtacctggacctatcaatgccactggatcaatactcaccctcttttcccgacactcgaagttccacttgtagttccggggaagattcagtcttctcccacgagcccctcccggaggagccctgtcttcctagacaccccgcacaactagccaatggcggactgaaacgcagatag

SEQ ID NO: 223228 - DNA, 168 bp, synthetic construct
  misc_feature 1..168: note = Description of Artificial Sequence: Synthetic coding sequence
  source 1..168: mol_type = other DNA
atgtggtcctggaagtgtctgctcttttgggcagtactggtaacggccaccctgtgtaccgctaggcctagcccaaccctgccggagcaagacgcactgccgtcatccgaggatgacgacgacgacgacgacagctccagtgaggagaaagaaaccgacaatacctag

SEQ ID NO: 223229 - skipped

SEQ ID NO: 223230 - DNA, 2469 bp, synthetic construct
  misc_feature 1..2469: note = Description of Artificial Sequence: Synthetic coding sequence
  source 1..2469: mol_type = other DNA
atgtggtcatggaagtgtctgcttttctgggccgtcctggttaccgcaactctatgcaccgcgagacccagccctactctgccggagcaagcccagccttggggggcacccgtggaggtggaaagctttctcgtgcaccccggtgatctgcttcaattgagatgtcgcctccgcgatgatgtacaaagtatcaactggctgagggatggtgtacaactggctgagagtaataggacccgcattacgggcgaggaagtggaagttcaggactcggttcccgcagacagcggtctgtacgcctgcgtgacgagctctcctagcggatccgacactacttactttagcgtcaacgtgagcgatgctcttccctctagcgaggacgacgatgacgatgatgactcctccagtgaagagaaagagacagataatacaaagcctaaccgtatgccagtggcgccatactggacgtctcccgaaaaaatggagaagaagctccacgcagtgccagccgctaagaccgtgaagtttaagtgtccttctagcgggacaccaaatcctacccttcgctggcttaagaatggcaaggaatttaagcctgaccatcgcattggaggatacaaagtgaggtatgctacatggagtattattatggattcggtcgtgccgtcagataaggggaattatacctgtatcgttgaaaatgaatatgggtctataaaccatacatatcaactggacgttgtagagcgatcgcctcataggcccattctgcaggctgggcttcccgcaaacaagactgtcgcactaggctcaaatgtcgagttcatgtgtaaggtttactctgacccccagccacatatccagtggctaaaacatattgaggtaaatggctctaaaatcggaccagataaccttccttatgtgcagatcctgaagactgccggagtcaacacaaccgacaaagagatggaagtgctgcatctaagaaatgtctcttttgaagacgcaggtgagtacacctgccttgcgggaaactcaatcgggttaagtcaccactctgcctggctaactgttctcgaagctctggaggagagacccgctgtcatgacatcacccctgtacctggaaattatcatctactgtaccggcgcttttctgatttcatgcatggtgggttccgtgatcgtgtacaagatgaagtctggaacaaagaaatcagactttcatagccaaatggccgtgcataagctggctaaatcaatcccattgaggagacaggtgaccgtgagcgcagactcttccgcgtccatgaacagcggtgtgctgctggtgagaccaagccgcctcagcagttccggcactcctatgctggctggcgtaagtgagtatgaactcccagaggaccccaggtgggagctccctcgagatagacttgtactcggaaaacccctgggcgaggggtgctttgggcaggtggtgctggccgaagcaataggactagataaagataaacccaatagagtgacgaaggtggcagttaagatgctcaagtccgatgcaacggagaaggatctcagtgatttgattagcgaaatggagatgatgaaaatgattgggaagcacaagaatatcataaacttgctgggagcctgcactcaggatgggcctttgtacgtcattgtcgaatatgcgagcaaagggaatctgcgtgaatacttgcaggccaggagaccgcctgggcttgaatattgctataatcctagccataaccctgaagagcagctgtcttcaaaggacctggtttcctgtgcctatcaggtggcacgagggatggaatacctggcaagtaagaaatgtatacaccgagacctggctgccagaaacgtcttagtcaccgaagacaacgttatgaagattgctgattttggcctcgcaagggacattcaccatatcgactattataagaaaacaactaacgggagactcccagtgaagtggatggcgccagaggccctcttcgatcgtatctatactcaccagtctgacgtgtggtcattcggcgtcctgctgtgggaaattttcacattaggcggaagcccttatcctggcgtgccagtcgaggagctgtttaaacttctgaaggaagggcaccggatggataagccgagtaattgcactaacgaactgtacatgatgatgagggattgctggcacgccgtgccatcccaaagaccaacatttaagcaacttgtcgaggatttggatagaattgtggcgctcacatctaaccaggagtacctggacttatcaatgcccctggatcagtacagcccttccttcccagacacgaggtcctcaacatgctctagcggtgaagatagcgttttctcgcacgaacccctccccgaagaaccctgtctcccccgacacccagcacaactcgctaatggcggtcttaagcggagatag

SEQ ID NO: 223231 - DNA, 897 bp, synthetic construct
  misc_feature 1..897: note = Description of Artificial Sequence: Synthetic coding sequence
  source 1..897: mol_type = other DNA
atgtggagttggaagtgtcttctgttttgggctgttctagttaccgccactctctgtactgcccgacctagtcctactttgcctgaacaagctcaaccctggggagctccagtggaggtggaatctttccttgttcatcctggtgatttgttgcagctgagatgccgtctcagagatgatgtccagtcaatcaattggctgcgcgatggagtgcagttagctgagagtaataggacacggattacaggtgaagaggtagaggtgcaggattccgtcccggcagacagtggactttatgcctgtgtaacttcctcaccaagtggatctgacactacctatttcagtgtgaatgtctctgatgccctcccaagttcagaggatgacgacgacgatgatgactcgagctcagaggaaaaagagaccgataacaccaaacccaatcgcatgcccgttgccccatattggactagcccagagaaaatggagaaaaaactccatgctgtgccagctgcaaagacagtgaagttcaagtgtccgtctagcggaacacctaaccccacacttcgttggcttaaaaacggcaaggagtttaaacctgaccatagaatcggcggttataaagtaagatatgccacttggagcataatcatggatagcgttgtgccgagtgataaaggaaattatacctgtatcgtggaaaatgaatacggatccattaatcatacttaccagttggatgtggtcgaacgatccccacaccggcctattctccaggcaggactgccagcaaataagacagtcgctctgggctccaatgtggagttcatgtgtaaggtctactccgatccacagccacacatccagtggttgaagcacatcgaggttaatggctcatag

SEQ ID NO: 223232 - DNA, 438 bp, synthetic construct
  misc_feature 1..438: note = Description of Artificial Sequence: Synthetic coding sequence
  source 1..438: mol_type = other DNA
atgtggagttggaagtgcctgctgttctgggccgttcttgtcacagctacactgtgtaccgccagaccctcccccactctccctgaacaggatgccttgccttctagcgaagatgatgatgatgacgatgatagtagttctgaggagaaagaaacagacaataccaagccaaatcctgtggctccttactggacctcccctgagaagatggagaaaaagctgcatgcagttccagcggcaaaaacggtgaaatttaaatgtccatcatccgggacgcccaatccgacccttcgatggctcaaaaatggcaaggaattcaagccagatcaccgaatcggaggatacaaagtgagatacgctacctggtcaatcatcatggactctgttgtgccgagcgacaagggcaattacacctgcatcgtcgagaacgaatactag

SEQ ID NO: 223233 - DNA, 429 bp, synthetic construct
  misc_feature 1..429: note = Description of Artificial Sequence: Synthetic coding sequence
  source 1..429: mol_type = other DNA
atgtggagctggaaatgtctgttattctgggccgtgctggttaccgccaccttatgtacagcccgaccatcccccacgctgccagaacaagacgctctgccttccagcgaagacgacgacgatgatgatgattccagttcagaggaaaaggaaaccgataacactaagcccaatagaatgcctgttgccccatactggacaagcccagaaaagatggagaaaaaactccacgcagtgccagcagccaagaccgtcaaattcaagtgtccatcttcaggaactcccaacccgacccttagatggctgaagaacggaaaggaattcaagccggaccaccggataggaggctataaagtcaggtacgctacgtggagcatcataatggacagtgtagtcccatccgacaaaggtaattacacctgcatttag

SEQ ID NO: 223234 - DNA, 258 bp, synthetic construct
  misc_feature 1..258: note = Description of Artificial Sequence: Synthetic coding sequence
  source 1..258: mol_type = other DNA
atgtggtcctggaagtgtctcctcttttgggccgtgctggttacagcaacgctgtgcacagcacgcccttctcccactcttccagagcaggacgctctgcccagctccgaagacgatgatgatgatgatgacagtagctcagaagagaaagaaaccgacaacacaaagccgaaccctgtggcaccttattggaccagccctgagaaaatggaaaaaaaactgcatgccgtgcccgcagccaaaaccgtcaagttctag

SEQ ID NO: 223235 - DNA, 2463 bp, synthetic construct
  misc_feature 1..2463: note = Description of Artificial Sequence: Synthetic coding sequence
  source 1..2463: mol_type = other DNA
atgtggagctggaaatgcctgctgttttgggccgtcctggtcacagcaactctatgtacagcacgccctagtcccaccctccccgaacaggcacaaccatggggagcaccagttgaggtcgagagtttcctggtgcaccccggagacttgctgcagcttcggtgtcgcctgagggacgatgttcagtccataaactggctccgagatggcgtccagctagcagaatctaatcggacacgaattacgggcgaggaggtggaggtacaagactccgttcctgccgatagtggcctctatgcctgcgtgacttccagcccctcaggctctgatacaacttattttagcgtaaacgtctcagatgcgctcccttcgtccgaggacgacgatgacgatgacgattctagcagtgaggagaaagaaacagacaatacgaaacctaaccggatgcctgtggccccatattggacatctcctgaaaaaatggaaaaaaagcttcacgctgtcccggctgccaagactgttaagtttaagtgtccctcttccgggacaccgaacccgacactaaggtggctgaaaaacgggaaggagttcaagcccgatcataggatcggtggctacaaagtgcgttacgcaacatggagcatcatcatggatagtgtggtgccttctgataaagggaattacacttgtatagtggagaacgagtacggaagcataaatcacacctaccagcttgacgttgttgaacggagcccacacagacccatcctgcaggcaggccttccagcaaataaaactgtcgcgctgggctccaacgttgagtttatgtgtaaagtgtatagtgacccccaacctcacatccaatggctcaagcacatcgaggtaaatggttccaagatcggccctgacaacctcccatatgtccagattctaaagacagctggcgtgaacactacagataaggaaatggaggtcctgcacctgcgaaatgtgagtttcgaagacgccggagaatatacctgcttagctggaaattcaattggactgtcacaccatagtgcctggctgaccgtgctggaagccctggaagaacgccctgccgtgatgacatctcccctatacctggaaattattatctactgtaccggagccttcctcatttcctgtatggtgggcagcgtgattgtatacaaaatgaagtctgggactaagaagagcgacttccactctcagatggccgtccacaagcttgccaagagcatcccactcaggcgacaggtgagtgccgacagctctgcctcaatgaactctggagtgctgctggtgcggcctagcagattgagctcttccggcaccccgatgctagctggagttagcgagtatgaactgcccgaggacccgcgttgggagctgccaagagaccggttggtgttggggaagcctctcggtgagggatgtttcgggcaagtcgtcttagccgaggcgatcggcctcgacaaagacaaaccgaatagagtgacaaaggttgcagtgaaaatgctaaagtcagatgcaacagagaaagatctcagtgatctgatatctgaaatggaaatgatgaagatgattggcaagcacaaaaacataatcaatctgttgggtgcatgtacgcaggatgggccactgtacgtaatcgttgaatacgcaagcaaaggaaatctccgggaatatctccaggcacggagacccccaggccttgaatattgttacaaccccagtcataatcctgaggagcagctttcgtcaaaagatttggtttcttgcgcttaccaagtcgctcggggaatggaatatcttgcgtcgaaaaagtgcatccacagggacctagcggcaaggaacgttctggtgactgaagacaatgtgatgaagatcgccgacttcggcctcgcaagagacattcatcatatcgattattataaaaaaaccaccaatggtcggcttccagtaaagtggatggctcccgaggcccttttcgacagaatttatacacatcagtcggacgtgtggtcttttggtgtgctgctgtgggaaattttcaccctgggcggatcaccataccccggtgtgcctgtggaggagctcttcaagctcctaaaggagggtcatcgcatggataagccctctaattgcacaaacgagttgtacatgatgatgcgcgattgctggcacgccgtgcctagtcagagaccgacatttaaacagctcgtagaggacctagatagaatagtcgcgctaacgtccaatcaggaatatcttgacttatccatgccacttgatcagtactctcccagttttcccgacaccaggtcttctacctgtagctccggagaggatagtgtgttctcacacgagccactgccggaggaaccatgtctgcccaggcacccagcccagctggcgaatggcggtctgaagaggcggtag

SEQ ID NO: 223236 - DNA, 2010 bp, synthetic construct
  misc_feature 1..2010: note = Description of Artificial Sequence: Synthetic coding sequence
  source 1..2010: mol_type = other DNA
atggtaagctgggggaggtttatatgtctcgtggtagtgacaatggcaacgctgtcactcgcccgtccaagcttttcacttgtggaagacaccaccttagaaccagaggacgccatctcttctggggacgacgaagatgacacagacggcgcagaggacttcgtctccgaaaattccaacaacaaacgtgccccatattggactaacactgagaagatggaaaagcggcttcatgccgttccagccgctaacaccgtgaaattcaggtgcccagccggtgggaatccgatgcccactatgcggtggctgaagaatggtaaagaattcaagcaggagcataggattggtggatataaagttcgaaatcagcattggtctctcataatggaatctgtggtccccagtgacaaggggaactatacctgcgtggttgagaatgaatacggatcgatcaatcacacttatcacctggatgtggtggagcgttctcctcacaggcctatattgcaggccggtctgccggcaaatgcgtcgaccgtcgtcggcggtgatgtagaattcgtgtgtaaagtgtactctgatgcacagccccatatccagtggatcaagcacgtggagaaaaacggctctaagtacggaccagatgggctgccgtacctcaaagtgctgaaagccgctggagtgaacactacagacaaagagatcgaggttctctacatcagaaacgtgacttttgaagacgccggtgagtatacctgtcttgctggcaacagtataggaatatcctttcattcagcatggcttacagtgttgcccgctccaggcagggagaaggagattactgcgagtcctgactatcttgagatagcgatttactgcattggagtgtttctgatagcatgcatggtggtgaccgtcatcctgtgtaggatgaaaaacactaccaaaaaaccagatttttccagccagccagctgtacataaattgaccaagcgcatccctctgagaaggcaggtcagtgccgaatcatctagtagtatgaatagcaacacacccctggtaagaattaccacacgcctgtcctcaactgcagacacacccatgctcgccggtgtgagcgaatacgaactccctgaagacccgaaatgggagttcccacgtgataaacttactcttggcaaacctctgggcgagggatgttttggccaagtggtgatggcagaagccgttgggatcgacaaagataaaccgaaggaggccgtgaccgtggctgtgaagatgcttaaggatgatgccaccgagaaagatctgtccgatctggtttcggagatggaaatgatgaaaatgattgggaagcacaagaacatcatcaatctgttgggcgcatgcactcaagacggccctttatatgtgattgtcgagtacgccagtaaaggcaacctccgcgaatacctgcgcgctcggagacctccaggaatggagtactcatatgacatcaaccgggtgcctgaagagcagatgacttttaaggatctcgtaagctgtacatatcagctcgcccgaggaatggaataccttgcaagtcagaaatgtatccaccgagatctggctgctcgaaacgtgctggtcaccgaaaacaatgttatgaaaatcgctgactttggcctggcccgagatattaataacatagactactataagaagacgaccaacggaaggttacctgtgaaatggatggctcctgaggcacttttcgatagagtttatacccatcaaagtgacgtgtggtccttcggcgtcttgatgtgggaaatttttactctcggaggatcaccatatccaggcattccagtcgaagaactgtttaaactgctgaaggaaggccacaggatggataaacctgctaattgtaccaatgaactgtacatgatgatgcgcgattgctggcacgctgttccatctcagaggcccacctttaagcaactcgtggaagacctcgaccgcatctag

SEQ ID NO: 223237 - DNA, 2460 bp, synthetic construct
  misc_feature 1..2460: note = Description of Artificial Sequence: Synthetic coding sequence
  source 1..2460: mol_type = other DNA
atggtttcctgggggaggtttatatgcctggtggtagtgacaatggctactctgagcctggccaggccttccttttcactggtggaagataccacgctggagcccgaagaaccaccaaccaagtaccagatctcccagcccgaagtctatgtggctgctcccggagaaagcctggaggtgagatgcctattaaaggacgcagccgtaatctcttggactaaggacggcgtccatctgggtcctaataaccggaccgtgctcattggagaatatctacaaatcaaaggtgctacgcccagggatagcggactgtatgcttgcacagcctcaagaacagtggacagcgaaacttggtacttcatggtgaatgtgacagatgctatcagctctggtgacgacgaggatgataccgacggcgctgaagatttcgtgagtgagaatagcaataataaacgcgcaccctattggacgaatacagaaaaaatggagaaacggctccatgctgtcccagctgctaacacagtcaagttcaggtgtcccgcagggggaaatcctatgcctacgatgcgttggctcaaaaatggaaaggaattcaagcaggagcatcgtatcggaggctataaggtaagaaaccagcactggagtctgattatggaatcggtggttccttcagacaaaggaaattatacatgcgtggtggagaatgaatacggctcaattaatcacacctatcacttggatgtcgtcgagcggtcccctcatcggccaattctccaggcaggtctacctgccaatgccagtactgtggtgggaggggacgtcgagttcgtctgcaaggtttacagtgacgcccagccacatatccagtggatcaaacacgtggagaagaacggttctaagtatgggccagatgggctgccgtatctgaaggtccttaaagcagccggtgtaaatacaactgacaaggaaattgaggtcctctacataaggaatgtgacatttgaagatgctggggagtacacatgtcttgccggtaatagcataggcatatcattccatagcgcgtggctgacggtgctccccgctccagggagagaaaaggaaatcaccgcatcaccagattacctggaaatcgccatctactgtatcggagtgtttctgatagcttgcatggtagtgacagtgattctttgtcggatgaagaacacaaccaagaagcctgatttctccagccagccggctgtacacaagctgaccaagcggatacccctccgcagacaagtgagcgcggagtccagctcaagcatgaacagcaacacacctctcgtcagaatcacaacgcgcttgagtagtactgccgatactcctatgctcgcaggcgtctctgagtacgaactgcccgaagatcccaaatgggagtttccccgtgacaaattaacactcggcaaacccctgggtgagggttgtttcggccaagtggtgatggcagaagcagtcgggattgacaaagacaaacctaaggaagccgtgacagtggccgtcaaaatgcttaaggacgatgccaccgaaaaagacttgtccgacctggtgagcgaaatggaaatgatgaagatgattgggaaacacaagaatataattaatctgctaggggcttgcacgcaggacggaccactgtatgtcatagtggaatacgcttctaagggaaacctgcgggaatacctcagggcccgacgccctcctgggatggagtacagctacgatattaaccgagttcccgaggaacagatgacattcaaggacttggtgagttgcacataccagctggcgcgaggaatggaatatcttgcgtcccagaaatgcatccaccgagaccttgctgcaagaaatgtgctggtgacagagaacaatgtaatgaaaatagccgatttcggccttgccagggacataaacaatatagactactataaaaaaaccactaacggaagacttccagtaaaatggatggcgcctgaagctctgtttgatcgagtgtacacccaccagagtgacgtatggtcttttggcgttttaatgtgggaaatattcacactaggcggttccccctacccaggaatccctgtggaggagctgttcaaattactaaaagagggacacaggatggacaagccagccaactgtactaacgaactgtacatgatgatgcgcgattgctggcacgctgttccttcccaacgcccaacgttcaagcagctggtcgaagatctggacagaatcctaacactgacaaccaacgaagaatatctcgacctgagccagccattggaacagtacagcccgagctatccagatacgagatcaagttgctcatcaggcgatgactcagtatttagtccggaccccatgccctacgagccttgcctgccccagtacccccacattaatggttcggtcaaaacttag

SEQ ID NO: 223238 - DNA, 2358 bp, synthetic construct
  misc_feature 1..2358: note = Description of Artificial Sequence: Synthetic coding sequence
  source 1..2358: mol_type = other DNA
atggtctcgtggggccgattcatttgtctggttgtggtaacaatggcaactctttctctcgcccgacccagtttctctctggtggaggatactaccttggagcctgaggaaccacctactaagtatcaaataagccagcctgaagtttatgttgccgctcctggtgaaagcctcgaggtccgatgtctcctgaaggacgctgccgtgatcagctggaccaaagacggggtgcacttgggcccaaataacagaactgtacttatcggcgagtacctgcaaataaagggcgctaccccgcgagattccggcctgtacgcctgcaccgcttcaaggacggtggactccgagacatggtatttcatggttaatgtaactgatgccatttcatccggggacgatgaagatgacaccgacggagccgaagacttcgtatccgaaaattctaacaataaacgtgccccatattggactaacactgaaaaaatggaaaagcggctgcacgccgtgcccgcagccaacacagttaaattcagatgtcctgctggtggtaatccaatgcccaccatgcgatggttaaaaaatgggaaggagtttaaacaggagcatagaatcgggggatataaggtgcgcaatcaacactggtccctcatcatggaaagtgttgtgccctctgataaggggaattatacgtgtgtcgtggagaacgaatacggaagtattaaccacacctaccacctggatgtagtggagagaagtcctcacagaccgatactgcaggctggactgcccgcaaatgcgtctaccgttgtcggcggagacgtagagtttgtgtgtaaggtgtacagcgatgcccagccgcatatccagtggatcaaacacgtagagaagaatggcagcaagtatggtccagatggcctgccctacctcaaggttttaaaggccgcaggtgtgaacaccactgataaggagatagaagtcctctatattagaaacgtcaccttcgaggacgcgggagaatacacttgcctggctggaaattctataggtatttcattccattccgcgtggctcacagtgcttccagccccaggcagagagaaagagatcaccgcctctcccgattacctggaaattgctatctattgtattggggtgttcctcattgcctgtatggtcgtgactgtgattctgtgccgcatgaagaacaccacaaagaaacctgactttagttctcagcctgccgtgcacaagctgacaaaacggattcctctccggagacaggtgtccgctgagtcctcctcatcaatgaactcaaatacccctctcgtgaggattaccactagacttagttcgacggctgatacacctatgctcgctggagtatcagagtacgaactgcccgaggatcccaaatgggagtttcctagagataagctgacactgggtaaacctcttggcgaaggatgtttcggacaagtagttatggccgaggccgttggcatagacaaggacaagcccaaggaagctgtgaccgtcgctgtaaagatgctcaaggatgatgcaactgaaaaagacttgagtgacctggtcagcgaaatggagatgatgaagatgataggcaagcacaagaacatcatcaatctgctgggagcatgcacgcaagacggaccactgtacgtgatcgttgagtatgcatcgaagggtaatctgagggaatatttaagagcaagaagaccgcctggaatggaatattcctatgacatcaaccgagtgcccgaggaacagatgacattcaaggatctcgtgagctgcacctatcagctagctcggggaatggagtatttggcttcccagaagtgcattcacagggatctggccgctaggaatgtgctggttacagagaataatgttatgaagatcgcagatttcgggctggctcgggacattaataacatcgactattacaagaagacaacaaacgggagactgccagtgaagtggatggctcccgaagctctcttcgaccgtgtgtatacacaccagtcagacgtgtggagcttcggcgtgcttatgtgggaaatcttcaccctcggtggctctccgtaccccggaattcccgtggaagaactctttaagcttctgaaggagggccaccgtatggacaagcccgctaactgtaccaatgaactctacatgatgatgagggattgttggcacgccgtcccatcgcaaaggccgacctttaagcagcttgttgaggacctggaccgcatactcaccctcacaaccaatgaagagtatctggacctgtcacagccactggaaccatattctccctgttaccccgaccctagatag

SEQ ID NO: 223239 - DNA, 2115 bp, synthetic construct
  misc_feature 1..2115: note = Description of Artificial Sequence: Synthetic coding sequence
  source 1..2115: mol_type = other DNA
atggtgtcctggggcagattcatctgcttagtggttgtgaccatggccacccttagcctggccaggccctcattttccttggtggaggacaccacgctcgagcccgaaggggcaccatattggaccaacaccgagaagatggagaaaaggctccacgccgtccctgccgcaaacaccgtgaaatttcgatgccctgccggagggaacccaatgccgacaatgaggtggctgaagaacggcaaagaatttaaacaggaacaccgtattggcggttataaagttaggaaccagcactggagtctgatcatggaaagtgtggtccccagcgataaaggtaattatacctgtgtggtggaaaatgaatatgggagcatcaaccatacctaccatctggatgtggtcgagagatctccccatagaccaattcttcaggcaggcctgccagccaacgcaagcacagtggtggggggagatgtggagtttgtctgtaaggtctacagcgacgctcagccccacatccagtggataaaacacgtcgagaaaaacgggagtaaatacggccctgatggtctcccctacctaaaagtgctgaaggcagccggagtgaacaccaccgataaggagatagaagtgttgtatatccgcaacgtgacatttgaagacgctggcgagtatacatgcctagctggtaatagtatcggcatatccttccattctgcctggctaactgttctccccgctccaggaagagaaaaggaaattacggcgtcaccggattacttggaaatcgctatttactgcatcggcgtgtttctgatcgcctgcatggttgtgactgtgatcttgtgccgcatgaagaacaccacaaagaagcctgacttcagcagtcagccagcagtacacaagttgaccaagagaattcctctgaggcgccaggtttccgctgaaagctccagcagcatgaattctaacaccccactggtaaggattaccacacgactgtcatcaacagccgatacccctatgctggccggtgtgtctgagtatgagctcccggaggatcccaaatgggaatttccacgcgacaaacttacactcggtaagccccttggtgaaggttgcttcggccaggtggttatggctgaagccgtaggcattgacaaggataagccaaaggaggccgtaaccgtggcagtcaaaatgctaaaggacgacgccactgaaaaagacttaagtgaccttgtgagcgaaatggagatgatgaagatgatagggaagcacaagaatataatcaatttacttggtgcctgtactcaggatggaccgctgtacgtcatcgtggaatatgcttctaagggtaatctcagggagtacttaagggctcgtcgtccgcctgggatggaatacagttacgatatcaaccgggtgcccgaggagcagatgacattcaaggatctggtgtcctgtacctatcaactcgctaggggcatggaatacctggcctctcagaagtgtatccaccgggacttagccgcaagaaacgtgcttgtcaccgaaaataacgtcatgaagatcgccgacttcggccttgcaagagatatcaacaatatcgactattataaaaagaccactaatggcaggcttcccgtgaaatggatggctccagaggcattgttcgaccgggtatacacccaccaaagcgacgtgtggtctttcggtgttcttatgtgggaaatattcacccttgggggaagtccctaccccggtattcccgttgaggaactcttcaaactacttaaggagggacataggatggataaacctgccaattgtactaacgaactgtacatgatgatgagagattgttggcatgcagtcccgtctcaacgccctaccttcaaacagttagtggaagacctcgatagaattcttacgctgaccactaacgaggaatatctggacctcagtcagccacttgagcagtattccccctcttacccagacactcgctccagctgcagttccggagacgactccgtattctcaccagatcccatgccatacgagccttgtttgccacaatatcctcacatcaacggctctgtcaaaacatag

SEQ ID NO: 223240 - DNA, 2124 bp, synthetic construct
  misc_feature 1..2124: note = Description of Artificial Sequence: Synthetic coding sequence
  source 1..2124: mol_type = other DNA
atggtgtcttggggccgattcatctgcctggtcgtggtcaccatggcgaccttgagtttggccagaccatccttctcactggtcgaggatacgactcttgaaccggaagatgccatttcatctggggacgacgaggatgacaccgatggcgcagaagatttcgtgtcagaaaactccaataataagagggccccttattggactaataccgaaaaaatggaaaaacgcctacatgcagtgccagccgcaaacacagtgaaatttaggtgcccagctggcggaaatccgatgcccacgatgcgttggcttaagaacgggaaggaattcaaacaagaacacagaatcgggggttacaaagtgaggaatcagcattggagcttgataatggagtccgtagtgcctagtgacaaggggaattacacttgtgtagtagagaacgaatacggctctattaaccacacctatcacctcgatgtagtggaaagaagtcctcatcggccaattctgcaggccggtttgcctgcaaatgccagtacagtcgtcggaggcgatgtggagttcgtgtgcaaagtgtactctgatgcacagccacatattcagtggattaagcacgtggaaaaaaatggcagcaagtatggccctgatggactgccctaccttaaggtgctgaaggccgctggggtgaacactacagataaggaaatcgaagtgctctacatcagaaacgtcacttttgaggacgccggagagtacacatgcctggccggaaactccatcggcatctctttccacagcgcttggcttaccgtgctccctgccccaggacgggagaaggagatcactgctagtcccgattatctagagatcgctatctactgcataggggtgttccttatcgcatgcatggttgtgacagtgatactgtgccgcatgaagaatactaccaaaaagccggatttcagtagccaaccggcagtgcacaaactgacaaagaggattccgctgagacggcaggtgacagtgtctgctgagtccagttcctctatgaatagtaatacacctcttgttagaatcactaccaggctgtccagtaccgccgatacccccatgttggccggagtttctgagtatgaactgcctgaggaccccaagtgggagtttccaagggacaagctgaccctaggcaaacccctcggtgagggctgctttggtcaggtcgtcatggcggaagctgtaggtatagataaagataagccgaaagaggctgtgaccgttgccgtgaaaatgttgaaagacgacgcgacggagaaggacctgagcgacttagtgtctgaaatggagatgatgaagatgatcggaaagcataaaaacattatcaatctgttgggagcttgtacccaggacggccctctgtacgttattgtggaatacgcaagcaaaggcaacttaagggaatacctgcgggctcggaggccgcctggaatggagtactcatacgatatcaaccgcgtgccagaggagcagatgacctttaaagacctcgtttcttgtacttaccagttggcacggggaatggagtacttagcaagtcagaaatgtatacacagagatctggccgcacggaatgtgcttgttactgagaacaatgtgatgaaaatagctgactttggtctggctcgagacatcaataacatcgactactataaaaagaccacgaatggacgactgcctgtgaaatggatggccccagaggcattgttcgacagagtctacacccatcaatccgacgtgtggtccttcggggtgctcatgtgggagatctttactcttggtggatccccatatccagggattccagtcgaggaactctttaaactcttaaaggagggccatagaatggacaagcctgcaaactgcacaaatgaactgtatatgatgatgagggattgctggcacgcagtgccttcacagcgtcccacatttaaacagctggtcgaggatctggataggattcttacactcactaccaacgaagaagaaaaaaaggtctcaggtgccgtggactgccataaacccccatgtaatccatcccacctgccgtgcgtgctcgctgtcgaccagtag

SEQ ID NO: 223241 - DNA, 2466 bp, synthetic construct
  misc_feature 1..2466: note = Description of Artificial Sequence: Synthetic coding sequence
  source 1..2466: mol_type = other DNA
atggtttcgtggggtaggttcatctgtctggtggtggttaccatggccacactcagcctggccaggccttccttctccttggtagaagataccactcttgagcctgaagagccacccaccaagtatcagatttcacagccggaagtttatgtggcagcgccaggggaaagccttgaggtacgttgcttgcttaaagacgccgctgttatctcctggacgaaggacggcgtacacctcggacccaacaataggacggtactgatcggggagtatctgcaaattaagggagcgactccaagggacagcgggctctatgcgtgtacagctagcagaactgtggactccgaaacttggtacttcatggtgaacgtgactgacgcgattagttctggagatgacgaggacgataccgatggtgcagaagacttcgtgtcagagaattctaataataagagagccccatactggaccaacacagaaaaaatggagaagagattgcatgccgtcccagcagcaaacaccgttaagtttagatgcccagcaggcggaaacccaatgcccacgatgaggtggctaaaaaatggcaaggagtttaaacaggaacataggataggcggatacaaggtgcgcaatcagcattggagccttatcatggagtctgttgtaccatctgacaaaggcaactacacttgcgtggttgagaatgaatatggatcaatcaaccacacctatcatctggacgtcgtggaaaggtcccctcatcgacctattctgcaggccggtctccccgctaatgctagtactgtggtaggtggcgacgttgaatttgtgtgtaaagtctactcagatgctcagcctcatatccagtggattaaacacgttgaaaagaacggatcaaagtacgggccagacgggctcccgtatctcaaggtgttgaaggccgcaggagtgaacacaacagacaaagaaattgaggtactttacattagaaacgtcacatttgaggatgctggggaatacacatgtcttgccggaaatagcatcggtatcagctttcactctgcatggctcaccgtgctgccggcaccagggagggagaaggaaatcactgccagccccgactacctggagatcgccatatactgtatcggggtatttctgatagcctgcatggtggtgactgtgatcttatgtagaatgaagaacacaacgaagaagccagatttttctagccagcctgcagtccataaattaacgaagcgtattcctcttcgcagacaagtcaccgtgagcgcagagagttcatcttcgatgaactctaatacgcctctggtccgcataacaacccggcttagcagcacagcggacacgcccatgctagccggagtgagcgagtacgagttgccggaagatcccaaatgggagtttcccagggacaagttgaccctggggaagcctctaggagagggatgttttggccaggtggtaatggctgaggcagttggcattgacaaagacaagcccaaagaggccgtcaccgtggctgtaaagatgcttaaagatgacgctacagagaaagatttgtcagacctggtgagcgagatggagatgatgaagatgatcggcaagcataaaaatatcattaacctactaggggcttgcacccaggatgggccactgtacgtgatcgtggaatacgcgtctaagggaaacctgcgggagtacctccgtgcacgcaggccaccgggtatggagtattcttatgatataaaccgggtgcccgaagaacagatgacttttaaggacctcgtttcttgtacatatcagctggccagaggaatggaatacctggcaagtcagaagtgtatccatagggacctcgccgctcggaacgtcttggtgacagagaacaatgtgatgaaaatagccgatttcgggctcgcacgagatatcaacaatatcgactactacaaaaagacaactaacgggaggctgcctgtgaagtggatggccccagaagcactttttgatagggtgtatacacatcagagcgatgtctggtcattcggcgtactcatgtgggaaatttttactctgggaggcagcccataccctgggattccagtcgaggagcttttcaaacttctgaaggagggccatcggatggacaagccggctaactgcaccaatgaattatacatgatgatgagggattgctggcacgcagttccatcacaaagacccacttttaagcaactcgttgaggatctggataggatcctcaccctcactactaacgaagagtacttggacttatcccagcccctggaacaatatagcccttcctaccccgatactcggagttcctgtagcagtggggatgattcagttttttccccagatcccatgccctatgagccatgcttaccacaatacccccacatcaatggcagcgtgaaaacctag

SEQ ID NO: 223242 - DNA, 765 bp, synthetic construct
  misc_feature 1..765: note = Description of Artificial Sequence: Synthetic coding sequence
  source 1..765: mol_type = other DNA
atggtgagctgggggcgatttatttgcctggtggtcgtgacaatggccacactcagccttgccagaccgtctttctctctggtggaggacaccaccctcgaaccagaagaaccccctactaagtaccagatatctcagcccgaggtgtatgtggcggctcccggtgaaagcctcgaagtcagatgtctactgaaggacgccgctgtgatttcttggacaaaggatggtgtccatctgggacctaataatcggaccgtgttaatcggggagtacctccagatcaagggggctacaccccgtgactctggactctacgcctgcactgcaagtcgcaccgttgactctgaaacatggtattttatggtcaatgtaaccgacgccatttcatccggcgatgacgaggatgacaccgatggggcagaagacttcgtgtcagaaaatagtaataataagagagcgccatattggactaacactgagaaaatggagaagcgcctgcacgccgtcccagctgcaaatacagtaaaatttaggtgccccgcagggggaaaccccatgccaacgatgcgctggttaaagaatggaaaggaattcaaacaggagcacagaattggagggtataaagtgagaaatcagcattggtcactgatcatggagagtgtggtgcccagtgacaaggggaactatacttgcgtcgtggaaaacgaatacggcagcattaatcacacctaccaccttgacgtggtcggaagccaaggactctag

SEQ ID NO: 223243 - DNA, 2043 bp, synthetic construct
  misc_feature 1..2043: note = Description of Artificial Sequence: Synthetic coding sequence
  source 1..2043: mol_type = other DNA
atggtttcgtgggggaggtttatctgtctagtggttgttacgatggctacacttagtttggcgcgaccttctttctccctagtcgaggacacaacgctggaaccggaggatgcaataagcagtggtgacgacgaggacgacacagacggagcggaggacttcgtcagtgaaaattccaataataagcgggcaccttattggactaacaccgaaaaaatggaaaagcggctgcacgccgttcccgctgccaacactgtcaagttccgctgtcctgccggaggtaatccaatgcctactatgcggtggcttaagaatggcaaggagttcaagcaggagcatcggattgggggttacaaggtaagaaaccagcattggtccctcataatggagagcgtggtcccctcagacaaaggcaattacacatgtgtggtcgagaacgagtacggttctattaaccacacttaccacttggacgtggtggagcgcagcccacaccggccaattttacaagctggactacccgctaatgccagtactgtcgtgggcggtgacgtggagttcgtgtgtaaggtgtacagcgatgcccagcctcatatccagtggatcaagcacgttgagaagaatgggagtaagtacggcccagacgggttgccttatttgaaggtcttaaagcactctggaataaactcgtccaatgctgaagtgttagctctgttcaacgtcaccgaagccgatgccggagaatatatttgcaaggtctctaactacatcggtcaggcgaatcagtctgcgtggcttacagtccttccaaagcaacaggcccctggtcgtgagaaggagattaccgcctcaccagactatctggagatcgctatctactgtatcggcgtctttctgatcgcctgcatggtagtgactgtcatcctgtgtaggatgaagaacactaccaagaagcctgacttcagctcacagcctgccgtgcacaagttgactaaacggatacccctgcgaaggcaggttactgtaagtgccgaatcctcttcatctatgaactccaatacacccctcgtccgtattaccacacggctcagctccactgccgatacacccatgctggccggagtctccgagtacgagctgccagaggatcccaagtgggaattccccagggacaaattgaccctgggcaaacccctgggagaaggatgcttcggccaggtggtaatggcagaggccgtcggtatcgacaaggataagccaaaggaggcagtgactgtagcagtgaagatgctgaaagacgatgctacagaaaaagatctgtctgaccttgtgagcgaaatggagatgatgaaaatgatcgggaagcataagaacataattaaccttctgggagcctgtacacaggatggcccactctatgtgatcgtcgagtatgcttctaaggggaatctaagggaatacctgcgtgctcgaaggcctcctggtatggagtactcttacgacatcaaccgtgttccagaagaacagatgacctttaaagacctggtctcctgtacttaccagctggcccgaggtatggagtacttggcctcccagaagtgcatccaccgggatctggctgccagaaatgtactggttaccgaaaacaacgtgatgaaaattgcagattttggactggcccgagacataaacaacatcgactactataaaaagacaacgaacggacgcctccctgtgaaatggatggcaccagaggctctcttcgaccgcgtgtacacccatcaatcagatgtgtggtcattcggagtccttatgtgggagattttcactttgggcggatctccatacccgggaattcctgtcgaggaactgttcaagttgctgaaagagggccatagaatggataagcctgcaaattgcaccaatgaactctatatgatgatgcgggactgctggcacgctgtgccgtctcagagaccgactttcaaacagctcgtcgaggacctcgatcgcatcctcaccctcaccacaaacgaaatctag

SEQ ID NO: 223244 - DNA, 2310 bp, synthetic construct
  misc_feature 1..2310: note = Description of Artificial Sequence: Synthetic coding sequence
  source 1..2310: mol_type = other DNA
atggtgtcgtgggggcgatttatttgtctggttgtcgtgacgatggccacactctctcttgcacggccatcatttagtttggtggaagacactactctggaacctgaagagccgcctaccaagtatcagattagccaaccagaagtgtatgtggctgccccaggtgaatccctggaagtacgatgtctgctgaaggatgctgccgtgatcagctggactaaagatggggtccatctggggcctaacaacaggaccgtcctgatcggcgagtatctgcagattaagggggctactccaagagatagtggcttgtacgcatgtaccgcctctcggacggtcgatagcgaaacatggtacttcatggtcaacgtgacggacgcaatctccagcggtgacgatgaagatgataccgacggagctgaagactttgtgtccgagaactctaataacaagcgagcaccctattggacaaatacggaaaagatggaaaaacgattacacgccgtgccagctgccaacaccgtgaagtttcgatgtcctgccggaggcaatccgatgcctacaatgagatggctgaaaaacggcaaagagttcaagcaggagcacagaatcggcggatacaaggttaggaatcagcattggtcattgataatggagagcgtggtcccgtcagacaagggcaattacacttgtgttgtggagaatgaatatgggtccatcaaccacacttaccacctagacgttgtggaaaggtcaccacatagacctattctccaggccggactcccagccaatgccagcaccgtcgtcggcggagatgtggagtttgtgtgtaaagtgtacagcgacgcacagcctcacattcagtggattaagcacgtggagaaaaatggatctaaatacggccctgatggtctcccttacctgaaagtgctgaagcactcggggattaattccagcaatgcagaagttctggccctttttaatgtgaccgaggccgacgccggtgagtatatttgtaaggtatctaattatataggacaggcaaatcaatccgcatggctgaccgtcctgcccaagcagcaggcaccgggtcgagaaaaggagataacagccagccccgattacctggaaattgccatatattgcatcggcgtgttcctgattgcctgcatggtcgtcaccgtaattttatgccgcatgaagaacacgacaaaaaagccagactttagttcccaaccagccgtccataaactgacaaagaggattccactgcgacgacaagtgactgtaagcgcagaatctagcagcagcatgaatagcaatactcccctggtacgcatcacaactagattatccagcacggcagacacgcccatgctggccggagtgtctgagtacgaactccccgaagatccaaagtgggagtttcctcgggacaagctcacactcggcaaaccactgggcgaagggtgttttggtcaggtggttatggccgaagctgtgggcattgacaaggacaaaccgaaagaggctgtaacggtcgctgttaagatgctgaaagatgacgcaacagagaaggatctatccgacctggtcagcgagatggaaatgatgaagatgattgggaagcacaagaacatcataaatctcctaggcgcatgtacacaggatggcccactatacgtgattgtcgagtacgcttccaagggcaatttgagggaatatctgagggcaagacggccaccaggaatggaatacagctatgacatcaatcgagtcccagaggagcaaatgacgtttaaggatctggtgtcctgtacataccaacttgctcgcggtatggagtatctggcctcccaaaagtgtatccatcgggatctggctgctcgcaatgtgctggtgactgaaaataacgtgatgaaaatcgctgatttcggcctcgcccgtgatattaataatattgattattacaagaaaactaccaatgggagactgccagtgaagtggatggcacctgaggcattgttcgatagagtttatacccatcagagtgacgtgtggtcgttcggggttctaatgtgggaaatattcacgctaggaggaagcccctacccaggaatacccgtggaagagctcttcaagctcctgaaggaaggccatagaatggataaacctgcgaattgcaccaatgagctttacatgatgatgcgggactgctggcacgccgtgccctcccagcggccaacatttaagcagctcgttgaagacctagacagaattttgactctgacaactaacgagatttag

SEQ ID NO: 223245 - DNA, 2307 bp, synthetic construct
  misc_feature 1..2307: note = Description of Artificial Sequence: Synthetic coding sequence
  source 1..2307: mol_type = other DNA
atggtatcatggggacgttttatctgtctcgtcgttgtgacaatggccacgcttagcttagcacgaccctccttctcactcgtggaggatacaactcttgaaccagaggagccccctaccaagtaccagatatcccaacccgaggtgtatgtagctgctcctggtgaatccctggaggtgcgatgtctgctgaaggatgctgctgtaatatcctggaccaaggacggtgtgcacttaggtccgaataatcgtaccgttctgatcggcgaatacttgcagatcaagggtgccacgccgcgtgactctggactgtatgcatgcacagcttctcgcacagtcgattccgaaacctggtattttatggtgaatgtcactgatgctataagctccggcgatgatgaggatgataccgacggagctgaggattttgtttccgagaattctaataacaagcgggcaccgtactggaccaatacggaaaagatggaaaaacgtctgcacgccgtccctgcagcgaacactgtcaaatttcggtgcccagccggaggaaatcctatgcccacaatgcggtggctaaaaaacggcaaggagttcaaacaggagcacagaatcgggggatacaaagtccggaaccaacattggagcctgatcatggagtccgtcgtgccttccgacaaggggaactacacctgcgtcgtcgaaaacgaatacgggtccatcaaccatacataccacctggatgtggtggagcggagcccacataggcctatccttcaagccggtttacccgcaaatgcctctacagtggttggaggcgatgtggagttcgtgtgtaaagtttattctgacgcacaaccacacattcagtggatcaagcacgtggagaagaacggttccaaatatggacccgacgggctcccgtatttgaaagtgttgaagcattcgggaatcaattctagcaacgccgaggttctggcgctgttcaacgtgaccgaagcagatgctggagagtatatctgtaaggtttccaactacatcggccaggctaaccagagcgcatggcttacagttttgcctaaacagcaagcaccaggcagagaaaaagagattaccgctagtcctgattacctggaaatcgctatctactgtataggcgttttcctgatcgcttgtatggtcgttaccgttatcctgtgccggatgaagaacaccacgaagaagccagacttttctagccagcccgctgtgcacaagttaacaaaaagaattcctctcagacgccaggttactgtgtccgctgagtcatcatcctcaatgaatagcaataccccgctcgtacggatcaccacccgactctcctccaccgcagatactcctatgctcgcgggagtctccgaatatgaactgcccgaggatccaaaatgggagtttcccagggacaaacttaccctgggaaagccccttggcgaggggtgcttcgggcaggtcgttatggctgaggctgtgggaattgacaaggacaagcccaaagaggccgttaccgtcgccgtgaagatgcttaaggatgatgctactgagaaagatctttccgatctagtcagcgagatggaaatgatgaagatgattgggaagcataagaatatcatcaacctgttgggcgcttgtactcaagatggcccactctatgtgatcgtggagtacgcatctaagggaaacctgagggagtaccttcgcgctcgcagacctccaggaatggagtactcgtacgatattaacagggtgcccgaagagcagatgacatttaaagacctggtctcctgtacttaccaactcgccaggggcatggagtatctggcatcccaaaaatgcatccacagggatctcgcagcgcgaaacgtgttggtgaccgagaataacgtgatgaagatcgctgattttgggctcgctcgcgacattaacaatatagactactacaaaaagaccaccaatggtcgactgcctgtgaaatggatggcccctgaggccctgttcgacagggtgtacactcaccagagcgatgtatggtcgtttggagtcctgatgtgggagattttcaccttgggagggtccccctatcccggaatccccgttgaagagctcttcaagctgctcaaagagggccaccgcatggacaagccagcaaactgtaccaatgaactttacatgatgatgcgggactgttggcacgctgtgccctctcagagacccactttcaagcaacttgtggaggatctggatcggatccttactcttacaacaaacgaatag

SEQ ID NO: 223246 - DNA, 2124 bp, synthetic construct
  misc_feature 1..2124: note = Description of Artificial Sequence: Synthetic coding sequence
  source 1..2124: mol_type = other DNA
atggtcagttggggtcgatttatctgcctcgttgtcgtcacgatggccacactgtcccttgcccgacccagttttagtctagtggaagatactacactggaaccagaaggtgctccttattggactaatacagaaaagatggagaaacgcctgcacgctgtgcccgcagctaatacagttaaatttcgatgtcccgctggtgggaaccccatgccgaccatgaggtggcttaagaatggcaaggagtttaaacaggaacatcgaatcgggggatacaaggttaggaaccagcactggtccttgattatggagtccgtcgtgccctcggacaaaggaaactatacctgcgtagtggaaaatgagtacggctccataaatcatacttatcacctggacgtggtggagcggagcccgcaccgtcccatcttgcaggctgggcttccggctaacgcgtcaacggtcgtgggcggagacgtggagtttgtgtgcaaagtgtacagtgatgcacagcctcatatacagtggattaagcacgtggaaaagaatggcagcaagtatggcccagacggcctgccctatctaaaggttctgaaacatagtggcatcaattcgagcaacgcagaggtcttagccctctttaacgtcaccgaagcggatgccggtgagtatatctgcaaggtctcaaactacattggtcaggccaaccagtccgcctggctgaccgtgttaccaaagcagcaagcacccggacgggaaaaagagatcacagcctcacccgactacctggaaattgccatctactgtataggagtgttcctcatcgcctgcatggtggtgaccgtcatcctttgtcgaatgaagaacaccactaagaaacccgatttttcctcccaacccgctgttcacaaactcaccaagcgcatccctctccgaaggcaagtcaccgtctctgcggagagcagctcttccatgaacagtaacacgccactagtgagaatcaccaccagactgagtagcaccgccgacacaccaatgctcgccggagtctcagaatacgagctgcccgaagatcctaagtgggagtttccaagggacaagctcaccctgggcaaacccttgggagagggctgcttcggacaagtggtgatggctgaggccgtcggcattgataaagacaaacctaaagaagcagtcacagtggccgtgaagatgctgaaagacgatgccacggagaaggatctgtccgatcttgtctccgaaatggaaatgatgaagatgattggcaaacacaaaaatatcattaaccttctcggcgcttgtacacaggacgggcctctctatgtgatcgtagagtacgcttcaaagggcaatctgcgtgaatacctacgcgctaggcggccacctgggatggagtattcatatgatatcaacagggtgccagaggagcagatgacatttaaggatctggtgagctgcacctatcagctcgccagggggatggagtatttggcatctcagaagtgtattcatcgggacctggctgccaggaacgtactggtaacagaaaacaacgttatgaaaatagccgatttcggtctggcgagggatatcaacaacatagactattacaaaaaaaccacgaacggccgactgcctgtgaaatggatggctcccgaggccctgtttgaccgcgtctatacacaccagtccgacgtgtggtctttcggcgtactcatgtgggaaatctttaccctgggcggaagcccatatcctgggatacccgtcgaggagcttttcaaactgctgaaagaggggcaccgcatggacaagccagcaaattgcacaaacgaactatacatgatgatgagagactgttggcacgctgtcccctcccagcggccaaccttcaaacaactggtagaggatcttgacaggatcctcactctgacgacaaatgaggagtatttggacctttcccaaccgctggagcagtattcacctagctatcctgacacaagaagttcttgtagctctggggacgacagcgttttttcccctgatcctatgccgtacgaaccatgcctgccacagtacccccatatcaacggctcagtcaagacctag

SEQ ID NO: 223247 - DNA, 2118 bp, synthetic construct
  misc_feature 1..2118: note = Description of Artificial Sequence: Synthetic coding sequence
  source 1..2118: mol_type = other DNA
atggtcagctggggaaggttcatttgcctggtcgtggtgacgatggcgacactgagcctggcaaggcccagcttttctctggtggaagatacaacactggagcctgaggagccacctactaaatatcaaatttctcagcctgaggtatacgttgccgctcctggcgagagcctcgaggtacgctgcttactgaaagatgctgctgtgatctcctggactaaagacggagtacacctgggtcctaacaatcgtactgtgcttatcggcgaatacctgcaaatcaaaggagctacacctcgggattccgggctctatgcttgcactgcgagcagaaccgtggattccgagacatggtacttcatggtcaatgtaaccgacgctatttcatcaggggatgacgaggacgacaccgatggggctgaggatttcgtctcagagaattccaacaataagcgagcgccttactggactaataccgagaagatggaaaaacggctgcacgcagtgccagctgccaatactgtgaaatttcgatgcccagcagggggaaaccctatgccaacaatgcgttggctgaagaacggaaaggagttcaagcaggagcatcgcattgggggttacaaggttcggaatcaacactggtcattaataatggaaagcgtggtgccctccgacaaagggaactatacctgcgtagtggaaaatgagtacgggtccatcaaccacacttatcacctggacgttgtcgaaaggtcccctcaccgcccaatcttgcaagcgggattgcctgcaaacgcttccaccgtggttggcggagacgtagagtttgtctgtaaggtctattcagacgcccagccacatattcagtggatcaagcatgtggaaaagaatggtagcaaatacggtcctgacggactgccctacctgaaagtgctgaaagtgagcgccgagagttcttcaagcatgaactctaatacacctctggtgcggataacgacccgcctgtcctcgaccgctgatacacccatgcttgccggtgtgtctgagtacgaactgcccgaagaccctaaatgggagttccccagggacaaactgacgctggggaaaccattgggcgaggggtgtttcggtcaagtggtgatggcggaggccgtcgggattgataaagacaaaccaaaggaagcagtcaccgtcgcggtgaaaatgcttaaggacgatgcgacagagaaggacctgtctgatcttgtctcagagatggagatgatgaagatgattgggaaacacaaaaatatcattaacttgctgggggcttgcacccaggacggtcctctgtacgtcatcgttgaatacgcatctaaaggaaacttaagagagtacctgagggcccgaaggccccctggcatggaatatagttacgatatcaatagggtgcccgaggaacagatgacttttaaagacctcgttagctgcacctatcagctggctagggggatggagtacctcgcctctcagaagtgtattcatcgagacctggccgcacggaacgtgcttgtcacagagaataacgtaatgaaaattgctgacttcggtctggccagagatattaacaatatagactattacaagaagacaacaaatggcagactgccggtcaaatggatggcaccagaggcgttgttcgacagggtttatacacaccagagtgacgtctggtcgtttggggtcctgatgtgggagatctttacactcggcggatcaccttatcctggtatacctgtagaagagttgttcaaactgctgaaagagggacatcggatggacaagccggcaaattgtactaacgagctctatatgatgatgagagattgctggcacgccgtgccgtctcagaggcctacgttcaagcagctggtggaagacctggatcgcattttaacgctgacaaccaacgaggaatatctcgatctgagccagcctcttgagcagtattctccctcctaccccgatacaaggagttcgtgttcttccggagacgacagcgtgttttcccccgaccctatgccatacgagccatgcctcccacagtacccccacatcaacggttccgtgaaaacctag

SEQ ID NO: 223248 - DNA, 2130 bp, synthetic construct
  misc_feature 1..2130: note = Description of Artificial Sequence: Synthetic coding sequence
  source 1..2130: mol_type = other DNA
atggtgtcttggggcaggtttatttgcctcgtggtcgtgacgatggccactctatctcttgcgaggccctctttctccctcgttgaggatacaacactggagccagaggaaccaccgaccaagtaccagatttcccagcctgaagtttatgtggcggcacctggggaatccctggaagtgcgatgtcttttgaaggacgccgcagttattagctggaccaaagatggagtgcacctggggcctaataatcggactgtactcattggcgagtacctgcagatcaaaggagctactcccagagatagtggcctgtatgcgtgcactgccagccggaccgtggactccgaaacctggtacttcatggtgaatgttacggatgcaatctcttcaggagatgatgaagatgatactgatggggctgaagactttgtgagcgaaaattctaataacaagcgggcaccctactggaccaatactgagaagatggaaaaacgactgcacgccgtgccggctgcaaatacagttaagtttagatgtccggctggaggcaatcccatgcccactatgaggtggctgaagaacggaaaggagttcaagcaggaacacagaattggcggttataaggtgagaaatcagcactggtcactgatcatggagagtgtggttccatctgacaagggaaactatacttgtgttgtggaaaatgagtacggctctataaatcatacctaccatctcgacgtggtcgcacctggacgcgagaaagagattacagccagcccagattacctggagatcgcaatctactgtattggcgtttttctgattgcctgtatggtcgtgacggtgattctgtgtcggatgaagaatactaccaagaaacctgattttagctctcagcctgctgttcacaagctgactaaaaggatcccccttcggaggcaggtgacggttagcgccgaatcctcaagctccatgaactctaatactccactcgtgcggattacaacccgactttcatcgactgctgatacacctatgctggctggggtgagcgaatacgagttgcctgaagaccccaagtgggagtttcctagagataagctgacactgggcaagccgctgggggagggttgttttgggcaagtcgttatggccgaagccgtcggtatcgacaaagacaagcccaaagaggcagtgacagtggccgtgaagatgttgaaagatgatgccaccgagaaagacctttcggacctggtttctgagatggaaatgatgaagatgatcggcaaacacaagaacataattaatctgctcggcgcatgcacacaggacgggccactctatgtaattgtcgagtatgccagcaaaggtaatcttcgagaatatctgagggctaggcgccctcctgggatggaatattcttatgatatcaacagggttccagaggagcagatgactttcaaggaccttgttagttgtacataccagctggcccgaggcatggaatatctcgcaagccagaagtgcattcacagagacctcgccgctcgaaacgtgctggtaacagaaaataatgtgatgaagatagcagattttggacttgcgagggacattaataatatagattactataagaagaccacgaacggaaggttacccgtgaaatggatggcccctgaggctctgttcgaccgcgtgtacacacatcagtctgatgtatggagctttggagttctaatgtgggaaattttcacattgggcggatctccatatcctgggattcccgtcgaagagctattcaaactcctgaaagaagggcaccggatggataagcctgccaattgtacaaacgaactctacatgatgatgagggactgctggcatgctgtgccttctcagaggccgacttttaaacagctggtagaagatcttgaccgcatcttaacactcacaacaaatgaagagtaccttgacctctcccagcccttagaacaatattctcccagttacccagatacaagatcctcctgtagcagcggtgatgacagcgtgttttctcctgatcctatgccctatgagccttgcctacctcagtaccctcatataaacggatccgttaagacatag

SEQ ID NO: 223249 - DNA, 2469 bp, synthetic construct
  misc_feature 1..2469: note = Description of Artificial Sequence: Synthetic coding sequence
  source 1..2469: mol_type = other DNA
atggtcagctgggggcgatttatttgcttagttgtggtcactatggccacactatctttagctcggccttcctttagcctcgttgaagataccacattagaacccgaggagccccctaccaaatatcaaattagtcagcctgaggtctatgtcgcagcccctggtgaatcactagaggtacggtgtctgctgaaggatgcagccgtcatcagctggacaaaggacggagttcacttgggcccaaacaacagaactgtcctgatcggcgaatacctccagattaaaggagcaactcctagggactcggggctgtacgcctgtacagcatctaggaccgttgatagtgagacatggtacttcatggtcaacgttacagacgcaatctcgtctggcgatgatgaagatgatactgacggcgcagaggatttcgtgtccgagaattcaaataacaagcgagcaccatactggaccaataccgagaaaatggagaagcggctgcacgcagttccggcagcaaacactgtcaagttccggtgtccagccggaggcaaccctatgccaacgatgcgctggctgaagaatgggaaagaatttaaacaggagcatcgaattgggggatacaaagtccgtaatcagcactggtcgctcataatggaatccgtggtccccagtgataagggtaactacacatgtgtggtcgagaacgagtacggctccatcaaccatacgtatcatctcgatgtggtcgaaaggagccctcaccgcccaatcctccaggccggattgcctgcgaatgcttcgaccgtggttggtggggatgttgaattcgtctgtaaagtttactcagatgcccagccgcatattcagtggatcaaacacgtcgagaaaaacggcagcaagtacggccctgatgggctcccttatctgaaagtgctgaaggtgactaaggcggctggggtcaacacgacggataaagagatcgaggtgctgtacatccggaatgtgaccttcgaagacgccggtgagtatacatgtttggccggaaattctatagggatctcattccactcagcatggctgactgttctcccggctccaggtagggagaaggaaataactgcatccccagactacttagagatcgctatctactgtattggcgtgttcctaattgcttgtatggtcgtgacagtaattctgtgtaggatgaagaacaccaccaagaaacctgacttcagttcccagcctgccgtccacaagctgactaagagaattcctctcagaagacaggtcagcgctgagagcagtagcagcatgaactccaatacgcccctggtacgtatcaccactagactgtcttccacggcagatacccccatgctcgccggtgtgtccgaatatgagctgccagaggatccgaagtgggaatttccaagagacaaactaacccttggaaagcctctcggtgagggttgcttcggtcaggtggttatggctgaggccgtcgggatagacaaggacaagcctaaggaagctgtgaccgtggccgtgaagatgctgaaggatgacgctacagaaaaggatctctccgatctggttagcgagatggaaatgatgaaaatgatcggtaagcataagaatataattaacctgctgggcgcatgcacacaagacggcccactgtacgtaatcgtcgaatacgcctccaaggggaatcttagagaatacttacgggcacgacggcctccaggcatggagtactcgtatgatattaaccgcgttcctgaagaacagatgaccttcaaagacctcgtgagctgtacctatcagcttgcacgcggtatggaatatttggcgagccagaaatgtatacaccgggatcttgcagcccgaaatgtgctggtgacggaaaacaacgtcatgaaaatcgccgactttgggctggccagagatatcaataacatcgattactataagaagaccactaatggtaggctgccagttaagtggatggcccctgaggcacttttcgatcgggtgtacacccatcagtctgatgtatggtcttttggcgtgttaatgtgggagatctttactctgggaggttctccttaccccggaattccggtagaagagctattcaaactcctcaaggaaggccatcgtatggacaaacctgccaactgtaccaacgaactgtacatgatgatgcgggactgctggcacgccgtgccaagccagcgtccaacgttcaaacagttagtggaagacctagataggattctgacactgaccaccaacgaagaatacttagacctgtcacaacccttagagcagtatagtccatcttacccagataccagatcaagttgctcctccggagatgatagcgtgttctctcctgaccctatgccctacgaaccatgccttccgcaataccctcatatcaacggcagcgtgaagacttag

SEQ ID NO: 223250 - DNA, 2469 bp, synthetic construct
  misc_feature 1..2469: note = Description of Artificial Sequence: Synthetic coding sequence
  source 1..2469: mol_type = other DNA
atggtctcatggggtcggtttatctgtcttgttgtggtcactatggcaaccctctctctggccaggccctctttttcactcgtggaagacacaacccttgaacctgaggaaccacccactaaataccaaatctcacagcctgaggtctatgtggccgctcccggagagagcctggaggtgagatgtctgctgaaagacgcggcagtgatctcatggacgaaagacggggttcacttgggaccaaataatagaacagtgctgatcggggaatacctgcagatcaaaggcgcaactcctcgcgatagcggcctttatgcctgcaccgcgagtcgtacagtggattcagaaacctggtactttatggtcaacgtaacagacgcgatctctagtggagacgacgaggacgacacagacggcgctgaggacttcgtgagcgaaaacagcaataacaaaagagcgccatactggaccaataccgagaagatggaaaagcggctccatgcagtgccagcagctaacacagtgaaatttaggtgccccgctgggggaaatcctatgcctactatgaggtggctaaagaatggaaaggagtttaaacaggagcaccggatcggcggatacaaagtgcgtaaccagcattggtctcttatcatggaaagcgttgtgccctcggacaaaggtaactatacttgtgtcgttgagaacgagtatgggagcataaaccacacctatcacttagatgtcgttgagaggtcgccccaccgacccattctccaagccggtctgcccgcaaacgcgtctaccgtagttggcggagatgttgaattcgtttgtaaggtgtactcggatgctcagccacacattcagtggattaagcatgtggagaaaaacggaagcaagtacgggccagacggtctcccttatctcaaggttctcaaacattctggaatcaacagttcaaacgctgaggtactcgcactgttcaacgttactgaagctgacgcaggtgagtatatctgtaaagtgtctaattacattggtcaggccaatcagagtgcatggctgaccgtcctgcccaaacagcaggccccaggcagagagaaggaaatcaccgcatcccctgactacttggagatcgctatctactgcatcggagtgtttttgattgcctgcatggtagtgactgtgatcctgtgcagaatgaagaatacaacaaagaagcccgacttttcatctcagcccgcagtgcataaactaaccaagcgaatacccctccgcaggcaggtcaccgtgtccgctgaatcttctagttctatgaactcaaacactcctctggtcaggattacaactcggctctcctccaccgccgacacacccatgctcgccggagtttcggagtacgaacttcccgaggatccaaagtgggaatttcccagggataagttaacgctcgggaagcctctgggagagggctgcttcgggcaagtggtaatggcggaagcggtgggaattgacaaagataagccaaaagaagctgtgacagtggcagtgaaaatgctgaaagacgacgctactgaaaaagatttatctgatctcgtcagcgagatggagatgatgaaaatgatcggcaaacataagaatattatcaatctccttggggcttgtactcaagatgggccactctacgtgattgtggagtacgcaagcaaggggaatctgagggagtaccttcgcgcacggagaccaccgggtatggaatatagctatgacataaatcgcgtaccagaggagcaaatgactttcaaagatctggtatcctgtacttatcagctcgcgcgaggaatggaatacttggcatcccagaagtgcatacacagggacctcgccgcacgcaacgtcctcgtgacggaaaacaacgtaatgaaaattgccgacttcggcctagccagggatatcaacaatattgattattacaagaagaccaccaatgggaggctacccgtgaagtggatggcgcctgaggcgctgttcgatcgcgtgtatacccaccaatcggacgtttggtctttcggcgtgttaatgtgggagattttcacattaggtggctcaccttatccaggtatccctgtggaggagctgtttaagctgctgaaggaagggcatcggatggacaagcccgctaattgtacaaacgagctgtatatgatgatgcgcgattgctggcatgcagtgccatcccagcgccctactttcaaacagttggtcgaggacctcgatcgaattttaacccttacaacaaatgaagaatatcttgatttatctcagcccctggagcagtacagtccatcatatcccgacacccgatcttcctgttcttctggagacgattcagttttttcacctgatcccatgccctacgagccttgcctgccccagtacccccacatcaacggctctgtgaaaacctag

SEQ ID NO: 223251 - DNA, 1515 bp, synthetic construct
  misc_feature 1..1515: note = Description of Artificial Sequence: Synthetic coding sequence
  source 1..1515: mol_type = other DNA
atgaccccaagtccactgcttctgctgttgctacctcctttgctgcttggagcctttccacccgcagctgccgcaagggggcctcctaagatggccgataaggtggtgccacggcaggtagcaagactcggcaggactgtgcgactgcagtgccccgtggagggtgatccccctccccttactatgtggacaaaagacgggaggacaatccacagtggttggtccagattccgcgtgcttccgcagggccttaaagtgaaacaggttgagagagaagatgccggagtctatgtctgtaaggccacgaacgggttcggatctctgagcgtgaactacactctggttgttttagacgacatttccccaggcaaggagtcacttggcccagacagcagcagtggcggtcaggaagacccagcttcacaacagtgggcacgcccaaggttcacccagccctctaaaatgagaagacgggtgatagctaggccagtgggttcaagtgttcggttaaagtgtgtggcgagcggccatccacgccctgatattacctggatgaaagacgaccaagccctgacccgacccgaagcggctgagcccagaaagaaaaagtggactttgagtttaaagaacctgcgacccgaggattctggaaaatacacatgcagggtgtctaaccgggcaggggcaattaatgctacgtataaagttgacgtgatacagcggacacggtccaaacctgtgctgactggcacacatccagtaaatactacagtggacttcggtggtacgacaagcttccagtgtaaggtccgaagtgacgttaaacccgtcatccaatggctcaagcgcgtggaatatggggctgagggcaggcataatagcactatcgacgtgggcggacagaaattcgtggtcctccccacaggggacgtctggtctagacctgatgggtcctacttgaacaagttattgatcacccgagctagacaagacgatgcaggtatgtacatctgtctgggagctaacacaatgggctacagctttcggagcgctttcctgaccgtgctgcccgatccaaaacctccgggaccacctgtggccagttcttccagtgcgacctcactaccctggcccgtggtcataggtattcctgccggtgccgtgttcatcctcggtactctcctgctttggttgtgccaggcccagaaaaagccatgcactcccgcaccggctcccccactacccggacatcggccacccggaaccgctcgcgatcggtctggcgacaaagacctgccttccctggcggctctgtctgcaggaccaggtgtgggcctgtgcgaggagcacggctctccggctgccccacagcacctgctgggcccaggtccagtcgccggacccaaattgtatcctaagctctataccgacattcacacgcacacacacactcactcccacactcactcacatgtcgagggaaaggtccaccagcacatccactatcagtgctag

SEQ ID NO: 223252 - DNA, 1515 bp, synthetic construct
  misc_feature 1..1515: note = Description of Artificial Sequence: Synthetic coding sequence
  source 1..1515: mol_type = other DNA
atgacacccagcccactgttgcttctcctgttgcctcctcttttactcggcgcatttccacccgcagctgcagctagaggccctccaaagatggccgacaaggtcgtgccccgtcaggttgccagacttggacggaccgtgagactccagtgtcctgtggaaggtgatccgccaccgctcactatgtggaccaaagatggtaggaccatccattcaggctggagccggttcagggtgctgccccagggactgaaggtcaagcaggtcgagcgggaagacgcaggtgtttatgtctgtaaagcaacaaatgggttcggatccttatccgtgaactatactctggtagtgctcgatgacatctctcccggtaaggaatccctcggtcccgattcaagtagcggcggtcaggaggaccctgcctcacaacaatgggccagacccagattcacacaaccatctaagatgagaaggagagtgatcgcacgccctgtgggcagctcagtacgtctgaaatgcgtcgcctcaggtcatccccgtccggacataacatggatgaaagatgaccaagcgttgaccaggcccgaagccgcagagccccgaaaaaagaaatggacactctccttgaaaaacttgcgccctgaagatagtggaaaatacacctgtcgcgtttccaatcgcgcaggggcaattaatgcaacgtacaaggtggatgtcatccaacggactaggtcaaagcccgtgcttaccgggacgcacccagtgaacaccaccgtcgactttggcggaacaacctcgttccagtgtaaggtgcgctccgatgtgaaacccgtgatccagtggttgaagcgtgtcgagtacggggctgagggcagacacaacagcaccatcgacgtcggtggacagaagttcgtcgtcctccctacaggggacgtgtggagtcggccagatggctcctacctgaacaagctgctgatcaccagggctaggcaagacgatgccggaatgtacatctgtctgggagcaaacactatgggctacagcttcaggtccgcattccttacagttttgccagatcccaaacctccaggccctccggtggcttctagttcttcggctacatcgctcccatggccggtggtcattgggattcccgcaggagcggtcttcatcctgggaaccttactcctgtggctgtgccaggcacagaagaaaccctgcactcctgcgccagctccgccactcccaggccacaggccaccaggcacagcgcgtgatcgctcaggcgataaggaccttccatcgctggctgcactgtccgcaggaccaggcgtggggctgtgcgaagagcatggaagccccgcagctccacagcatctcctgggcccagggccagtagccggacctaagctatatccaaaactgtacaccgatatccacactcatacacacacccactcacatacacactctcacgtcgagggcaaggtacatcagcatattcactaccagtgttag

SEQ ID NO: 223253 - DNA, 1515 bp, synthetic construct
  misc_feature 1..1515: note = Description of Artificial Sequence: Synthetic coding sequence
  source 1..1515: mol_type = other DNA
atgactccatcccctctgttgctgctgttgcttcctccgctcctgctgggggcttttccacccgctgctgctgccaggggtcctccgaagatggctgacaaggttgttcccagacaggtcgcgagactcggcaggacagtcagactccagtgccccgtagagggggaccccccacctcttacaatgtggactaaggatggtagaaccatccactccggatggtcacgatttagggtgcttcctcaagggctcaaggtgaagcaagtggagagagaagatgcaggggtgtacgtgtgcaaagcaaccaatggcttcggtagcttgagtgtgaactacacattagttgtgttggatgacatctcgcctggcaaagagtcccttggacccgatagctcctctgggggacaggaggatccagcttcccagcagtgggcgagaccgcgatttacccagccaagcaaaatgcggagacgggtaatagctagacccgtcgggtcttccgtccgactcaagtgcgtcgcgtccggacacccacgacccgacatcacttggatgaaagatgaccaagccttaactaggccagaagcagccgagccacgaaaaaagaagtggactctctccctcaagaatttacggccagaggattctggcaagtatacctgcagggtgtccaacagggctggtgcaataaacgctacttacaaggttgatgttattcaacgcaccaggagcaaacccgttctgacaggaacacatcccgtgaatactactgtcgattttgggggtacgaccagcttccaatgtaaggtgagatcagacgtcaagccggtaatccagtggcttaagcgagtggaatacggcgcagaggggagacacaactccaccattgatgtcgggggacagaagttcgttgtactgcccaccggagacgtgtggtcccggcctgacggttcatatttgaataaactgctgatcacacgtgctcggcaggacgatgccggaatgtatatatgccttggcgcaaacacaatgggatactcttttagatcagccttcttgactgttctgcccgaccctaagccacccggacctccagttgcgtctagtagttctgccacttctctcccatggcccgtggtaattgggattcctgcaggggcagtgttcatcctgggtactctgctgctatggctctgtcaagcacagaagaaaccttgcactcccgctccagccccacccctgccaggccacagacctcccggtacggctcgagacaggagcggcgataaagatctgcccagtctggccgcactgtctgctggccctggtgtggggctgtgcgaggagcacggaagtcccgctgccccacagcaccttcttggcccaggaccagttgctgggccaaaactgtaccctaagctgtatacggacatccacacacatacacatacccacagtcatacgcattcgcatgttgaggggaaagtacaccagcacatacactatcagtgttag

SEQ ID NO: 223254 - DNA, 459 bp, synthetic construct
  misc_feature 1..459: note = Description of Artificial Sequence: Synthetic coding sequence
  source 1..459: mol_type = other DNA
atgaccccctctcctctattgctgctgttgctgcccccactcctgctgggggctttcccacccgctgccgcagcaagagggcctccaaaaatggccgacaaggttgtccctcgacaggtcgcccgactggggcgtaccgtgcggctgcaatgtccggtagaaggggacccccctcccctcacaatgtggacaaaagacggacgtaccatccactccggctggtctagatttcgcgtgcttccgcaggggcttaaggtgaagcaggtcgagcgggaggacgcgggtgtctacgtgtgtaaggccacaaatgggttcggaagtctgtcggtaaattacacactggtggttttagacgatatttcacctggaaaggagagtttagggcctgattcctctagcggagggcaggaagacccagcctcacagcagtgggccagaccaaggttcactcagccgtag

SEQ ID NO: 223255 - DNA, 1515 bp, synthetic construct
  misc_feature 1..1515: note = Description of Artificial Sequence: Synthetic coding sequence
  source 1..1515: mol_type = other DNA
atgaccccaagcccgttgctgctgctgctcctcccacctctgttgctgggggctttcccgccagccgcagcagccagaggcccaccaaagatggccgataaagttgtccctcgccaggtggcacgcttgggtcggaccgtccggcttcagtgtcccgtggaaggtgatcctccgcctctgactatgtggactaaggatggaagaactatccattcagggtggtctaggttccgagttctgccacagggcctgaaggttaagcaggtggagcgcgaggacgccggtgtgtacgtctgtaaagctaccaacggatttggaagcctgagtgtaaactatactctcgtggtgctagacgacattagccccggaaaagaaagcctcggccctgacagctcatccggcggacaggaggatcctgcctctcagcagtgggccaggcctcgattcacacagccaagcaagatgcgaaggagggtaatagccaggcctgtcggctcttcggtgagattaaaatgtgttgccagcggccatcccagacccgatataacatggatgaaggacgaccaggcactcaccaggcctgaagccgctgaaccaagaaaaaagaagtggacactttccctgaagaacctccgtccagaagacagcgggaaatacacgtgcagagtgtctaacagggctggcgcaattaacgctacctacaaagtcgacgtcattcagagaaccagatccaaacctgtcctgaccggcacacaccccgtgaacacgaccgtcgatttcggcggaaccacctccttccagtgtaaggtacgatcagatgtaaagcccgtgatacaatggcttaaacgagttgagtatggagccgagggtcgccataacagtaccatagatgtgggtgggcaaaaattcgtagtgcttcctacaggggatgtttggtccaggcccgacgggtcctacctgaacaagctccttataacacgtgctcgtcaagacgacgctggcatgtatatctgtctgggtgcgaatacaatgggatattccttcaggtcagcatttctgaccgtgctgccagacccaaagccacctggtccacctgtcgccagcagcagctccgccaccagcctcccttggcccgtggtgatagggattccagctggggctgttttcatccttggcaccctgctgttatggttatgtcaggcccaaaagaaaccatgcactccagcacctgcccctcctctccccggacacagacctccaggtactgcacgcgatcgttctggcgacaaggacctgccttctttggcggcattgagtgctgggccaggggtaggcttgtgcgaagaacatggaagccccgctgctcctcagcatttgctgggtcccggaccggtcgcaggtcctaagctgtacccaaagctgtatactgatatccatactcacacacacacacactcccacacacattctcatgtggagggaaaggtccaccagcatatccactatcagtgctag

SEQ ID NO: 223256 - DNA, 243 bp, synthetic construct
  misc_feature 1..243: note = Description of Artificial Sequence: Synthetic coding sequence
  source 1..243: mol_type = other DNA
atgacaccttccccacttttgctattactacttccccctctcctcttaggagcctttcccccagctgccgctgcaagagggccaccaaagatggccgataaagtggtccctcggcaggtagccagacttggacgcacagtacgcctgcagtgtcctgtggagggggacccccctccactcacaatgtggacgaaagacggtaggacaatacactctggctggagccggttcagggtgctttag

SEQ ID NO: 223257 - DNA, 1326 bp, synthetic construct
  misc_feature 1..1326: note = Description of Artificial Sequence: Synthetic coding sequence
  source 1..1326: mol_type = other DNA
atggctgataaagtcgtgccccgtcaggtggcaaggctcggcagaactgtaaggctgcagtgtccagtggaaggagaccctcccccattgaccatgtggacaaaagatggacgcaccatacattctggatggagccgcttccgtgtgcttccacagggactcaaggtaaagcaggttgaaagagaggacgccggtgtgtatgtgtgcaaggctaccaacggttttgggtctctcagtgtgaattacactctggtggtgctggacgacatctctcccggaaaggagagcttaggccctgattcctcctccggtggccaggaagatccagcctctcagcaatgggccaggccaagattcacccaaccaagtaaaatgcggcgaagggtgattgctaggccagtgggctcctctgttcgcctgaaatgcgtagccagtggacaccctcgaccagacatcacctggatgaaagacgaccaggcactcacacggccagaggccgcagaaccgagaaaaaaaaaatggactctcagcctgaaaaacttgcggccagaagattcggggaaatatacttgtagagtgtccaatcgcgcaggcgctattaatgctacttacaaagtggatgtcatacaaagaacaaggtccaagcccgtgctgaccggaacacacccagtgaataccaccgtggattttgggggaactacaagttttcagtgcaaggtgcgcagtgacgtgaaacccgtaattcagtggctgaagagagtggagtatggggcagagggcagacacaatagtaccatagacgtgggaggccagaaattcgtggtgctgccaacaggcgatgtgtggtctcggcctgacggcagttacttgaataagctgctgatcacacgagcaagacaggatgacgccggtatgtatatctgtctgggtgctaatacgatgggatattcatttagatcagcctttctcactgtattgcccgaccctaaacctccgggacctcctgtggcctcatccagctcagcgaccagtctgccctggcctgtggttattggcattcccgctggcgcagtgtttattctgggtacactactgctgtggttatgtcaggcgcagaagaagccttgcactcccgctcctgctccgccactcccaggccacagacctcctgggacagcccgtgataggtctggggataaggacttgcctagtctggccgctctaagcgcagggccaggagtcggtctctgtgaggagcacggtagccccgcagcccctcagcaccctacagtggtcgttgccccagatctatgcaactttatgtag

SEQ ID NO: 223258 - DNA, 1131 bp, synthetic construct
  misc_feature 1..1131: note = Description of Artificial Sequence: Synthetic coding sequence
  source 1..1131: mol_type = other DNA
atgcagtggaccagccttctcctgctagccggattattttccctatcacaagcacaatatgaggacgacccacactggtggttccactacttgcgcagtcagcagtctacctattacgacccatatgacccttatccatacgagacatatgagccttatccctatggagtcgacgaaggtcctgcatatacatatggctccccttccccacccgaccccagggactgtcctcaggagtgcgactgtccacctaattttccaacggcaatgtattgtgacaatcggaatctgaagtatctccctttcgtcccaagtaggatgaagtacgtttacttccagaataatcaaatcactagcatccaggaaggggtctttgataatgctaccgggcttctctggattgccctgcacgggaaccagattacttccgataaggtcgggaggaaggtcttttcaaaattgcgacacttggagaggctttacttggaccacaataatttaactcggatgcccggaccactgcctcggagtctcagagagttgcacctagaccacaatcagatatctagagtccccaacaacgcccttgaagggctggaaaacctcactgcactatatcttcagcacaacgaaatccaggaagtgggtagttcaatgcggggactgagatcactgatccttctggacctgagttacaatcatcttcgaaaggtgccagacgggctgcccagtgcgctcgaacagttgtatatggaacacaacaacgtgtacaccgtcccggattcctattttcgcggagccccaaagcttctgtatgttcgactgtcacataacagcctgactaataacggtctcgccagcaacactttcaatagtagcagcctgctggaattggacctgtcttacaaccagctgcagaagatcccacctgtgaataccaacctggagaacttatatctccagggaaaccgtattaacgaattttccataagcagcttctgcacagtagtcgacgtggtcaacttttcaaagttgcaagtgcttaggctggatggcaatgaaatcaaacgctctgcgatgccagcagacgccccactctgcctccgcctggcctcactgatcgagatctag

SEQ ID NO: 223259 - DNA, 1092 bp, synthetic construct
  misc_feature 1..1092: note = Description of Artificial Sequence: Synthetic coding sequence
  source 1..1092: mol_type = other DNA
atgcagtggacatcattactcctgctcgccggactgttctccttatcacaggctcagtacgaggacgacccccactggtggtttcattacttgcggtctcaacagtctacatactatgacccctatgatccctacccctacgagacatatgaaccctatccatatggcgtcgatgagggcccagcgtacacgtatggttcgccttcccctccggatccacgtgactgcccgcaggaatgtgactgccccccaaacttcccacccttcgtgcccagcaggatgaaatacgtgtacttccagaataaccagataactagtatccaagagggcgtgtttgataatgccaccggcctgctttggatcgcactacacggtaatcaaataacatccgacaaagtcgggagaaaggtgttttctaaactgcggcacttggaacggctgtacctagaccacaataacttaacacgcatgcctgggcctctgcctaggtcccttagggagttacacctagatcataatcaaatcagtcgagtcccaaacaatgcgctcgaggggctcgagaacctgaccgctctctatctgcagcataacgagatccaggaagtgggaagctccatgcgaggcttgaggagccttattctgctggacctctcgtacaatcacctacgcaaagttcctgatggtttgccaagcgccctagagcagttatacatggagcacaacaatgtgtacacagtgcctgatagctactttcgaggagcacccaagcttctatatgtccgccttagccataactctctgaccaataacggcctggcctcgaatacgttcaattcttctagtttgctggaacttgacttgtcttataatcagctgcagaagataccacctgttaatactaatttagagaacctctatctccagggcaaccgcatcaacgaattcagcatttcaagcttctgcaccgtggtagacgtagtgaacttctctaaactgcaggtgctgagacttgacggcaatgagattaaaagatcagcaatgcccgctgacgcaccgttgtgcctgcggctggcatctcttatcgagatctag

SEQ ID NO: 223260 - DNA, 594 bp, synthetic construct
  misc_feature 1..594: note = Description of Artificial Sequence: Synthetic coding sequence
  source 1..594: mol_type = other DNA
atgaagatgaccctaataggcggttcgacgacgtcggccgcttccagtccacccactaccatccccatgacactgactagaatgagaccgaccagtctgactcccatggggtggatgaaggggcagcccaccccgactgctttgcacccccttcaaatccccgctaccgcacccaggtccgccactgcccatccaacatctaccgctatgtactgtgacaataggaatttgaaatatttgccctttgtgccctcgcgaatgaagtatgtgtactttcagaataaccagataacatccatccaagagggtgttttcgataacgctactggcttgctgtggatagcgttacatggaaatcagataactagcgataaggttggcaggaaagtgttctccaaacttagacacttggagaggttatacttggaccacaataacctgacccgcatgccgggacctctgccacgcagtttgcgcgagttacatcttgaccacaaccagatctcacgggtgccaaataacgcgttggaaggcaggacctcacggccatgcacttccaacaccatgagatctcggaagtgggcagtgccctag

SEQ ID NO: 223261 - DNA, 2025 bp, synthetic construct
  misc_feature 1..2025: note = Description of Artificial Sequence: Synthetic coding sequence
  source 1..2025: mol_type = other DNA
atggtcgtggcccacccgaccgcaactgcaaccacaacgcctactgcaaccgttactgccacggtggtgatgaccacagccactatggacctgcgcgactggctgttcttgtgttacggactcatagcattcttgacagaggtgatcgactccactacctgcccatcagtgtgccggtgcgataatggttttatctactgcaacgatagaggactgacgtctatccctgccgacataccagatgatgccacgaccctctatcttcagaataaccaaattaataacgccggaatcccacaggatctaaaaaccaaggtgaacgtacaggtgatttacctgtacgagaacgacctggatgagtttcccattaatttgccccgttcccttagggagttgcatctgcaggacaataacgtcaggaccatcgcacgcgactcccttgccagaatccctctacttgaaaagctgcatttagatgataattctgtgagtactgtcagtattgaggaagacgcgttcgctgactctaagcagttaaagctgttgttcctatctcggaaccacctgagctctatccccagcggcctgccacacacactcgaagagctgagattggatgataaccgcatctctactatccctttgcatgccttcaaaggactgaactcgctgcgccgtctggttttggatggcaatcttctggccaatcaacgcatcgcggatgacactttctctcggttgcagaatctgacagagctctcactggtgcgcaattccctggccgcaccaccgctgaacctcccgagtgcccaccttcagaagctctacctacaggataatgctatatcccatataccgtataacacacttgctaagatgagagagctggaaagactggacctcagcaataacaatcttacgaccctccctcgagggctgtttgacgacctgggtaatctggcccagctcctgctaagaaacaacccttggttttgcggatgtaatctcatgtggctgagagattgggtcaaggctcgtgcagccgtcgtaaatgtgcggggactgatgtgtcaagggccagagaaggttagaggaatggccatcaaggatatcacctctgaaatggatgagtgtttcgaaaccggccctcagggaggcgtggcaaacgcggctgcgaagacaaccgcttctaaccacgcgagcgccacgactcctcagggcagtctgttcactctaaaagctaagaggcccggtctgaggctccccgactcgaacatcgactaccccatggctacaggagatggcgcaaagacactggccattcacgtaaaggctcttacagcagatagtattcggattacatggaaagccacactgcctgcgtcatccttccgcctgtcttggctgcgtttgggacattccccagcggtcgggtcaataacagagacactggtgcagggcgataaaaccgaatatttattaaccgctttggaaccgaagtcgacgtatattatctgcatggtaactatggaaacctcaaacgcatatgttgccgacgagacacccgtgtgcgcaaaggctgaaactgccgatagttacggccctaccacgactttgaaccaggaacagaacgccggaccaatggcttccctccccttggcaggaatcatcggaggggctgtggcgttagtgttcctgttccttgtcctgggcgcaatctgctggtacgtgcaccaggcaggcgaactgctcacaagagagagagcctacaatagaggatctcgaaaaaaagatgactacatggagagcgggacaaaaaaggacaattctatcttggagatccgtggcccaggactgcagatgcttccaattaatccgtacagagcaaaggaggagtacgtggttcataccatttttccctccaatgggtcttcactgtgtaaggctactcataccattgggtatggaactacccgtgggtatcgggacggcggtataccggatatcgattatagctacacttag

SEQ ID NO: 223262 - DNA, 1983 bp, synthetic construct
  misc_feature 1..1983: note = Description of Artificial Sequence: Synthetic coding sequence
  source 1..1983: mol_type = other DNA
atgggactacagaccacaaagtggccttctcacggtgcctttttccttaagtcctggcttattatatcactgggtctttactcgcaggtgtcaaaactcctagcttgtccctcggtatgtcgctgtgatcggaatttcgtgtattgcaacgagcggagtctcacctccgtgccactcggaatccccgagggggtcactgttctctaccttcacaataaccaaatcaacaacgccggattcccagccgagctccataacgttcagagcgtgcataccgtttacctgtacggcaatcagctggatgagtttcccatgaatctgccaaaaaatgtgagagtgcttcatctacaggagaacaacattcagaccatcagccgcgcagccttagcacagctcttaaaattagaagagctccacttagatgataattccattagtacagtgggtgtcgaggacggggcatttcgcgaggccattagcctcaagctgctcttcttaagtaaaaatcacctgagctcagttcccgtggggctgcctgtcgatctgcaagagctcagggtcgatgagaatagaatcgccgtcatctctgacatggcattccagaatctcacttcgctggaaaggctaatagtggacggaaatcttctaacaaacaaagggatcgccgaagggactttttctcacctgacaaaacttaaagagttttctatcgttcgcaactcactatcccatcctccacccgacttgccagggacccacttaattcgcctgtacctccaggataatcagattaatcacatccccctcacggcttttagcaatctgcggaaactggagcggcttgacatctctaataatcagctgcggatgcttactcagggggtgtttgacaacctttccaacctcaagcagctgaccgctaggaataatccttggttctgtgactgcagcataaaatgggtcactgagtggttgaagtatattccttcttctttgaacgttcggggattcatgtgtcagggcccagaacaggtgagaggaatggctgtgagagaattgaatatgaatctcctcagttgtccaaccactaccccgggtttgccactgttcactccggcaccctcaacagcttccccaaccactcagcccccaacactgtcgattcctaacccctcccggtcatacacaccacctaccccaaccaccagcaagctgccgaccattcctgactgggacgggagggaacgggtcacgccccctattagcgagcgcattcaactgagcatacactttgtgaatgatacgtcaattcaggtgagttggctgagtctgtttacagttatggcctataagctcacttgggtcaaaatgggtcatagcctcgtggggggaatcgtccaggaaagaatagttagcggcgagaagcagcacctgtctctggttaacctcgaacccaggtctacatatcggatttgtctggtgccccttgatgcttttaattatagggctgtggaggatacaatttgtagtgaggcaaccacacatgcttcatatttgaataacggttctaataccgcctccagccacgagcagacaacaagtcatagcatgggctccccgttcctgttggccggacttatcgggggagcagtgattttcgttcttgtggtcctgctgagcgtattctgttggcacatgcataaaaagggtcgctacacctcccaaaaatggaaatataacagaggcaggagaaaggatgactactgtgaggcaggtactaagaaggataatagcattctcgaaatgactgaaacgagcttccagattgtctcactgaataacgaccagttactgaagggcgacttccgtttgcagcccatttacaccccaaacggcggaattaactataccgattgccatattcccaacaatatgaggtactgtaacagctccgtgcccgatctggagcattgccatacctag

SEQ ID NO: 223263 - DNA, 942 bp, synthetic construct
  misc_feature 1..942: note = Description of Artificial Sequence: Synthetic coding sequence
  source 1..942: mol_type = other DNA
atggccgttcgcgagctgaatatgaacctcctcagctgccccaccacaactccaggactgcctctctttacgccggctcctagtaccgctagccccaccacccagccaccaacattgagtatcccaaatcctagtcggagctacaccccacccactcccactacaagtaagctgccaacaatccccgactgggacggcagggagagagtgaccccacccatctctgagaggatccaattgagtatccattttgtgaatgacacttccatccaggtgagctggctgtcactgtttaccgtgatggcgtacaagctcacttgggtgaaaatgggccacagtttagtggggggaatcgtgcaagaaagaattgtgagtggtgagaaacagcacctgtccctcgtgaacctcgaacccagaagtacctatcggatctgccttgtgccgttggatgcattcaactacagggcagttgaagacaccatttgcagtgaagcaaccacacatgccagttatttgaataatgggagtaacacagcgtcaagccacgaacaaaccactagtcattccatgggctccccattcctgctggccggattgatcggaggagccgttattttcgtcctggtggtacttctctcagtcttctgctggcatatgcacaagaagggcagatatactagtcagaagtggaagtataatagaggccgacggaaagatgattattgcgaagccggaacaaaaaaagataactccatcctggaaatgaccgagacaagctttcaaatcgtcagcctcaataatgaccaactgctgaagggcgacttccgcctccagcctatttatacgcccaacgggggaataaattatacagactgccatataccaaataatatgcggtactgcaacagctctgtccccgatctggagcactgtcatacgtag

SEQ ID NO: 223264 - DNA, 1983 bp, synthetic construct
  misc_feature 1..1983: note = Description of Artificial Sequence: Synthetic coding sequence
  source 1..1983: mol_type = other DNA
atgggtttgcagacgacgaagtggccaagccatggagcatttttcctgaagtcctggctgatcatctccctcggcctgtattcgcaagtcagtaaactcctagcgtgccccagcgtctgtaggtgtgatcggaactttgtctattgtaacgagagaagtctcaccagtgtgcctttggggatccccgaaggcgttacagtactgtacctgcacaacaaccaaatcaacaatgctggatttccagcagaactgcacaatgttcagtcagtgcataccgtgtatctctacggaaaccagctcgatgaatttcccatgaacttacctaagaacgtccgcgtgttgcacctccaagaaaataacatacagacaattagcagggccgcattagcacagttgttaaaactagaggagctgcacctggacgataattccatatctacagtgggggtagaagatggagccttcagggaagcgatcagcctgaaattgctgttcctctctaagaaccacctgagtagcgttcccgtaggcctgccggtagatctgcaggaactgagagtggacgagaatagaattgccgtaatttccgacatggcgttccagaacttgaccagcctggagagactaattgtcgacgggaatctattaaccaacaaaggcatcgcagaagggaccttcagtcacctgactaagctaaaggagttcagtatcgtcagaaatagcctcagccatccgccaccagacctgccaggtacccacctgattcgtctgtacttacaggacaatcagatcaatcacattcctcttaccgccttttctaatctccgaaagctggagcgactggacatttctaataaccaattgcgtatgctgactcagggggtcttcgataacctgagtaacctcaaacaactgaccgctaggaataacccgtggttctgtgactgctcaattaagtgggtgacggagtggttgaagtacatccccagtagtctgaatgtcagaggctttatgtgccaaggccctgaacaggtaagaggaatggcggtcagagagcttaatatgaatctgctctcttgccccacaactacacctggcctcccactgtttacgccggctccctccactgccagcccaaccacccagcctccgacgctgtctatccctaatccctccaggagctataccccccctacaccaacaaccagtaaactgcccactattcccgattgggacggacgagagcgtgtgacacctcctatatcagaacgaatccagttatctatccacttcgtgaatgataccagcatacaggtaagttggctaagcctgtttaccgtgatggcctacaaactgacttgggtgaagatgggccactctctagtgggcggtatcgtccaagaaaggatagtaagcggcgagaagcagcacttatccctggtcaatttggaacccagatcaacttatcgcatttgcctggttccattggacgcctttaattatcgcgctgtagaagacaccatttgttccgaggcaactactcacgcatcctacctgaacaacgggagcaatactgcctcctcccacgaacagacaacctcccacagcatggggtcgccatttctgctggcgggactgatcggcggtgcagtgatatttgtcttagttgtgctgctatcggttttttgttggcatatgcataagaagggtagatataccagccaaaagtggaagtataatcgaggccgacgcaaggacgattattgcgaggcagggactaagaaagataattccatcttggaaatgacggagacctcgtttcagatcgtctccctcaataacgaccagcttttaaaaggggattttcggttgcagccaatctatacccctaatgggggtatcaactacactgactgccacatacccaataacatgcgctactgcaatagttcagtacccgatctggagcactgtcacacttag

SEQ ID NO: 223265 - DNA, 1950 bp, synthetic construct
  misc_feature 1..1950: note = Description of Artificial Sequence: Synthetic coding sequence
  source 1..1950: mol_type = other DNA
atgatctcggctgcatggtctatcttcctcatcggaactaaaatagggttgttcttacaagtcgcacctttatccgtgatggcaaagtcatgtccatccgtgtgcaggtgcgatgctgggtttatctattgtaatgatcgctttctgacatcaattcccacaggcatacccgaggatgccactactctttacttgcagaacaatcaaatcaataatgctgggataccaagcgatcttaaaaaccttttaaaagtggagcgaatatatttatatcacaattcactggacgagtttcccacgaatttaccaaagtacgtaaaagagttacatttgcaagagaacaatatcaggacaattacctacgacagcctttccaaaattccttatctggaggaactccacctcgatgacaacagtgtgtccgcggtgagcatagaggagggtgccttccgtgacagcaactatctgagactactgttcctgtctagaaatcatctcagtactatcccctgggggttgccaagaacgatcgaggaattgaggttagacgacaacagaatcagcacaatcagttccccctcgctgcagggactgacttcattaaagagactggtgttggatggcaatcttctcaacaatcacggccttggagataaagttttcttcaacttagtgaacctgacggagctgtcactagtacgcaacagtctcaccgctgctcccgtaaatcttcccggaaccaatttaagaaaactgtacctacaggacaatcacatcaatcgagttccccctaacgccttcagctacttacgtcagctgtatcgtctagatatgtccaacaacaatttaagtaaccttcctcaaggaattttcgatgacttagacaacatcacacaactgatcctaagaaacaacccttggtattgcgggtgcaagatgaagtgggtgcgggattggctacagtcactccccgtgaaagttaatgtccggggactaatgtgccaggccccagaaaaagtgagaggcatggccataaaggacctaaacgcagagctgttcgattgcaaggacagtggaatagtctccaccatccagatcacaacggccatccccaatactgtctaccccgctcagggccagtggccagcacccgtcaccaagcagccagatatcaagaatcccaagttgaccaaagatcatcagactaccgggagtcctagtaggaagacgatcaccattactgttaaatcagtgacttccgatacaatccacatttcgtggaaactggccctgccaatgacggctctaaggctctcttggctgaaactgggtcacagccccgctttcggatccatcactgagacgatcgtaaccggtgagaggtccgaatacctggtgactgctttggaaccagatagtccatacaaagtgtgcatggtgcctatggaaactagcaatctttacctgtttgacgaaacccccgtctgtatcgagacagagactgccccattgaggatgtataacccgaccacaactctgaaccgggagcaggaaaaggaaccctacaagaatccaaacctgcctctggctgccatcatcggaggtgctgttgcactggttactattgctctcctagctctcgtatgttggtatgttcaccgaaacggttctctgttttcaagaaactgcgcatattcgaagggtcggaggcgtaaggacgattatgctgaggccggaaccaaaaaggataactctattctggagatcagagagacgtctttccagatgcttccaatatccaatgaacctattagtaaggaagagtttgtgattcataccatctttccacccaacggcatgaatttatataaaaataatcacagtgagagctctagcaatcggtcgtatagagactccgggatcccagacagtgatcatagccatagctag

SEQ ID NO: 223266 - DNA, 1950 bp, synthetic construct
  misc_feature 1..1950: note = Description of Artificial Sequence: Synthetic coding sequence
  source 1..1950: mol_type = other DNA
atgatttccgccgcttggtccatctttcttattggaaccaagatcggtctgtttctgcaggtggcccctctgtccgtgatggcgaaaagctgcccctcagtgtgtaggtgtgacgcaggctttatctactgcaacgatagatttctgacttctatccccaccgggatccccgaagatgcgaccacgctttatctgcagaataaccaaataaacaacgcgggtatcccttccgacttgaaaaacctgctgaaagtggagcggatctacttataccataacagcctagacgaattccctaccaatttgcctaaatacgtcaaagagctccaccttcaggaaaataacatccgtacaatcacttatgacagcctctcaaagatcccctatctggaagagctgcacttagatgacaattctgtgtcggctgtctccattgaagaaggagccttcagagactctaattatctccggttgctcttcctgtcacgaaatcacttgtcaacaattccgtgggggttgcccaggacaatagaggaacttagacttgacgataatcgtatctcaaccatctccagcccgtcactacagggactgactagtctcaagagactggttttagacggcaatctcctcaataatcacgggctcggcgacaaagtttttttcaatctggtgaatttaaccgagctctccctggtacggaacagcctgaccgccgctccagtcaatctgcctggaacaaaccttcgtaagctctacctgcaggacaatcatatcaatcgtgttccccctaatgctttttcatatttgagacaactgtacagactcgacatgtcaaataacaatctcagcaacctcccacagggaatctttgacgatctggataatatcacccaactgatcctcagaaataacccctggtactgcggctgtaaaatgaagtgggttcgggattggctgcagtcattgccggtcaaggtgaacgtgcgaggcctgatgtgtcaggccccagaaaaggtacgcggaatggcaataaaagaccttaatgctgaactgttcgattgcaaagactctggaatcgtttccacaattcagataaccaccgcaatcccaaacactgtctacccggcacagggtcagtggcccgctcctgttacgaagcaacccgacatcaagaacccaaagctgactaaagatcaccaaaccaccgggtctccgtctaggaaaacaatcaccatcactgttaaatccgttacttctgataccattcacatcagttggaaactagccttgccaatgacagcattgcggctgagctggttgaagttggggcattcacccgctttcggatcgattactgagaccatcgtgaccggggagcggtctgagtatcttgtcaccgcgctggagcccgactctccttacaaggtatgcatggttccgatggaaacatcaaatctctacctgtttgatgaaactccagtgtgcatcgagacggagaccgcccctctgcggatgtataaccccaccactacgctaaaccgagaacaggagaaggagccctacaagaacccgaatctgcctctcgctgccataattggtggagccgtggctctggtgactatagcactgctggcactcgtgtgctggtacgtccatcgcaatggtagcctcttctctcgaaactgcgcctactctaagggtcgccgacggaaggacgattatgccgaagcaggaactaaaaaagataacagtattcttgagattcgtgagacctcattccagatgttaccaattagcaacgagccaatcagcaaggaagagttcgtaatccatactatcttcccacctaacggcatgaacctgtataaaaataatcatagtgaatcttctagtaaccgtagctaccgtgatagcggcatccctgattctgaccacagtcactcgtag

SEQ ID NO: 223267 - DNA, 1884 bp, synthetic construct
  misc_feature 1..1884: note = Description of Artificial Sequence: Synthetic coding sequence
  source 1..1884: mol_type = other DNA
atgatctcagccgcttggagcatcttcttgatcgggactaagattggcttgtttttacaagtggcccctctttccgtcatggccaaaagctgcccctctgtatgcagatgcgacgccggttttatatactgtaacgaccggttcctaacctctataccaaccggcatcccggaagacgctaccaccctgtatctccaaaacaaccagataaacaacgctgggattccttctgacctcaagaatctgctgaaggtggagaggatctacctctatcataacagtttagatgagtttcccaccaacctgcctaaatatgtgaaagagctgcacctgcaggagaataacatccgcaccatcacatatgatagcttgtctaagattccttacttagaggagctacaccttgatgataacagtgttagcgctgtgagcatcgaagagggtgcatttagagactctaactacctgagactgctgttcctgagtcggaaccaccttagcacgattccatggggcctgcctaggactatcgaagagttgcgcctggatgacaacaggatttcaactatcagctccccttctttacaaggattgacaagcctgaaacgcctcgtgctcgatggtaacttgctcaacaaccatggactgggggataaagtgtttttcaacctggtgaacttgactgagctctccctagtcaggaacagcctcaccgcagcacctgtcaacctcccgggtacaaacctcagaaaattatacctgcaggacaatcatatcaatagagttccccctaacgccttctcttacctccggcagctctacagactagacatgtccaataataacttgtctaacctcccccagggtatcttcgatgatctcgataacatcactcagctcatcttgcggaacaacccctggtactgtggctgtaagatgaagtgggttagagactggctgcagtctctgccggtcaaggtgaatgtcagaggactgatgtgccaggcaccggaaaaggtgagaggcatggccattaaggatctgaatgccgagctgttcgactgtaaggatagcggcattgtgtccacgatccaaattactaccgctattcctaacacggtataccccgctcaagggcagtggcccgcacctgtgactaagcagccggacatcaaaaaccctaaactgacaaaagatcatcagaccaccggtagcccatcacggaagactattaccatcactgttaagtctgtgacatctgatacaatccacattagctggaagctggcgttgccaatgacggctctgcgcctatcttggctcaagctcggtcacagccctgccttcgggagtatcacagaaactatcgtcactggagaacgctcagagtacctagtcacagcactggagcccgatagtccctataaagtgtgtatggtgcctatggagacttcaaacctgtacctgtttgatgaaacaccagtgtgcatagagactgaaactgcccctctgagaatgtacaatccgacaacaaccctgaaccgagaacaggaaaaagaaccctacaagaaccccaatctacctttggcagcaatcatcggcggagctgtggccctggtgaccatagccctgttggctctggtatgttggtacgtgcacagaaacggttccttgttctcccggaactgtgcttactctaaggggcgtaggaggaaagatgactatgccgaagctgggaccaaaaaggacaacagtatcctcgaaatacgagagacaagcttccaaatgctaccaattagcaatgagcccatttcgaaggaagagtttgtcatccacaccattttcccccctaatgggatgaatttgtacaaacagtcccaatag

SEQ ID NO: 223268 - DNA, 402 bp, synthetic construct
  misc_feature 1..402: note = Description of Artificial Sequence: Synthetic coding sequence
  source 1..402: mol_type = other DNA
atgcctccctctaaaccccaccctcctgttgttggcaaggtcacccatcacagcatagaactctattgggatctggagaagaaggcaaagagacagggtccacaagaacagtggtttcggttctcaatagaggaagaggaccccaagatgcatacctatggaataatctacaccggatacgctacgaaacatgttgtggagggcctcgagccccgtaccttgtatagattccggctgaaggttactagccccagcggcgaatgtgagtactctccgctggtcagtgtttcaaccacttcctccatctggctggggggtgaacccattagttcagagcacctgcacagagctgtctcagtgaacgatgaagacctgcttgtgcgaatcctgcaggggggttag

SEQ ID NO: 223269 - DNA, 849 bp, synthetic construct
  misc_feature 1..849: note = Description of Artificial Sequence: Synthetic coding sequence
  source 1..849: mol_type = other DNA
atgcctccatcaaaaccacacccaccggtcgtggggaaagtcactcaccacagcatcgagctctactgggacctcgagaaaaaagccaagcggcagggcccacaggagcaatggtttcggttctctatcgaagaagaggaccctaagatgcacacatacggcattatttatacagggtacgcaaccaaacatgtcgtggaagggctggaacctcgcacactgtatcgattccgactcaaggtcacctccccgtcgggggagtgcgaatatagtccgctagtcagcgtaagcaccacatcaagcatttggttaggaggcgagccaatatcatctgagcatctgcaccgcgctgtctccgtcaatgatgaggaccttctcgtccgcatcctacaaggtggcagagtaaaagtggatgttccaaacaagtttggcttcactgcacttatggttgctgcgcagaagggatacacctctctgatgctggcctgttatgcgggtcacctcgacgtcgtcaaatacttgaggcgccatggcgcttcatggcaggctagagacttaggcggttgcaccgcactgcactgggctgcggatggaggtcattgtagtgtgattgaatggatgatcaaagacggctgcgaggtcgatgtggtcgatacgggatctggttggaccccacttatgcgggtgtccgccgtctctgggaatcagcgagtggcctcccttttgatagacgcgggagcaaatgtgaacgtcaaagaccggaacggcaaaactcccctcatgtcagtcgtatcactcctggaggaacgaaagaaaaagcaacgacctaaaaagagttgtgtgtgctag

SEQ ID NO: 223270 - DNA, 1116 bp, synthetic construct
  misc_feature 1..1116: note = Description of Artificial Sequence: Synthetic coding sequence
  source 1..1116: mol_type = other DNA
ctgcagaagcaaaagattatgccaccatccaagccgcacccccctgttgtgggcaaggtgacacatcacagtatcgagctatactgggatctggagaagaaagctaaacgccagggcccacaagaacagtggttccggttttcgatcgaggaggaagatcccaagatgcacacttatggcatcatctacacgggttacgccactaagcatgtggtggaggggctcgagcctcgcacattgtataggtttagactgaaagtcacctcaccatccggagaatgtgagtacagccccttagtatccgtgtctactacacgaccttctctgagtaagtccctggtgaaaatccgaatggttacaagcgtgttacatggccctcccaccgagaacactggggagcctatcagcagcgagcacctccatcgggcagtttcagtgaacgatgaagaccttctggttcggatcctgcaaggaggcagggttaaggtggatgttcctaataaatttggatttactgcactcatggttgccgctcaaaaaggttacacccgattggtaaagatcctggtgtccaacggtacggacgtgaatctgaagaatggaagcggcaaggactcgttaatgctggcctgctacgccggtcacctagacgtcgtgaagtacttgcgccgacatggtgcctcctggcaagctagggacttggggggatgcaccgccctacattgggctgccgacggtgggcactgctccgtgattgagtggatgattaaggatggctgtgaagtggacgtggtcgatactggctcaggctggacccctcttatgcgcgtcagcgctgtgagcgggaatcaacgagttgccagcttactgatcgacgcaggagctaatgtaaatgtgaaggaccgtaacggcaagacacctctcatggtggccgtgctcaataatcatgaagagttggttcagctgctgttagacaagggagccgatgcctcggttaagaacgaatttgggaagggagtgctggaaatggccagagtctttgaccggcagagtgtcgtgagtctccttgaggaacggaagaagaagcagagacctaagaagagctgtgtatgctag

SEQ ID NO: 223271 - DNA, 1038 bp, synthetic construct
  misc_feature 1..1038: note = Description of Artificial Sequence: Synthetic coding sequence
  source 1..1038: mol_type = other DNA
atggaaccccagaagatcatgccaccaagtaagcctcaccctcccgttgttggaaaggtcacccaccattccatcgaactctactgggatctggagaagaaggccaaacggcagggaccgcaggaacagtggttcagattcagtatagaagaggaggatcccaagatgcatacttacggtattatctacaccggatatgctacgaaacacgttgttgaagggctggagccccgaacattgtatcgattcaggctgaaagtaaccagccctagtggtgaatgcgagtattctcccctggtgtccgtgtccacgacgcgtgagccgatcagcagcgagcatctgcatagagccgtgagtgtgaatgacgaagacctgctggtgcgcatcctccagggcggaagagtgaaggtagatgtccccaacaagttcggatttacagctcttatggtcgcggctcaaaaaggttataccaggctggttaaaattctggtatctaatggtacggacgtgaacctcaaaaatggttctggaaaagattccctgatgctcgcatgttacgcgggacatctcgatgttgtaaaatatctccgacggcacggagcttcatggcaagcccgtgacttagggggttgcaccgccttgcactgggcagctgatggtggtcactgttcggttatcgaatggatgattaaggatggttgtgaagtggacgtggtcgacactggatccggctggacgcccctcatgcgagtaagcgctgtgagtggcaatcaaagggtggcctccctgcttatagatgctggagccaacgtcaacgtcaaagaccggaatggaaaaacaccccttatggtggcagtcctaaataatcacgaggagttggtccaacttctgctggataaaggcgctgacgccagcgtgaagaacgaatttggcaaaggtgtgctagaaatggctagggtgtttgaccgccaatccgtcgtaagtctcctcgaagagcggaaaaagaagcaacgcccaaaaaaaagctgcgtgtgctag

SEQ ID NO: 223272 - DNA, 1020 bp, synthetic construct
  misc_feature 1..1020: note = Description of Artificial Sequence: Synthetic coding sequence
  source 1..1020: mol_type = other DNA
atgcccccttcaaaaccccacccacctgtggtcggaaaagttacccatcactccattgaactctactgggacctcgagaaaaaagctaagcgccaaggcccacaagagcagtggttccgcttctctatcgaagaggaagaccccaagatgcacacctacggaatcatctacacagggtatgcaactaagcacgtggtggaaggtctggaaccacgaacactgtataggttccggttaaaagtaacttccccatcgggagaatgcgaatactcccctctggtgtctgtaagtaccacacgcgagccgatttcttctgaacatctccaccgggctgtgagtgtgaatgacgaagacctattggtcaggatcctgcaggggggtagggtgaaagtcgacgtacctaataaatttggctttactgccctgatggttgcagcccagaagggttataccagacttgtgaaaatcctcgtgtcaaacggaaccgatgtgaacctcaaaaacggtagcggaaaggactctctgatgcttgcctgctatgccggacatctggatgttgtgaagtacctgagaaggcacggagccagctggcaggccagggatctagggggatgcaccgccctgcactgggctgcagacggaggccattgttccgtgatcgagtggatgattaaagacggatgtgaagttgatgtagtggatacaggttccggctggacccctctgatgcgtgttagcgctgtgagtggcaaccagcgagtagcctccttgctgatcgacgctggagccaacgtgaatgttaaagaccgtaatggaaagacacccctcatggtggccgtattaaacaatcatgaagagttagtgcagctgctgctggataaaggggcagatgccagcgtgaagaacgaatttggcaagggagtcctggagatggccagggtattcgaccggcagagtgtggtgtcccttctagaagaacggaagaaaaagcagcgaccaaagaagagctgcgtttgctag

SEQ ID NO: 223273 - DNA, 375 bp, synthetic construct
  misc_feature 1..375: note = Description of Artificial Sequence: Synthetic coding sequence
  source 1..375: mol_type = other DNA
atgccgccttcaaagccacacccgccagtggtgggcaaggtaacccaccacagcatcgagctttactgggatctcgagaagaaggcaaagcgacaggggcctcaggagcagtggttcagattcagtattgaagaggaggacccaaaaatgcacacgtacggaattatttacaccggctacgctaccaaacacgtggtggagggacttgagcccagaactctttatcgctttagactgaaagttacctccccaagcggcgagtgtgagtattccccactggtttcagtctcaaccacccgagaacccatttcgtccgagcatctccatcgagccgtctccgtgaatgatgaagacctgcttgtgagaatcttgtag

SEQ ID NO: 223274 - DNA, 402 bp, synthetic construct
  misc_feature 1..402: note = Description of Artificial Sequence: Synthetic coding sequence
  source 1..402: mol_type = other DNA
atgcctccctccaaacctcatccccctgtggtcggaaaggttactcatcactccatcgaactatattgggatctggaaaagaaggcaaaaaggcagggccctcaagagcagtggttccgcttctccattgaggaggaagatcccaagatgcatacctatgggattatctacaccggatacgcgaccaaacatgtcgtggaaggactggagcccagaacactgtataggttcagactaaaagtcacgtcaccgtccggcgaatgtgaatattcccctcttgtgtcagtgtccacaacctcttccatctggctgggcggagagccaatcagctccgagcacctccaccgcgcagtgtccgtcaacgacgaggacttgttagtgagaattcttcagggtggttag

SEQ ID NO: 223275 - DNA, 441 bp, synthetic construct
  misc_feature 1..441: note = Description of Artificial Sequence: Synthetic coding sequence
  source 1..441: mol_type = other DNA
atgccaccctccaagccacacccacctgttgtgggcaaggtcacacatcatagtatagaattgtattgggatctcgaaaagaaggccaagcgtcagggccctcaggaacagtggttccggttctctattgaggaagaggaccccaagatgcacacgtatggtatcatctataccggctacgccactaagcatgtcgtggaaggcctggagcccaggaccctgtatcgctttcgtttgaaagttacaagcccgagtggggagtgcgagtactcgccgttggtcagcgtgagtacgacctccgagtattccgaccgaccacatagtcccttatcccgcagcatggaaatgaccagtaatctggagaaaatcttctgcctgtcgtttggtttgactaggtctagaaacgataccatttttaagcattgcaacaatatctgctag

SEQ ID NO: 223276 - DNA, 600 bp, synthetic construct
  misc_feature 1..600: note = Description of Artificial Sequence: Synthetic coding sequence
  source 1..600: mol_type = other DNA
tgagaaccaatcagctccgaacatctacacagagccgtttccgtaaatgatgaagacctcttggtacgaattctgcagggaggaagagtcaaagtggacgtgcccaataagttcggttttacggctctgatggtggctgctcagaagggatacactcggttagtcaagattcttgtcagcaacggaaccgacgtgaaccttaagaatggctccgggaaagacagcctcatgctggcttgttacgcaggccatcttgacgtggtgaaatacttacggagacacggtgcttcttggcaggccagagacctgggtggatgtacagcactgcactgggctgcagatgggggacactgtagtgtgatcgagtggatgattaaagatggctgtgaggtggacgtggtggatactgggagcggctggacccccttaatgcgcgttagcgcggtttctggcaatcagcgggttgcttcactgctcatagacgcgggagctaatgtgaacgtcaaggaccgcaacgggaaaacacctctgatgagcgtggttagccttttggaagagcgcaagaagaagcagcgtccaaaaaagtcatgcgtttgttag

SEQ ID NO: 223277 - DNA, 735 bp, synthetic construct
  misc_feature 1..735: note = Description of Artificial Sequence: Synthetic coding sequence
  source 1..735: mol_type = other DNA
atggaagtcaccggagtaagcgctcccactgtgacagtgtttatctctagttccctcaatacattccgctcagagaagaggtactctagatccctgactatcgcagagtttaagtgtaagctcgaactcttggtagggtctccggcaagttgcatggagctggaactctatggtgtggatgataaattctacagcaagctggatcaggaggatgccctgttgggctcatatccggttgacgacggctgccggatacacgtcatcgatcacagcggcgctcgcttaggcgagtacgaggacgtttcacgagtagagaaatacactatctctcaggaggcatatgatcaacggcaggacacggtgaggtcttttttgaaacgtagtaaactgggtcgctacaacgaggaggagagggcccagcaggaggcagaagccgctcagaggttagccgaggagaaggctcaggccagttcgattcctgtaggcagccgatgtgaagttcgggcagccggacagagccccagacgcggaaccgtgatgtatgtgggcctgactgacttcaagcccggatactggattggagtgcgatatgacgagcctctcggaaagaatgacggcagtgtaaacggcaaacgctactttgagtgccaggccaagtacggtgcgtttgtcaagcccgcagtggtgactgtcggagatttccccgaagaggactacggtttagatgagatatag

SEQ ID NO: 223278 - DNA, 1497 bp, synthetic construct
  misc_feature 1..1497: note = Description of Artificial Sequence: Synthetic coding sequence
  source 1..1497: mol_type = other DNA
atggacagccaaaaagaggccttgcagaggatcatctccacactcgccaacaagaatgacgagattcaaaacttcatcgataccctgcaccacacgctcaagggcgtccaggaaaacagctccaacattctgagtgagttggatgaagagttcgactccctgtactcaatattggacgaggtgaaagaaagcatgattaattgtatcaagcaggagcaggcccgaaagtcccaagaactgcagagccagatcagtcagtgtaataacgcactcgagaattccgaggagctactggagttcgctactaggagcttggatattaaagaaccagaggagttttccaaggcggcacgccagattaaggaccgcgtgacaatggctagcgccttcaggttgtctctgaagcccaaagtgtcagataacatgacacacttgatggtggacttcagccaggaacgccagatgctgcagacactgaaattcctacctgtacctaaagcccctgaaattgacccagttgagtgcctggtagcagataatagtgtaacagtggcgtggcgcatgcccgaggaggacaataagattgaccactttatcctggaacacagaaaaaccaattttgatggtctccccagagtcaaggatgaaagatgctgggagatcatcgacaatattaagggcacggaatataccttatccgggcttaagttcgattccaagtatatgaactttcgcgtgcgggcttgtaacaaggccgtggcaggcgaatactccgatccagtcaccctggaaacaaaagctttgaactttaatctggataattcaagcagccacctcaatctcaaggtagaggacacttgcgtggagtgggaccccacagggggtaaggggcaggagtcaaaaatcaaaggaaaagagaacaaagggaggtctggcactccctcacctaagcgcaccagcgtgggaagccggccaccggcagtccgtgggtctcgggaccggttcacaggggagagttacactgtacttggagatacagctatcgaaagcgggcagcactactgggaagtgaaagcccagaaagactgtaagagctacagcgtcggggtggcctataaaacactgggcaagttcgaccagctgggaaagaccaatacctcatggtgtattcacgtgaacaactggctacaaaatacctttgccgctaagcacaacaataaggtgaaggccttggatgttacagtcccagaaaagattggcgtgttttgcgactttgacggcggacagctgtcgttctacgacgccaatagcaaacaactcctgtactcatttaagacaaaatttactcaaccagtactgcccggatttatggtttggtgcgggggattgtctctctcaactggcatgcaggttccttccgctgttcgcaccttgcaaaaatccgaaaacggtatgacagggtcagcgtcatctttaaacaatgtagtgacacagtag

SEQ ID NO: 223279 - DNA, 438 bp, synthetic construct
  misc_feature 1..438: note = Description of Artificial Sequence: Synthetic coding sequence
  source 1..438: mol_type = other DNA
atggattcacagaaagaggcattacagcggatcatctccaccctcgccaacaagaatgacgagattcagaattttatcgatacacttcaccatactctgaagggcgtccaagaaaatagttccaacatcttgtcagagttagatgaagagtttgactccctctacagcatactggatgaggtcaaagagtctatgatcaattgtattaaacaggaacaggcccgtaagagccaagagctccagtcacagattagtcagtgcaacaacgccctggagaactccgaggagttgcttgagttcgccacccggtccctggatataaaggaaccagaggaattttctaaagtgcacaaaaattgcataaacacgctcaacaaaggcagctgtatctttaagaaagcatttctctttttttttagctttgggtttctttactag

SEQ ID NO: 223280 - DNA, 1593 bp, synthetic construct
  misc_feature 1..1593: note = Description of Artificial Sequence: Synthetic coding sequence
  source 1..1593: mol_type = other DNA
atggacagtcagaagtactgtttcaaggaaaatgaaaatgtgaccgtggacaaagcctgcttcctgatcagcaatatcaccataggtcctgaaagcattaacctgcaacaggaggccctgcagaggataatcagtaccctggctaacaaaaatgatgagatccagaatttcatcgacaccctacaccacacgctcaagggggtgcaggagaatagtagcaacatactgtctgaactggatgaggagttcgattccctgtattctatcctagatgaagtaaaagaatccatgataaactgtattaagcaggaacaggctcggaaatcgcaggagctgcaatctcagatcagccagtgtaacaacgcccttgaaaacagcgaagagctgttagagttcgccacaagaagcctggacatcaaagagcccgaagagttcagtaaggctgctcgtcagataaaggaccgagtgacgatggccagtgcctttcggctgtctctaaagccaaaagtgtccgacaacatgacccacctaatggtcgatttcagtcaagaacgacagatgctgcagactctcaagttcttgcctgtgccaaaggcccctgagatcgatcccgtcgaatgcctggtggccgacaactctgtgacagtggcctggagaatgccagaagaggataataaaattgatcactttattctggagcatcgcaagactaatttcgacggattgccaagggtgaaagacgaacgctgctgggagattattgataacataaaaggaactgagtacacattatcaggcctgaagttcgactccaaatatatgaactttagagtgcgtgcatgcaataaagcagtagccggtgaatattccgatcccgtgaccctggaaactaaagctttgaattttaatctagacaactccagttctcacttaaacctcaaggtggaggatacctgtgttgagtgggaccctacaggaggcaaggggcaggagtcgaagatcaagggaaaggagaacaaaggcaggtctggaacaccttcaccaaaacgtacatctgtgggcagtcgcccacccgctgtgaggggctccagggatcgttttactggagagtcttataccgtactgggggatactgcaatcgagtcaggtcagcactactgggaggtgaaggcacagaaagattgcaaaagctatagcgtaggcgtagcctataagacactcgggaagtttgaccagctgggtaagacaaatacatcctggtgcatccacgtgaataattggctacagaatacctttgcagctaagcataacaacaaagttaaggcccttgacgtcacagtgcccgaaaaaattggagtgttttgtgatttcgatggcggtcaattgagcttttatgatgccaactcgaagcaattgctgtactcatttaagaccaagtttacccagcccgttctgcccggtttcatggtgtggtgcggtggcctttcactctccaccggcatgcaggtaccttcggccgttcgaacactgcagaagagcgaaaacgggatgaccggatcagccagttcattaaacaacgtcgtgacccagtag

SEQ ID NO: 223281 - DNA, 1152 bp, synthetic construct
  misc_feature 1..1152: note = Description of Artificial Sequence: Synthetic coding sequence
  source 1..1152: mol_type = other DNA
atggcatccgccttccgactctcccttaaacctaaggtgtccgataacatgacacacctcatggttgacttcagtcaggaaaggcaaatgttacagactctcaagtttctccccgtaccgaaggctccggagatcgacccggtcgaatgcttagtcgcagataattcagtgactgtggcctggcgcatgccggaggaagataacaagatcgatcactttatcttggagcataggaaaaccaattttgatggactgcctcgtgtgaaggacgaaaggtgctgggaaatcatagacaacatcaaaggaaccgagtacaccctctctggactaaagttcgactcaaagtacatgaatttccgagtacgagcctgcaacaaggctgtagcaggggagtattcagaccctgtgaccttggaaactaaagcactgaactttaatctcgataactcgagcagtcacctcaatctgaaggtcgaggatacctgtgtggagtgggaccctaccggcggtaaaggccaggagtccaaaatcaagggaaaagagaacaagggaagcgtccacgtgacttccttgaagaaacatacctccggcacaccgtccccaaagcgcacaagtgtaggtagcaggccgcctgcagttcgaggatcccgtgaccggttcacaggagagtcttacacagtgctcggcgataccgcaatcgagagcggccaacattattgggaggtgaaggcgcaaaaagactgtaagtcttattcagtcggagtggcctacaaaacactgggaaagtttgatcaattggggaagaccaacacatcgtggtgtattcatgtaaataattggctccaaaatacatttgccgcaaaacacaacaataaagtcaaggctttggacgtgacagtgccagagaaaatcggcgtgttctgcgattttgatgggggacaactgtcattctatgacgcaaactcaaagcagctgctttactctttcaaaactaaattcacccagccagtgctccccggatttatggtctggtgtgggggtttgagcctgagtacaggtatgcaggtccctagtgccgtaagaacacttcaaaaatcagaaaatgggatgacagggtcagcatcctccctgaacaacgttgtaacacagtag

SEQ ID NO: 223282 - DNA, 5685 bp, synthetic construct
  misc_feature 1..5685: note = Description of Artificial Sequence: Synthetic coding sequence
  source 1..5685: mol_type = other DNA
atggcccctgaagcaggcgcaaccctgagagctcctcggaggcttagttgggcggctctgctgctgctggcagctctgctgcctgtggccagcagcgcagctgcttcggtggaccatcctctgaagcccagacatgtaaagctgctcagcaccaagatgggacttaaagtgacatgggaccctcccaaagatgccacctcaagaccggtggaacactataatattgcctacggtaagtctctgaagtccctgaagtacataaaagtgaatgccgagacatacagtttcttgattgaggacgtggaacctggcgtagtgtacttcgttctgctgacagcggaaaaccactccggcgtctcacgcccagtctaccgcgcagagtccccccctggcggagagtggatcgaaatcgacggctttcctatcaaggggcctggacccttcaacgaaaccgtgacagaaaaggaagtccccaataaaccactgcgagtgcgcgtgcgctccagtgacgaccggttgtcagtggcttggaaagcgccacgccttagcggagccaagagtcccagaaggagcagaggcttcttgctcggttatggtgagtccggcaggaagatgaattacgtgcctctcacgcgcgatgagagaacccatgaaattaaaaagctggcttccgaatccgtctacgttgttagcctacagagtatgaacagccagggcaggagtcagccagtttaccgcgcagctctgaccaagcgaaagatatccgaggaagacgagctggatgtccccgatgatatttctgtgagggtgatgtctagccagtccgtgttggtgagctgggtggaccccgtgctggagaaacagaaaaaagttgtggccagccgtcagtatacagtgcggtatcgtgaaaaaggggaactcgcccgatgggactacaagcagattgcgaacagaagagtacttattgagaatcttatcccagatactgtctacgagttcgcagttaggatctctcaaggggagagagatgggaagtggtctacatctgtgttccagcgtaccccagagagcgcaccaaccactgccccagagaacctgaatgtgtggccggtgaacggaaaaccgaccgtcgtcgctgccagttgggacgcgttacccgaaacagaaggaaaagtgaaggaatacattctgagttatgcccctgccttaaaaccttttggagcgaagagcctgacatatccgggtgatacaacctctgctttagtcgatgggctgcagccaggcgagaggtatctattcaagatccgcgctactaaccgccgaggcctgggtccgcatagtaaggcctttatcgtggccatgccaaccacatccaaggcggatgtagagcagaatacagaggataacggcaaaccagagaagcccgaaccgtcatcaccttcaccacgcgcacctgcttcctcacaacacccatccgtcccggcatctccacagggcagaaatgccaaggacctcctgcttgatcttaaaaataaaatactggctaatggaggagcccctcgaaaaccacagctcagggctaaaaaggcagaggagttggatctgcagagcaccgagatcaccggagaggaagaactgggctctcgtgaggactcccctatgtcaccctccgacacccaggaccaaaagaggacgctccggccaccctcacgccacggccattcagtcgtcgcacccggaagaacagcagtaagagcccgaatgcctgcattgccacggagggagggtgtggataagcccggttttagtctagctactcagcctagaccaggcgcacccccaagtgccagcgcatccccagcccaccatgccagtactcaaggcacaagccatcgccctagcctacctgcttcccttaacgataatgacttggtagatagcgacgaagatgaacgcgcagtgggctcattacatccaaaaggggcattcgcccaacctcgtcctgcccttagtccatcccgccaatctcccagcagcgtgctgcgggataggtcatctgtgcacccaggcgctaaacctgcatcccctgcccgacggacaccgcacagtggcgcagccgaagaggactcatccgcctcagcacccccttccaggctgtctccgccacatggcggtagtagcagattgctcccgacacaaccccacttatctagcccactctctaaaggcggtaaagacggcgaagacgcgccagcaaccaattcaaacgccccaagccgctctaccatgagttcctcagtttcatcacatctgtcctccagaacacaggtcagtgagggggctgaggcgtccgatggagagtcccacggcgatggtgacagggaagacgggggacggcaggccgaggccacagctcagaccctgcgcgctaggcccgcaagcggacatttccacctgttgaggcataagccatttgctgctaacgggaggtcacccagcaggtttagtatcggcaggggacctcgcctgcagccttcgtcatcccctcagagcaccgtgccctcccgggcacacccgagagtgccctctcacagcgactcccaccccaagttgtccagtggcatccacggggacgaggaagacgagaagcccttgccagcaaccgttgtgaatgaccatgtgccatcttcttcccgacagcctatttcccgcggatgggaagacttgagacggtccccgcagcggggtgcctccctgcatagaaaagagcctatccccgagaatcctaagtcaactggggctgatactcatccccagggcaaatacagctccctcgcaagtaaagcccaagacgtgcagcagagtaccgatgccgacacggaaggtcattctccgaaagcccagcccggttctactgataggcacgccagccctgccagaccaccagctgctagaagtcaacagcacccttccgttcctcgtcgcatgacgcccggaagggctccccaacagcaacctcccccacctgtggcgacaagccagcaccatcctggaccccagtctcgcgatgcagggagatccccaagccagccgagactgagcctcacacaagccggacgtcccaggccaacctcacaaggcagatcccatagtagctctgatccctatactgcgagtagcagaggtatgttgcccacggcgcttcagaaccaagatgaggatgctcagggtagttatgatgacgattctacagaggtcgaagcccaggacgttagggctcccgcacatgccgcacgtgcaaaagaagcggcagcgagcctgcccaaacaccagcaggtggaatctcctacaggagcaggtgccggaggcgaccataggagtcagcgcggacacgctgcatcccccgcacgtccatcaaggccagggggtccacaatccagggcgagggtcccatcaagagccgcacccggaaagagtgagccacctagcaagcgccctctgtcatcaaaaagccagcagtccgtgagcgcagaggacgacgaggaggaggacgccggtttcttcaaagggggtaaagaggacctgctctcttcatccgtcccaaaatggccaagttcttctaccccacgtggaggaaaagatgccgatgggtcattagccaaggaggaacgggagcctgctattgctctggctccccgagggggtagcctggcacccgtgaagaggcctctaccacctccaccagggtcaagcccgagagccagccatgtcccgtccaggcttccccctaggtctgcagccactgttagcccagtcgctgggacacatccctggcctcagtatacaactagggctcctcctgggcatttctccaccaccccaatgttgagtctgcggcagcgaatgatgcatgccagatttagaaaccctctaagtcggcagcctgctagaccgagctaccggcaggggtacaacggacgaccaaacgtggaagggaaggtcctaccaggatcaaatggcaaacccaatggccagcggatcataaacgggcctcaaggaacaaagtgggtggttgatctagatcggggactcgtgttgaatgccgagggacggtacctgcaggacagtcatggaaaccctttgaggatcaagttagggggagacggaagaaccatcgtggatctggaaggcactccagtggtgagccctgatgggctcccgctctttggacagggaaggcacggtaccccactcgccaacgctcaggacaagcctatcctgagcctagggggaaaacctctggtagggcttgaggtaatcaaaaaaaccacacacccaccgactactacgatgcaaccaacaacaacaacaacacccctaccaactacaacaactccaagacccaccacagcgactactagaagaactacaactacaagacgcaccaccacccgcagacctacgacaactgtgaggacaactacccgcactacgacaacaactactcctacaccgaccactccgattccaacatgcccccctggaaccttagagcgccacgacgatgacggcaacctgatcatgtctagcaacggcatccctgagtgttacgccgaggaggatgagttctctgggttggagaccgatacagccgtgccaacagaagaggcgtatgttatttatgatgaggactacgagttcgagactagtcgtccaccaacaaccaccgagccctccaccacggccacaactcccagagttatccctgaggaaggagccatcagttcctttcctgaggaggagttcgaccttgccggacggaagaggtttgtggccccttacgtgacttatctgaacaaggatccgtctgctccatgctccttaacagacgccctggaccacttccaggtggatagtttggacgaaatcattcctaacgatcttaagaaaagcgacctgccccctcagcacgcaccacgcaacatcaccgtcgttgctgtggaagggtgccatagcttcgtgattgtggactgggacaaggcaacgcctggtgatgttgtaactggctaccttgtttacagcgcatcatacgaagattttatccgtaacaagtggagtacccaggcatccagcgtcacccacttgcccatagagaacctgaagcccaatacacgctactattttaaggttcaggcgcaaaatccacacggttacggccctatcagccccagcgtgtctttcgtgaccgaatcagacaatccactgctggtcgttagaccccctggtggcgagccaatttggataccgttcgcttttaaacacgatccctcctatacggactgccacggcaggcaatatgttaagcggacatggtatcgaaaatttgtgggggtggtgctttgtaacagcttacgatacaaaatttacttaagcgacaacctcaaagataccttctactctatcggggacagctggggcagaggggaggatcattgccaattcgtcgacagccatcttgacggcaggaccgggcctcagagttacgtggaggctctccccactattcagggctactaccgtcagtacaggcaggaacctgtcagatttggaaatatcggatttggtaccccttattactacgtggggtggtacgaatgcggcgtcagtattcccggtaagtggtat

SEQ ID NO: 223283 - DNA, 5495 bp, synthetic construct
  misc_feature 1..5495: note = Description of Artificial Sequence: Synthetic coding sequence
  source 1..5495: mol_type = other DNA
atggctcccgaggcaggcgctacattgagggctccccgtagactcagctgggccgctctgctgctacttgccgcactgctgcccgtggcttctagcgctgccgcatcggtcgaccaccctttaaagcctagacatgtgaagctgttgtcgaccaaaatggggctgaaggtgacttgggatccaccaaaggatgcgaccagtcggccagttgagcattacaacatcgcttatgggaagagcctgaagtcactgaagtatatcaaggtaaatgcagagacctatagtttcctgattgaggacgtagaaccaggagtggtctactttgtcctgcttacagctgaaaaccactctggggtgagtcgcccagtgtacagagccgaaagcccccctggcggagagtggattgagatcgatggctttcctattaagggtcctggccctttcaacgagacggtaaccgagaaagaggtccctaataagccactcagagtaagagtccgttcctccgacgaccggctttcggtggcttggaaggcacccagactgagtggagccaaatctccacgcaggtcacgtggcttccttctcggctacggggaatcgggcaggaaaatgaactatgtgccactgacgagagacgaacgaacacatgaaattaagaagttggcctctgaatctgtttacgttgtttccttacagtccatgaattcacagggtaggagtcagcccgtgtatagggccgcactgactaagcgaaagatttccgaggaagacgagctggatgtacccgatgatatctctgtcagggttatgagctcccagtccgtgttagttagttgggttgatccagttctggaaaaacaaaaaaaagtggtggccagtaggcagtacaccgtccgttatcgggagaaaggcgagctggctagatgggactataagcagattgctaatcgtagggtcctgattgaaaacctaataccagacacagtttatgaatttgctgtaagaatctctcagggcgagagagacgggaaatggtccactagcgtgtttcaacggacgcccgaaagtgcccctaccaccgcccctgaaaacctgaacgtgtggcccgtcaatggtaagcccacagtggttgcagcgtcctgggacgcgctgccggagactgaagggaaggtgaaggcttccaaagccgatgtggaacagaacacagaggacaatggcaagcctgaaaagcctgagccctctagtccgtcccccagagctcccgcttctagccagcacccctccgttcccgctagcccccagggcagaaacgccaaggatctgttgctggatctaaagaataagatcttggctaatggcggagcccctcggaagccccagctacgggcaaagaaagccgaggagctggatttgcagtccacggagattacaggcgaggaagaactcggctctagggaagacagtcctatgtcaccctccgatacacaagaccaaaaaagaactttgagaccccctagccggcacggccatagtgtcgtcgcgccaggaaggactgctgttagggcacgaatgccggctctacctaggcgcgagggtgtggataagcctgggttctctctggctacacaacctcgacccggagccccacccagcgcttctgccagccccgcacatcacgcatccacacaggggacttctcaccggccaagcctgcctgcctctttaaatgataacgacctagtcgacagcgacgaagatgaacgcgctgtaggttctctgcacccaaaaggggcttttgcacagcctcgccctgcactgagcccctcccgacaaagcccgtcgagcgtgttgcgggacagatcctcagtgcatccaggtgccaaacctgcttcccccgcaagaaggactccacactcaggggctgccgaggaggattcctctgcatcggctccaccctccaggctttcaccccctcacggaggatcctcgcggcttctcccaactcagccacacctgtcctctccgcttagcaagggcggaaaggacggagaggacgccccagcaaccaattccaatgccccaagcaggagtacgatgtcttcttctgtgtcctcacacctaagctcgcggacacaagttagcgagggggcagaggcctctgatggggaatcccacggggacggcgatagagaggatggaggacgccaggctgaggccaccgcccagacattgagagccaggcccgcttccggacatttccacctgctaaggcataaaccatttgccgcaaacggccgaagtccttcccgctttagtattggacgagggcctcggttgcagccaagctcctcacctcaatccactgtccctagtcgggcacacccccgtgtaccctctcacagcgattcacatccgaagctgagtagcggtatccatggcgatgaagaggatgaaaagcccctgccagcaacagtagtaaatgaccacgtgccctcttccagcaggcagccaatcagcagagggtgggaggatctgaggcgcagtccacagcggggagccagccttcaccgcaaggagcctattccagagaatcccaaatctactggagcagacacccatcctcagggcaagtacagcagtctggccagtaaagcccaggacgtccagcagtctacagacgcggacacggagggtcactcaccgaaggctcagccaggttcaacagatcgccacgcttcaccagctaggcctcccgctgcacggtcccagcaacatccctcagttcccagacggatgaccccaggtagagcccctcaacagcagccacccccacccgttgccacttcccagcaccatcccggtcctcaaagtagggacgctggcagatctccctcgcagcctagacttagccttacgcaggcagggagaccacgtccaacaagtcagggaaggagtcacagcagctcagacccctacacggcctcctcccgaggcatgttgcctacagctctacagaaccaggatgaagatgctcagggatcttatgacgacgacagcacggaagtcgaagctcaagacgtgcgcgctccggctcatgcagctcgcgcaaaggaagctgccgcaagcctgccaaaacaccaacaggttgagtctcccaccggggctggcgctggaggggatcatcggtcccagaggggacatgctgcttccccagccagaccaagtaggccgggaggaccacaatcccgggctcgggtgccctcacgcgctgctcccggtaagagcgaaccaccgagcaagaggccattatcctccaaatctcagcagagcgtgtcagccgaagacgatgaggaggaagatgccggattttttaaaggagggaaggaggatctgctctccagttcagtgcctaagtggcccagcagttctacacccagaggtggaaaagacgccgacggctcccttgcaaaggaggagcgggaacccgcaatagccttggctcctcgtggtggctctctcgctccggtcaaaagacctcttccccctcctcccggttctagccccagagcaagccatgtgccaagccgccttcccccacgcagcgcggcaactgtatctccggtggcaggtacacatccttggccccagtacacgaccagagctccaccaggtcacttctccaccacgcctatgctgtcgctgaggcagagaatgatgcacgcacgatttagaaatccgctcagcagacagccagcaaggcctagctaccggcagggatataacggtaggcccaacgtcgagggcaaggttctccctggctccaacggtaagcctaacggacaaaggatcatcaatggtcctcaaggcactaaatgggtggtggacctggaccgcggtctcgtcctcaacgccgaaggacggtacctccaagactcacacggtaacccgctgcgcattaaattgggcggtgacggacggaccatcgtcgatcttgaggggacccctgttgtttcaccagatggcctgccgctatttggtcagggacggcatggcactccacttgccaacgcacaagataagccaatcttgagcttgggcggtaagcctctcgtgggacttgaggtaatcaaaaagacaacacacccaccaacaaccaccatgcaacccacaactacgaccacccccctcccaaccacaacaaccccaagacctacgacagcaacaacaaggagaaccacaacaacccgccgtacaactacacgaagaccaacaacaaccgtgagaaccactactaggacaacgactactactactcccactcccaccactccaattccaacttgccctcccggtacactcgagcgccacgatgacgacggtaatcttatcatgagcagtaatggaatcccagaatgttatgctgaggaggacgaattcagcggcctggaaaccgatacagcagtgccaactgaggaagcgtacgtgatctacgatgaggactacgagtttgaaacatcccgtcccccaaccactacagaaccttctacaacagccaccactccaagggttataccagaagaaggcgcaatcagctcattccccgaagaggagttcgacttggccggacgcaagcgcttcgtggccccatatgtgacctatcttaataaggacccatctgctccatgcagcttgaccgacgctctggaccactttcaggtcgactccctggacgagattatccccaacgatctgaaaaaaagtgacctcccaccacaacatgcaccaagaaatatcacggtggtagcagtagagggctgccatagctttgtgatcgtggactgggacaaagccacacccggagatgtggtaaccggctacctggtgtactctgcatcttatgaggacttcattagaaacaagtggtctacgcaagctagtagcgtgactcatctcccaatcgaaaacctcaagccaaatacgcgctattactttaaagtacaggcccagaaccctcacggttatggcccaatcagcccatcggttagctttgtcaccgaatctgataatccgctcctcgtcgtgcggccaccagggggagagccaatctggatcccatttgccttcaagcatgacccgtcttacacagactgccatgggcgacagtacgtcaaacggacctggtaccgcaagttcgttggtgtagtgttgtgcaactctctgagatacaagatttacctgtccgataacctcaaagatacattctactcaattggggacagctggggcaggggtgaggaccattgccagttcgttgatagtcacctggacggtaggacaggcccacaatcctatgtggaagccctcccaacaatccagggatattatcgccagtatcgtcaggaacctgtgcggttcggaaacatcggattcggtacaccctattactacgtgggatggtatgaatgcggcgtatcgatccccggtaagtggta

SEQ ID NO: 223284 - DNA, 3615 bp, synthetic construct
  misc_feature 1..3615: note = Description of Artificial Sequence: Synthetic coding sequence
  source 1..3615: mol_type = other DNA
atgtatgttactatgatgatgactgaccagattccattagaactgccccctctcttgaacggggaagtggctatgatgccacatttagttaacggggacgcagcccagcaggtcatcctggttcaagtcaacccaggggagacatttacaatcagggccgaggacggcactctacagtgcattcagggtccggctgaggtccctatgatgtcaccaaacggttccataccacccattcacgtgccccctggctatataagtcaagtcattgaggacagcacgggtgttagaagggttgttgtaacgccacaaagcccggaatgctatccccctagttatccctcagccatgtcgcctacccatcaccttcctccatacttaacacaccatcctcacttcatccacaactctcacacagcatactacccacccgttaccgggccaggagacatgccacctcagtttttcccacaacatcatctcccacataccatctacggtgagcaggaaattatcccattttatggcatgagtacttatatcactcgggaggaccagtattcaaagcccccacataagaagctcaaggacaggcagatcgaccgccagaatcggttaaattccccaccaagttcgatctataagagcagttgcaccacagtgtataacggatacggaaaggggcacagtgggggtagtggcggtgggggatccggaagtggaccagggattaagaaaacggaacggagagccaggtcgtccccgaagtctaacgactctgacttgcaagaatatgagctggaagtgaagagggttcaagacattctaagtggtatcgaaaagccccaggtcagcaacatccaggccagagcagtggtgctctcctgggcacctcccgttggcttgtcctgcggcccacattccggcctgagttttccctactcttatgaagttgccctgtctgacaagggtagggatggtaagtacaagattatctactccggcgaagagttggagtgtaatctgaaggatctgaggcccgcaactgactatcatgtgcgagtgtacgccatgtataattctgtaaagggctcctgcagcgagcctgtgtcatttacaacccatagctgtgcccctgaatgtccattccctcctaagctcgcccatagatccaagtcaagcctgacactgcaatggaaggctcctatcgataacggatccaagattacaaattacctcctcgaatgggatgaaggcaagcgtaattcaggctttcgccaatgcttttttggtagtcagaagcattgcaaactcacaaagctttgcccggctatgggttatacatttagattggccgcacggaatgacatcggcacatctggatactctcaggaagtggtgtgctacacattgggaaatatcccccagatgcccagtgcaccccgtttagtaagagctggcattacttgggtgactcttcagtggtctaaacccgagggatgcagtcctgaggaggtcattacttatacccttgagatacaggaggatgagaatgacaatctattccatccaaagtacactggggaggacttgacttgcaccgtcaagaaccttaagaggagcacacaatacaagttccgactcacagctagcaatactgagggcaagtcgtgcccttcagaagttctggtttgtacaacctcccctgaccggcctgggccacccaccaggccactcgttaagggccctgtgaccagccacgggttctcagtcaaatgggacccccctaaagataacgggggaagcgagatcctgaagtatctcctggagatcacagacggtaacagcgaggcaaatcaatgggaagtggcgtattcaggatctgcaactgagtatacattcacacacctgaaacccggtaccctatacaagctgcgagcttgctgtatctcaacaggcggacactcacagtgctctgaaagcctgccggtgcggactctctctattgcccctggccaatgtaggccccctcgtgtgctgggcaggcccaaacacaaagaggtccatctcgaatgggatgttccagccagtgagtctggatgcgaagtgagtgagtacagcgtcgagatgaccgaaccagaggacgtagcttctgaagtatatcatggtcccgaactcgagtgtactgtgggtaatcttctgcctggaaccgtgtatcgcttccgtgtgcgtgcacttaacgacggaggatatgggccatatagcgacgtgagcgagattactactgccgcaggtccacccggacagtgcaaggcgccttgcatctcctgtacgcctgacggttgtgtgctggtgggatgggagagtcccgattcctctggtgccgacataagtgagtaccgcctggagtggggagaggatgaggagagtctggaattaatctatcacggcacagatacaagatttgagatacgagacctattgcccgcagctcagtattgttgccgcctgcaggccttcaaccaggcgggtgccggaccctattctgagttggtcctttgccaaacacctgcatctgcgcctgatccggtatccacactttgtgtgctggaggaagagccgctggatgcataccctgactcaccctcagcgtgcctagtcctgaattgggaagaaccctgcaataatggttccgaaattctggcttatacaatcgacctcggagacacgagcattacagttggcaacacaaccatgcatgtgatgaaggaccttctgcccgaaacaacgtacaggatccggatccaggccataaatgaaataggtgcaggccctttctcccagtttattaaggcaaagacccgaccgctgccacccttaccccctcggcttgagtgtgccgctgccggacctcagagcttgaagttgaaatggggagactccaatagcaaaactcacgctgctgaagacatcgtgtatacattgcaactggaagaccggaataagcggttcatatcaatctatcgtggaccttcccatacttacaaagtgcagaggcttaccgaatttacctgttactccttccggatccaggccgcatcagaagccggtgagggcccattttctgagacctacacctttagcacgactaaaagcgttcctccgaccatcaaggctccacgcgtaacgcagctggagggcaactcttgcgagatcctgtgggaaactgtaccttcaatgaaaggcgacccggtgaactacattcttcaggttcttgtgggtcgggaatcagaatataagcaagtctacaagggggaggaagcgaccttccagatttccggcttgcagactaatacggattatcgcttcagggtgtgcgcgtgcaggaggtgcctggatactagccaagagctgtccggagctttctccccatctgccgcatttgttcttcagagatcagaggtgatgttgactggagatatggggtctctggacgatccaaagatgaagagcatgatgcccaccgacgagcagttcgcagcgatcatagtcctgggcttcgcaacattgtctatcctcttcgcatttatcctccaatatttcttgatgaaatag

SEQ ID NO: 223285 - DNA, 216 bp, synthetic construct
  misc_feature 1..216: note = Description of Artificial Sequence: Synthetic coding sequence
  source 1..216: mol_type = other DNA
atgtatgtcacaatgatgatgaccgatcagattccactggagctgcctccattactgaacggggaggtcgcaatgatgcctcaccttgtcaatggagatgcggctcaacaggtgatcctggtgcaggtcaacccaggcgaaacctttactatccgcgctgaggatggaacattacagtgtatccaggaagtcaacgtaaaacggcactgcctgtag

SEQ ID NO: 223286 - DNA, 3615 bp, synthetic construct
  misc_feature 1..3615: note = Description of Artificial Sequence: Synthetic coding sequence
  source 1..3615: mol_type = other DNA
atgtacgtgacaatgatgatgacagatcaaattcccctagaactccctccactgctgaacggcgaggtggcaatgatgccccacttagtgaatggggatgccgctcagcaggttatcctggtccaggttaacccaggcgagactttcacaatccgcgcagaagacggaacattgcagtgcattcagggacccgctgaagtgcctatgatgagccccaatgggtcaataccacctatccacgtaccacctgggtatatcagtcaggtgatcgaggatagcactggcgtgcggagagtggttgtaacaccacaatctccggaatgttatccccctagctaccccagcgctatgagcccaacacatcatctgcctccctacctgacccaccatccccactttatccataattcccacacagcttactacccgccagtgactggccctggcgatatgccaccccaattcttcccccaacaccaccttccacacactatttatggagaacaggagatcatacctttctatggtatgtcaacttacatcacccgcgaggatcagtactctaaacctcctcataagaaactcaaagatcggcaaatagatcgccagaatcggctcaacagcccgccttccagtatctacaagtccagctgcacaacggtatacaacggttatggaaagggacacagtggcggaagcggagggggtggttccggctccggaccaggaatcaagaagacagaaaggcgggcaaggtcttcccccaaatcaaatgacagcgatctgcaggagtatgagctggaggtcaagagagttcaggacatcctatcagggattgaaaagccacaggtgagcaatattcaagcgagggccgtggtccttagttgggctcctccagttggtctgtcatgcgggccacacagtggactcagctttccttattcttatgaggtagctctctctgacaagggccgagacgggaaatataaaattatctatagcggtgaggaacttgagtgtaacttaaaggatctgcgaccagccaccgattatcacgttcgcgtctatgccatgtataactccgtgaaaggaagctgcagtgaaccagtgtctttcaccacccacagctgcgcaccagaatgcccctttccccctaagttggcccatcgctctaagtcgtctctgaccttacagtggaaagcacccatcgacaacgggtccaagatcacgaactacttactcgaatgggacgaggggaaacgtaactcggggttccggcagtgctttttcggctctcagaaacattgtaagctaactaagctctgcccggctatgggctacactttccgactcgcggcacgaaacgatatcgggacctccggctactcccaagaagtagtatgctatacgttgggcaatataccgcaaatgccatcagcgcctagactggtgcgtgctggcataacatgggttaccctgcagtggtccaaacccgagggatgctcaccagaggaggtgattacctatacactggagattcaggaggacgagaacgataaccttttccatccaaagtacactggggaggaccttacttgtaccgtgaagaatctgaagcgctccacacagtacaagtttcggctgaccgcctctaatactgagggcaaatcgtgcccctctgaagttttggtatgtactacctcccctgaccgtcctgggcctcctacacggccattagtcaaaggccctgtgacttcacacggcttctcggtgaaatgggatcctccaaaagacaacgggggttccgaaatcttaaagtatctgcttgaaattactgacggcaattctgaggccaaccagtgggaggttgcttactccggatctgcgactgagtatacttttacccatctgaagccagggacattgtataaactgagggcctgctgcatcagtacaggtggacattcacagtgttccgaaagtctgccagtcaggaccttgtccatcgcccctggacagtgtcggcctccaagagtccttggcaggcctaaacacaaagaggtgcatcttgaatgggacgtgccagcctcagaaagcgggtgcgaggtcagcgaatattcagtggagatgacagagccagaggatgtggcctccgaggtgtatcacggaccagaattagaatgtaccgttgggaacttgttgcccggaaccgtgtaccggtttcgcgtgcgtgcactgaatgacggtggctatggcccttactccgacgtcagcgagatcacgaccgccgctggacccccaggccagtgtaaggctccatgtattagttgtacccccgatggttgtgtgttagtgggatgggaatcacctgatagcagcggcgctgacatctccgagtacaggctggaatggggagaagacgaggagtccttggagctcatataccacggtacagacacacggttcgagatcagggacctgctgcctgccgctcagtactgttgtagacttcaagccttcaatcaggccggtgccggtccctactccgagctagtcctgtgtcagacacccgcatcagcacccgaccctgtcagcaccctgtgcgttctggaggaggaaccactcgatgcttatcctgacagtccttctgcttgtctcgtcctaaactgggaggagccttgcaacaacgggagtgagatcctggcatacacaattgacctgggagatacaagcatcacagtgggaaatacaactatgcacgtcatgaaggatctgctccctgagacaacgtatcgtatccgcattcaggctatcaatgagatcggagctggcccattcagccagtttatcaaagctaaaacccgccctctgccaccattgcccccacgccttgagtgtgccgctgcaggaccgcagagcttgaaactcaagtggggagactcaaactctaagacccatgctgccgaagacatcgtctacactctccagctagaagatcggaacaagcggttcatctcgatttataggggcccatctcacacttataaggtccagaggttgacagagtttacttgctactcgtttaggattcaagccgcatccgaggccggtgaaggccctttctctgagacatatacgttttcaaccacgaagtcagtccctcccactattaaagcgccacgcgtgactcagctggagggcaatagttgtgaaatcttgtgggaaaccgtgccaagtatgaaaggcgacccggtgaattacattctacaggtcctcgttggacgtgagagtgagtacaagcaggtgtacaagggagaagaggccactttccagatttccggactccagactaatacggactaccgctttcgtgtgtgtgcttgtcgacgctgcttagacacgtcccaggaattgtccggcgcattcagcccctccgctgcttttgtgctgcagcggagtgaagtaatgctaaccggcgatatgggcagtctggacgatcccaagatgaagagtatgatgcccaccgacgagcaatttgccgctataattgtgctgggttttgcaacactttctattctgttcgcatttatactgcagtactttttgatgaaatag

SEQ ID NO: 223287 - DNA, 3615 bp, synthetic construct
  misc_feature 1..3615: note = Description of Artificial Sequence: Synthetic coding sequence
  source 1..3615: mol_type = other DNA
atgtacgtgaccatgatgatgactgatcagatcccgttggaactgccacctctgttaaatggcgaggttgcaatgatgccccacttagttaacggtgacgctgcccagcaggtgattttagtccaggtgaacccaggcgagactttcacgatccgcgctgaggacggcacgctccaatgcattcaggggccagcggaggtgcccatgatgtctccaaacggtagtattccccctattcatgtgcctcccggttacatcagccaggtgatcgaagatagcacaggtgtaagacgtgtcgtagtgaccccccaaagcccggagtgctaccctcccagctacccctctgctatgagcccaacacaccacctgcctccttacctgacccatcacccccacttcatccataattcccacaccgcttactacccaccggttacgggacctggcgatatgccccctcagtttttcccccagcatcatctgccacacaccatctacggagagcaagaaattatacctttttacgggatgagcacctacattacccgtgaggatcagtattcaaagccgcctcacaaaaagttgaaggaccggcaaatagaccgtcagaaccggcttaacagtcctccgtcctctatatacaaaagctcttgcactacagtctataacggatatggcaaagggcacagcggaggctccggcggaggtggcagcggaagtggcccagggataaaaaagacggagcggagggccaggtcttcaccaaagtccaacgatagcgacctacaagagtacgagctggaagtcaaacgggtgcaggatattctgtccggaatcgaaaagccccaggtgagcaacattcaagcacgagccgttgttctgtcctgggccccacctgttggcctcagctgtgggccacacagcggtctctccttcccctattcatatgaagtggcactcagcgacaagggacgggatggcaagtacaagatcatttactctggggaagagctcgaatgtaacctaaaggatctccgacctgcaaccgactaccatgtgcgcgtatacgccatgtacaacagtgtgaaaggttcttgttccgaacctgtgtcatttaccacacacagttgtgctcccgagtgtccgttcccgcctaaactggcacaccgctcaaagagctccctgactctccaatggaaggccccaatcgacaacgggagcaagatcactaactacttgctcgaatgggacgaagggaagaggaactcaggatttcgtcaatgtttctttgggagccagaaacattgtaaattgaccaagctgtgtcctgccatggggtatactttcagacttgcagctagaaacgatattggtacatcaggctacagtcaagaggtcgtgtgttacacattagggaatatcccacagatgcctagtgcacccaggctcgttcgagccggtatcacgtgggtcactctgcagtggagcaagcccgaaggttgctcgcccgaggaggtgattacttacacgttagagattcaggaggatgaaaacgacaatttatttcacccaaagtatacaggagaagacctgacttgcactgtcaagaacctgaaacgaagcacgcagtacaaatttaggttgacagcgtccaatactgagggcaagagctgcccgagcgaggtgctcgtgtgcactacatcccctgaccggccaggaccccctactagacctctggtcaaagggcctgtaactagccacgggttttctgtcaagtgggacccacccaaagacaatgggggttctgaaattttaaagtatttattggagatcacagacggaaactcagaggctaatcagtgggaagtggcatactcagggtccgccacagagtatacatttacacaccttaaaccaggcactctatataagctgagagcctgttgcatttccaccggcggacactcccagtgctcagagtcgttgccggtccgcacgctgagcatcgccccaggtcagtgtagaccaccacgcgttctcggtcgaccgaagcacaaggaagtgcacctggaatgggacgtccctgcgagtgagtcaggatgtgaagtgtccgagtacagcgtcgagatgactgagcctgaagatgtcgcatccgaagtttatcatgggccagagctggagtgtacggtggggaacctgttacctggaacggtgtacagattcagagtgcgcgctttgaacgacggtggttacgggccttattcagatgtgtctgagataacaactgctgctggcccaccaggccagtgtaaggccccatgtattagttgcacccctgacggttgcgtattagtggggtgggaatctcccgattcaagtggagcggatatctcagaatatcggctcgagtggggagaagacgaagaatctctggaactgatttatcacgggactgacacaagattcgagatcagggatcttctgccggcagcacaatactgctgtcggctccaggccttcaatcaggccggagctggcccttatagcgaactggttctgtgccagacgcccgcatccgcccctgacccagtgagcacattgtgtgtcctcgaggaagagcctcttgacgcctaccctgacagtccgagtgcttgccttgtgttaaactgggaagagccatgtaacaatggatctgagatcttggcgtatacgatcgacctcggcgacacaagcatcactgtggggaatacaaccatgcacgtaatgaaggacttactccccgaaacaacataccgtatcaggatacaggccattaatgaaatcggagccggacccttcagtcagtttattaaggccaagacccgtcccttaccacccctccctcctagattggagtgcgcagccgctggccctcagtccctgaagctgaaatggggcgatagcaactctaaaacgcacgcggctgaagacattgtatatactcttcagctggaagacagaaacaaacggtttatatccatctaccgcggaccttctcacacttataaagttcagaggctgaccgagtttacctgctactcctttaggattcaggctgcgtcggaggccggtgagggcccattctcagagacctacacctttagcaccacaaagtctgtgccgccaaccattaaggcgccacgagtaactcaacttgagggaaattcttgcgagatcctctgggagaccgtgcccagtatgaaaggggacccagtgaactacatcctgcaggtgttagtggggagagaatctgagtataaacaggtgtacaagggtgaggaggctacatttcagatctctggactccagacaaatactgactatcgattccgagtgtgtgcgtgcaggaggtgtttagacaccagccaggaactatctggcgctttttcgccttcagctgcttttgtcctgcagagatctgaggtgatgttaacgggcgatatggggtcacttgacgaccctaagatgaaatcaatgatgcccacagacgagcagtttgccgctattatcgtgttgggtttcgccaccttgtctattttgttcgcgtttattctgcagtatttcctgatgaaatag

SEQ ID NO: 223288 - DNA, 627 bp, synthetic construct
  misc_feature 1..627: note = Description of Artificial Sequence: Synthetic coding sequence
  source 1..627: mol_type = other DNA
atgttcactaaagagaaaatatggtctgaggtcattttagtgcaggtgaatcctggagagacttttactattcgcgctgaagatggcacattgcagtgtatccagggaccggcagaagtgcctatgatgagtccaaatggcagcataccaccaatccacgttccacccggatacatatctcaggtcatagaagactcaacgggcgtacgccgagttgttgtgacacctcagagcccggaatgttatcccccttcttaccctagcgctatgtcgcctactcaccatctaccgccatatttgacacatcacccccactttatccacaactcccacactgcatattatccacctgtcacaggaccaggtgacatgccaccccagttttttccgcagcaccatctgccccataccatctatggggaacaggagatcatccccttttatggaatgtctacatacattacccgggaggatcaatactctaaaccaccacataagaagctgaaggatagacagattgacaggcagaataggctcaattccccacccagttctatatacaagagttcatgcaccaccgtctacaacggctacgggaagggtcacagcggaggcagcggcggatag

SEQ ID NO: 223289 - DNA, 705 bp, synthetic construct
  misc_feature 1..705: note = Description of Artificial Sequence: Synthetic coding sequence
  source 1..705: mol_type = other DNA
atgccgagcgggtgtcacagttctcccccttcagggctccgcggtgacatggcatcactggtgcctctgtcaccatacctttcgccaacagtgttgctgcttgttagttgtgatctgggtttcgtaagagccgatagacccccttccccagtaaatgtcaccgtgacacatttacgcgcaaactctgccactgtgtcctgggacgtgccagaggggaatatcgtaatcgggtattcaatatcccaacagcggcagaatggtccaggccagcgggtcatccgagaggtcaacacaacaacaagggcttgcgctctatgggggctagctgaggactcggattatacggtgcaggttaggtctatcggcctacgcggagaatctcccccaggtcctcgggtccactttcgcacgcttaagggtagcgatagactcccatccaattcttcatccccaggtgatatcacagtcgaagggctggatggtgagcgaccacttcagaccggagaggtcgtgatcatcgtggttgtgttgctgatgtgggcagctgtcattgggttattttgtagacagtatgacattatcaaagataacgatagtaataataaccctaaggaaaagggaaaaggcccagaacagagccctcaaggcaggcctgtcggaactaggcaaaagaagtccccgagcattaacaccattgatgtatag

SEQ ID NO: 223290 - DNA, 2478 bp, synthetic construct
  misc_feature 1..2478: note = Description of Artificial Sequence: Synthetic coding sequence
  source 1..2478: mol_type = other DNA
atggttggcaaatctcagcagaccgacgttatagaaaaaaaaaagcatatggctatccccaagagctccagcccgaaagcgacccatcggatcggtaacacatcaggttccaagggaagttatagcgcaaaagcatatgagtcaatacgggtctcctccgagctccagcagacttggacaaagcgaaaacacggccaggagatgacaagcaaatccctccagactgacaccattgtcgaggaaaagaaggaggtcaagctcgtcgaggagactgtggtaccagaggaaaagtcagcagacgtaagagaggccgctatcgagctgcctgaaagcgtgcaggacgttgaaataccccctaacatcccctcagttcagcttaagatggaccgttcacagcagacttccagaacagggtactggactatgatgaatatcccaccagttgagaaggtggataaggaacagcagacatatttctctgagtcagaaatagtagtcatcagtagaccggacagctccagtacaaagtctaaggaggacgccctgaagcacaagtctagtggcaaaatttttgcgtctgagcaccccgaattccagccagctacaaatagcaatgaggagatcgggcaaaaaaacatctctcgaacctccttcacccaagagaccaaaaaagggccaccggtgttgctagaggatgaactgagggaggaagttacagttcctgtggtgcaagaagggagcgccgttaagaaggttgcaagcgcagaaattgaaccaccatctaccgagaaatttccagctaaaatccagccgccactcgtggaggaagccacggcgaaagcagaaccacgccctgcagaggagacgcatgtccaggtgcagccaagcacggaagagactcctgacgccgaagcagctaccgccgtcgcggaaaattcggtgaaggtacaacccccaccggcagaagaagcgccactggtggaatttccagcggaaatccaaccgcctagtgccgaagagtctcccagcgtggaattgctggcagagattctacccccttctgcagaggaaagcccatccgaggagccacccgcagaaattcttccacccccagctgagaagtccccatcagttgaactactgggggagataaggagccctagcgcgcaaaaggcaccgattgaggtgcaaccgctccccgcagagggagccctggaagaggctcccgcaaaggtcgagccaccgacagtggaagagacactggcggacgtgcaaccgctccttcctgaagaagctccgagagaagaggctcgggagctccaattaagcacggccatggagacgcctgctgaggaggcacctactgaattccagtcacccttgccgaaagagactacggctgaggaagctagcgccgaaatccagctcctcgccgcaaccgaaccacccgcagacgaaaccccagctgaggccaggtccccgctgtccgaagaaaccagcgccgaagaggcccacgccgaagttcaaagtcccctagcagaagagaccactgccgaggaagcttctgccgaaattcaattgctggcagcaattgaagctcccgctgacgagacaccagccgaggcccagtctccactgagcgaagagacgtctgccgaggaggcgccagctgaggtccagagcccctctgccaagggagtttccatcgaagaagcacccctggagctgcagcccccttctggcgaggagactactgcagaagaagccagtgctgccatccagctgctggcagccaccgaagcctcggccgaagaggcccctgccgaggtgcagccaccgccagccgaagaggctcccgcagaggtgcaacctcctcccgcagaggaagctccagccgaggtgcagcctccccctgcggaggaagccccagcagaggtgcagccaccacctgccgaagaggcccctgcagaggtccagccgccaccggctgaggaggccccagcagaggtgcaaccaccgccagcagaagaagcacctgcggaggtacaatccctccctgctgaagagacgcctatcgaggagacattggccgcagtgcactctccgcctgcggacgacgtgcctgcagaagaagcctcagtggacaaacattccccacccgcagacctgctcctgaccgaagagtttcccataggtgaggcatccgcagaagtgagtccacccccatcagaacagactccagaggatgaagccttggtcgagaatgtgagcactgagttccagagcccccaagtcgctggtatcccagcagtcaagttagggagcgtcgtccttgaaggggaggcaaagttcgaagaagtctcaaagatcaatagtgttctcaaggacctgagtaacaccaatgatggccaggcacctaccttagagatcgagtcagtatttcatatcgagctgaagcagcgccctcccgaattgtag

SEQ ID NO: 223291 - DNA, 2157 bp, synthetic construct
  misc_feature 1..2157: note = Description of Artificial Sequence: Synthetic coding sequence
  source 1..2157: mol_type = other DNA
atggtggggaagtcacagcagaccgacgtgattgaaaagaagaagcacatggctattcccaaatcttcttcccccaaagctactcaccgtatcggtaacaccagcggatccaagggcagctactcagctaaagcatacgagtccatccgtgtcagcagcgaactgcagcagacttggaccaaaagaaaacacggtcaggagatgacgagtaaatctctgcagacagacactattgttgaggagaaaaaagaggtgaaactggtggaggaaacggtcgttcctgaggagaaaagcgctgatgtgcgcgaggccgcaatcgagttgccggagagcgtgcaggacgttgagatcccccctaacataccatccgtgcaattgaaaatggacaggtcccagcagacttcccgaacggggtactggaccatgatgaacatccccccagtggaaaaggttgataaagagcagcaaacctacttttctgaaagcgagatcgtcgtgataagccgaccggatagttcatccaccaaatcaaaggaagatgcactgaaacacaaatcaagcggcaagatctttgccagtgagcacccagagtttcagccggcaacgaattccaatgaggagattggccagaaaaacatcagcagaacatccttcactcaggaaacaaagaaggggccacctgtgctgctcgaagatgaactccgggaggaggtcacagttcctgtggtgcaagaagggagcgcagtgaagaaagttgcatccgctgaaatcgagcctccaagcacagagaagttcccagcaaagattcaacccccactggtggaagaagctacagccaaggccgagcctcgccctgcagaagaaacccacgttcaggtccaaccttccacggaagagacacctgacgccgaggctgctacagctgtcgccgagaacagcgttaaagtgcaaccccctcccgctgaagaagcacccctggtagaattcccagccgagattcaacctccatcggcggaggagagtcctagtgtggagctcctggctgaaatcctgccgccaagcgccgaggaaagcccatcagaggaacctcccgctgaaattcttcctcctcctgccgaaaaaagcccttcagttgaactgctgggagaaattcgctcacccagtgcccagaaggccccaatcgaagttcagccattaccagccgaaggggcacttgaggaggcaccggctaaagtggagcctccaacagtagaggagacacttgcagacgtgcagccgcttctacctgaggaggcacccagagaggaagccagagagctgcagctctccacggccatggagacccccgcagaggaggcacctaccgagttccaaagcccattaccgaaagagacaaccgccgaagaggcatcagccgaaatccagctcttggccgctaccgaaacctcagcggaagaggcacccgcagaggtccagtctcctagtgctgaagaggccccagctgaggtccagcctcccccagctgaagaggcaccagccgaggtgcaacccccaccagccgaagaggctccagcggaagttcagccccctccagctgaagaagcccctgccgaggtgcagcctcccccagctgaagaagcccctgccgaagtccagcctccccctgcagaagaggccccagccgaggtccagcctccgccagctgaggaagcacctgcagaagtgcagtccctgccagccgaggagacacctatcgaggagactctagccgctgtgcacagcccacctgcagatgacgtgcccgctgaggaggccagtgtggataaacacagcccccctgcagatctgctccttactgaggagtttccgataggcgaggcctcagctgaagtatccccgcctcccagcgagcagacaccggaggatgaggccctggtcgaaaacgtctccactgaatttcaatctccacaggttgctgggatcccagccgtgaagctcgggtccgtcgtgctggagggcgaggccaagttcgaagaagtgtctaagatcaattctgtgttaaaggatctttccaatacaaacgatgggcaagcccctacattggagatcgagtctgtgttccatattgagcttaaacagcggccaccggaactttag

SEQ ID NO: 223292 - DNA, 2052 bp, synthetic construct
  misc_feature 1..2052: note = Description of Artificial Sequence: Synthetic coding sequence
  source 1..2052: mol_type = other DNA
atggaacgggctgcaccaagtcgaagagtccccctgcctctgctgttactcggcggtttggcccttctagcagctggggttgacgcggatgtgctacttgaggcctgttgcgctgacggccacagaatggcaactcaccagaaggactgttcattaccttacgctaccgaaagcaaggagtgtagaatggtgcaggaacagtgttgtcattctcagttggaggaactgcactgtgccacaggaatttccctggccaatgagcaggaccgctgtgcaactccacacggggataatgcctcactagaggctacattcgtgaaacgctgctgtcactgttgcctgcttggtagggccgcacaggcccagggacagtcgtgcgaatactcactcatggtcgggtaccaatgcggccaagtgttccaagcatgttgtgtgaagtcccaggaaaccggcgatcttgacgtggggggactgcaagagaccgacaaaatcattgaagtggaggaagagcaggaggatccttacctgaacgacaggtgcagaggaggcggtccgtgcaagcagcagtgtagggacactggagacgaagtcgtctgttcttgcttcgtggggtaccagctgctgtctgatggtgtaagctgcgaggacgtcaatgaatgcattacgggtagccattcatgcagattgggagagtcctgcattaataccgtcggctcatttcgatgtcagagggacagctcttgcggcactggttatgaactgacagaggacaacagttgtaaggatattgatgagtgtgaatccggcattcacaattgtctgcctgacttcatttgccagaatacactgggatcattccggtgcaggccgaagctgcagtgtaagtccggtttcatccaagacgcactagggaattgcatagacattaacgaatgcctctcaatcagtgcaccatgccctattggccacacgtgtatcaacacagagggctcctatacgtgtcagaaaaacgtgccaaattgcgggagaggctatcacctgaacgaggaagggaccaggtgtgtggatgttgacgagtgcgctccaccagctgagccctgcggtaagggacaccgatgcgtgaattctcccggaagttttcgctgtgaatgtaaaacaggctactatttcgatggcatttcaaggatgtgcgtagatgtgaacgagtgccagcgctaccccggtcggctctgtggtcataaatgcgaaaatactctaggctcctatctgtgcagctgttccgttggatttagactttctgtcgacgggaggagctgcgaggatattaacgagtgctccagctcaccttgttcgcaggagtgcgccaatgtgtatggctcgtaccaatgttattgtcgtcggggataccagctctctgacgtggatggagtgacatgtgaagacatcgatgagtgtgcccttcctaccggcggacatatatgtagctatcggtgtattaacattccgggatcattccagtgtagctgtcctagctctggataccgactcgctcccaatggcagaaattgccaggacatcgatgaatgtgtgactgggatccacaactgcagcatcaatgaaacctgctttaacatacagggcggatttcggtgtctggcattcgaatgccccgagaactaccggaggtccgccgcaacacgctgcgagagactgccatgccacgagaatagagagtgctctaaactacctctgcgaattacttactaccatctgtcttttccaactaacatccaggcgccagccgtggtctttcggatgggacccagcagcgccgtaccaggtgactctatgcagctggccattactgggggaaacgaagagggattcttcaccacccgtaaggtcagtccgcacagcggcgtggtcgccctgaccaagcccgttcctgagccacgagatttattgctcacagtaaagatggatctttctaggcacgggacagtttcttcctttgtggccaaattatttatcttcgtgtccgctgaactctag

SEQ ID NO: 223293 - DNA, 2112 bp, synthetic construct
  misc_feature 1..2112: note = Description of Artificial Sequence: Synthetic coding sequence
  source 1..2112: mol_type = other DNA
atggagagggccgctcctagtcggagggtgcccctgcctttactgctcctcggtggcctggcgctcctggccgcaggggttgatgcagatgtgctcctggaggcttgttgcgccgacggtcataggatggccactcaccagaaggattgttccctgccatatgctacagagtccaaggagtgtcgcatggtgcaagaacaatgttgccactcccagctggaggaactccactgtgcaacaggcatctccttagctaatgagcaagacaggtgcgctaccccccatggggacaatgcatccttggaggctacattcgtgaagcgttgctgtcactgctgtctgctgggccgtgccgcacaggcacaaggccagtcctgcgaatattcactgatggtaggttaccaatgcggacaagtgttccaggcctgttgtgtgaagtcccaagaaaccggcgacctggatgttgggggactccaggagaccgacaaaattatcgaagttgaagaggagcaagaagatccatacctgaatgatagatgtcgcggtggtggaccttgcaagcaacagtgccgcgataccggcgacgaagtggtctgctcctgtttcgtgggctatcagctgttgtcagacggtgtgtcttgtgaagacgttaatgagtgtataacgggatctcacagctgcagactcggggaaagctgcatcaacacggtgggctctttcagatgtcaacgggattcctcatgcggtacaggatacgagctgacagaagataactcctgtaaggatattgacgagtgcgagagcggaattcacaattgcctgcccgacttcatttgtcaaaatacattggggagcttcaggtgccggcctaagcttcaatgcaaatccggattcatccaagatgccctgggaaattgtatcgacattaacgagtgtttgtccatctctgctccatgtccaatcggacatacttgcattaacacggagggcagctatacttgtcagaagaacgtgccaaactgtggcagaggataccacctaaacgaagaggggactcggtgcgtagacgtggacgagtgtgcccctcctgctgagccctgcggaaaaggtcaccgctgtgtcaatagccccggatctttcaggtgtgaatgcaagacaggatactactttgacggtatttctaggatgtgtgtcgacgtgaacgaatgtcagaggtatccaggtcggctctgcggccacaagtgcgaaaacacactgggatcttacctgtgctcctgcagtgtcgggttcagactctccgtggatgggaggtcatgcgaagacatcaacgaatgtagttccagtccatgctcacaggaatgcgcgaatgtgtacggaagctatcagtgctattgtcgcagagggtaccagctctcggatgtcgacggcgtgacatgcgaagacattgacgagtgcgcattacccactggcggacatatctgcagttaccggtgtatcaacattcctggtagttttcagtgcagttgcccaagctccggctaccgcctggctccgaatggccgtaactgtcaggatatagatgagtgtgtgactgggattcataactgttctatcaacgagacgtgctttaatatacaggggggtttccggtgcctggcttttgagtgccccgagaactatcggagatccgcagccacgctgcaacaggagaaaaccgacactgtcaggtgtattaagtcctgcaggccaaatgacgtgacatgcgttttcgatccagtgcacaccataagccacacagtcatctccttgccaactttcagagagtttacaaggcccgaggagattatattcctccgagccattactcctccacaccccgcttcacaggccaacatcatattcgacatcacagagggcaacctgcgggatagttttgacatcattaagcgttacatggacggaatgactgtgggagtggtgagacaggttaggcctatagtcggtcctttccacgccgtactgaaattagagatgaactatgtggtgggaggcgtcgtttcccaccggaacgtcgtgaatgtgcatatatttgtgtcagaatactggttttag

SEQ ID NO: 223294 - DNA, 1701 bp, synthetic construct
  misc_feature 1..1701: note = Description of Artificial Sequence: Synthetic coding sequence
  source 1..1701: mol_type = other DNA
atggagcgcgcagcaccttccaggcgcgtaccattgccattgctgcttctggggggactggcactgctggcagccggtgtcgatgccgacgtgctgctagaggcatgctgtgccgacggccataggatggcaactcatcaaaaagattgcagccttccttatgccactgagtccaaggagtgcaggatggtgcaggagcaatgttgtcacagccagctggaggagctacactgcgccaccggaatcagtttggctaacgagcaggaccggtgtgcaactcctcacggtgacaatgcaagcctggaagctactttcgttaaacggtgctgtcactgctgtttacttggaagagccgctcaagcacagggccagtcttgtgagtattctcttatggttggctaccagtgtgggcaggttttccaagcctgttgtgttaaatcacaggagaccggggatctcgacgtaggcggtttacaggaaactgataagattatcgaggtggaggaggagcaggaagacccgtacctgaatgatcggtgccggggtggcggtccctgcaagcagcagtgtcgggatacaggggacgaggtggtttgttcctgcttcgtaggataccaactgctgtcagatggcgtatcttgcgaagatgttaatgaatgcataactggatcgcactcgtgccgcctaggggagagttgtattaatacagtgggttcctttcgttgccaacgggatagctcttgtgggacaggttatgaattgaccgaggataattcctgcaaagatattgatgaatgcgagtcaggaattcacaattgtctgcctgatttcatttgccaaaataccttgggctcttttcggtgtaggcctaaactccagtgtaaatcaggatttatacaggatgctctggggaattgcatcgacattaacgagtgcctgtctatatccgccccttgtccgataggccacacttgtatcaacactgagggctcatatacttgtcagaagaatgtgcccaattgtggacgaggataccatctgaacgaagagggaacccgttgcgttgacgttgacgaatgcgcccctcccgcagaaccctgtgggaaaggccatcggtgcgtcaatagtcctgggtccttcagatgcgaatgcaaaaccggatattatttcgatggtatatcccgaatgtgtgtggacgtgaacgagtgtcagcgctaccctgggagactttgtggtcataagtgtgagaataccctcggaagttatctgtgcagctgttccgttggctttcgactctccgtcgacggcagaagctgtgaagatattaacgagtgctcctcatctccgtgctcccaggaatgcgctaatgtatatgggtcttatcagtgctattgcagaagaggataccagctgagcgacgtcgacggcgtcacgtgtgaagacatcgacgagtgcgcccttcctaccggaggacacatctgtagttacaggtgcataaatatccctggatccttccagtgtagctgtccctccagtggttaccgcctcgctcccaatggacgaaactgtcaggacatcgacgagtgtgtaacagggatccacaattgttcaattaacgaaacttgcttcaacattcaaggcggattccgatgtttggcattcgagtgccccgaaaattacaggcgcagcgctgccacatag

SEQ ID NO: 223295 - DNA, 2112 bp, synthetic construct
  misc_feature 1..2112: note = Description of Artificial Sequence: Synthetic coding sequence
  source 1..2112: mol_type = other DNA
atggagcgcgcagcgccatccaggcgggtaccgttgccactcctactactggggggattggccctcctggccgcaggtgtcgatgcggacgtcctattggaagcatgctgcgcggatggccatcgcatggcaactcatcagaaagactgctcactcccttatgctacagaatccaaggaatgccgcatggtgcaggaacagtgttgccattctcagctggaggaactgcactgtgccaccgggatttccttggccaatgagcaggacaggtgtgcaaccccgcacggggataacgcaagcctggaagccaccttcgtcaagagatgctgccactgttgtctgctgggccgtgccgctcaggctcagggtcagtcctgtgaatactccctgatggtcggctaccaatgtggacaggtgttccaggcgtgctgcgtgaagagtcaggagaccggcgatctggacgtcggcggtttgcaagaaaccgacaagattatcgaggtagaagaggagcaggaagacccctacctgaacgacaggtgtagggggggaggaccctgtaaacagcagtgcagggacaccggtgacgaagtagtgtgttcctgcttcgttgggtatcagctactctcagatggggtgtcctgtgaggacgtgaacgagtgcattacggggtcccattcctgtcgtcttggcgaatcatgcatcaacacggtgggctctttcaggtgtcagcgggattcatcctgtggcacggggtacgagctgacagaagacaactcctgcaaagatattgatgaatgtgagagtggcatccacaactgtctgccagactttatctgccagaataccctggggtcattccggtgtcgcccaaagctgcaatgtaagtcaggatttatccaggacgcactaggcaactgcatcgacattaatgagtgcctttctataagcgccccatgccctattgggcatacatgtatcaatacagagggatcatacacctgccagaagaacgtgcctaactgtggtcggggatatcacttgaatgaagagggcaccaggtgtgtcgacgtggatgagtgcgcaccccctgcggaaccttgcgggaagggccatcgctgcgtcaatagccctggatcctttagatgtgagtgtaaaactggctattactttgacggtatcagccgcatgtgtgtcgacgtgaatgagtgtcagcgctatcctggtcgcctctgtggtcacaagtgcgagaacaccctgggaagttacttgtgttcctgctccgttggttttagacttagcgtggacggacgcagctgcgaggacataaacgaatgctccagctctccctgctcccaggagtgcgcaaacgtttatgggtcttaccagtgctattgtcggaggggataccagctttctgacgtcgatggcgtcacctgcgaggacatagatgagtgtgcgctgcctactggtggccacatctgctcctaccgctgcattaacatccctggatcgtttcaatgtagctgcccgagcagcggatatcgcctggcgcctaatggcagaaattgccaggacatagacgagtgtgtgacaggcatccataattgcagtatcaacgaaacttgtttcaacatccagggcggattccggtgtttggcatttgagtgccccgagaattaccgcagatccgcggctacccaaaagtctaagaagggtcgccagaatacacctgcaggttcaagcaaagaggattgtcgtgtcctgccatggaaacaaggcctcgaggacacccaccttgatgcctatctgccgtgctgccggaggttcacacggcctgaggaaatcatttttctaagggcaattacacccccacacccagcgtctcaggctaacataatctttgacattaccgaggggaatctcagagactccttcgacattattaagcgttacatggacggtatgacagtgggcgtcgtacgacaagtgaggcctatcgtggggccatttcatgccgtgcttaaactggaaatgaactatgtggtgggtggagtggtttcccaccgaaacgtggtcaacgtccatatatttgtcagtgagtattggttctag

SEQ ID NO: 223296 - DNA, 2166 bp, synthetic construct
  misc_feature 1..2166: note = Description of Artificial Sequence: Synthetic coding sequence
  source 1..2166: mol_type = other DNA
atggagcgggctgcccctagtcgccgagtgcctctccccctcctgttgttggggggtctggcattacttgcagccggtgttgacgccgacgtgctgctggaggcttgttgcgcagatgggcaccggatggccacacatcaaaaggattgttctctgccgtacgccacagaaagtaaggaatgtagggctgtggggctggcatctctgtgtcaggacctgaatggagcctgggcagtatggaaagttggcagagcctctcaagctgaaggaaccgcttcagcgagggctcagagaagaggcatggtacaggaacagtgttgccatagccagctcgaagagctgcactgcgcaactggtatctcattggcaaacgagcaagaccggtgtgcaacccctcatggcgacaatgctagcttagaagctacgttcgtgaaacgatgttgtcattgctgtctgttgggcagagcggctcaggcgcaggggcagtcatgcgaatattcactcatggttggctaccagtgtggtcaggtgttccaggcatgttgcgttaaaagtcaggagactggggacctggacgtcggaggactgcaggagaccgacaagatcattgaggtcgaagaagaacaggaggacccctatttaaacgatagatgccgtgggggaggcccatgcaagcagcaatgcagagatactggcgatgaggtggtgtgtagctgcttcgtcggataccagcttctgtcagacggagtgagctgcgaggacgtaaacgaatgcatcactggttcacacagctgtcggctgggggagtcttgtatcaatacagtcgggtcttttcgatgtcagcgtgacagctcatgcggcaccggatacgagcttacagaggataacagctgcaaagacatcgacgagtgtgaatccggcatacacaattgtctccccgacttcatctgtcagaacacactcggaagcttcagatgtaggccgaagttgcagtgtaagagcggctttattcaggacgccctgggcaactgcatcgatatcaatgaatgtctatctatttcagcgccatgtcctatcgggcacacttgtatcaacactgagggaagctacacatgccagaagaatgtgcctaactgcgggagaggctaccatctgaacgaagagggcacacggtgcgtggatgtggacgagtgcgcacctccagcagagccctgtggaaaaggacacaggtgcgtgaacagcccgggaagcttcaggtgcgagtgcaagacaggttactactttgacggaatctcccgtatgtgtgtggatgtaaacgaatgtcagaggtatcctgggaggctgtgcggccataagtgcgaaaatacattggggagctatctgtgctcatgttctgtgggtttcaggctctccgttgatgggcgatcctgtgaagacattaacgagtgttccagcagtccttgctcgcaggaatgcgcgaacgtgtacgggtcctaccagtgctattgcaggagagggtatcagcttagtgacgtggatggtgtcacttgcgaggacatcgatgagtgtgccctacctacaggtggccatatttgttcttacaggtgtatcaatatacctgggtcctttcagtgctcatgtccatctagtggatacagactggcgcctaatgggaggaactgccaagacattgatgagtgcgtgacgggcattcacaactgcagtattaatgagacgtgctttaatattcaagggggatttagatgtctcgcttttgagtgtcccgaaaactaccggagatcggccgctacacggtgcgagcgcctcccttgtcatgaaaaccgggagtgttctaaacttccactgcggattacttattatcaccttagcttccccaccaacatccaggcacctgccgtcgtgtttcggatgggcccatcaagcgctgtccctggcgacagcatgcagctcgctattaccggaggcaacgaggagggattttttaccacccggaaagttagcccccacagtggtgtggtggccctcactaagcctgtgcccgagcccagagatctgctactgacggtcaagatggacctctcgagacatggaacggtgagctcttttgtggctaagctgtttatatttgtttccgctgaactctag

SEQ ID NO: 223297 - DNA, 570 bp, synthetic construct
  misc_feature 1..570: note = Description of Artificial Sequence: Synthetic coding sequence
  source 1..570: mol_type = other DNA
atgaatagctacacaaggggatcccggcgtcccagcgctaaagccgcatctccagcggcatcggtcacatcccgtgtgtccccctcaggaccaggcgtgcctgtcgatgctgatgtgttgttggaggcttgctgtgctgatgggcaccggatggctacccatcagaaagactgttcccttccctacgcgaccgaaagtaaggagtgcaggatggttcaggagcagtgctgccacagtcagctggaggaattgcattgtgccactggtatctccttagccaatgaacaggatcgatgcgctactcctcatggcgataatgcctccctagaggcaactttcgttaaaaggtgctgccattgttgtttgctgggacgagccgctcaggcccaaggccagagttgcgagtactcattaatggtggggtaccagtgtggacaggtcttccaggcctgctgcgtgaaaagtcaggagactggcgacctggacgtgggcggtctgcaagagaccgataagatcatcgaagtggaagaagagcaggaggacccctatctgaacgatcgctgccggtag

SEQ ID NO: 223298 - DNA, 81 bp, synthetic construct
  misc_feature 1..81: note = Description of Artificial Sequence: Synthetic coding sequence
  source 1..81: mol_type = other DNA
atggcgacccaccagaaggattgctctctcccttatgctacagagagtaaggagtgcagaatggtgcaagaacagtgctag

SEQ ID NO: 223299 - DNA, 1806 bp, synthetic construct
  misc_feature 1..1806: note = Description of Artificial Sequence: Synthetic coding sequence
  source 1..1806: mol_type = other DNA
atggagcgggcagccccttctcgaagggtgccactgccactgctgctgctcggcggtctggccctccttgcggcaggagtggatgccgacgtcctcttggaggcatgctgtgctgacgggcacaggatggccacccaccaaaaagattgctcgcttccctatgcaactgagagcaaagagtgtaggatggttcaagaacagtgctgtcactctcagttggaagaactccattgtgccacaggcattagtctggcaaatgagcaggaccggtgtgccactccccacggggataacgctagcctcgaagctacctttgtgaagaggtgctgtcattgttgcctattgggaagagcggctcaagcccaaggccagtcttgtgaatatagcttaatggtggggtatcaatgcggacaggtttttcaggcctgctgcgtcaagtcacaggagactggggatctggacgtaggcggactgcaggaaacagataagataatcgaggttgaggaggagcaggaagacccctacctaaacgatagatgcagggggggaggaccctgtaaacagcagtgcagggacaccggcgacgaagtcgtttgtagctgctttgtggggtatcagctcctcagcgacggtgtgtcctgcgaggatgttaatgaatgcatcaccggctctcactcttgtcggctcggcgaatcgtgcattaatacagtgggcagttttcgctgtcagcgtgacagttcctgcggtactggttacgaattgaccgaggacaactcatgtaaagatattgatgagtgcgagtcgggtatccacaactgcctcccagattttatctgtcagaatacccttggttctttccgctgtagacctaaactccaatgtaagtctggattcatccaggatgcattagggaattgtatcgacatcaacgagtgtctgtcgatctctgccccatgcccaataggccatacttgcatcaacaccgagggaagctatacctgtcagaaaaacgtacccaattgcggaagggggtatcatctcaatgaggaggggacccgatgcgttgatgtggatgaatgtgcccctcctgctgaaccatgcggcaaaggccaccgctgcgttaatagccccggttcctttcgatgcgaatgtaaaacaggctattactttgacggtataagccgaatgtgcgtagatgtgaatgagtgccagcgctaccctggacgcctttgcggtcacaaatgtgaaaataccctggggtcgtacctatgttcctgttctgtaggctttcggctatccgtggacggccgatcttgtgaggatataaatgagtgcagcagctctccatgctcccaggaatgcgcaaatgtatacggatcctaccagtgctattgccgccgtggataccagctatccgacgtggacggagtgacatgcgaggacatcgatgagtgtgctctacccacaggtgggcatatttgttcctacaggtgtattaatattcccggttcgttccagtgctcctgtccttcttcagggtacaggctagcgcctaacggacgaaactgtcaggatattgatgagtgtgtaacgggcattcacaactgctccataaacgaaacttgcttcaatatccaaggcggtttcaggtgtctggctttcgagtgtcccgagaactacaggagaagtgcagcgacccagaagagcaagaaaggcaggcagaacacgcctgctggtagtagcaaagaagattgcagggtactgccatggaagcaagggctagaagacacacatttagacgcgtag

SEQ ID NO: 223300 - DNA, 198 bp, synthetic construct
  misc_feature 1..198: note = Description of Artificial Sequence: Synthetic coding sequence
  source 1..198: mol_type = other DNA
atggctacccaccagaaagattgcagcctgccctatgccaccgagtcgaaagagtgtcgcatggtgcaagaacagtgttgtcattcacagctggaagagcttcattgcgccacgggtatatctctcgcgaacgagcaagatcgctgtgctacaccccatggcgacaacgcctccctagaagctacattcgtgaaatag

SEQ ID NO: 223301 - DNA, 546 bp, synthetic construct
  misc_feature 1..546: note = Description of Artificial Sequence: Synthetic coding sequence
  source 1..546: mol_type = other DNA
tgccggatggtgcaggaacaatgttgtcactcccagcttgaggagttacactgtgccaccgggattagcctggccaacgaacaagatcggtgcgcaacccctcacggagataacgcctctttggaggctacttttgtcaagagatgctgccactgctgtctgctgggcagagctgcacaagcacagggacagagctgtgaatactccttaatggttggctaccagtgcggccaggtgttccaggcttgctgcgtgaagagtcaggagaccggtgacctcgacgtggggggactccaggagacaggcggaggaccatgcaagcagcagtgtcgtgacacgggggacgaagtggtgtgtagctgctttgttgggtatcagctccttagtgatggcgtgtcttgtgaggacgtaaacgagtgtatcacggggtcccattcctgtaggttgggcgaatcctgtattaacaccgttggctccttccgttgtcagcgtgatagctcttgtggcacagggtacgaactgacagaggataactcgtgtaaatag

SEQ ID NO: 223302 - DNA, 420 bp, synthetic construct
  misc_feature 1..420: note = Description of Artificial Sequence: Synthetic coding sequence
  source 1..420: mol_type = other DNA
atggcaacgcatcagaaagattgctctctgccatatgccacggagagtaaggagtgccgaatggtccaagagcagtgctgccactctcaacttgaggagctgcactgtgctacaggaattagtctcgctaacgaacaggaccgctgcgctaccccccacggagataacgctagtctcgaagcgaccttcgtgaagcgatgttgtcattgttgtcttctcggcagagccgcacaggctcaaggacaatcatgcgagtactctcttatggtaggctaccaatgtgggcaagtctttcaggcgtgttgcgtgaagtcccaggagactggcgatctggacgtgggcggtctgcaggaaacagataagataattgaggtcgaagaggaacaggaagatccatatcttaacgatcgctgccgctag

SEQ ID NO: 223303 - DNA, 519 bp, synthetic construct
  misc_feature 1..519: note = Description of Artificial Sequence: Synthetic coding sequence
  source 1..519: mol_type = other DNA
atggaacgtgccgctcctagccgccgtgtgcctctcccccttcttctcctggggggtcttgccctcctcgccgctggggtggacgccgatgttttactggaagcgtgttgtgctgatggccacaggatggctacacatcaaaaggactgctctctgccctacgccactgagagcaaggagtgcaggatggtccaggagcagtgctgtcattcacaactggaggagctacattgtgcaacaggaatttctctcgccaacgagcaggaccggtgtgcaaccccccacggcgacaacgctagcctcgaagctacatttgttaagcgatgctgtcactgctgcctgcttggacgggctgcgcaggcacaggggcagagctgcgagtatagtctcatggtcggttaccaatgcggacaagtcttccaggcttgttgcgtgaagtctcaagaaacaggagatctggatgtaggaggtcttcaggaaactggcggaggaccctgtaagcaacagtgcagagattag

SEQ ID NO: 223304 - DNA, 3555 bp, synthetic construct
  misc_feature 1..3555: note = Description of Artificial Sequence: Synthetic coding sequence
  source 1..3555: mol_type = other DNA
atggtgctcctgtgggagcccgcaggcgcttggctggcccttggccttgctctggccttaggcccaagcgtagctgccgctgctcccaggcaggattgtaccggcgtggagtgtccaccgctcgagaactgtatagaggaagccttagaacctggagcatgttgcgctacttgtgtgcagcaaggctgtgcttgcgagggttatcagtactatgattgcttgcagggaggcttcgtgaggggacgggtgcccgctggacagtcctattttgtggacttcggtagcaccgagtgctcatgcccccctggaggcggaaaaattagttgtcagttcatgctttgccctgagctacccccaaactgtatcgaggctgttgtggtggccgatagctgcccccagtgcggtcaagtaggttgcgtccacgccggacacaagtacgccgcaggtcacaccgtgcatctaccaccctgtagggcctgccactgtcccgacgcaggtggagaactgatttgctaccagctccccggatgtcacggcaacttctccgatgccgaggagggtgaccctgaaaggcactacgaggacccatattcttacgatcaggaagttgccgaggttgaggctgcaaccgccctgggcggtgaagtacaggcgggagccgtacaagccggtgccggaggcccacccgcagctctcgggggaggatctcagcccctcagcacaatacaggcaccaccttggcctgccgtcctgcctaggcctaccgctgccgcagcacttggtccgccagcacccgtgcaggcaaaggcgagaagagtgacagaggactcagaggaagaggaggaggaggaagaagagcgggaggaaatggcggtcaccgagcagttggctgctggcggtcaccgagggcttgatggactgcccaccaccgctccagcaggaccaagcctgcctatacaggaagagagggccgaggcaggcgctagggcagaagctggtgccaggccagaggaaaacctcattttggacgcacaggccactagccgatctaccggtcccgaaggggtgacccatgcccctagcttggggaaggccgcactagtgccaactcaagccgttcccggtagcccgagggaccccgtaaagccaagtccccacaacattctgtctacaagccttcccgatgcggcatggattcccccaacacgtgaagtgccccgaaagcctcaagtgctaccacactctcacgtggaggaagataccgatccaaacagtgtgcatagcattccgagaagcagcccagaaggttcaactaaggatcttatcgaaacttgttgcgccgcaggtcaacagtgggccattgacaacgatgaatgtctggagatccccgaaagcggcacagaggacaacgtttgtcgaacggcgcagcggcactgttgtgttagttacctgcaggaaaaaagctgcatggctggcgtgctcggggctaaggaaggagagacatgtggagcagaggacaacgactcctgcggcattagtttatacaaacagtgttgcgattgctgtggccttgggttgcgtgttcgagccgagggccaatcatgcgagtctaatccaaacttgggctacccttgtaaccatgtgatgctatcttgttgtgaaggtgaggagcccctcatcgtcccagaggtgaggcggccaccagagcctgccgctgccccaagaagggtgtctgaagcagaaatggccggtcgcgaggctctttccctggggactgaggcggagctgcctaatagcctgcctggtgatgatcaggatgaatgcctcctgcttcctggcgaattgtgccagcacctgtgtatcaacacagtaggtagctaccattgtgcatgttttcctgggttctccctgcaggacgacgggaggacttgccgacctgagggtcacccccctcagccagaggcaccccaagagcctgcgcttaagtctgagttctcgcaggtagcctctaacactattcctctgcccctcccacagcccaacacatgtaaggataacggaccttgcaaacaggtgtgcagcaccgtggggggatccgcaatttgtagttgttttcccggatatgcaattatggccgacggcgtgtcatgcgaagatattaatgagtgtgttacggacctccatacctgcagtagaggagaacactgtgtcaacaccctgggcagctttcactgctataaagcgctcacttgtgagccaggctatgccctgaaggatggcgaatgtgaggatgttgacgaatgcgcgatgggaacacacacctgtcagcccggatttctgtgtcagaacacgaagggatctttttattgccaagcgcgtcagcggtgtatggatggttttttgcaggacccggaaggcaactgtgtcgatattaacgagtgtacaagcttgtctgaaccctgcagaccgggtttcagctgtattaacacagtgggcagctacacttgtcagcggaacccactgatctgtgctagagggtatcatgctagtgatgatggcactaaatgcgtggacgtgaacgagtgtgagacaggcgtacaccggtgcggcgaggggcaagtgtgccacaatctacccggatcatacagatgtgattgcaaggccggtttccagagagatgcatttggaaggggctgtatcgacgtaaatgaatgttgggcctcaccaggaagactgtgccagcatacctgtgaaaataccctgggcagctacagatgttcctgtgcctcaggtttcctgctggccgctgatggaaaacgctgtgaggatgtaaacgagtgtgaggcccaacgatgctcccaggaatgcgcaaatatttatgggtcctaccagtgctattgcaggcaaggctatcaacttgccgaggacggccatacctgtactgatatcgacgaatgcgcccagggtgccggtatcttatgtactttccggtgcctgaatgtccctgggtcgtaccaatgtgcttgtcccgagcagggctacaccatgactgctaatggacgtagctgtaaggatgtcgatgagtgtgcactgggaactcacaactgtagtgaagcagaaacttgtcacaacatccagggaagtttccgttgtctcaggttcgaatgtcctcccaattatgtccaggttagtaagactaaatgtgagcgcacaacttgtcatgacttccttgagtgtcagaacagccctgctagaattactcactaccaactgaatttccaaaccggtcttctggttcccgctcatatatttcgcattgggcctgctcccgctttcaccggggatacgattgctctgaacataatcaaaggcaatgaagagggctatttcggtacccgcagactgaacgcctacaccggtgtagtgtacctccaaagggcagttttggagcctcgagatttcgcactagacgttgagatgaaattatggcgccagggaagtgtcacaacattcctggcaaaaatgcatatcttcttcactacctttgccttatag

SEQ ID NO: 223305 - DNA, 3696 bp, synthetic construct
  misc_feature 1..3696: note = Description of Artificial Sequence: Synthetic coding sequence
  source 1..3696: mol_type = other DNA
atggtgcttctgtgggagccagctggtgcctggctggctcttgggctcgctctggccctgggaccaagcgtcgccgctgctgcccctaggcaggattgtacaggcgtcgaatgccctccactagaaaactgtatcgaagaagccctggaaccgggtgcttgttgtgccacatgtgtccaacagggttgcgcttgtgaggggtatcagtactatgattgcctgcagggaggattcgtgcgtggaagggtgcccgctggtcagagctattttgtcgactttgggtctacggaatgttcttgccctccgggaggcggaaaaattagctgccagttcatgttgtgtccggagttacctcccaactgcattgaggcggtggtcgtggctgactcttgtccccagtgtggccaggtgggttgtgtccatgctgggcataagtatgctgctggacatacagtacaccttcctccgtgccgcgcatgtcactgcccagacgcagggggagaactgatctgttatcaactgccaggatgccatggaaatttctctgacgccgaggagggtgaccccgaaaggcactacgaggacccttatagttatgaccaagaggttgctgaggttgaggctgcaaccgctttggggggagaggtacaggcgggtgccgtccaggcaggggctggcggacctcctgctgcgttgggagggggatcccagcccctgtcaaccattcaggcccctccatggccagccgtgctacctcgtcccacagcggcagccgcactgggaccacctgcgccagtgcaagcaaaagccaggagagtgacagaagatagcgaggaggaagaggaagaagaagaagagcgagaggaaatggctgtaacagagcagctagcggctgggggacatagggggctggatggcctgccaactaccgcccctgccggtccttctctgcccattcaggaggagcgcgcagaggctggagcaagggccgaggctggtgcaagaccagaggagaatttgatcctggacgcccaggccacgtcgaggtccacaggacctgagggggtcacccacgccccaagcctgggcaaagcggcactggtgccaacccaagccgtgccgggaagcccacgggacccggtgaagccaagcccccacaatattttgagtacgagtctgccggatgctgcgtggatccctcctactcgggaagttccacggaaaccgcaggtcctgccacacagccacgttgaggaggacacagatccaaactccgttcatagtatccctcggagcagcccagaagggtctaccaaggatctcatcgagacctgttgtgcagcgggtcaacagtgggccattgataacgatgagtgtctcgaaatccctgagagcggcactgaggacaacgtatgccgcactgcacagcgacattgctgcgtttcgtacttgcaggaaaaatcatgtatggctggagtgttgggggctaaggagggggaaacctgtggggctgaggataacgattcttgcggcatctctctttataaacaatgctgtgactgttgtgggctgggattaagggtgagggctgaagggcagtcctgtgaatctaaccctaatctaggctacccctgtaaccacgtgatgctttcttgctgcgagggcgaagaacccctgattgtcccagaggtgcgcagaccacccgaacccgctgccgctcctcgtagggtgtcagaggccgaaatggcgggaagagaagccctgtcacttggcacggaagccgagctgccaaatagtctgcctggggacgatcaggacgaatgcttactcctgcccggtgaattgtgtcaacatttgtgcatcaataccgttgggagctaccattgcgcatgcttcccgggattcagcttacaggatgacggtcggacctgcagaccggaaggtcatcccccacaacccgaggctccccaagagccggcactcaagtccgaattttctcaggtcgcatctaacacgatcccactcccactgccccagccaaacacctgtaaggacaacggaccatgcaagcaggtttgttctactgtggggggttcagctatctgtagctgttttcccggatatgccattatggctgacggcgtgtcctgcgaagatcaggatgagtgtctcatgggcgcacacgactgcagcagaaggcaattctgcgtgaatacgctcggcagtttctattgtgtaaatcatactgtgctctgcgcggacggttacattctgaacgcccataggaagtgtgttgacatcaacgagtgcgttaccgatttacatacctgctctcgaggcgaacactgtgtgaacacactgggttccttccattgctacaaggcactcacctgcgaaccaggatatgctcttaaggatggtgaatgcgaggacgtagatgagtgcgcaatgggcacacatacgtgccaaccaggctttctgtgtcagaacaccaagggaagcttttactgtcaggccaggcagcgttgtatggatggcttcctgcaggatccagaaggcaactgtgtggatattaacgaatgcacatccctctctgagccctgtagacccggattcagctgcattaacacagtcggatcctacacctgtcaacggaaccccttaatatgtgcgaggggctaccacgcttcagacgatggcactaaatgcgtagacgtgaatgaatgtgaaactggggtacacaggtgtggcgaggggcaagtgtgtcataatcttccagggtcttacaggtgcgattgcaaagccggatttcaaagagatgccttcggcagaggctgtatcgacgtgaacgagtgctgggcttcacccggaaggctttgccaacatacatgtgagaacacccttggctcttatagatgcagttgcgcctcgggctttctgctggccgcagatgggaagaggtgtgaagatgttaatgagtgcgaggcgcagaggtgctcccaagagtgcgcaaatatttacggaagttaccagtgttattgccgccaggggtaccagcttgcggaggatgggcacacctgtactgacatcgacgaatgcgcacagggagccggaattttatgcaccttccgctgcttgaatgtaccagggagctaccagtgtgcatgtcctgaacagggatatacgatgactgccaacggacggtcttgtaaagacgtggatgagtgtgcgctcggtacacacaactgctcagaggctgagacatgccacaacatccagggctctttcagatgcctgcggttcgagtgtccccctaattacgtgcaggtgtctaaaacaaagtgtgaacggaccacgtgccatgatttccttgagtgtcagaactctcctgctaggattactcactaccagttgaatttccagacagggttgctagttccagcacacatttttcggatcggcccagcacctgcctttactggggacacaattgccctcaacatcataaaaggtaacgaggagggttacttcggcactaggagactcaacgcatacaccggggtcgtgtatctgcagcgggcagttctggagccacgggacttcgcactggacgttgaaatgaagctgtggaggcagggaagcgtcactacttttctcgccaagatgcatatttttttcactacattcgcgctgtag

SEQ ID NO: 223306 - DNA, 480 bp, synthetic construct
  misc_feature 1..480: note = Description of Artificial Sequence: Synthetic coding sequence
  source 1..480: mol_type = other DNA
atggtgctcctgtgggaacctgctggggcatggttggctttaggactggccctggccttgggaccgagtgtcgcagctgcagctcctagacaggactgcacgggcgttgaatgcccgccacttgagaattgtatagaagaagcactggaaccaggcgcttgctgtgccacttgtgtccagcagggctgcgcgtgtgaaggctatcagtattacgactgtctacaagggggtttcgttcgtggcagagtacctgctggccagagctatttcgtggatttcggttctacagagtgttcctgtcccccagggggtgggaaaatttcctgccagttcatgctctgccctgagctgcctccaaactgtatagaggcagtggtggtcgccgattcatgcccccaatgcggccaggtgggttgcgtacatgccggacacaagtatgctgcagggcatacggtacacctgcctccttgtagggcgtag

SEQ ID NO: 223307 - DNA, 3696 bp, synthetic construct
  misc_feature 1..3696: note = Description of Artificial Sequence: Synthetic coding sequence
  source 1..3696: mol_type = other DNA
atggtgctgttgtgggaacctgccggagcttggcttgcattgggattggccctggcgctcgggccatccgtggcagccgctgctcctcggcaggactgtactggggtggaatgcccgccacttgagaactgtattgaagaagcgctcgaaccaggcgcttgctgcgccacctgtgttcagcaaggctgcgcatgtgagggataccagtactatgattgtctccagggcggattcgtgcggggacgggtgcctgctgggcagtcgtactttgtcgactttggcagcactgaatgttcttgcccacctggcggtgggaaaatcagctgccagtttatgctgtgccccgagctgcccccaaattgcatcgaagcggttgttgtggcggatagctgtccacaatgtggacaggtgggatgcgtccacgccggacacaagtacgccgctggacacacagtccacctgcctccctgccgagcatgccactgtcctgacgcaggcggtgagcttatttgctaccaacttcctggctgccatggtaacttttctgacgcggaggagggcgatcccgagaggcactatgaagatccctattcttacgatcaggaggtggctgaagtcgaggctgctacagctctggggggtgaggtccaggctggggcagtgcaggccggagccggaggcccaccagcggctctgggcggtggatctcagcccctttctactatccaagcccctccctggcctgccgttctgcctaggcctactgctgcagccgcactgggacctccggctccggtgcaggctaaggccaggagagtgacggaggactcagaagaggaggaggaagaggaagaagagagggaggaaatggccgtgacagagcaactcgctgccggtggacatcgcggactcgatgggctcccaactacagcacccgcaggaccctctttgcctattcaggaagagcgggctgaagctggcgctagagccgaggcaggcgctaggccagaggaaaacctcatactggacgctcaggcaacaagccgcagtacaggaccggaaggagtgacgcatgcgccatcactcggtaaggctgccctggtgcccacccaggccgtacccggatccccacgagaccccgttaaaccatccccacataatatcctgagcacgtcccttccagacgccgcttggatcccacccacacgagaagtgccgagaaaaccacaagtgttaccacacagtcatgtggaggaggatacagatcccaacagtgtacactcaattcctcggtcttcacccgaaggtagcaccaaggatcttatagaaacatgttgtgctgccggtcaacagtgggccatcgacaatgacgagtgtctcgagattcccgagtcgggcacagaagataatgtatgtagaactgctcagcggcattgctgcgtgagctatttgcaggagaagagttgcatggctggcgtgctgggcgctaaggagggagaaacctgcggcgcagaagataatgactcctgcggaatcagtttatacaaacagtgctgtgactgctgcggactcggcctgagagtaagggccgaaggacagtcctgtgagtccaaccctaatcttggttacccctgtaaccacgtgatgttaagctgttgcgaaggggaggagccactcatcgtgccagaagttaggcggccaccggagcccgctgctgcccctaggagagtttccgaggccgagatggctgggcgtgaagctttaagtttgggtaccgaggctgagctgcccaactccctccctggggacgatcaggatgagtgcctgctgctacctggagagctctgccagcatctgtgtataaataccgtgggctcgtaccattgtgcttgcttcccaggtttctcactacaagacgatggaagaacctgcagaccagagggtcatcctcctcagcccgaagcgcctcaggaaccagccctaaagtccgaattctcccaagttgcctccaatactattcccctgccattgccacagccaaacacctgcaaagacaacgggccatgtaaacaggtgtgttctaccgtaggcggttctgccatctgttcttgcttccccggatacgctataatggctgacggggtttcttgcgaagaccaggacgaatgtctgatgggggctcatgattgctcccgtaggcagttctgtgtcaatactctggggagcttttattgtgtaaatcataccgtactgtgcgcagatggatatattttgaatgcccaccgcaagtgcgttgacatcaacgagtgtgtcacagatcttcatacctgctcacgcggagagcactgcgtcaatactctgggttccttccactgttataaggccctgacatgcgaaccgggatatgcgctgaaagatggcgagtgtgaagatgtcgacgagtgtgcgatgggaactcacacctgccaacctggatttctgtgccagaacacaaagggttctttctattgtcaggcccgacagcgctgcatggatggcttcttgcaggatcctgagggtaattgtgtggatataaacgagtgcactagcctgagcgagccttgcaggcctggcttttcatgtattaacaccgtgggatcatacacttgccaaaggaacccactgatatgcgcaagaggctaccacgcaagcgatgacggtaccaagtgtgtagacgtcaatgaatgcgagacaggcgttcaccggtgcggagagggacaggtctgtcacaatctcccaggtagttacagatgcgattgtaaggctggattccagcgcgatgctttcgggagaggatgtatcgacgttaatgagtgctgggctagcccaggccgactgtgccagcatacctgtgagaacacacttggcagttaccgatgttcctgcgctagcggattcttgcttgcagcagatggcaagcgctgtgaagatgtaaatgaatgcgaggctcagcggtgctcacaggagtgtgctaacatatatgggagctaccagtgttactgtcgccaagggtatcaactggctgaagatggtcacacttgcacagacatcgatgaatgtgcccagggtgcagggattctctgcacattccgatgtctgaacgtgcctggctcttaccaatgcgcctgtcccgagcagggctacaccatgacggctaatggacgatcctgtaaggatgtggatgagtgtgccctgggaactcataactgtagcgaggccgaaacctgtcacaacatccaaggctcttttcggtgtctccggttcgaatgtccacccaattatgtgcaggtgtctaagacaaaatgtgagcgcactacctgccatgatttcctagaatgtcagaattcgccggcaaggatcacccactatcagctcaactttcagacggggcttctggtgccggcacatattttccggatcggcccagccccagccttcacaggagatacgatcgctttgaatatcataaagggaaacgaagagggatatttcggcactagaagactcaatgcgtacaccggcgttgtgtatttacagcgcgctgtgctcgaacctcgagactttgccctcgacgtcgaaatgaaattgtggcgacagggttccgtgacaacgttcctcgccaaaatgcatatcttttttacaacatttgcactctag

SEQ ID NO: 223308 - DNA, 3633 bp, synthetic construct
  misc_feature 1..3633: note = Description of Artificial Sequence: Synthetic coding sequence
  source 1..3633: mol_type = other DNA
atggagacctctctctccttggagagtggccatcacgggtcctaccggagaggcgaccgaccgggtctggcatggaccatggtgctgctgtgggaacctgcaggtgcatggttggcactggggctggctctggccctgggccctagtgttgctgccgctgcacctaggcaggactgtacaggcgtggagtgtcccccattagaaaactgtattgaagaggcactggagcccggagcttgttgcgccacctgcgtccagcaaggttgcgcctgtgaagggtaccaatactacgactgcctgcagggcggattcgtcaggggtcgagtgcctgccggtcagagctatttcgtcgatttcgggagcaccgagtgctcatgccctcccggtggaggtaaaattagttgccagtttatgctctgcccagaattgccacccaactgcattgaggccgtagtggtggcagactcttgccctcagtgtgggcaagtcggttgtgtgcacgccggtcataaatatgctgcaggacataccgtgcatcttccgccatgtcgtgcttgtcactgtccggacgcaggcggagagctcatatgctaccaactccccggttgccacggaaatttctctgacgccgaggaaggcgatccagaacgccactacgaggacccatattcttacgaccaggaagtggctgaggttgaggccgcaaccgccctgggtggtgaggtgcaggccggagcagtgcaggccggtgccggtggtcccccagccgcacttggcggaggctctcagccactgtccacgatacaggcgcctccctggcccgctgtgcttccacgtcctactgctgctgctgcactgggtccccctgccccagttcaagccaaagcaaggagggtgactgaagattctgaggaggaggaagaggaagaagaagaacgtgaggagatggccgttacagaacaactagccgcaggcggacaccgcggtctggacgggctgcctacaacagctcccgcaggcccttccctgcctattcaggaggaacgcgcagaagcaggcgcaagagccgaggccggtgctcgccctgaggagaatcttatacttgatgcccaagcaacctccagatctacaggtccagaaggagttactcatgcaccatcactcggtaaggcagcgttggtcccaacccaggccgtccctgggtccccgagggacccggtcaaaccctccccacataatattctcagcacgagcctccctgacgcggcttggatcccaccaacccgggaagtgcccagaaaaccccaagtgttgccgcactctcacgtggaggaagatacggatcccaactcggtgcactccatccccagaagttctcccgaagggtccacaaaggatttgatcgaaacttgttgtgcggctgggcaacagtgggctatagataatgacgaatgtcttgagattcccgagagcgggaccgaggacaatgtgtgccgcactgcccagcgccattgctgtgtctcatacctgcaggaaaagtcgtgtatggccggagttttgggcgcaaaagaaggggaaacgtgcggtgctgaagacaacgacagttgtggcatatcgctgtataaacaatgctgcgactgttgtggtcttgggctgcgagtaagggccgaggggcagagctgtgaatctaaccccaatttgggatatccttgcaatcacgtgatgctctcatgttgcgagggggaagagcccttaatcgtccccgaggtccgccgacctcctgagcccgctgccgctcctaggagggtatcggaggcagagatggccggacgcgaggcgctctccctggggaccgaagccgaacttccaaattctctccctggggacgaccaggatgagtgtctgttgttacccggagagctttgccagcatctgtgtatcaatacagtgggatcctatcattgtgcctgcttccctgggttctcccttcaggacgatggcaggacatgccggccagaaggacatccgcctcagccggaagctccacaagaacctgctctgaagtctgaatttagtcaggtggccagtaatacaatccccctgcccctgccacaaccaaacacttgcaaagataatggaccatgcaaacaagtgtgcagtaccgttggcggaagcgccatatgctcatgctttcccggatatgctataatggccgacggcgtgtcttgtgaggacataaacgagtgtgtgaccgatctgcatacatgctcccgcggagaacattgcgtgaatacattagggagcttccattgttacaaggctcttacatgcgaacccggttacgccctcaaggacggagaatgcgaagatgtggacgagtgtgctatgggtacgcatacgtgccaacccggatttctgtgtcaaaataccaaaggaagtttttactgtcaggcccgacagcgctgcatggatggatttctccaggacccagagggcaactgtgtcgacatcaatgagtgcacttccttatccgagccctgcagaccaggcttctcgtgcatcaacacagtcggcagctacacctgccaaaggaatccactgatatgtgcccgagggtaccatgcgagtgatgatggcacaaaatgtgtcgacgttaatgagtgcgagactggagtgcaccgctgtggtgagggccaggtttgccacaaccttcccggtagctacagatgcgactgcaaggctggattccagagggatgctttcggtagaggatgtatcgatgtgaatgaatgctgggcttcacccggtcgactgtgccagcacacatgcgagaatacattaggaagttaccgctgcagttgcgcatcagggttcctgctggccgcagatgggaagaggtgcgaagatgtgaacgagtgcgaagcacagaggtgttctcaggagtgtgctaacatctacggaagttaccaatgctactgtagacagggttatcagctcgctgaagatggacatacatgcacagatatcgatgagtgtgcccaaggagccggaattctatgcacattcagatgcctgaacgtgcccggatcctaccagtgcgcttgcccggaacagggatacaccatgaccgcaaacggacggtcttgtaaagatgtggatgaatgtgcactgggaacacataactgcagtgaggctgagacctgccacaacatacagggatcctttagatgcctgagatttgaatgcccccctaactatgtgcaagtgtctaagactaaatgtgaaagaacaacctgtcatgatttcttagagtgtcagaacagccccgcaagaattacacattatcaattgaattttcaaaccggattgttagttcctgcccacatcttccgaattgggcctgctccagcatttacaggtgacacaattgcgctgaatatcatcaagggcaatgaagagggatactttggaacccgacgcctaaacgcctacaccggcgtggtttacctccagcgggctgtcttggaaccaagggactttgccttggatgtggagatgaagctctggaggcagggatcagtgacaacatttctggccaaaatgcatatcttctttaccaccttcgctctatag

SEQ ID NO: 223309 - DNA, 1347 bp, synthetic construct
  misc_feature 1..1347: note = Description of Artificial Sequence: Synthetic coding sequence
  source 1..1347: mol_type = other DNA
atgcctggcatcaaacgtatactgaccgttaccatcctggccctctgtctgccaagccccggaaatgcacaagcccaatgcactaacggctttgatcttgaccggcagtctgggcaatgtctggacattgatgagtgcagaaccattccagaggcatgtcggggtgatatgatgtgcgtgaatcagaacgggggatacctgtgtattccccgtactaatcccgtttaccggggtccctattccaatccatatagcactccttactctgggccttatccagccgctgcgccacccctctccgcgccaaactaccccacaatttctcgcccactcatttgccggtttgggtaccaaatggacgaaagcaaccagtgcgttgatgtggatgagtgtgcaaccgattctcaccagtgtaatccaactcagatttgcatcaatactgagggaggatacacgtgttcctgcacagatggctactggctgctggagggccagtgccttgatattgatgagtgtagatatgggtactgccagcagctctgtgcaaatgttccagggagttacagctgcacatgcaatccaggctttaccctgaacgaagatggcagatcgtgccaggatgtcaatgaatgtgccacggaaaatccttgcgtgcagacctgcgttaacacatatggcagcttcatatgcaggtgcgatcctggatacgaactcgaggaggacggagtgcattgttctgacatggacgagtgttcctttagtgaattcctgtgtcagcatgagtgcgtaaaccaacctggcacgtatttctgcagctgccccccaggctacattctgttagacgacaaccgcagctgtcaagacattaatgaatgtgaacatcgtaatcatacatgcaacttacaacaaacttgctacaatctgcaaggcggatttaaatgcatagacccaatccgttgtgaagagccttacctcaggatttctgacaacagatgcatgtgcccagctgaaaacccaggttgcagggaccaaccctttaccattctgtaccgcgacatggacgtggtctcaggcaggagtgttcccgcagatattttccagatgcaggctactacacgctaccctggcgcttattacatctttcagattaagtccggtaacgaaggcagagaattttacatgagacagaccgggccaatctctgccaccctggtgatgacccgacctattaaggggccaagagaaatacagttggacctggagatgatcacagtcaacacggtgattaattttagggggagttcagtcatccgcctccggatttacgtgtcacaatatcctttctag

SEQ ID NO: 223310 - DNA, 276 bp, synthetic construct
  misc_feature 1..276: note = Description of Artificial Sequence: Synthetic coding sequence
  source 1..276: mol_type = other DNA
atgcccggaatcaagcgaatcttaacggttactattctagccctctgtctgccgagtccaggcaacgctcaggcccaatgtaccaacggcttcgacctcgacagacaaagcggacagtgcctagacatcgacgaatgccggactattccagaggcatgccgaggtgacatgatgtgcgtcaaccagaatggaggctacttgtgtataccgaggactaatcctgtttacagaggcccatactccaatccttactcaactccatatagtggcccatag

SEQ ID NO: 223311 - DNA, 1320 bp, synthetic construct
  misc_feature 1..1320: note = Description of Artificial Sequence: Synthetic coding sequence
  source 1..1320: mol_type = other DNA
atggtgccgtcaagccctcgggcactctttttgctgctgttgatcctcgcttgccccgaacctagggctagccagaactgcttgtctaagcaacaactgctgagtgctatcaggcagctgcagcagctcctcaaggggcaggaaactcgctttgctgaagggattaggcatatgaagtcccgtttggcggctctccagaatagcgtcggacgggttgggcctgacgctcttcccgtgagctgccccgcactcaatacaccagcagacggtcggaaattcggtagtaaatatcttgtcgatcatgaggtccactttacctgtaatccaggtttccgcctggtgggccctagctccgttgtgtgcctccctaacggaacgtggaccggtgaacagccgcactgtcgtggaatctccgaatgctcatcccagccttgtcagaacgggggtacctgcgttgaaggggtgaatcaatacagatgtatttgcccgccagggcgaacgggcaataggtgccaacaccaggctcagaccgcagctcctgaagggtcagttgccggagattctgccttcagccgagcaccacggtgtgctcaggtagagagagcgcagcactgctcttgtgaggcagggttccatctctcaggggctgcgggagacagtgtgtgccaggatgttaacgagtgtgagctatatggacaagaaggccgaccacggctctgcatgcacgcatgtgtgaacacgcctggctcgtacagatgcacatgccccggaggataccggacattagcagatggcaaatcatgcgaagacgtggacgagtgcgtgggcctccagccagtatgtccacaaggcactacatgcataaacactggcggatccttccagtgcgtatcacccgagtgtccagaaggaagtggcaacgtgagctacgttaagacgagcccttttcagtgcgagaggaacccttgccctatggacagtcgcccttgcaggcacctgcccaaaaccatttccttccactacctttcactgccgtcaaatctgaaaaccccaatcacgcttttcaggatggcaacagcttccgcacctgggagggcaggtcccaactcccttaggtttgggatcgtgggaggcaacagccggggtcattttgtcatgcagcggtcagatagacagacgggtgatctaattctggttcagaatttagaagggccacagactctcgaagtggatgtggacatgtcagaatatcttgatcgcagctttcaagctaaccacgtatcaaaagtgaccatattcgtgagtccttacgacttttag

SEQ ID NO: 223312 - DNA, 1182 bp, synthetic construct
  misc_feature 1..1182: note = Description of Artificial Sequence: Synthetic coding sequence
  source 1..1182: mol_type = other DNA
atggtgccctcctcccctagggccttgtttctgctgttgttgattttggcatgtccagaacccagagctagtcagaattgcctctccaagcaacagttgctgagtgccataaggcagttgcagcaattgctgaaggggcaggagactcggtttgctgaggggattcgccacatgaaatcccgcctcgctgcgctgcagaattctgtgggaagggtcggccctgacgccctgcccgtgtcatgcccagccctgaacacaccagctgatggcaggaagtttggctcaaagtacttagtagaccatgaggtgcacttcacttgtaaccccggattcaggctggttgggcctagtagcgtggtgtgtcttcctaacggcacctggacaggagaacaaccacactgtaggggtatttccgagtgttcttctcagccttgtcagaacggcggaacgtgtgtcgagggagtaaaccagtaccggtgtatctgcccacccggaaggacaggtaatcggtgccagcaccaggcccaaacggacgtgaatgaatgtgagctgtacgggcaagaaggacgtccacggttatgtatgcatgcttgtgtcaatactcctgggtcctaccgctgtacctgccctggaggttacagaacactcgctgacgggaaaagctgcgaggacgtggacgaatgcgtcgggctacagcccgtatgcccacagggcactacatgcatcaatactgggggaagcttccaatgtgtgtctcctgagtgccccgaagggtctggtaacgtctcctacgtgaaaacgtccccatttcagtgtgagcgcaatccatgcccaatggattcccgaccatgtaggcatttaccaaagaccatatcgttccactacctgtctcttccctccaatctaaaaaccccaatcacccttttccgcatggctaccgcctccgcgccaggcagagccggtccgaattctcttagatttgggatcgtgggagggaatagccggggacactttgtgatgcaacgatcagaccgacagaccggcgatcttatcctggttcagaacttggagggcccacaaacactggaagtcgacgtggatatgagcgagtacctagatcgcagtttccaggcaaatcacgtgtctaaagttaccattttcgtgtcgccttacgatttctag

SEQ ID NO: 223313 - DNA, 942 bp, synthetic construct
  misc_feature 1..942: note = Description of Artificial Sequence: Synthetic coding sequence
  source 1..942: mol_type = other DNA
atggagttggatcgcgcagtgggtgtgttgggagccgctacactcctgctgtccttcttaggcatggcctgggccctgcaagccgctgacacctgtcctgaggtgaaaatggttgggcttgaaggcagcgacaagcttactattttgagaggttgtcctgggctgccaggagccccaggacccaagggtgaagcaggcaccaacggtaaacgcggagagaggggaccacctggaccccctggtaaggctgggcctcccggaccaaacggagcaccaggggaacctcagccctgcctcaccggcccaaggacgtgtaaggatctcttggaccggggacatttcctcagcgggtggcacaccatctatttgccagattgtaggcctctgactgtgctttgtgacatggacaccgacggcggagggtggacagtattccagaggcgcgttgatggaagcgttgatttttatcgagattgggcgacatacaaacaagggttcggctcaaggttgggcgagttctggttgggaaacgacaacatccatgccctgacagcgcagggcaccagcgagttaagagttgatttggtggatttcgaggacaactaccagttcgccaagtataggtctttcaaggtagccgatgaggcggaaaagtataacctggtgcttggcgcatttgttgagggcagtgctggggactctctcaccttccataataaccagtccttcagcacaaaagaccaggacaacgacctgaacacaggcaactgtgctgttatgtttcagggcgcatggtggtacaagaattgccacgtcagcaacctcaatggcagatacctgagggggacccatggctccttcgccaacgggataaattggaaaagcgggaaggggtataactacagttacaaggtttccgagatgaaggtgcggccagcttag

SEQ ID NO: 223314 - DNA, 828 bp, synthetic construct
  misc_feature 1..828: note = Description of Artificial Sequence: Synthetic coding sequence
  source 1..828: mol_type = other DNA
atggagttggatcgcgctgttggcgtgcttggagctgccaccttactgctcagctttctgggcatggcatgggctctgcaggctgcagatacatgccctggagaaaggggccctccgggaccccctggaaaagccggaccccctgggccaaacggggctcctggcgaaccccagccgtgcctgacaggaccacggacatgcaaggatctgttggatcggggacatttcttgtccggctggcacaccatctatttacccgattgtcgcccactgactgtgctctgcgacatggacactgatggaggagggtggaccgtattccagcggagagtggacggatcagtggatttctatagggattgggccacttataagcagggttttgggtccagactcggagaattttggttgggtaacgataacattcacgcactcacagcccagggcacttccgaactccgcgtcgacctggtcgacttcgaggacaactaccagttcgcgaagtacagatcttttaaggtggcagacgaagctgagaagtataaccttgtgctaggagccttcgtagaaggcagcgccggtgacagcttgacgttccataataaccagtcattctctacaaaagaccaggataatgatctaaatacgggaaactgtgcagtgatgtttcagggggcatggtggtacaaaaactgtcacgtatctaatctgaatggacggtacctccgcggaacgcatggctcatttgccaacggcataaattggaaatctgggaaaggctacaattactcatataaagtaagcgagatgaaagtacggccagcttag

SEQ ID NO: 223315 - DNA, 564 bp, synthetic construct
  misc_feature 1..564: note = Description of Artificial Sequence: Synthetic coding sequence
  source 1..564: mol_type = other DNA
atggaactgagcggcgcaactatggcgagggggctcgccgtattactggttctgtttctccatatcaaaaatctcccagcgcaggccgctgatacgtgtccagaagtaaaggtggtagggctggaaggcagcgacaaattgacaatccttaggggctgtccgggtctgccaggggctccaggccctaagggcgaggccggagtgattggggaacgaggcgagagaggtctgccaggtgcgccaggcaaggctgggcctgttggaccaaaaggcgacgcgggacagagccagtcttgtgccacagggccaaggaactgtaaagacctcttggaccgcggatacttcctcagtggctggcacaccatttatcttcccgactgtcggcctcttaccgttctatgcgatatggatactgatggtggtggctggactgtgttccagaggaggatggacgggtcagtggatttctacagggactgggcggcttataaacaaggatttggaagccagttaggtgaattctggttaggcaatgataatatccacgcccttacggcacagtag

SEQ ID NO: 223316 - DNA, 981 bp, synthetic construct
  misc_feature 1..981: note = Description of Artificial Sequence: Synthetic coding sequence
  source 1..981: mol_type = other DNA
atggaacttagcggtgccacaatggcccgtggacttgccgtgctgctggtgctgttcctccacatcaaaaaccttccagcccaagccgctgatacatgccccgaggttaaggtggtggggcttgaagggtctgacaaacttacaatccttagggggtgccccggtctgcccggtgccccaggacctaagggagaggccggtgtcattggggagcgcggtgaacgaggcctgccaggagcccctggaaaggcaggcccagtcggacctaagggagatcgtggagagaaaggtatgcgcggagagaagggcgatgcaggacagtctcagagctgtgccactggcccacgaaattgcaaagatttgctggatcgtggctacttcctgagtggctggcacacaatctatctgccagattgccgcccactgactgtgctgtgtgatatggacactgacggaggcggttggaccgtatttcagcgcaggatggacggttcagtggatttttacagagattgggcagcatacaagcaagggttcggatctcaattgggagaattttggctgggcaacgacaatatacatgccttaacagcccagggtagttccgagctgagggtggatctagtcgatttcgaagggaaccatcaattcgccaagtacaaatcttttaaagtggcagacgaggctgaaaagtataaattggtactcggggcttttgttgggggttcggcgggtaactcccttacaggtcataataataattttttcagtacaaaagaccaggacaatgacgtgtcgtcttccaactgcgccgaaaagttccagggcgcttggtggtatgctgattgtcacgcctctaacttgaacggcctatatttgatggggccacacgaatcctacgctaatggcattaattggagtgcagccaaggggtataagtattcttacaaggtgagcgagatgaaagtacggcctgcctag

SEQ ID NO: 223317 - DNA, 1083 bp, synthetic construct
  misc_feature 1..1083: note = Description of Artificial Sequence: Synthetic coding sequence
  source 1..1083: mol_type = other DNA
atggagctgtctggggctacaatggcccgtggactcgcagtactcctggtgctctttctccacataaagaacctgcccgcacaggccgcagatacttgccccgaggtaaaagtggtgggtctggagggttccgacaagttaacaatcctcagaggctgccccggtttgcccggagcacccggacccaagggggaagccggtgtgatcggcgagaggggggagcggggtctccctggtgctccaggcaaagccggtccagttgggcctaagggcgacaggggtgaaaagggtatgaggggagagaagggagatgctggacaaagtcagagttgcgctaccgggccacggaattgtaaagatttgctcgacagaggttactttttgagtggatggcataccatatacctcccagattgccgaccacttaccgtcctatgtgacatggataccgacgggggagggtggaccgtgtttcagcgtcgcatggacggttcagtcgacttttacagggactgggctgcctacaagcaagggttcggaagccagacccactcacacgacgctcacagctgtcctttcgccccatccagcgtcaagccccctcacgcccacaacctgacacgaggcagaatcatgtttctgaacatgtttacactggggcagaagagtttcacttcatttaatgtgtgttttctcaataccagcggttttgaccattttccagtatccgtggcacggcaggtttttccgtggaatctggtgagcagggaggaaagtggaccactgttctcgagatggcattaccgctgcagtggtcggctgtccgacttctgcgaggactttcctccccctgtgatcgacacagggcgatctagtccgcctccaccatcattaccacacccacccatgccccattcccagcattttacactgctggagaagggacatttcggtgtacaaaaaactctgacaaagaaaggggaatcccttgtcgggacttttctgctgcctaccacggctgaattcatgttgtgggctggatggctcctgggccgagacaaacacttggccctgactaaatag

SEQ ID NO: 223318 - DNA, 900 bp, synthetic construct
  misc_feature 1..900: note = Description of Artificial Sequence: Synthetic coding sequence
  source 1..900: mol_type = other DNA
atggatctcttatggattttaccaagcctgtggctcttgcttttgggcggtccggcatgtctcaaaacacaagagcatcctagttgtcccggacccagagaattggaggctagtaaagtggtgcttttaccaagttgccctggtgccccaggttcccctggagagaagggggcaccagggccacagggaccgccaggccctcctggaaagatggggccaaagggtgaacccggagatccagtgaaccttctcaggtgccaagagggtcccaggaactgtcgcgagttgctctcacaaggagccactctgtcaggctggtatcacctctgtctgcctgagggccgagcgctgcccgtgttttgcgacatggacacggaagggggtgggtggctggttttccagaggcgtcaggacggatcggtggatttcttcaggagctggtcttcttatcgggcaggcttcggcaatcaggagtcagagttttggctagggaacgagaacctgcaccagctgaccctccaaggcaattgggaattaagggtggagttagaggatttcaacggcaaccgcacattcgcccactatgctaccttccggctacttggtgaagtcgatcattaccagctcgctctgggcaaattcagcgaaggtaccgccggtgattccctgagcttgcattctggcaggcccttcacgacctacgacgccgaccacgactccagcaatagcaactgcgctgtcattgtgcatggtgcatggtggtacgcatcttgttacagatcaaacttgaatggaagatatgccgtgtccgaggctgccgcacacaagtacggaatcgattgggcaagtggaaggggagtgggccatccgtataggagggtgcggatgatgctacgatag

SEQ ID NO: 223319 - DNA, 867 bp, synthetic construct
  misc_feature 1..867: note = Description of Artificial Sequence: Synthetic coding sequence
  source 1..867: mol_type = other DNA
atggatcttttgtggatcctgcctagtttgtggctcctgctactgggagggcctgcctgtctcaaaacacaggagcatccctcatgtccagggcctagggaacttgaagctagtaaagtggtgctcttgccttcctgtcctggggctcctgggtccccgggagagaaaggcgcaccaggaccacagggacccccaggaccgccagggaagatgggacctaagggcgagcccggacctcggaactgtcgggagttactgagccaaggagcgaccctcagcggctggtaccacctgtgtttaccggaggggagagccctgcccgtcttctgcgacatggataccgaaggcggtggctggttggtatttcaacgcaggcaagacgggtctgttgacttcttccgatcttggtcttcataccgcgcaggatttggcaaccaggagagtgagttctggcttggcaatgagaatctccatcagctcaccctgcaggggaattgggaactgagagtagagctagaagactttaacggcaaccggacattcgcacattacgcgaccttccgtctcctgggggaggtagatcactaccagcttgccctcgggaaattttctgaaggcactgcaggagactcactgtccttacactcaggtcgacctttcacaacctacgatgcagaccatgactcttctaacagcaactgtgcggttatcgtacacggtgcgtggtggtatgctagctgttataggtcgaacttaaatggcagatacgctgtctccgaggctgccgctcacaaatacgggatcgactgggcctcggggagaggtgtgggccatccataccgaagagtgcgaatgatgctgcgctag

SEQ ID NO: 223320 - DNA, 300 bp, synthetic construct
  misc_feature 1..300: note = Description of Artificial Sequence: Synthetic coding sequence
  source 1..300: mol_type = other DNA
atggacacagagggaggaggatggctcgtgtttcagcgaagacaggacggctccgtggacttctttcggagctggagctcttacagggctggcttcggcaaccaggagtcagaattttggctcggcaacgagaacctacaccagctgactctgcagggaaattgggagctgagagtagaattggaggatttcaatgggaatcggactttcgctcactatgcgacctttcggctgcttggggaggtggatcactaccagcttgcattagggaaattctctgaggggaccgccggtgagtag

SEQ ID NO: 223321 - DNA, 2094 bp, synthetic construct
  misc_feature 1..2094: note = Description of Artificial Sequence: Synthetic coding sequence
  source 1..2094: mol_type = other DNA
atggccgagactagtcctgagcctagtggtcagcttgtcgttcacagtgacgcacattccgacacagtactggccagttttgaggaccagaggaaaaagggcttcctgtgcgacataaccttgattgtggagaacgttcattttagggctcacaaggcgctgttagcggcttccagcgaatacttcagtatgatgtttgcagaggagggggaaattggacaatcaatttatatgctggaagggatggtagcagacacattcggcatcctattagagtttatctatactggctacttacatgcctctgagaaatccacagagcagatacttgccaccgctcaattcctgaaggtgtatgatctcgtgaaggcgtataccgactttcagaacaatcattccagtcctaaaccaaccacactgaacacagcaggggctccagtggtggtcatttctaataaaaagaatgatccacccaaaagaaaacggggacggccaaaaaaggtgaatacactgcaggaggagaagtcagaattggctgcagaagaggagatccagctgagagtgaacaactctgtccagaatagacagaacttcgtggtgaaaggtgattcaggagttctgaacgagcagattgcagccaaagaaaaggaggagtccgagcctacatgcgagccctctcgcgaggaggaaatgcccgtggaaaaggatgaaaactacgatcctaagaccgaggacggccaggccagtcagtccaggtactcaaaacgccgtatctggcggagcgttaagttaaaggattacaagctcgtcggcgatcaggaggaccacggcagcgctaaacggatctgtggtcggcgtaagcgaccagggggaccagaggcaagatgcaaggactgtggaaaggtttttaaatacaaccactttctggccatccaccagcgctcccatacgggagagcgcccatttaaatgcaatgaatgcggcaagggcttcgcacagaagcactcgctccaggtgcacacccgcatgcacaccggagagagaccgtatacatgtacagtgtgctccaaagcactcacgacaaaacactccctcctggaacatatgtctttacactcgggccagaagagctttacctgtgaccaatgtgggaagtatttctcccagaatcgccagctgaaaagccactacagggtccacaccggacactccttgcctgagtgcaaggactgtcacagaaagttcatggacgttagccagctgaaaaagcatctacgtactcacaccggggaaaaaccctttacatgcgaaatctgtggcaaatcgtttacagccaaatcatccctccagacgcatattcgaatccaccggggtgagaagccgtatagctgcggtatctgtggtaagtccttttctgactcgagtgcaaagcggcgtcactgcattctgcataccggaaagaagccgttttcctgccctgagtgtaacctccagttcgccaggctcgataaccttaaggctcatctcaaaattcattccaaggaaaagcacgcctcggacgcttcttcgatctccggttcaagcaatactgaagaagttcggaatatcctgcagctgcaaccataccagctgtccacatcaggtgaacaggagattcagttgttggtaacagattctgtccacaacatcaatttcatgcccggtccctctcaagggatctctatcgtcactgcggagtcctctcagaacatgactgctgatcaggcggcaaacttgaccctgttaacccagcagcctgaacagctgcaaaatttgattctgagtgcccagcaggaacaaaccgagcacatccaatctttaaatatgattgaaagccagatgggacctagtcaaactgagcctgtccatgtcattacgctgtccaaggaaaccttggagcacctccatgcccatcaagagcagactgaggaactgcacctcgctaccagtacttccgacccagcccagcacctgcagttgacacaagaacctgggcctcccccacccacccatcacgtgccccagcctacccccctgggtcaggaacaatcttag

SEQ ID NO: 223322 - DNA, 420 bp, synthetic construct
  misc_feature 1..420: note = Description of Artificial Sequence: Synthetic coding sequence
  source 1..420: mol_type = other DNA
atggggcaaaagggctccagcggcctgtttagagcagtgtcagctttcggagtggtgggcttcgtgagattcttagaagggtactatatcgtgctgatcacgaaacgtcgtaaaatggccgatattggaggtcacgccatctataaagtcgaagacactaatatgatctacatcccaaacgatagcgtgcgagtgacccaccctgacgaggctcgctatttgcgcatttttcaaaacgtggacttgtccagtaatttttatttcagttactcctatgatctgtcgcactcccttcagtataaccttactgttctgagaatgcccctggagatgctgaagagcgaaatgactcagaaccggcaagagtcatttgatatcttcgaagacgagggcctgatcactcaggggggatccgggtag

SEQ ID NO: 223323 - DNA, 411 bp, synthetic construct
  misc_feature 1..411: note = Description of Artificial Sequence: Synthetic coding sequence
  source 1..411: mol_type = other DNA
tgactttttgaagaactgtatgaagaccatggtgatacgctgtctctgcagtatggcggatcacaactggtccatcgtgtaaagacttacaggaagatagctccatggacacaacattctaaagacataatgcaaactttgagccggtactatagcaatgccttttcggacgccgaccgccaggactcaataaatctgttccttggggtgtttcacccgactgaagggaagccacatttgtgggagcttcctacagatttttacctgcaccacaagaacactatgcgtctgctcccgactcgcaggagttacacctactggtggacccccgaggtcattaaacacctgcccctaccatacgatgaggggtttctggccagatcgcctgccaacttagagtgttcaaattag

SEQ ID NO: 223324 - DNA, 300 bp, synthetic construct
  misc_feature 1..300: note = Description of Artificial Sequence: Synthetic coding sequence
  source 1..300: mol_type = other DNA
atgaccagcagcgccagagatttcatgcctaaaacggtggggatcgatccctctccgttcactgtcaggaaacccgacgagacgggcaagagtgtactgggcaacaagtcaaatcgcgaggaggccgtcttgcagcgcaagactgccgcaagcgctcccccacctccttctgaagaggccgtgagctcttccagcgaagacgattccggaaccgaccgtgaagaggaggggagtgtgagccagcgcagtacccctgtgaagatgacagacgccggagacagcgctaaagtgactgaatag

SEQ ID NO: 223325 - DNA, 1806 bp, synthetic construct
  misc_feature 1..1806: note = Description of Artificial Sequence: Synthetic coding sequence
  source 1..1806: mol_type = other DNA
atgactggctatctgagaatttttcagaacgtggacctgtcgtccaacttctacttctcttattcatatgatctgtcacattccctccagtacaatctgacagtgttgcgtatgcctcttgaaatgctgaaatccgagatgacccagaacaggcaggagagcttcgacattttcgaggatgaaggcctgatcactcaaggtggctctgtcgaccaagcagaccccttcgcgcacgtcgcggcactgcacttcgatcaaatgttccagagattcgggtccccaatcattatcctcaacttggtgaaggaaagagaaaagagaaagcatgaaaggatcctgtcagaggaactcgtggccgcagtgacttatttgaatcaatttcttcctccggaacacacgattgtgtacatcccctgggacatggcaaaatacaccaaaagtaaactatgcaatgtgctggacagactgaacgtcatcgcagaatcggttgtcaaaaaaacgggtttttttgtcaatcggccagattcctactgcagcattctcagacctgacgagaaatggaatgagctgggtggttgtgtcatccctaccggaagactacagactgggatcctgagaacaaactgcgtggattgtctagatagaaccaacaccgcccagtttatggtcggcaaatgtgccctggcctatcagctgtacagcctgggcctcatcgacaagcctaacctgcagtttgatacagacgcagtgagactgtttgaagagctttacgaggaccatggcgacacactatcgctgcagtacgggggatctcaattggtgcacagagttaagacctaccgaaaaatagcaccttggactcaacattccaaggacatcatgcagaccctttccaggtattatagtaacgcctttagtgacgccgaccggcaggattcaattaacctgtttctgggggtgtttcatcctacagaagggaagccccacctttgggaactcccaacagatttttacctgcaccacaaaaacactatgcgactgttacccacaaggcgctcctacacgtactggtggacccctgaggtgattaagcatctgcctctgccctacgacgaagttatatgtgctgttaatcttaaaaagctgatcgttaagaagttccacaagtacgaggaagagatagacatccacaacgagttcttccgtccatatgagcttagtagcttcgatgacacattttgtcttgccatgacctcctcggccagagactttatgcccaagacggtcggcattgatccttccccttttaccgttcgcaaaccagatgaaactggcaaatctgttctgggtaataagtcaaatcgggaggaagccgtcctgcagaggaagaccgctgcctcagcgccaccacctccttccgaagaagccgtgtcctccagttctgaggatgattcaggtactgaccgggaagaggaaggctcagtctcccagcggagtacccctgttaagatgactgacgcaggcgatagtgcaaaagtgacagaaaacgtggtacaacctatgaaagagctgtacgggattaacctgtccgatgggttatctgaggaggacttctccatctattctcggacccccattagcgcatttagccaggataatatctatgaggtccaacctccccgagttgacagaaagtctacagagatattccaagcccacattcaggccagtcagggaatcatgcagccactaggtaaagaggattctagcatgtaccgggagtatattaggaaccgctatctatag

SEQ ID NO: 223326 - DNA, 714 bp, synthetic construct
  misc_feature 1..714: note = Description of Artificial Sequence: Synthetic coding sequence
  source 1..714: mol_type = other DNA
atgcggtactttctggtggggagtaataatgccgaaactaagtacagggtgctgaagatcgacagaacggagcccaaagacctcgtcattatcgacgatcgtcacgtgtatacgcaacaggaggtaagggagctccttggtcgtctagatctgggcaatcgtacaaagatgggccaaaagggatcatctggactctttcgcgctgtgtccgcttttggggtggtggggtttgtccggttcttagaaggctactacatcgttctgatcaccaagcgaagaaagatggccgacatcggaggacacgcgatatacaaggtggaagacacgaatatgatctacatacccaacgacagtgtgagagtcacccacccggacgaggccagatacctacggattttccaaaatgtagatctctcatccaacttctattttagttatagttatgacctgagtcacagtttgcagtacaacctgaccgttctcagaatgcctctggagatgcttaagagcgaaatgacccagaaccgccaggaatccttcgatattttcgaagacgaagggctgatcactcagggcggttcgggagtgtttggcatctgcagcgaaccatacatgaagtatgtctggaacggagagcttttagacataatcaagtcaactgtgcacagggactggttgttgtacatcatacatggattctgtggacagtcatag

SEQ ID NO: 223327 - DNA, 969 bp, synthetic construct
  misc_feature 1..969: note = Description of Artificial Sequence: Synthetic coding sequence
  source 1..969: mol_type = other DNA
ctgtaccaggtgagcacacacgaacagtcagagtccgcccatggtcgcacgggcccatctacgggtggcagacagcggagccggcatgaacaggcccgtgatagctccaggcacagtgccagccaagaaggccaggacaccattaggggtcaccctgggagctctagaggcggaagacagggctctcattatgagcagtccgttgacagctccgggcatagtgggtcacaccactcccatacgactagccaggagcggtcggacgtcagcagaggacaaagcggctcccgatccgtcagcagacaaactcggaatgaaaaacagtctggcgatgggtcacggcattccggcagccgacaccacgaagccagttcccgggctgactcatctcggcattcccaggtaggccagggccagtccagcggtcccagaacctcacgcaatcaggggagctccgtgtcccaggatagtgactcgcagggtcattcagaggattcggagagacggtctggctccgcctcgcggaaccaccatggctccgctcaggaacagtcccgggatgggtcacgccaccctagaagtcaccatgaagacagagcaggacatggccactccgccgagagtagccggcagtctggcactcatcacgccgagaactcatcgggcggacaagcagcttccagccacgaacaggcacgatctagcgctggcgagcgccacgggtcacatcaccagcagtccgctgactctagcaggcacagcgggattggccacggccaggcctcctccgcagtacgcgattccggccacaggggatcatccggatcccaggcgtctgatagcgagggacattctgaggatagcgatactcaatccgtgtctgcccacggtcaggctggcccacaccagcagtctcaccaggagagtacccggggtagatctgcgggaagatccggtagatctggatag

SEQ ID NO: 223328 - DNA, 969 bp, synthetic construct
  misc_feature 1..969: note = Description of Artificial Sequence: Synthetic coding sequence
  source 1..969: mol_type = other DNA
ctgtatcaggtgtctacccacgaacagtctgaatcaagccacggttggaccggcccatccaccaggggtcgccagggatctagacacgaacaggcacaggattcctcacggcacagtgcctcgcaggatggccaagatacaatcagaggacacccaggaagcagtagagggggaagacagggttaccaccatgagcacagcgtggattcatcaggacatagcggctcccatcatagtcatacaacatctcaggggcgttccgacgcatctcgaggtcagtctggctcccggtccgcctcccgaacaactagaaacgaggagcagtccggcgatggttcgaggcacagtggaagtaggcaccacgaagcatccactcatgctgatatctctagacattcgcaggctgttcaggggcagagcgagggctctcgcaggtcccgaagacaaggctcttccgtctctcaggattcggactcggagggccattctgaggacagtgaacggtggtctgggtctgcatctagaaatcaccgcggatccgtgcaggaacagtccagacacggctcacggcatcccaggagccaccacgaagaccgagcaggacacggccactctgctgaccgcagccgtcagtccggcacaaggcacgccgaaacatcaagtggaggccaggcagcatcaagccacgagcaggcccgatccagtcccggagagaggcacggaagccgtcatcagcagagcgcagattcctcaaggcactctgggattccgaggggtcaggcaagctccgctgtaagggattctcgccactgggggagctccggctcacaggcttctgacagtgaaggccatagcgaggaatccgacacccaaagcgtgagcggccatgggcaggctggacctcaccagcagtctcatcaagagtctgctagagacaggtccgggggaagaagtgggcgtagtgggtag

SEQ ID NO: 223329 - DNA, 12186 bp, synthetic construct
  misc_feature 1..12186: note = Description of Artificial Sequence: Synthetic coding sequence
  source 1..12186: mol_type = other DNA
atgagcacgctactcgagaacatcttcgcaatcattaatttatttaaacagtacagcaagaaagacaagaacaccgataccctgtcaaaaaaagagctgaaagagcttctggaaaaggagtttcggcagatactcaaaaaccctgatgacccggacatggtggacgtgtttatggaccatctggatatcgatcataacaagaagatcgacttcaccgagtttttactcatggtctttaagttagcacaagcgtattacgaatccacacgtaaggaaaatctccccatctctgggcataagcaccggaagcactcacatcacgacaaacacgaggacaacaagcaggaggagaacaaggaaaacaggaagagaccttcttcgcttgaacggaggaataatagaaaaggaaataaaggacgtagtaagtctccaagggaaactggtggtaaaaggcatgagtcctcctccgaaaagaaggagagaaagggttactctccaactcacagggaggaggaatatggtaaaaaccaccataactccagcaaaaaggagaagaacaagactgaaaacactcgcttgggggataatcgcaagagactgagcgagagactggaagagaaagaggataacgaggaaggtgtttacgactacgaaaacacagggaggatgacacagaaatggatccagagtggccacattgctacctactacacgatccaggatgaggcttatgacaccaccgattctctgctcgaagaaaacaaaatctatgagcgatccagatcctccgacgggaagtctagctcacaggttaacaggagtcgccatgagaacacaagccaagtcccgttacaggagagtaggaccagaaaacggagagggtcccgcgtatcacaggaccgcgatagtgaagggcacagcgaggattccgagcgacatagcggaagcgcctccagaaatcaccacggcagcgcatgggagcagagtagagatggctctagacacccccgtagtcacgatgaggaccgagctagtcacgggcattctgctgacagttcaaggcagtctggcacccgccatgcggaaacaagctcacggggacaaaccgcttctagccacgagcaggctcggagttcccctggggagcgccacggctcgggtcaccagcagtccgctgatagtagtaggcacagcgccactgggaggggccaagcaagtagtgctgttagcgaccggggacatcgcggatcttcaggcagtcaagctagcgacagcgaaggccatagtgagaacagtgatacccagtctgttagcgggcatggtaaagccggtttgcggcagcaaagccaccaggagtcaacacggggtcgttcaggggaacgctctgggcgatctggtagctctctttaccaggtgtcaacccacgagcagcccgatagcgcccatggaaggactggcacgtccacagggggtcggcagggatctcatcacgagcaggccagagactcatcccgccattcagcgtcacaggaaggtcaagatactatccgaggacatcctggctctagccgagggggtcggcagggctcacaccacgaacagagtgtgaaccggagtggacatagtggcagtcaccacagtcatacaacctcccagggacgtagtgatgcttcccatggtcaatccggttccagatcagcatcccggcagacacgaaacgaggaacagtctggggatgggactcggcatagcggttcccggcatcatgaagcaagcagtcaggctgattcatccaggcactcgcaagtaggccaaggacagagtagtggcccacgaacctctagaaaccaggggagttccgtcagccaggactccgacagccagggccacagcgaggactcagaaagatggagcggaagtgcgtctcgaaaccaccacggttctgcacaggagcaaagcagagacgggagcagacacccgagatcccaccacgaagacagggccggacatggacactcagccgatagctcgagaaagagtggaactcgtcatacgcagaattcatctagtggtcaagcagcctcatctcatgagcaggccagaagctccgcgggagaacgccacggttcaaggcaccagttgcagtccgctgattcgtctaggcattccggcaccgggcatggccaggcctcatcggcggttcgtgactccggccaccgtggctctagcgggagtcaggccaccgacagcgaaggccactctgaggactcagacacccagtccgtatccggccacggccaggctgggcatcaccagcagtcacaccaagaaagcgcccgtgaccgctctggggaacgctcgcgcaggtcaggttcattcctgtaccaagtatccacccacaagcagtcagaaagtagccacggctggacaggtcccagtacaggcgtgaggcagggatcccatcatgagcaggctagagataattcccgccacagcgcttcgcaggatggacaggacaccatccgaggccaccccggtagctcccgacgcggtcgtcagggctctcatcatgaacagtctgtcgatcgaagcggccacagcggaagccaccattctcatactacctcccagggacgatccgacgcatcaagaggccagtccgggtcaaggtccgcttcgagaaccactcgaaatgaggagcagtcccgcgacgggtcaagacacagcgggtctcgccatcatgaggctagctctcacgcggacatatcacggcactcccaggcgggacaaggccagtctgagggcagtcgcacgtcaagacggcaaggatcaagtgtctcccaggatagcgattctgaaggccactctgaggattctgagcgctggagcggatcggcttctcgaaatcacagagggtccgctcaggagcaatccagacatggcagcagacacccaaggagtcaccacgaggacagggccggacatggacacagtgccgactcttctcgacagtctggtacccctcatgccgaaacttccagcggcggtcaggcagctagttcccatgagcaagccaggtcctccccgggtgaaaggcatggttcacgacaccaacagtccgccgacagctccagacattccggcatccctcgacggcaagcgagctcagcagtacgcgactctggtcattgggggtccagcggaagccaggccagcgattcagaaggacattctgaggagtcggacacgcagagtgtctctgggcacgggcaggacggccctcaccagcagtctcatcaggagtctgcccgtgattggtccggcggtcggagcgggaggtccggaagctttatctaccaagtctcaacacacgaacaatcggaatccgctcacggcaggactaggacatccaccggacgacgccagggcagccatcatgaacaggctcgggactcgagtaggcacagcgcctcccaagaggggcaagataccatccgagcccatcctggctcccgaaggggcggaaggcaaggatctcaccacgagcaatcagtggacagatcaggtcacagtgggagccaccactcccatactacatcccagggaaggtctgatgccagccacgggcagtctggatccagatcagcctcacggcagacccgaaaagacaaacagtccggagacggatcaaggcactcgggaagcagacaccacgaggcagcgtcctgggcggattcctcacggcattcacaggtgggccaggagcaatcgtcagggtcaagaacttctcggcaccaggggtcgtccgtaagccaggactccgatagtgaaagacactctgatgacagtgaacggttaagcgggtctgcaagcaggaaccaccatggatcctcccgcgaacaatccagagacggttctcggcaccctggtttccatcaagaggatagggcatcacacggccacagcgctgattcttctcgacagtccggtacacaccacactgagagctctagtcatggccaggccgtttcctcgcacgagcaggccaggagcagtcccggtgagcgccacggaagccgacaccaacagagtgctgacagttccaggcactctggtatcggccaccgccaggccagtagcgcagttagagatagcggccacagaggttcttccggatctcaggtcactaattctgagggacactctgaggattctgacactcagtcggtgagcgcgcacggtcaagccggaccccatcagcagagccacaaagagtccgccagaggccaaagtggagagtcatctggccgttcccgtagttttctgtatcaagtgtccagccatgagcagtccgagtctactcacggtcagactgctccaagcaccggcggtcgtcaagggtctcggcacgagcaggccagaaactcttccaggcattccgcctctcaggatgggcaggacaccatcaggggtcacccgggtagctcacgtgggggacgtcaggggtcctatcacgagcaaagtgtggacagaagcggccatagcggttaccaccattcacacaccaccccccaggggagatccgatgcctcccacggccagagtgggcctcggagcgcatcccggcagacccgcaatgaagagcagagtggggacggatccaggcactctggatccaggcaccatgagccatccacaagggccggaagttcccgtcactcccaggtggggcagggcgagtctgcgggaagcaaaacctcaaggcgccagggttcgtccgtgagtcaggatcgggactctgagggacactctgaggacagcgagcgcaggtcagaatcagcttccagaaaccattacggctctgcaagagaacaaagccgccacgggagcagaaatcccagatctcatcaagaagatagggccagccatgggcattctgcagagtcctccaggcagtccggcacaaggcacgctgaaactagtagcggtggtcaggccgcaagtagccaggagcaggcgcgttctagcccaggagaacgccatggaagcagacatcagcagtcggcagactcttccactgactcgggaaccggccgtaggcaggactcctccgttgtcggggatagtggtaatcgaggatcatcagggtctcaagcctcagatagcgagggccactccgaggaaagcgacactcaatctgtcagcgcacacgggcaggcgggtccccaccagcaaagtcaccaggagtcaacacggggacagagcggtgaacgaagcgggagaagcgggtcattcctttaccaagtcagtacacacgagcagtccgagtccgcccacggcaggactgggcctagcaccggcggacgacagcgcagccggcacgagcaggccagggatagtagccgtcattctgcatctcaggagggccaggataccataaggggtcatcccggttctagccggggtgggagacaaggttcgcactacgagcaaagcgtcgattctagtggtcatagcggatcccaccactcccacactacatctcaggagcgctccgatgttagcagaggccagtcagggtctcgctccgtttccaggcagacccgcaatgagaagcaatcaggggatggatccagacacagcggttcacgccatcacgaggcatcatctagagcagacagcagcagacattctcaggtgggacaaggccaaagtagcggcccacgaacttccagaaaccaaggttcaagcgtcagtcaggattcagattctcaaggacacagtgaggatagtgagaggtggagcggcagtgcaagcagaaaccatctggggtccgcctgggagcaaagtagggacggctcccgccatcctggtagccaccatgaggatagagccggacacggccattcagcagactcttccaggcagagtgggactaggcacaccgaaagcagttcccgcggtcaagcagcctcttcacatgagcaggcgagaagcagcgctggagaacggcacggctcccaccaccagctccaaagtgccgacagcagtcgacattcagggatcggacacggtcaggcctcaagcgctgtcagggattcgggccacaggggatactcaggctcacaggctagcgattccgaaggccactccgaagatagcgatactcagtcagtgtcagcccaaggaaaggccggtccccatcagcaatcccataaggaaagcgccagggggcagtctggcgaatcgtccggcaggtcgggaagctttctctatcaggtgtctacacatgagcaatccgagagtacacacgggcaaagtgcccctagtactggcggaagacagggctcccactatgaccaggcccaggactcttctaggcactcagcttcccaagaaggccaagatacgattcgtgggcaccccggaccttctaggggcggaaggcagggctcccaccaagaacagagcgtggatagatcaggtcactcagggtctcatcattcgcatacaaccagtcaaggtaggagcgatgcctcacggggtcagtcaggttcccgatcagcatctaggaagacctatgataaggagcagagcggtgacggaagccgccattctgggtctcatcaccatgaagcaagttcctgggccgacagctcaagacacagcctcgttgggcagggtcagagtagtggaccaaggactagccggcctcggggttcttccgtgtctcaggactcagacagtgagggccattccgaggattccgaacgcaggtctgggagtgccagtagaaaccaccacggtagtgcgcaggaacagagcagagatggctccagacatccacgtagccaccatgaagacagagctggccacggacactccgccgagtcttccaggcagtccgggactcatcatgctgagaactccagcgggggtcaggccgcaagcagtcacgaacaggcaaggtcctccgccggagaaagacatggctcacaccaccaacaaagcgcagactctagccgccactctggaatcgggcatggacaggccagctcagctgtccgtgacagcggacacagagggtcctccggcagtcaggcctctgattctgagggccacagcgaggactccgacacacagtcagttagcgcacatggccaagcagggccacatcagcaatcacatcaggaatccacaagaggcagatccgcgggaagatcaggacgatctgggagtttcttgtatcaggtgagcacacacgaacagagcgagtccgcacatggaaggacaggtactagtactggtgggagacagggatctcatcacaagcaagctagggactcctccaggcatagtacttcacaggaaggacaggacaccatccatggccatcctgggagcagcagtggaggccgtcaaggctctcattatgagcagctggtggatcgttctggacactcaggatcgcatcatagccacacaacaagccagggccgttccgacgcgtcacacggacacagcggatctcgttccgccagccggcagacacggaacgacgagcaaagtggcgacggctccagacactctggatcacgtcatcatgaggcctcatcccgtgctgatagttccggacattcccaagttggccagggtcagtccgaagggcctcgaacatcacgaaactggggcagctcattttctcaagattctgactcccaaggacactctgaagacagcgagaggtggtcaggtagtgcaagtcggaaccaccatggaagcgcccaggagcagctacgtgacggatcaaggcatcccagatcccatcaggaagatcgggcaggccacggacactcagctgactctagccggcagagcggaactaggcacactcagactagctcaggtgggcaggccgcttctagccacgaacaggcacgttcctcagcaggagaaaggcacggctcccaccaccagcaatccgccgacagcagccgacactccgggatcggacacggtcaggcgtcgtcggccgtacgcgattcagggcacaggggttactcagggagccaggcatcggacaacgaaggccacagtgaagacagtgacactcaatccgtttccgcccacggccaagccggttcacatcagcagagtcatcaggagagcgcgaggggacgatctggagagacgtctgggcactctggctcttttctgtatcaagtatccacccacgagcagtcagaatcctcccatggttggaccggcccaagcacgaggggccgtcaaggaagtcgacacgagcaggcccaggactccagccgtcactccgcaagccaggatgggcaggatacaatccggggacatcctggatcaagccgtggaggacgtcaaggttaccaccatgagcacagcgtggattcctcaggacattctggctcccaccactctcatacgacaagtcagggacgcagtgacgcctcaagaggacagtccggatccagatcagcaagccgcacaacaagaaacgaagagcagtctggcgatggctccagacactccggctcccggcaccacgaagcttccacccatgccgacatctcccgtcactcgcaagccgtgcagggccagagtgagggttctcgcagatcaaggcgccaggggtcctccgtgtcccaggacagcgatagcgaaggccattccgaagactcggaacgctggtctggctcagcctcacggaatcaccatggatcagcacaagaacagctgcgagatggctccaggcacccccgtagccatcaagaggatagggccggacacggtcactcggcagattcttctaggcagagtggcactaggcatacgcagacaagctcgggtggacaggccgcaagcagtcacgaacaggctagatcctctgctggggagcgccatggctcgcaccatcagcaatccgcagactcaagcagacattcggggatcgggcatggccaggcgtcctcagccgtccgcgacagtggccacagagggtactccggatcccaagcctcagacaacgagggccattctgaagatagtgacacccagtccgtttccgctcatggccaggctggctcgcaccagcagagtcatcaagagtccgccagagggcgaagcggtgagacaagcggccacagcggatccttcctataccaagtgagcacgcacgagcaaagtgagagctcacacgggtggacaggtcctagcacacggggaaggcaaggatcgcgtcatgagcaggcccaagatagcagtagacattcagctagtcagtacgggcaggacacaatcaggggccatcctggaagctcacgcggtgggaggcaggggtatcaccatgaacactctgtcgactcttcgggccattccggctctcaccacagtcacacaaccagccaaggacgtagtgacgccagccgaggtcagtcggggtccagaagcgctagccgtactacccgcaatgaggagcaatccggcgactcttccaggcatagcgtttcgaggcatcatgaggccagcacacacgccgacatttccaggcactcacaagcggtacaggggcagagcgagggatcccgacggtctaggagacaggggagctccgtaagccaagattcagactccgaggggcattccgaggattctgagcgctggtcaggaagtgcctcacggaaccacaggggtagtgtccaggaacagtctagacacggttcacgccatcctcgctctcaccatgaggacagagctggccatgggcattctgccgatcggtctcgacaatccggcacccgacacgccgagaccagcagcggtggccaggctgcctcaagccacgaacaagcaaggtcttcgcccggagagagacacggctcccgacaccaacagtctgccgactcctctcgtcacagcggtatacccagaggacaggcgtccagcgctgtaagagacagcagacattgggggtcctctgggtctcaagcctcagattcagagggccactccgaggagtccgacacccagagtgtatccggccacggacaggccggtcctcaccagcagtcccatcaggagagcgccagggaccgttccgggggaagatccggcaggtccgggtcattcctgtatcaagttagtacccacgaacagagtgagtccgcccatggaagaacaaggacgagcaccgggcgtcggcaggggtctcaccatgagcaggctagggactcttctcgccatagcgcaagccaggaaggccaagatacaattaggggccatccagggtcatcaagacggggaagacagggctcacactacgagcagtctgtggacaggtccgggcactcaggctctcaccactcacacaccacgagccagggcaggtctgacgcatcacggggtcaaagtggaagtcggtctgcatctagacagactagaaacgacgagcaatccggcgacggatccagacattcctggtcccaccaccacgaagcaagcacgcaggcagactcttcccgacactcccagtctggacagggccagagcgcgggacctaggacgagccggaaccagggctccagcgtatcacaagactcagacagtcagggtcattccgaagactctgaacgctggtcaggctctgcctctagaaatcaccgtgggagcgcacaggagcagtccagagatggctccagacatccaacctcacatcatgaggatcgagctggccacggacacagcgcagaaagtagtaggcagagcgggacccaccacgctgaaaatagttctgggggacaggctgccagtagccacgaacaagcccgaagttcggccggagagcgacatggcagccatcaccagcaatcagctgactccagtcgccattccggaatcgggcacgggcaggcaagctctgccgtgcgtgactccggccaccgcggaagctccggttcgcaggcttctgacagtgaaggtcactccgaagattctgacacacaaagtgtttcagctcacgggcaggccggacctcatcagcagtcccaccaggagagcaccaggggaagatccgcaggccgttccggccgtagtggttctttcctgtatcaggtgtccactcatgaacagagcgagtcagcgcacggcagagcaggccctagtaccggcggtcggcagggctcccgccatgagcaggccagagactcaagccgccatagtgcctcccaggaaggacaagacacaatcaggggacaccccggttctagacgcggtggccgtcagggcagctaccacgaacagtcggtcgaccgctccgggcactcaggtagccaccactcacatactacctcacaaggacgctccgacgcatctcatggccagagcgggtcccgaagcgccagccgcgagacacggaatgaggagcaaagcggagatgggtcccgacactctggcagtagacatcatgaagctagcacacaggcggattctagtaggcatagccaatcagggcagggtgagagcgcagggtcccggcgaagtcgacgccaggggtcatccgtatctcaggacagcgattcagaggcatatcccgaagatagcgaaaggagatcggaatcggcatcccggaatcaccacggttcaagtcgggagcagtcccgggacggaagccggcaccccggatcctcccacagagacacggcgagtcatgtgcagtccagcccagtacagagcgacagtagcacggcaaaagagcatggccatttcagctctctgtcgcaggactctgcataccactccgggatccaaagtagggggagtccccacagctcctccagttaccattaccaaagcgaaggaactgagcgccaaaagggtcaatccggactggtgtggaggcatggaagttatggaagtgccgactatgattacggggagtcggggttccggcattcacagcatgggtcagtgagttacaattcaaatccagtggtgttcaaagaaaggagtgatatttgtaaagccagtgcgttcggtaaagaccaccctcgctactatgccacctatattaacaaagatcctggcctttgtggtcattcaagtgacatcagcaagcagttggggttttcacagtcacaacgctattattattatgagtat

SEQ ID NO: 223330 - DNA, 969 bp, synthetic construct
  misc_feature 1..969: note = Description of Artificial Sequence: Synthetic coding sequence
  source 1..969: mol_type = other DNA
ctgtatcaagttagcacacacgaacagccagattccgctcacggcaggactggaacttcaacagggggacgtcagggatcccatcacgaacaggccagagacagtagcaggcactccgcttcacaggaaggacaggatacaattcgaggtcaccctggctctagtagaggcggtaggcaggggagccatcacgaacagtctgtgaaccgttcggggcattctggcagtcatcactcgcatacaacgtctcagggccgatcagacgcttcacatgggcagtctggaagtcgttccgctagcagacagacacgaaatgaggaacaatcaggggacgggaccagacactcaggttctcgacatcatgaagcctcctcccaagctgactcctccaggcattcgcaggccggtcaaggccagtctgaggggtcgcggacaagccgcaggcaagggtcgtcagttagtcaagacagcgatagcgagggacatagcgaagacagtgagaggtggtccgggtctgcaagccgtaaccataggggaagcgcccaggaacagagtcgccacggtagccgtcacccacggagtcaccatgaggacagggcaggccacgggcactccgctgattcttctcgacagtccggcacacctcacgccgagactagctctggaggccaagctgccagcagtcacgaacaggctcgttcgtcccccggtgaacggcacgggtctcgtcatcagcagtctgctgatagttcacgtcacagcggtattccaagacgacaggcctcctccgctgtccgcgactcaggtcactggggctcgtccggtagccaggctagcgactcggagggtcactcagaggaaagtgatacccaatccgtcagtggccacggccaagacggccctcatcaacagagtcaccaggagtccgctagggactggtcaggcggacgtagtgggaggagcggatag

SEQ ID NO: 223331 - DNA, 3402 bp, synthetic construct
  misc_feature 1..3402: note = Description of Artificial Sequence: Synthetic coding sequence
  source 1..3402: mol_type = other DNA
atgagaagcagaggaagcgacacggagggatctgcacaaaaaaagttccccaggcataccaaaggccacagcttccagggcccaaagaacatgaaacatagacaacaggataaggactcaccttctgagtctgacgtgatactgccttgtcctaaagccgagaaaccccactctggcaatggccaccaggccgaggacctgtcccgggacgatctgctgtttcttctgtcaatcctcgaaggggagctgcaagccagagacgaagttatcgggatcctgaaagcggagaagatggacttagcgttgctggaggcccaatacggatttgtcactcctaagaaagtgctggaggcgctgcagagagacgcctttcaagcaaaatcaactccctggcaagaagatatctatgaaaagcctatgaatgagttggacaaggtagtggaaaagcacaaagaatcgtaccgccgtatcctcggccaactgctggtggccgaaaagtcccgtcgccagaccatccttgaactcgaagaggaaaagaggaaacacaaggagtacatggagaagtctgacgagtttatctgtttactcgagcaggagtgcgaacgcctgaagaaactgattgatcaggaaattaaatcacaggaggagaaggagcaggagaaagagaaacgcgttacaaccttgaaagaggagttgacgaagctcaagtcattcgccctaatggtagtggacgaacagcagcgactcactgcccaactgaccctgcagagacagaagatccaggaactgaccactaacgctaaagagacacacacaaaactggctctagcagaggccagggtccaggaggaggagcagaaggccacccgcctagagaaggaactgcagacccagaccacaaaattccaccaggaccaggataccatcatggctaagctgaccaatgaggattctcagaatagacagcttcagcagaagctggctgctctctctcgtcagatcgacgagctggaggagactaatcgcagtctgagaaaagctgaggaagaactccaggacattaaagagaagataagtaaaggagaatacggcaacgctggaatcatggctgaggtcgaggaactgcgaaaacgggtcctcgacatggagggcaaggatgaggagcttatcaagatggaggagcaatgccgggatctcaacaaacggctggaaagggagacccttcagagcaaggattttaaacttgaagttgaaaaactgagcaagcgtattatggctctggagaaacttgaggatgctttcaataagagtaagcaggagtgctactcattaaaatgcaacctggaaaaggaacgcatgacaacgaagcagctttctcaggaacttgaatctctgaaggttagaataaaggagctcgaagctattgagtcaaggctcgagaaaaccgagtttactctaaaggaggacttgaccaagctcaagaccctgactgtgatgttcgtcgatgagcggaaaacaatgagcgagaaattgaaaaaaaccgaggataaactacaggccgcatcgtcccagttgcaggtagagcagaacaaggtaaccaccgtcaccgaaaaactaattgaggagacgaaacgcgcactaaaaagcaagaccgacgtcgaagaaaagatgtacagcgtgaccaaagagcgcgacgacttgaagaataagcttaaggctgaagaagagaagggcaacgatctactgtctagggtgaatatgctcaaaaatcgcttgcagtcgctggaagcaatcgaaaaagactttctcaaaaacaagttaaaccaggacagcggtaaatctacaaccgccttacaccaggaaaacaataaaataaaggagttgagccaagaggttgaaagactgaaactgaagttgaaggatatgaaagcaatagaggacgacttgatgaagactgaggatgagtatgagaccttggagcggaggtacgccaacgaacgcgacaaggcacagttcctctctaaagaattagagcacgtgaaaatggagctggccaaatacaagttggctgagaaaaccgagaccagccacgaacagtggctgtttaaaaggcttcaggaggaagaggctaagtccgggcacttatcaagggaggtcgacgccttgaaggaaaaaatccatgagtacatggccaccgaggatttaatctgtcatctacaaggggatcactcggtgttacagaaaaagctgaatcaacaggagaaccgcaatagagacttgggacgcgaaattgaaaatctgacgaaagaactggagcgctatagacacttttctaagtcgcttcggccatctctaaatgggagaaggatatcggatccccaggtgttctcaaaggaagtccagacggaggctgttgataacgagccccctgattacaaatctcttatccctcttgagagagcagttatcaacggtcaactgtatgaagagtccgaaaatcaggatgaggatcctaatgacgagggctccgtcctctcgttcaaatgtagccaatctacgccatgccccgtaaacagaaagttgtggattccatggatgaagtccaaggaaggtcatttacaaaacggtaaaatgcagaccaagccgaatgcgaactttgtacaacccggtgacttggtactttcccacacgccaggacagcctctacacattaaggtcacccctgaccatgtgcaaaatactgcaactctcgagataacatcacctaccacagaaagcccgcattcctacacgagtactgcggttattcctaactgtggcacaccaaaacagcgtattacaatcctgcaaaacgctagtataactcccgtgaagtctaagacctcaaccgaggatcttatgaacctcgaacagggtatgtcgccaatcaccatggccactttcgcccgagcgcaaacacccgaaagctgcggtagtctcacacctgagcggacgatgtcgcccattcaggtgctggcggtcaccggttctgctagctctcccgagcagggcagatctcccgaaccaacagagatcagtgccaaacacgctatctttcgggtgtcgccggatcgacagtcatcttggcagtttcagagatccaacagcaatagcagcagcgtgataactaccgaggacaacaagattcatatacacctgggttctccctatatgcaggccgtcgcttccccagtgcgtccagcttcgccttccgctccactgcaagataacagaacgcaagggctcataaacggcgctctgaataaaacaaccaacaaggtgacttccagcattacaataactcccactgcgactccactcccccgacagagtcagatcaccgtgtcaaatatctataactag

SEQ ID NO: 223332 - DNA, 3408 bp, synthetic construct
  misc_feature 1..3408: note = Description of Artificial Sequence: Synthetic coding sequence
  source 1..3408: mol_type = other DNA
atgagaagtcggggaagcgacaccgagggaagcgcccagaagaaattccccagacacaccaaggggcactccttccagggtccgaagaatatgaaacaccgccagcaagacaaagactcaccaagcgagtccgacgtaatactaccttgccccaaggcggagaaacctcactccggtaacgggcaccaggctgaggacctgagtagagatgatcttctgttcctgctcagcattctagaaggagagctccaagccagggacgaagtaatcggaattctcaaagctgagaaaatggatttggctctgcttgaagcccagtatggatttgtaactccgaagaaggtcttagaagcacttcagagggacgcatttcaggccaagtcaacaccatggcaagaagacatttacgagaagcctatgaacgaacttgacaaagtcgtggagaagcacaaggagtcctatcgaagaatcctgggccagttgctggtcgctgaaaagagtaggcgccagacaattctcgaactggaggaagagaagaggaaacataaggaatatatggagaagtctgacgagttcatctgcctgctcgagcaggaatgtgagcgcctgaagaagctgatcgaccaagagatcaaatctcaagaggagaaagaacaggaaaaggaaaagcgcgtgacgactttgaaagaggaactgacgaaattaaaaagttttgcactgatggtcgttgacgaacagcagagactaaccgcccagctgaccctccagcggcagaagattcaagagctaacgactaatgcgaaagagactcacactaagcttgccttggccgaagctagagtccaggaggaggaacagaaggccacccgtcttgaaaaggaactgcagactcagacaaccaagttccaccaggaccaagacacaattatggccaagctcaccaatgaggacagccaaaatcggcagctccaacagaagctagccgctctctcccgtcagatcgatgaactggaggagacaaatagatccctgagaaaggcagaggaggaactccaggatatcaaggaaaagatctctaaaggcgagtacggtaacgctggcattatggccgaggtagaggagttgagaaaacgggtcctcgatatggagggcaaagatgaggaactgatcaaaatggaagagcagtgccgtgatttgaacaagagactggaaagggagacccttcagagcaaggacttcaagctcgaagtcgaaaaattgtccaagcgcatcatggcattggagaagctggaggacgcgtttaacaagagtaaacaggagtgctacagtctgaagtgcaacctggagaaggagcgcatgacaactaagcagctgagtcaggaactggagtccctgaaagtccgcatcaaagagctggaggctatcgagtctcgacttgagaagacagaatttacactcaaagaggatcttactaaactgaaaaccctgacggttatgtttgtggatgaacgtaagacaatgtcagaaaaattaaagaaaactgaggacaagctgcaagcagcaagttcccaactgcaagtggaacagaacaaggtgacaacagttaccgaaaagcttatagaagagacaaaacgggcactgaagtcgaaaactgacgtggaagaaaaaatgtacagcgtcaccaaagaacgtgatgatttaaaaaacaagttaaaggcagaggaggagaaaggaaacgatctgttgtctcgcgttaacatgctaaagaacaggctccaatcccttgaggcgatcgagaaagattttctgaagaacaagctgaatcaggatagtggaaagagcacaactgctctccatcaggagaacaataagattaaagagctgtcccaggaggtagagcgtctgaagctgaagctcaaagacatgaaggccattgaggatgatttgatgaaaaccgaggatgagtatgagaccctggaaagacgctacgctaatgaacgtgataaagcccagtttctgtcaaaggaacttgagcatgtaaagatggagctggcaaagtataagcttgcagagaagaccgaaactagccatgagcagtggctgttcaagcggctgcaggaggaggaagcaaagtcaggtcacctctcacgggaagtggatgctctcaaagaaaaaatccacgagtatatggctactgaagatctgatttgccatcttcaaggagaccatagtgtgcttcagaagaagctgaaccagcaggaaaaccgtaaccgcgatctcggcagggagattgagaacctcacaaaagagttagagcgatatcggcatttttctaagagccttaggccatctctgaatggtcgcagaatctctgacccccaagtgttttccaaagaggtccagaccgaagctgtagataatgagccgccagactacaaaagcctgattccactggaaagagcagtgatcaacggccagctctacgaggagtccgagaatcaggacgaggatcccaacgacgaagggtcggtcttgtcttttaagtgttcccagtctactccttgcccagtcaatagaaaactctggattccttggatgaagagcaaggagggccatctgcaaaatggaaaaatgcagactaagccaaacgcaaacttcgttcagcctggggacctggttctcagccacactccagggcagccactgcatatcaaagtgactcctgatcatgtccagaataccgccacattggagatcacttccccgactaccgagtcaccgcatagctacacctccaccgctgttattcccaattgcggtacgcccaagcagagaatcaccatcctgcagaacgccagcataaccccagtaaagtcaaaaactagcaccgaagatctcatgaaccttgaacagggaatgagccccataacgatggccacgtttgcgcgagctcaaaccccagagtcctgcggaagtctcacccctgaaagaacgatgagtcctatccaggtactggcagtaaccggcagcgccagtagccctgagcaaggcagatctccagaacctacagaaatcagcgcgaaacatgcgatatttagggtttcgcctgacaggcagagcagctggcagtttcaacgcagcaattctaattcgtcctcagtaataactactgaggacaataagatccacatacatttgggtagtccgtatatgcaggccgttgctagccctgttcggccagcatccccttccgccccactccaggacaatagaacacagggacttataaatggggcactgaataagactaccaacaaagtcacatcatccattactattaccccaaccgcgactcctctgcccaggcagagtcagatcaccgtcgagcctcttctcctacctcactag

SEQ ID NO: 223333 - DNA, 2682 bp, synthetic construct
  misc_feature 1..2682: note = Description of Artificial Sequence: Synthetic coding sequence
  source 1..2682: mol_type = other DNA
atggtggtagatgaacaacagcggctcaccgcacagcttacccttcaacggcagaagatccaggagctgactaccaacgcaaaggagacccacaccaaacttgctctggcagaggcccgagtccaggaagaggagcagaaggccactagattggaaaaagagcttcagacacaaacgaccaaatttcatcaggaccaggacaccattatggctaaattaacgaacgaagattctcagaacagacagctgcagcaaaaattggccgctctctctagacagatcgatgagcttgaagagaccaaccgatccttacgtaaagcagaggaagagcttcaagatatcaaggagaaaattagtaagggcgagtatggtaacgccggaatcatggcggaggtggaggaactgcggaagagagtgcttgacatggagggaaaggacgaggagctcatcaagatggaagagcagtgccgtgacctcaataagaggctcgagcgtgagacccttcagagcaaagacttcaaattggaagttgagaagctcagtaaacgcatcatggctttggagaagctggaggacgcctttaacaagagtaaacaggagtgctactcacttaagtgtaacttggagaaggaaagaatgaccacaaagcagctgtctcaggaactggaaagcctgaaggtccggatcaaagaactggaggccatcgagtcaagattggagaagactgagttcaccttgaaagaggatttgaccaagttaaaaactctgactgtgatgttcgttgatgagaggaaaacgatgagcgagaagctgaaaaagacggaggacaaactgcaggcagcctcgtcccagctgcaggttgagcagaataaagttactaccgtcaccgagaagctgatcgaggagacaaaaagggcactgaaatccaagactgatgtagaagagaaaatgtacagcgtgactaaagagcgcgatgacctgaagaacaaactcaaggccgaggaggagaaaggaaatgacctcctctcgagggtgaatatgttaaagaatcgcttacagtcactggaagccatagagaaggactttttgaaaaacaagctaaatcaggattccgggaaaagcactacagctttacaccaggagaataacaaaataaaggagctgtctcaagaggtggaacgcttaaagcttaagctgaaggatatgaaagccatcgaagatgacctcatgaagaccgaagacgaatacgaaacactcgaacggcgttacgcgaatgaacgcgacaaggcccagttcctctccaaagaacttgaacacgtgaagatggagctcgccaaatataaactggccgaaaagaccgaaacttcacacgagcagtggttgttcaaacgccttcaggaagaagaggccaagtctggtcatttaagtcgtgaagtggatgccttgaaagaaaagatccacgaatatatggcaacagaagatctaatttgccacctccagggcgatcacagcgtgctgcagaagaaactaaatcaacaggagaaccggaatcgtgacctgggtcgggaaattgaaaacttgactaaggaacttgaacggtaccggcacttttcaaagtctctgcgacctagccttaatggacggagaatttctgacccccaggtcttctcgaaagaagtgcagaccgaggccgtagacaatgagccaccggactacaagtctcttataccgctcgaaagagcagttattaacggacaactgtacgaggaaagcgagaaccaggatgaagacccaaacgatgaaggcagtgtgctcagcttcaaatgctctcagtcgaccccttgccccgtgaatcgcaagctgtggatcccttggatgaagagcaaggaaggtcaccttcaaaacggaaagatgcagaccaagccaaacgcaaatttcgttcagccaggcgacctggttcttagccatactcctggccagccactgcacatcaaggtcacccccgatcatgtgcagaacacagccaccctggaaatcacaagcccaaccaccgagtctccacattcctatacctctacagcagtgataccgaattgcggcacaccaaagcaaagaatcacaatccttcaaaatgcgagcatcactcccgtgaagagcaagacttccaccgaggaccttatgaatctcgaacaggggatgtctccaatcacgatggctacatttgctcgggcacagaccccagagagctgtggaagcttgaccccagaaagaacaatgtctcccatccaggtactcgccgttaccgggtccgcgtcctcacctgaacagggcagaagtcctgaacctacggagatcagcgcaaagcatgccatctttagggtgtccccagatcggcagtcctcttggcaattccagagatccaattcgaacagctcttccgtgattacaactgaggataacaagatccacattcatcttgggagtccatacatgcaagccgttgctagccccgtgcgaccagccagccccagcgcccctctgcaggacaacagaacacagggtcttataaatggcgcactgaataaaacgaccaacaaggtcactagctccattacgatcacaccaacagctacacccctgcctcggcagtctcaaatcacggtatcaaatatttataattag

SEQ ID NO: 223334 - DNA, 768 bp, synthetic construct
  misc_feature 1..768: note = Description of Artificial Sequence: Synthetic coding sequence
  source 1..768: mol_type = other DNA
atgaggtcccgcggttcggacacagaagggtctgcccagaagaaatttcctagacacacaaaaggccatagctttcagggccctaagaacatgaagcatcgtcagcaagacaaggactccccttccgaatccgatgtcattctgccctgcccaaaggcagagaagccacattccggcaatggacaccaagcggaggatctgtcaagggacgatctgctctttttactgtccatcctggagggcgaattgcaggctagggatgaggtgattggaatcctgaaagccgaaaaaatggacctggcactgctcgaagcccagtatgggttcgtaacccccaagaaagtgctcgaggctctgcagcgcgacgcttttcaagcaaagtcgaccccttggcaggaggacatctatgagaagcccatgaatgagctggacaaagtggtcgagaagcataaggagtcttaccgtcgaatcctggggcagctccttgtggcagagaaaagcaggcggcaaacaatcctagagctggaggaggagaagcgtaagcacaaggaatacatggagaagtctgacgaattcatctgtcttctcgagcaagagtgtgagaggtggagtctggctcttctgcccagactggagtgtaacgggatgatattggcccattgtaacctctgccttctcggttcaagtgattcccctgcttccgcgtttcaggtggccggtatcactggtactaggcaccatgcccagctggtttttgtgttcctgtag

SEQ ID NO: 223335 - DNA, 2640 bp, synthetic construct
  misc_feature 1..2640: note = Description of Artificial Sequence: Synthetic coding sequence
  source 1..2640: mol_type = other DNA
atggtagtcgacgagcagcagagattaacagcgcaattgaccctgcagcgccagaaaatccaggagctgacaacaaatgcaaaggaaacacacaccaaactggcgcttgccgaggccagagtgcaggaagaagagcaaaaggctaccagactggagaaagagcttcagactcagaccaccaagtttcaccaggaccaggatacgatcatggccaagttaacaaatgaggattcgcaaaatcgccaactgcagcaaaaattggctgctctgtcccggcaaattgatgagctggaagaaactaacaggtccctgcggaaagccgaagaggagctgcaggacattaaggaaaaaatcagcaagggagaatacggcaacgcaggcatcatggccgaggtggaggagttgatcaagatggaggagcagtgtagggacctcaataagcgtctcgaacgcgagactctgcaaagcaaagacttcaaactagaagtggagaaacttagtaagagaatcatggccctggagaagttagaggatgctttcaacaagtccaagcaggagtgctactctctgaaatgcaatctcgaaaaggagaggatgacaacaaagcagttaagccaggagctggaatcccttaaagtacgcatcaaggaactggaagccatcgagtcacggctagaaaagacggaatttactctgaaggaagacctcacaaagcttaagactttgactgtgatgtttgtcgacgaacgcaagactatgtcagagaagctgaaaaaaacagaggacaagctgcaggccgcttcatcacagctgcaggtggaacagaataaagttaccaccgtaacagaaaaacttatagaggagacgaaacgagcgctgaagagcaaaaccgatgtcgaagagaagatgtactccgttacaaaagagcgagacgatctgaaaaataagctgaaagccgaggaggaaaaaggaaatgatctcctgagtcgtgttaatatgctcaagaatcggctacagtcactagaagccattgagaaagactttcttaagaacaaactgaaccaggatagcgggaaatcgactactgcacttcatcaagaaaacaacaagattaaagaactgagccaagaagttgagagactcaagctgaaactgaaagacatgaaagcaatcgaggatgacttaatgaaaactgaggacgaatacgagactctggaacggcgttacgctaacgaacgggacaaggcccagttcctttcaaaagaactggaacatgtcaaaatggaacttgccaagtataagcttgcggaaaaaacagaaacaagccacgagcagtggttgttcaaacgtctgcaggaagaggaagctaagtctgggcatctgagtcgggaagtcgacgccctcaaagaaaaaatccatgagtatatggctaccgaagacctgatttgccacctgcagggcgaccattcggtgctgcagaaaaagctcaaccagcaggaaaatagaaatagggatctgggaagggaaatagagaacctgacgaaggagctggagcgctataggcacttctccaaatctctgcgcccttccctgaacggtaggcggatcagtgaccctcaagtattctcaaaagaagtacagacagaagccgtggataacgaacctcccgactataaatcacttatcccacttgagagagctgttatcaatgggcagctgtacgaggaatctgaaaaccaggatgaggaccccaacgatgaaggctctgtcttgtcttttaagtgctcccagagcacaccttgcccagtcaatcgcaaactgtggattccatggatgaagagcaaggaaggccacctgcagaatggcaagatgcagacaaagccaaacgccaacttcgttcaaccaggtgacctggtgctgtctcatacacccggtcaaccgctccacattaaggtgactcctgaccatgtgcagaacaccgccaccctagaaatcacaagcccaaccacagaatcccctcacagctacaccagtactgcagtcattcctaattgtggcaccccaaagcagagaattacaattctccagaatgcttcaatcactcctgtgaagagcaagacatccacagaagatctgatgaaccttgagcagggcatgagcccaatcaccatggccactttcgcaagagcccagacaccagagagctgcggaagcctaacccccgagcgcactatgtccccgattcaagtcttagccgttacgggttccgcaagctccccagaacagggaaggtctcctgaaccaaccgagatttcggcaaaacacgctatcttcagagtctcgcccgatcggcagtcatcctggcagttccaacggtcaaacagtaacagtagtagtgtcattacaaccgaggataacaagatccacatacacctaggatctccttatatgcaagccgtggcatctcccgtgcgacccgctagtccctctgcccctttgcaggacaacaggacccagggactgatcaacggtgccttgaacaagaccacaaacaaggtcaccagctcaataaccattaccccgaccgcaactcccttacctcgccagtcccaaatcaccgtgtcaaacatctacaactag

SEQ ID NO: 223336 - DNA, 2688 bp, synthetic construct
  misc_feature 1..2688: note = Description of Artificial Sequence: Synthetic coding sequence
  source 1..2688: mol_type = other DNA
atggtggtcgatgagcagcagcgcctgaccgcacagctaactctgcagaggcagaaaattcaagagcttactaccaatgccaaagagactcataccaaactcgcactcgctgaagcccgagtccaggaagaggagcagaaggctactcggttggaaaaggagctgcaaacccagaccaccaagttccatcaagatcaggacactatcatggccaagctgactaatgaagactcccaaaacagacaattgcagcagaaactggccgcattgagcagacagattgatgaactcgaagaaacaaacaggagcctcagaaaggcggaagaggaactgcaggatataaaagaaaaaatctccaaaggcgagtacggaaacgccggaattatggctgaagtggaagaactgcgtaagcgggtgttggatatggagggcaaggatgaggagctcatcaagatggaagaacagtgcagagatcttaacaagaggctcgaaagagagacactccagagcaaggactttaaactagaagtcgaaaaactctctaagcggatcatggccctggaaaagctcgaggatgcatttaacaagtcgaaacaggagtgttatagcctgaaatgcaacctggagaaagaacggatgaccacaaaacaactgagtcaggaattggagtctctaaaagtgcggatcaaggagctggaagccatcgaaagccgcctggagaaaaccgaattcacgttaaaggaagatttaacaaagctgaaaacactgaccgtgatgttcgtggacgagcgaaagaccatgtccgaaaaacttaagaagacagaagacaaactccaagctgcatcctcccagttacaagtcgagcagaacaaggtaacaacagtcactgaaaagttgattgaagagacgaagagggccctaaaaagcaagactgatgtggaggaaaagatgtactctgttaccaaggagcgggatgacttgaagaataagctgaaggctgaagaagaaaagggcaatgatctactgagcagagtgaacatgctgaagaatcgcttgcagtccttagaggctatagagaaggacttcctcaaaaataaattgaaccaggacagtggcaagagtactacagctctccaccaggagaacaataagatcaaagaactttctcaggaagtcgaacgcttgaagctgaagctaaaggatatgaaagcaatagaggacgatctgatgaagaccgaagatgagtatgagacactggaacgacggtatgccaatgagcgggataaagcccagttccttagtaaagagctcgagcatgtgaagatggaactggcaaagtataaactagctgagaaaacagagacctcccatgagcagtggctgtttaaaaggttacaggaagaggaggccaagagtggccacctgtctagagaggttgatgcacttaaggaaaagatacacgaatatatggctacggaagacctgatctgtcacctgcaaggcgaccatagtgtgctgcagaagaagttgaaccagcaagagaaccggaatagggatctcgggagggaaatcgaaaatcttacaaaggagctggaacgttatcgacatttctctaagtccctgcgtccgtcacttaatggtcgaaggatatctgatccccaggttttttcgaaggaggtccaaactgaggccgtcgataatgagccacctgactacaagtcacttatccctctggagcgggctgtcataaatggacagctgtatgaggaaagtgaaaatcaggatgaggacccgaacgatgaaggctccgtcctctcattcaagtgcagccaaagcactccgtgccccgtcaatcgtaagctgtggatcccctggatgaaaagcaaggaagggcacctgcagaacggcaagatgcaaaccaagccaaatgctaactttgtacagccaggagatctggtgctgtctcacacccccggtcagcctcttcacattaaggtgacacccgatcacgtacagaatactgcaacgctcgagatcacttctcccactacagaatccccacactcctatacatccactgctgtaatccctaattgcggcacgcccaagcagcggattaccattttgcagaatgctagcattacccctgtgaagagcaagacgagcactgaggaccttatgaatctcgagcagggaatgagcccgattacaatggctactttcgcgagagcccagacccctgagagctgcggcagcctgacccctgagcgaacaatgagccctatccaggttctggctgtcactggatctgcctcttcacctgaacaggggagaagtccggagcctacagaaatatcagccaagcacgccatcttccgcgtgtctcctgaccgacaaagtagttggcagttccagcgctctaattctaatagctcaagcgttatcacaaccgaagataacaagatacacattcacctcggctccccatacatgcaggctgtcgcaagccccgtgcgccctgcctctccttcggctccacttcaggacaatcgtacacaaggtctcatcaacggcgctctaaacaaaaccaccaataaagtaacatctagcatcaccatcacccctacagccactcctttgcctagacagtctcagataacagtagagcctctccttttaccacattag

SEQ ID NO: 223337 - DNA, 2136 bp, synthetic construct
  misc_feature 1..2136: note = Description of Artificial Sequence: Synthetic coding sequence
  source 1..2136: mol_type = other DNA
atggccctagaaaagctggaagacgcctttaataagtccaagcaggagtgctactcactcaagtgtaatctcgagaaggagcgaatgacaacaaagcagctctctcaggagttggaaagtctgaaggtccggataaaggaactcgaagccatcgagtccaggctggagaaaacggagttcacccttaaggaggatctgacgaagctcaagacactcaccgtcatgttcgtggacgaaagaaagactatgtcggaaaagctgaagaaaaccgaagataagctccaggcagcttccagccaactccaagtggaacaaaacaaggtcaccaccgtcacggaaaagcttattgaggagaccaaacgcgcactaaagagcaagacagatgtggaggagaagatgtactctgtgactaaagagagggatgatctgaaaaacaagctgaaggccgaggaggagaaagggaacgacctgctgagccgcgtgaatatgctgaagaatcgactccaatctctggaggctattgagaaagattttctgaaaaacaaactgaatcaggattctggaaagagcacaactgcgctgcaccaagagaacaacaaaattaaggagcttagccaggaggtggagaggctgaagctgaagctgaaggacatgaaagctatcgaggacgacctgatgaagaccgaggatgaatatgaaaccttggaaaggaggtacgctaatgaacgagacaaggcccagttccttagcaaagaactcgagcacgtgaaaatggagctcgctaagtataagctcgccgagaaaacagagaccagtcatgaacaatggcttttcaagcgtcttcaggaggaagaggcaaagtcggggcacctgagccgggaggtggacgctctgaaggagaaaattcacgaatacatggcaaccgaagacctgatttgccaccttcaaggtgaccattctgtccttcaaaagaaactaaaccagcaggaaaatcgaaatcgggatctcggaagagagatcgagaacctgaccaaggaactcgaaagataccggcacttcagcaagtcccttaggcctagcctgaacggtcggaggatttccgacccacaagtgttcagtaaagaagtgcaaactgaggccgtggataacgagcctcccgactataagagtctgattccactcgagcgggcagtgataaacgggcagctgtacgaagagtcagaaaaccaggacgaagaccctaatgacgagggatccgtgctctccttcaagtgcagccaatcaaccccatgcccagtgaatcgaaaattgtggattccgtggatgaaatcgaaggaagggcatctgcagaatggaaagatgcagaccaaaccaaacgctaattttgtgcagcccggagatctggtattatcgcatacgcccggtcaaccactacacataaaggtgacccccgaccatgtacagaacacggctaccctagagataactagtccgactaccgagagcccccactcgtataccagtacggctgtcatccccaactgcggcaccccaaagcagcgcattacaatcttacaaaatgcctcaattactcccgtgaaaagcaagaccagcaccgaggacctgatgaacctggagcagggaatgagtccaatcactatggccacctttgctagggcccaaactcccgagtcttgtggtagccttactcctgaacggacaatgtcgcccatccaggtcctcgcagtgactggtagtgcttcgtcccctgagcagggcaggtcccctgagcccaccgagatctcagccaagcacgctatattccgggtgtctcccgacaggcaatcttcttggcagtttcagcggtcgaactctaactctagcagcgtgatcacaaccgaagacaacaaaattcatattcacctgggttcaccttatatgcaggctgtggctagccccgtccgcccagcatccccgtctgcgcctttgcaggacaatcgcacacaggggctgatcaacggggctttgaacaagaccaccaacaaggtgaccagctccatcactatcaccccaacagccactcctctgcccagacagtctcagattaccgtggagccattactgctgccacactag

SEQ ID NO: 223338 - DNA, 2514 bp, synthetic construct
  misc_feature 1..2514: note = Description of Artificial Sequence: Synthetic coding sequence
  source 1..2514: mol_type = other DNA
atggtcgtagacgagcagcaaagactaaccgcacagctcactctgcagcggcaaaagattcaagaactgacaactaatgccaaggagactcacacaaagctggctctcgctgaggcaagagtacaggaagaggaacagaaagctacccgtttagagaaagagctgcagacccagaccaccaaattccatcaggaccaggataccattatggcaaaacttacaaatgaagacagccagaacagacagttacagcagaaactcgctgcattgtccagacagatagacgagcttgaagaaactaataggtcactgcggaaagcagaagaggagttgcaggatattaaggaaaaaatttccaagggagagtatggcaacgcaggtatcatggccgaggttgaggagctgaggaagcgtgtcctggacatggagggcaaggatgaggagctcatcaagatggaggaacagtgccgcgacctcaataaacggctggagcgcgagactctgcagagcaaagacttcaagttagaagtggagaaactgtccaagagaatcatggccctggagaagctggaggatgcatttaataaatctaagcaagaatgttattcgcttaaatgcaacctcgaaaaggagagaatgacaacaaaacagctgtcacaagaactagaatctttaaaggtaagaattaaagaactcgaggccatcgagtcaaggcttgagaagactgagttcacactgaaggaagaccttactaagctaaaaacactgacagtgatgttcgtcgacgagcggaaaacaatgtccgagaaattgaagaaaaccgaggataaactgcaagcggcaagctcacagttacaagtggagcagaataaagtgaccacagtgacggaaaagcttattgaggaaactaagcgtgctctgaagtctaaaaccgacgtcgaagaaaaaatgtactcagtgacaaaagaaagggacgacctaaaaaacaagcttaaggccgaagaggagaagggcaacgatctgctatccagagtgaatatgctgaagaaccgactgcagtcactggaggccattgaaaaggatttcttgaaaaataagcttaatcaggacagtggcaaatccaccactgctcttcatcaagaaaacaataagataaaggagctaagtcaagaagtggagagactcaagctgaagttaaaagacatgaaggctatcgaggacgacctgatgaagactgaagatgaatacgagacactagagcgcagatatgcaaacgaacgcgacaaggcgcagttcctgagcaaggagttggaacacgtgaagatggaactggctaaatacaaattagcagagaaaactgagacaagccatgagcagtggctcttcaagcgtctccaggaagaggaagccaagagcggccacctatctcgcgaagtggacgcccttaaagaaaagatacacgagtacatggcaacggaagatctgatctgccatctacagggtgaccactctgttctccaaaaaaagctgaaccagcaggaaaacagaaatagggacctgggacgagagattgagaatctaactaaggaactcgaacgctaccggcatttttcaaagagtctcagaccaagcctgaacggacgcagaatctcagatccacaggtgtttagcaaggaggttcaaacagaggctgtggataatgagccccctgactacaagagtttgatccctcttgagcgcgctgtgatcaatggacaattgtatgaagagtccgaaaatcaggacgaagatcccaacgatgaaggcagcgtgctgtctttcaagtgttctcagtctacaccctgccctgtcaaccgcaaactttggatcccttggatgaaatccaaggagggtcatctacaaaatggaaagatgcaaaccaaacccaatgcaaacttcgttcagccaggtgatttagttttgtctcacaccccaggccaacctctgcatatcaaggtgacccctgatcacgtgcagaataccgcaaccctcgaaatcacaagtccaaccacagaatccccccattcatatacttctactgccgtgatccccaactgcggtactccaaaacagagaattacaatcctgcagaacgcgtctatcactccagtcaagagcaagacctccaccgaggacctaatgaatttagagcaaggcatgtcacctattaccatggccaccttcgctagggctcaaacaccagaaagctgtggctcactgacacccgagcggacaatgtccccgatccaagtgctggctgtcaccggctctgcctcatcacccgagcagggacgttctcctgaaccaactgagatctcagccaagcacgcaatttttcgcgtgtcccccgaccgacagagttcatggcagtttcagcgatcgaattcaaatagctcttcggtgatcactacagaagataacaagattcatatccacttaggaagcccctacatgcaggccgtggctagcccatag

SEQ ID NO: 223339 - DNA, 7943 bp, synthetic construct
  misc_feature 1..7943: note = Description of Artificial Sequence: Synthetic coding sequence
  source 1..7943: mol_type = other DNA
atgagttcctcacactcccgcgcaggccagagcgcagcaggcgcagcgcctggaggaggagttgatactcgggatgctgaaatgcccgctaccgagaaagacctggccgaagacgcgccatggaagaagatccagcagaacaccttcactagatggtgtaacgaacatctgaagtgcgtaagcaaacggatcgccaacctccaaaccgacctgagcgatgggctccgactgatcgcactcctggaagtgttatctcaaaaaaagatgcacagaaaacacaatcaaagacctacgttcaggcagatgcagctggagaatgtcagtgtagcgctggaattcctggaccgcgaatctatcaagctcgtatccatcgattccaaggctattgtggacgggaatctgaagctgatcctggggctgatctggaccctgattcttcactacagcatttctatgccaatgtgggacgaagaggaagacgaagaagctaaaaagcaaacccccaagcagaggctgttagggtggattcaaaataagctgccgcagctgcctatcaccaacttcagtagggactggcagtctggcagggctttaggagcactcgtggatagttgcgctcccggactgtgcccagactgggatagctgggacgccagcaagccagtcacaaacgccagagaggcaatgcaacaggcagatgactggctcgggatcccgcaagtcataaccccagaggagatcgtggatcccaatgttgatgaacactctgtcatgacctacctaagtcagtttcctaaggccaaacttaagcctggggcacctctgcggccaaagctgaatcctaaaaaggccagagcttatggacctggaatcgagcccacaggtaacatggttaagaaacgggctgagttcaccgtggagacgcgcagcgcaggtcaaggcgaagttctcgtgtatgtcgaggatcctgcaggccatcaggaagaggcaaaagttacagctaacaacgacaagaatcgtacattttcagtctggtatgtaccagaggtgaccggcacccacaaagtcacagtcctgttcgctggccaacacattgccaaaagcccattcgaagtttacgtggataaatctcagggggacgcttcaaaagtcaccgcacagggtcccggactcgagcctagcggcaatatcgcgaataagacaacctatttcgagatatttacagcaggagcaggcaccggtgaggtcgaggtagtgatccaggacccgatgggccagaagggcacagtagagccgcaactcgaagccagaggtgattcgacctacagatgctcctaccagcctaccatggaaggcgtgcacactgtgcacgtaaccttcgctggtgtgcctatcccaaggagcccctatacagtgacggtcggtcaggcctgtaacccttctgcttgccgcgcagtgggcaggggtctgcagccgaaaggcgttagggtgaaggagacggctgattttaaagtatatacaaagggagccggaagcggagagttgaaagtgactgtcaagggccctaagggcgaggagcgggtgaaacagaaggacttgggtgacggtgtgtatggcttcgaatattacccaatggtaccaggaacctatatcgtgactattacatggggcggacagaatataggaagaagcccgttcgaggtcaaagttgggaccgaatgcggaaatcagaaggtgagagcatggggcccagggttagagggcggagtggtgggcaagtccgctgactttgtggttgaagccattggcgatgacgtgggtaccctgggcttctcagtcgaagggcctagtcaggctaagattgaatgtgacgacaaaggcgatggatcctgcgacgttagatactggccacaggaagccggagagtatgctgtccatgtgctgtgcaattccgaggatattagactctcaccttttatggctgatatccgcgatgctcctcaggactttcacccagatagggtgaaggctagaggccctggtttggagaagactggtgtggcggtaaataagccggcagagtttaccgttgatgccaaacacggtgggaaagcaccccttcgcgtacaggttcaggataatgaggggtgtcctgtggaggctttggtgaaagataacggtaatggaacatactcatgttcctatgttcccagaaaacccgtgaagcacaccgcgatggtgagttggggcggtgtatctatccctaatagtccgttcagagtgaacgtgggcgcaggctcccatcccaacaaggtcaaggtctatggcccaggtgtcgctaagaccggtctgaaagcacatgaacctacttatttcaccgtggattgtgccgaagcagggcagggagacgtgtcaatcgggatcaagtgtgcaccaggagtcgtaggcccagctgaggctgacattgacttcgacataatcaggaatgataacgatacattcacagttaaatacacaccaaggggcgctgggtcctacaccattatggtcttattcgccgatcaggccacacccaccagccctatcagggtcaaggttgagccgtcccatgacgcctctaaagtgaaagcagaaggaccgggtctttctcgaacaggcgtggaactggggaagcccacccacttcacagtcaatgccaaagccgctggcaaaggtaaactcgatgtgcaattttctggacttaccaagggtgacgctgtccgggacgttgacatcattgaccaccatgataatacctatactgttaaatataccccagtgcagcagggcccagtgggggttaacgtaacctacggcggagaccccataccaaagtcgcccttctccgtcgccgtatcgccaagccttgacttaagtaaaatcaaggtcagtgggttaggcgagaaggtcgatgtcgggaaggaccaagaattcacagtgaagagcaaaggcgcaggcggacagggcaaagtggccagcaagatcgtgggccctagtggcgctgccgtgccatgcaaagtggagccaggactaggcgctgataacagcgtggtccgctttcttccccgagaggaggggccatacgaagtggaggtgacttacgatggggtccctgtgcctggctcaccatttccccttgaggcagtggctccaaccaagccatccaaagtgaaggcctttggtccaggtctacaaggcggttcggccggtagccccgcacgctttaccatagacactaagggtgctgggactggagggctcggcctaaccgtcgagggcccatgcgaggcccagctggaatgcctagacaacggagatggcacttgttcggtgagctatgttcccacagaacccggtgattataacatcaacatattgttcgccgatacccacatccctggctcgccgtttaaagcccacgtggtcccctgtttcgacgccagcaaggtaaagtgctcaggtccaggtttggagagggcgactgctggagaagtgggccagtttcaggtcgattgctcaagcgcgggatccgctgaactcaccatcgaaatatgttcagaagccggactgccagctgaggtatatatccaagatcacggtgacggcactcataccattacttatatccccctgtgtcccggagcatatacggtaacaatcaagtacggaggtcaacccgtgcctaacttcccaagcaagctgcaagtcgaacctgctgttgacacgagcggagtacagtgctacggacccggaattgagggccagggtgttttccgggaggcaacaaccgagttctcagtagatgccagggcactgacccagacagggggtcctcacgtaaaggcgagagtggcgaacccgtctggaaacttaactgagacgtatgttcaggataggggcgacggaatgtacaaggtggagtataccccatatgaggagggcttgcacagtgtcgacgtgacatacgatggcagtccggtgcctagctctccattccaggtcccggtgaccgaaggttgcgacccttcacgcgttagagtccatggccctgggattcagagtgggacaaccaataagcctaataagttcaccgtggagaccagaggtgccggaacaggtggcctgggacttgccgttgagggtccctccgaggctaaaatgtcctgtatggacaataaggatgggtcctgttccgtcgagtatattccctacgaggcagggacatactccctgaatgttacctacgggggacaccaagtgcccggttctccgtttaaagtccctgtccacgacgtgaccgatgcaagcaaggtcaagtgttctggccctggcttgtctcctggcatggtgagggctaatctcccacagtctttccaggtggatacatcaaaagccggagtggctcctctacaggttaaagtgcagggacccaaagggctcgtagagcccgtggatgtggttgataatgctgacgggacccagaccgtgaactatgtgccctctcgcgagggtccctattctatctccgtcctctacggcgacgaggaggttcctaggagtccttttaaggtgaaagtgcttcccacgcatgacgccagtaaagtgaaagcctccggccctggcttaaatacgaccggagtaccggcatcacttccagttgagtttacaattgacgccaaggatgctggggagggtctgcttgctgttcagatcaccgacccagaaggaaagcctaagaagacgcatatccaggacaaccatgatgggacgtataccgtggcctacgtcccagacgtcacaggccgatataccatattgatcaagtatggcggagacgagattccctttagcccataccgtgtacgggctgtgcctaccggggatgcttcaaagtgtacagtgaccgtgtcaattggaggccatggcctgggcgcaggcataggaccaactattcagatcggcgaagaaactgtcataactgtcgacacaaaggccgctgggaaagggaaagtgacctgcactgtgtgcaccccagatggctccgaagtggacgttgatgtggtggaaaacgaggatggaacttttgacatcttctacacagctccccagcctggcaaatatgtgatttgtgtgagattcgggggagagcacgtgcctaatagcccttttcaggtgacagccctggccggtgaccagccgtccgtccaacccccactcagatcccagcagttggccccacagtacacctatgcccagggtggacagcagacttgggcaccggagagacctctggtcggcgttaacggccttgacgttacgagtcttaggcctttcgatctggtcattcctttcactataaagaagggggagatcaccggagaggtgagaatgccctccggaaaggtcgcccagcctaccatcacagacaataaagatggaactgttacagtgcgttatgccccatccgaagcgggactgcacgaaatggatattcggtacgacaatatgcatattccagggtccccacttcagttctatgtcgattacgtcaattgcggccacgtgacggcttatgggcctgggctgacacacggggtggtgaacaaacccgcaacttttaccgtgaacaccaaggatgcaggggagggcggactgtccctcgcaatcgagggccctagtaaagctgaaatatcatgtaccgataatcaggacggcacctgctctgtatcttacctccccgtgctgccaggagattattctatcctggtgaaatacaatgagcagcacgtgccagggtcgccatttactgcacgggttaccggcgacgattcgatgagaatgtcccatctcaaggtggggtctgccgcagacatccctatcaatatctccgagactgacctttccctgctcaccgccaccgtcgtgccacctagtggcagagaggaaccgtgcctgttgaaacgcctgaggaacggacatgtgggaatatcctttgtcccaaaagagacgggtgagcacttagttcacgttaagaagaatggacaacacgtggccagttcacccatccccgtggttatcagtcagagcgagataggagatgcttcgagagtccgagtctccggacagggtttacacgaaggccacacgtttgagccagcggagtttatcattgacactcgggatgccggatatggcggtctgagcctgtcaattgaaggcccaagcaaggtggacattaacaccgaggatctagaagatggcacatgccgcgtaacctattgccctaccgagcccggtaactacattattaatattaaatttgccgatcagcacgttccaggaagccctttcagcgtgaaagtgacaggagaaggaagggtgaaggaatctatcacacggaggcgtagagcaccaagcgtggccaacgtaggcagtcattgtgatctcagcctgaagatccctgagatctctatacaggacatgaccgcccaggtaacctcacccagcggaaaaacacacgaagcagagattgttgagggtgaaaaccacacttattgtatccgatttgtgcctgcagaaatgggaacacacaccgtgtccgttaaatacaaaggccagcatgtccccggaagcccattccagtttaccgtgggccctctgggtgagggaggtgcccacaaagtgcgcgctggcggacccggactcgagagagccgaagccggagtacccgctgagttttccatctggacccgggaggccggtgcagggggactggctatagctgtggagggcccatcaaaggccgagatttcattcgaggacaggaaagatggatcttgtggcgtggcctatgttgtgcaggaaccaggggattatgaggtgtccgtaaaatttaacgaggagcacatccccgattcacctttcgtggttcccgtagcctctccttcaggcgatgccaggcggctgactgttagctccttgcaggagagtggcttgaaggttaatcagccagccagctttgctgtgagcctgaatggtgccaagggagctatagatgctaaagttcactcaccaagcggtgccttagaggaatgctacgtgaccgagatagaccaggataaatatgcggtgagatttatccccagggaaaacggagtgtacctgattgatgtaaagttcaacggaacccacatcccgggatcgccttttaagattcgggtgggggaaccaggacacggaggcgacccaggcctggtctctgcctacggggcagggctggaaggcggtgtgacaggcaatccggcagaattcgtagtgaatacttccaacgccggtgccggagccctgagcgtaaccattgatggtccttctaaagtgaaaatggactgtcaggaatgccctgagggttatagagtcacatatactcccatggccccaggttcctacctgatctcgatcaagtatggcggtccttaccacataggagggagccctttcaaggcgaaggtgactggcccacgcctggtgtcaaaccattctctgcacgaaaccagtagcgttttcgtcgactccttgactaaagccacatgcgccccacagcacggcgcacccggacctggaccagctgacgcctccaaggtcgtcgctaagggccttggcctgagcaaagcgtatgtgggccagaagagctcgttcaccgtggattgtagcaaggccggaaataatatgctgttagtgggggtgcacggacccagaacaccatgcgaagagattctggtcaagcatgtggggagccgtctatacagtgtctcgtacctgttgaaagataagggtgagtacactctcgtcgtaaagtggggggacgaacatattcccggttcgccttaccgcgtcgtggtgcctta

SEQ ID NO: 223340 - DNA, 6947 bp, synthetic construct
  misc_feature 1..6947: note = Description of Artificial Sequence: Synthetic coding sequence
  source 1..6947: mol_type = other DNA
atgccagccacagagaaggatctggccgaggatgcgccttggaaaaaaatccagcagaatacattcacccgatggtgtaacgagcatctcaaatgtgtgtccaaaagaattgctaatctccagacagacctctccgatggactaagactgatcgctctcctggaagtgctgtctcagaaaaagatgcacagaaagcacaatcagcgtcctaccttccgccagatgcagcttgagaatgtcagtgtggcactggagtttctggaccgcgagtccatcaagttggtatcaattgactctaaagccatcgtggatgggaacctcaaactcatccttggcctgatatggacgctaatcctgcattattctattagcatgcctatgtgggacgaggaggaggacgaagaggccaaaaaacaaacaccaaaacaaaggctcctgggctggattcaaaacaagctacctcagctgcctattacaaatttttcaagggactggcaatccgggagagcgctcggcgcactggtggacagctgtgcccctggactctgccccgactgggattcatgggatgcttctaagccggtgacaaatgctagggaagctatgcagcaggccgatgactggctcggcattccccaggtgatcacccctgaagagattgtcgacccgaatgtggatgagcactccgtcatgacgtatttatcccaattccccaaggccaaactgaagccgggagctcccctgcgccctaagctgaaccctaaaaaagccagggcctatggaccgggaattgagcccaccggaaacatggttaagaagcgggcagagttcactgtagaaacgcgctccgccggtcagggggaagtccttgtgtatgtcgaagacccggctggccatcaggaagaagccaaggttacagcgaacaacgacaagaatcgaacatttagcgtgtggtacgtgcctgaagtgactgggacacacaaggtcactgtgctgtttgccggtcagcatatagcgaagtccccttttgaggtttacgtggacaaaagtcagggtgatgcttcaaaggtgacggcgcagggtcctggtctcgagccatcaggaaatattgccaataaaaccacttactttgaaatcttcacggccggagccggtactggcgaagtcgaagtggttatccaggatcccatgggacagaagggaactgtggaaccccagttagaggcgagaggcgattctacttacaggtgctcctaccaacccaccatggaaggagtgcacacggtgcacgtgacattcgccggagtacccatcccaagaagcccctacaccgtcaccgttggccaagcctgcaatccttccgcctgtagggcagttggcagggggctccagcctaaaggcgtgcgcgtaaaagaaacagccgatttcaaggtgtacactaaaggggctggcagtggcgagcttaaggtcacagtaaaagggcctaagggcgaagagcgcgtaaaacaaaaggatctcggggacggcgtttacgggttcgaatactatcctatggtccccggtacctacatcgttacgatcacatggggcggtcagaacatcggcaggtcccccttcgaggtgaaagtgggaacagagtgcgggaaccaaaaggttcgcgcttggggtccgggtctggaaggcggagtggtcgggaaaagtgcagacttcgtcgtagaggccatcggcgacgatgtggggactctgggcttctctgtggaaggtccaagccaggcaaaaattgagtgcgatgataagggagatggcagttgtgatgttcgctactggccccaggaggccggagaatatgctgtgcacgtcctctgcaattccgaggatattcgcctgtccccattcatggccgatatccgagacgccccacaggatttccacccagaccgtgtgaaggccagaggcccaggactggaaaaaaccggcgttgccgtgaacaaaccggctgagttcacagtggacgcgaagcatggagggaaagcacccttgcgtgtacaggtgcaggataacgaggggtgccctgtcgaggccttagtcaaagacaacggtaatggcacatactcctgctcatacgtccctagaaaacctgtgaaacacactgctatggtctcttggggcggagtgagtatacctaacagcccattcagggtgaatgtgggggcaggatcccatcccaataaagttaaggtgtacggtcctggggtggcaaaaaccggcctcaaggcacacgaaccgacatactttacagtggactgcgccgaggctggccagggcgacgtgagcataggcatcaaatgtgcaccaggcgtcgtcggtccggctgaggctgacatagatttcgacattattaggaacgacaacgacacatttaccgtgaagtacacaccccgaggcgctggatcatacacaattatggttttattcgccgatcaagcaaccccaacctcacctattagagtgaaagtggaaccctcgcacgacgcatcaaaggtgaaggccgaaggacccggactttcaaggactggggtggagctgggcaaacccacgcacttcacggttaatgccaaagctgccggaaagggcaaattagatgtacaatttagtggtttgaccaaaggagacgccgttcgtgatgtggacatcatagatcatcatgacaacacttacaccgtcaaatacacccctgtacagcagggccctgtaggagtgaatgtgacatacggtggtgacccaatccccaaaagcccattttcggtggccgtgagccctagtctcgacttaagcaagattaaggtttccggccttggtgagaaggtggacgtgggaaaggatcaagagtttaccgttaagagtaagggtgctgggggacagggtaaggtcgcgagcaaaattgtgggcccatctggagctgctgtcccatgcaaagtggaaccagggttaggcgctgataatagcgtcgtgcgctttctgcctagggaggagggaccctatgaagtggaagttacatatgacggcgtgcccgtcccgggaagtccctttccacttgaagcggtggctcctaccaagccaagtaaggttaaagcctttggtccaggtctgcagggtggctctgctggcagtcctgcgaggttcactattgacactaagggcgctggcaccggcggtctgggcctgacagtcgaggggccatgtgaggctcagctggagtgtctggataatggtgacggtacctgcagcgtcagctatgtgcctacggaaccgggtgattataacatcaacattctgttcgcagacacccatatcccgggttccccctttaaggcgcatgtggtaccatgtttcgatgcctctaaagtgaaatgttcaggaccagggctagaacgcgcaacagccggagaggtgggccaattccaagtggattgctcttccgcaggatcagctgagttgaccattgagatatgctcagaggcaggcctgcccgcagaagtgtacattcaagatcatggcgacggcacccacaccatcacctatattcctctctgtccaggcgcttacaccgttaccattaaatacggcggtcagcctgtcccgaattttccatcaaagctacaggtggagcccgctgtggacacttccggagtccagtgttacggcccaggtatcgaaggacagggcgtgttcagggaagctacaacggaattctcggtggacgcccgtgcgctgacacagaccggcggtccacatgtcaaagccagagtcgccaatccatctgggaacctgactgagacttatgtgcaggaccgtggcgacggaatgtataaagtcgaatacacaccttatgaggagggcctgcacagtgttgacgtgacttatgatggcagcccggtcccatcttccccctttcaggtgcccgtgaccgagggttgcgatccaagccgcgtaagagtacacggacccggaatacagtctgggacaacgaataagcccaataagttcaccgtcgagacgcgtggggcaggtactgggggactgggattagccgtggagggtccctccgaggccaagatgtcctgcatggataataaggacggatcgtgcagtgttgagtacataccctacgaggctggcacatacagccttaacgtgacatacggcggacaccaggtccccggttccccctttaaggtaccagtccacgatgtcacggatgcctcaaaagtcaaatgttctggacccggactgtcaccaggcatggtgagagctaaccttccccagtcttttcaggtcgacaccagcaaggcaggcgttgccccactgcaggtgaaggtgcagggaccaaagggcctggtggagcccgtcgatgtggtcgataatgccgacggaacacagactgttaactatgtacctagtagggaaggaccgtacagtatctcagtcctttatggcgacgaagaggtcccacggtctccgttcaaggtaaaagtgcttcctacacacgacgcgtcaaaggttaaggcctccggccctgggctgaacacaaccggcgttccggcttcactacccgtcgagtttaccatcgacgctaaagacgctggcgagggcctcttggctgtgcagatcaccgatcccgagggaaagcccaaaaaaactcacattcaggacaaccacgacggtacatacaccgtggcttatgtgcccgacgtgaccgggagatacaccatccttattaagtatggtggcgacgaaatccccttttccccttatcgggtcagagcagtgcccacaggagatgcctcaaaatgcacagtgacagtttccatcggtggacacggactgggggcagggattggcccaactatccagattggagaggaaactgtgattactgtggacaccaaagccgcaggaaaagggaaagtgacatgcacagtgtgtacccctgacggctctgaggtggatgtagatgtggtggagaacgaagatggcaccttcgacattttttacacagctcctcaacccggaaagtacgtgatatgtgtacgttttggcggtgagcacgttcccaatagtcccttccaggtgacagctcttgcaggcgatcagccctccgtgcaacctccactccgctcccaacagctcgcaccccagtatacctatgcccagggcggtcagcagacctgggcccctgaacggccactggttggcgtgaacggtcttgacgtgacctcactgcggccatttgaccttgtgatcccattcacaattaagaagggtgaaatcacaggtgaggtccggatgccatccggtaaagttgcccagcccacaataacagataacaaggatggtaccgtgactgttcgctacgcgccatccgaagctggccttcacgaaatggacatccgatatgacaatatgcacattcctggctcaccactccagttctacgtcgactacgtgaattgtggacacgtgaccgcctacggcccagggcttacgcacggcgttgtaaataagcccgcaacatttactgtgaacactaaggacgcaggggaaggaggattgagcctggccatcgaaggacctagcaaagcagagataagttgtactgataaccaggacggcacctgctctgtgtcttacctgccagtgttaccaggggactactctattctggtcaaatacaacgagcaacacgtacctggttcccctttcacagcacgcgtgacgggggacgattccatgagaatgagccatctcaaagtcggtagtgccgctgatatccctataaacataagcgaaatatctttcgaggaccggaaagacggtagctgcggagtggcatacgtggtccaggaacctggagactatgaagtgagcgtaaagttcaatgaggaacacatccccgatagccctttcgttgtaccggttgcatcacccagtggagatgccagacgcctcactgtgagctccctgcaggagtcgggattgaaagtgaaccagccagccagcttcgctgtgagtctcaacggcgctaagggcgctattgacgccaaagtacattctccgtctggggctctcgaagaatgctacgttactgaaatcgatcaggacaagtatgccgtgagattcatcccaagagaaaatggtgtgtacctgatcgacgtgaaattcaacgggacccacatccccggatcaccttttaaaattcgggtgggagagccaggccacggaggagaccctggcctggtctctgcatacggagcaggcctcgaagggggtgtgaccgggaaccctgccgagtttgtggtgaatactagtaacgcaggagctggtgcactcagtgtgaccatcgatggtccctcaaaagttaaaatggattgtcaggagtgcccggaggggtaccgggtgacgtacacacccatggcccctggcagctatctcatctctattaaatatggcggaccctaccacattgggggaagccctttcaaggcaaaagtcacaggtccgcgtctcgtatctaaccacagcctccacgagaccagctccgtgttcgtggactctctgactaaagcaacctgtgcaccccaacatggggctccaggaccaggcccagctgatgccagtaaagtggttgcgaaggggcttggcctgagtaaggcgtacgtgggacagaagtcttccttcactgttgattgttcaaaggctggaaataatatgctcttggtaggcgtgcatggtccaaggaccccctgcgaggaaatcctggtgaagcacgtggggtctagactttatagtgtctcttacctcttaaaggataaaggcgaatacacattagtggtgaaatggggcgatgagcatattccagggtctccttatagagtggtggtgcccta

SEQ ID NO: 223341 - DNA, 2343 bp, synthetic construct
  misc_feature 1..2343: note = Description of Artificial Sequence: Synthetic coding sequence
  source 1..2343: mol_type = other DNA
atgccttctggtaaggtggcccagcccactattacagacaataaggacggtacggtaactgtgagatatgcgccttctgaagcaggcctacacgagatggacatccggtatgacaacatgcatatcccaggaagccctcttcagttctatgtagactatgttaactgtggacacgtgacagcttacggtcccggactgactcatggagtcgtgaataagcccgcaacatttaccgtgaacacgaaggacgcaggcgagggcgacgattcaatgaggatgagccacctgaaggtggggtcagccgctgacatcccgatcaacatcagtgagactgacctatccctgctgactgcaacagtggtgccacctagtggtagagaggagccttgtctgctcaagcggctacgcaacggccatgtcggaattagttttgtgcccaaagagacgggggaacacctggtgcatgtcaagaaaaacgggcagcatgtcgcctccagccctatccctgtggtgatatctcagagcgagatcggggacgcctccagggtgcgagtatccggtcagggactgcatgaggggcacaccttcgagcccgctgagtttattatcgacaccagagatgcgggttacggcggtcttagcctctccatcgaagggccatcaaaggtagacatcaatactgaggatctggaggatggtacatgtagagttacttactgccccaccgaacctgggaattatataattaacattaagtttgccgatcaacatgtgcccggttctcccttttccgtgaaagtcaccggtgagggcagggtgaaggaatctatcacgcgacgcagaagagctcctagtgtggcgaacgtgggctcacattgcgatttgtccttaaagataccagagatcagtatacaggatatgactgcgcaggtgacctctcccagcggtaaaactcatgaagcagagatcgtggagggcgagaaccatacctactgcataagatttgtccccgcagagatgggtacacacacagtctcagtgaagtacaagggtcaacatgtcccaggctcccccttccagttcaccgttggccctctgggcgaaggaggcgcacacaaggtgcgggctggcggtccaggacttgagagagccgaagctggggtcccagcagagttctccatctggacccgcgaggcaggagcaggcggactggcaatagccgtggaggggccatccaaggctgaaattagcttcgaggaccggaaagacggctcatgcggcgttgcatacgtggttcaggagcctggagactacgaggtgagcgtaaaattcaacgaagaacatatcccagacagtccgtttgtagtgccagtggccagtccttctggcgacgccagacggctgactgtgtcatctctgcaggagtccgggctgaaggtcaatcagccagcatccttcgcggtctcactgaacggcgctaagggtgccattgacgccaaggtgcacagcccttcaggagcactcgaagaatgctacgtcacagagattgatcaagacaaatatgccgtcaggtttattccgcgagagaatggagtgtatctcattgacgttaagttcaacggtacacacattccagggagtccttttaagatcagggtcggcgagcccggtcacggcggtgatccagggttggtgtccgcctacggggctggactggaggggggagtgaccgggaatcctgctgaattcgttgtaaacacatcaaacgcaggggcaggagctctcagcgtgacaatcgatggaccctccaaagtgaagatggattgtcaggaatgccctgaaggatatcgagtgacctacacccccatggcaccgggtagctatctaattagtatcaagtatgggggtccctatcacattggcggttcaccattcaaggccaaagtgactggccctcggctcgtctccaaccactccctccatgagacttcctcggtgtttgtggactccctgaccaaagcgacgtgcgcgccacagcacggtgcaccagggcctgggcctgccgacgccagtaaagttgtcgcaaagggtctgggactatctaaggcatacgtaggccagaagagctccttcaccgtggattgcagcaaggcaggaaataacatgttactcgtaggcgtgcacggccctcgcacgccttgtgaggagatcctagtaaagcacgttgggagcaggctgtacagcgtgtcctatctgctcaaagataaaggcgagtacacactcgtagtcaaatggggcgacgagcacatcccaggatctccatatcgtgtggtagtgccctag

SEQ ID NO: 223342 - DNA, 7919 bp, synthetic construct
  misc_feature 1..7919: note = Description of Artificial Sequence: Synthetic coding sequence
  source 1..7919: mol_type = other DNA
atgagttccagccattccagggcgggtcagtcagctgccggagctgctccaggcggtggagtggacactagagacgcagagatgcctgcgacagagaaggacctcgccgaggacgcaccttggaagaagattcagcagaacacattcacacgctggtgtaatgagcacttaaaatgtgtctcaaaaagaattgccaatctccagactgacttgtctgacggcctaaggttaattgcgctgctggaagtgctcagccagaaaaagatgcaccggaaacataatcagcggcctacttttcgccagatgcagctggagaatgtgagcgtggcactcgaatttctcgatcgggagagcattaaacttgtgagtatcgacagcaaggccatcgtagacggcaacttgaaattaatcctcggtctcatctggactctgattctccattactcaatcagtatgccaatgtgggacgaagaggaggatgaggaggccaagaagcagaccccaaaacagcggctgctggggtggattcagaacaagctgccccaacttcctattactaactttagccgcgactggcaaagcggtagagcgttgggcgctctggtcgactcctgcgcacccggactctgccctgactgggacagctgggatgcatccaagcccgtgactaacgctcgggaagccatgcagcaggctgatgactggttaggcatcccacaggttatcacccctgaggaaatcgtcgaccctaacgtggacgagcattcagttatgacttatttgtctcagtttcccaaagcaaaattgaaaccaggtgctccattgagaccaaagctcaatcctaagaaggccagggcatacggtccaggcatcgaacccaccgggaacatggtgaaaaaaagggcagaatttaccgtcgagacaagaagcgcgggacagggggaggtactcgtgtatgtggaagaccccgctggacatcaggaggaggcaaaggtgacagcaaataatgataagaaccgaacattctcagtgtggtacgtgccagaggtcaccggcacgcacaaagtgactgtactttttgctggacaacatatcgccaagagccccttcgaggtttacgtggacaagtcccagggggatgcatcaaaggttaccgcccaaggccctggcttggagccttcgggcaacatagctaataagaccacttacttcgagattttcacggccggagctggaacaggggaagtggaagtggtgatacaggacccaatgggccagaagggaacagtggagccccagttagaggctagaggagactctacgtacagatgttcttatcagcccaccatggaaggcgtgcacacagttcatgttactttcgctggagtgcctatcccccgatccccttacacagtcactgttgggcaggcttgtaatccctccgcctgtagagcagtgggtagaggtctgcaacccaagggggtccgcgtgaaagagactgcagactttaaagtgtatactaagggggcagggagtggtgaactcaaggtgaccgtgaaaggtccaaagggcgaggaacgtgtcaagcaaaaggatctgggggacggcgtttatggtttcgagtattatcctatggtgccaggcacctacatagtgaccatcacttggggcggtcagaacatcggacgaagcccattcgaagtgaaggtgggcactgagtgcgggaaccaaaaggtgcgggcatggggccctggtctggaagggggtgtagttggtaaaagcgctgatttcgttgtggaggccattggcgacgatgtggggacccttgggttctcagtggagggtccctcccaggccaaaatcgagtgtgacgacaagggagacggttcctgcgacgtgaggtattggccccaagaggccggagaatacgccgttcacgttttatgtaacagcgaggatattaggttatcacccttcatggcagatattcgtgacgcaccccaggacttccacccagacagggtgaaagcacggggaccagggctggagaagacaggtgttgcagtcaacaagccggctgaattcaccgttgatgccaaacatggcggaaaagctccgctgcgagttcaggttcaagataacgaggggtgtccggtcgaagccttagtcaaggataacgggaatggcacctattcatgctcatacgtaccacgaaaaccggtgaagcacaccgccatggtcagctggggcggagtgagcatacctaactcaccatttcgagtgaatgtaggggctggatcccacccaaacaaagttaaggtgtacggccctggagtggcgaaaaccggattaaaggcccatgaaccaacttattttaccgtggactgcgctgaagctgggcaaggagatgtctccataggtattaagtgtgcgccaggcgtggtgggacctgccgaggccgacatcgactttgatatcattagaaacgataatgatacctttaccgtaaagtatactcccaggggcgctggcagctacactatcatggtcctgttcgccgatcaggccacaccgacatcccctatcagagtgaaagtagagccctcccacgatgcttccaaggtgaaagccgagggccctgggctctccaggaccggcgttgagctgggcaaacccacccactttactgttaatgcgaaggccgcagggaagggcaagctggatgtgcagttttccggcctcactaagggcgacgccgtgagagacgtggacatcattgaccaccacgacaacacctataccgttaaatatactcccgtgcagcagggtccagttggtgtgaacgtgacctacggcggagacccgatacctaagtctcctttcagtgttgcagtctccccgtctctagacttatcgaaaattaaggtcagcggcctcggagaaaaagtcgacgtgggcaaggaccaggagtttaccgtgaagtcaaaaggggctggaggccaggggaaagtggcatcaaagatcgtcgggccttctggagccgcagtcccttgtaaggtagagccaggtttgggcgctgacaactctgtcgtgcggtttctgccgcgagaggaagggccatacgaggtggaggtgacatacgatggtgtcccagtgccaggctcacctttcccgcttgaggccgttgcgcctacaaaaccgagtaaagtcaaggcctttggtcctggcctgcagggtggctctgctggttccccagctaggttcacaatcgatactaaaggtgcgggaacagggggactggggttgacagtggaggggccatgtgaggcacagttagaatgtctggataacggtgatggaacatgctccgtaagttacgtacccacggaacctggggactacaacatcaacattcttttcgccgacacacacattcctggctcccctttcaaagcccatgtagtgccttgtttcgacgcttcaaaggtgaaatgttctggcccagggctggagagagcgactgcaggggaggttggacaattccaggtcgactgctcctctgctggttcagcagagctcaccattgagatttgttcggaggctggcttaccagcggaggtgtacatccaggaccacggcgacggtacccacaccattacgtatatccctctttgtcctggggcttacactgtgacaattaaatatggaggacagcctgtccctaacttcccgagtaagctgcaagtagaacccgctgtcgacaccagcggcgttcagtgctatggtcctggtatcgaagggcagggagtgtttcgggaagccactacggaattctcggtagacgcacgggctctgacccagacggggggaccccacgttaaagctcgcgttgccaacccatctggcaacctgaccgaaacttacgtgcaggaccgtggagacggtatgtataaagtggaatacaccccatacgaggaaggcctccattccgtcgacgtaacctatgacgggtctccggtccccagcagcccttttcaagtaccggtgacggaaggttgcgatcccagtagagtgagagtccatggacctgggatccagtccggcaccaccaacaagcccaataaattcaccgtggagactcggggtgctggcactggtggcctgggcctggccgtggaaggcccttctgaagccaaaatgtcatgcatggataataaggacggttcatgtagcgtggagtatattccttatgaggcaggcacatattcccttaacgtcacttatggaggacaccaggtccctgggtcaccttttaaggtcccagtgcacgatgtcaccgacgccagcaaggtgaaatgttcagggcctggactgtctcccggaatggtccgggcaaacttaccacagtcctttcaggtggacacatcaaaggcaggcgtggcccctcttcaagtgaaggtgcaaggccctaaaggactggtcgagcctgtggacgttgtggataacgcagacggaacccagaccgtcaattacgtgccaagccgagaaggaccttactctatatctgtgttatacggggacgaggaggtcccaaggagccctttcaaagtgaaagtcctcccgacccatgacgcatccaaggtcaaggcttctgggcctgggctgaatactaccggagtcccggctagcctacctgtggagtttaccatcgatgcgaaagatgcgggtgagggccttttggcagttcagattaccgacccggagggcaaacccaaaaaaacacacatccaggacaaccatgacggcacctatacagtcgcctatgtccctgatgtcacaggcagatatacaatcctcatcaaatacggcggagacgaaattccattttcgccatacagagtgcgggctgtgccaaccggggatgccagcaagtgtaccgtaacaggggctgggatcggccctactatccagatcggagaagagactgtaatcacagttgacaccaaagcagccggaaaggggaaggtgacatgtacagtgtgcacacccgacgggagcgaagtggatgtcgacgtggtggagaacgaggacggaactttcgacatattttacaccgcccctcagcccggaaaatatgtcatatgcgtgagattcggcggagagcacgtgccaaattctcccttccaggtcacggccctcgctggggaccaaccctctgttcagccccctctgcgctcccagcagctcgcaccacagtatacttacgcccagggcggacagcagacatgggctcccgaaagacctctggttggagtgaacgggctggatgtgacctccctgagaccttttgacctggtcattccctttaccatcaaaaaaggcgagatcacaggcgaggtccgcatgccatctggcaaggtcgcccagccaactatcaccgacaataaagacggcacggttacagtcaggtatgcacctagcgaagcaggtctgcacgagatggatatccgctacgataacatgcatattcccggtagccccttgcagttctacgtagactatgtaaattgtggccacgtgaccgcgtacggtcccggtcttacacatggtgtggtcaataaacctgccaccttcaccgtcaataccaaagacgcgggtgagggaggactttcactggccattgagggcccatctaaagccgagatatcctgcaccgataatcaggatggaacgtgttcagtctcctacctgccagtcctccccggagactatagtatcttggttaagtacaacgaacagcatgtgcccggaagtccatttactgccagagtgactggcgacgacagcatgcgaatgagccacctcaaggtaggctcagcggcagatatcccaataaacatcagcgagacagacctcagcctcctgacagcaacagtcgtgcctccctccggaagagaggaaccctgcctgctcaagagacttagaaatggccacgtcggaatctctttcgttccaaaggagacaggcgagcatttagtccacgtcaagaagaatggtcagcacgttgctagcagccccattcctgtggtaattagtcaaagtgagattggggatgcatcccgcgttcgagtgtccggacagggtctgcacgaaggccatacctttgagcccgcagagttcatcattgatactcgggatgctggatacgggggactttcactgtccattgaaggcccttcaaaggtggacattaacactgaagacctggaagacggcacttgtagggttacatactgtcccacagaaccgggaaattatataattaatatcaaattcgccgaccagcacgtgccaggcagtcccttttccgtgaaggtgaccggtgaggggagggtcaaagaatccattactcggagaagacgagccccatctgtcgccaacgtggggagccattgtgatcttagtctgaaaattcccgaaatctctatccaagacatgactgcccaggttacttccccctcgggaaagacgcacgaagccgaaattgtggagggggagaatcacacatattgtatccggtttgtcccagctgaaatgggtacgcatacagtctcggtgaagtataagggtcagcatgtgccaggttcacctttccagttcacagtgggccctttaggggaaggcggagctcacaaagtgagggctggaggacccggactggaacgggcagaggctggagtacctgcggagttctcaatctggacaagggaagcaggtgcgggagggctcgcaatcgcagtcgagggcccttccaaggctgaaatcagctttgaggacagaaaggacggaagttgtggggtggcatacgtggtgcaggaacctggggactatgaggtgtctgtcaaatttaatgaggaacacatccccgattcccccttcgttgtccccgtggcctctccaagcggtgacgccagaagactgactgtatcatcccttcaggagagcgggctcaaagtgaaccagcccgcatcgtttgccgtgagcctaaacggtgccaagggggctatcgatgctaaagtgcactccccctcgggggctctcgaggagtgctacgtgaccgagatagaccaggacaagtatgctgttcggtttattcctagggaaaacggggtatacctgatcgacgtgaagttcaacgggactcacatcccgggaagcccatttaaaatcagagtgggcgagcccggtcacggcggtgacccaggtttagtcagtgcttatggggcagggctggagggcggtgtgaccggcaacccagccgagttcgtcgtaaatacgagcaatgcgggagccggtgccctgagcgtcaccattgatgggccttccaaggtaaagatggattgccaggaatgcccagagggataccgcgtaacctatacccctatggcgcctggaagctacttgatttccattaagtacggagggccatatcacattggcggaagtccctttaaggcaaaggtgacaggccctaggttagtgagcaaccatagcctccatgaaacctcatctgtgttcgtcgactccctgaccaaggccacttgcgccccacagcacggagctccgggacctggcccagctgacgcctccaaggtggtagcgaagggcttgggccttagtaaagcttacgtgggacagaagtcttccttcactgttgactgctccaaggccggaaacaacatgctgttggtcggagtgcatggaccacgcaccccttgtgaggaaatcctggtcaagcatgtaggcagccgcctctattcagtcagctatctgctcaaagataaaggagaatacactctcgttgtgaaatggggagacgagcacattcccggatccccctacagggtcgttgtgccata

SEQ ID NO: 223343 - DNA, 7808 bp, synthetic construct
  misc_feature 1..7808: note = Description of Artificial Sequence: Synthetic coding sequence
  source 1..7808: mol_type = other DNA
atgccggtgacagaaaaagacctcgccgaggacgccccatggaagaagatacagcagaacacctttacccgatggtgtaacgaacacttaaaatgcgtcaacaagagaatcggcaacctacagacggatctgagcgacggccttaggctgatagccctgctggaggtgctgtcccagaagagaatgtataggaagtaccaccagcgccctacctttcgccagatgcagctggagaatgtgagtgtagccctggaattcttggatcgcgagtcaattaagttagtctctatcgacagcaaggcgatcgtggacggcaatctcaagctgattcttggattggtgtggaccctgattctgcattactccatcagtatgcccgtttgggaagacgagggtgacgacgacgccaaaaaacagacacccaagcagaggctgctaggttggatccaaaataagattccgtacttaccaatcacaaacttcaatcagaattggcaggatggtaaagccctcggcgcacttgtggactcctgcgctcctggactttgccccgattgggaaagttgggacccccagaaaccggtcgacaacgccagagaggccatgcagcaggccgacgattggctgggggtaccccaagtcattacacccgaagagataatccatcccgatgttgatgagcacagtgtgatgacgtacctttcccagtttccgaaagcaaaactgaagccaggggctccgctgaagcccaaactgaatcctaaaaaggctagggcctatgggagggggatagagccaacgggcaatatggtgaaacagcccgctaaattcactgtggataccatcagcgctggacaaggagatgtcatggtattcgtggaggacccagaaggcaataaggaagaagcgcaagtaacgcccgattcggacaaaaacaagacttattcggtagagtatctgcctaaggtcacaggattacacaaagtaacagttctgtttgccggtcagcacatctccaagtctcctttcgaagtgtcagtggacaaagcacaaggggatgccagcaaagtgactgctaagggaccagggcttgaggcagtgggcaacattgcgaataagccaacttatttcgacatttacacagccggagccggtgtgggggacattggagtggaggtggaagatccccagggaaagaatacagtggaactcttggtggaagataagggcaatcaagtctatcgttgcgtatataaacctatgcagcctggtccgcatgttgttaagattttttttgcaggcgacacaataccaaagtctccatttgttgtgcaggtgggagaagcctgcaacccaaacgcttgccgtgcatcaggcaggggtctccaaccgaagggcgtcaggattcgagaaaccactgacttcaaggtagatactaaagctgcgggatccggcgagctgggtgtgaccatgaaagggcctaagggactcgaggagctggtcaaacagaaggacttcctagatggcgtgtatgcctttgagtactacccatcaactcccggtcgatactctattgctatcacctgggggggtcaccacatacccaaaagtcctttcgaggttcaggtcggtccagaggccggaatgcagaaggtgcgcgcttggggccctgggcttcacggcggaatcgtggggaggtccgcggatttcgtggtggagtccataggcagtgaggtgggatctcttggttttgcaattgagggtcccagtcaggccaaaatagaatataacgaccaaaacgacggtagctgtgatgtgaaatattggcccaaggagcccggagagtacgctgtacacattatgtgtgatgacgaagacataaaggactccccatacatggccttcatacaccctgcaacagggggatataacccagatctggtccgggcttacggacccggactggagaaaagcgggtgcatcgtcaataacttggcggaattcactgtagaccccaaagacgccggaaaagcaccgctcaagatcttcgcacaggacggtgagggccaaaggatcgacattcagatgaaaaacagaatggacggaacatacgcctgcagctacaccccagtgaaagccatcaaacacacgatagccgtcgtgtgggggggtgtcaacattccacattccccttaccgagtgaatatcgggcagggaagtcatccccagaaagtcaaagtttttggaccaggagtggaaaggtccggattgaaggcaaatgaacccacccacttcacagtggactgtactgaagccggagaaggcgatgtgtctgtcggcatcaaatgtgatgcaagagttctgagcgaggatgaggaagacgttgatttcgacataatccacaatgccaatgatactttcaccgttaagtacgtccctccggctgctggacgatacacaatcaaagtcctgtttgcttcacaggagattcccgctagtccattccgtgttaaggtagatccaagccacgatgcgtccaaggtcaaggcagagggacctggactctccaaggccggagtcgaaaatgggaagccaacccatttcacagtgtatactaaaggagccggaaaggctcccctcaacgtgcaatttaactctcccctgcctggcgacgctgtcaaggatctggatattattgacaactacgattatagccataccgtgaagtatacccccacgcagcaaggcaatatgcaagtgctggtgacttacggcggagatcctatccctaagtctccgttcactgtaggagtggcagccccactagatttgtctaaaattaagctgaatggactagaaaacagagtggaagtaggtaaggatcaggagtttactgtggacactagaggtgccggtgggcaaggcaagctagacgtcacaatattgagcccatcacgaaaggtggtgccatgccttgtgactcccgtcacgggacgcgaaaattcgacagcaaagtttattccgagagaggaagggctgtacgccgtggatgtcacatatgacggccaccccgtccccggatcgccctatactgtggaggctagcttgccccctgatccgtcaaaagtcaaggctcatgggcctgggctggagggaggactggtgggaaaaccggctgagttcacgattgatactaagggggctggaacgggcggactcggtctcactgtggaaggtccttgcgaggctaaaatagagtgtagtgacaatggcgacggcacgtgttctgtttcataccttcctaccaaaccaggggagtactttgtgaatatcctgtttgaggaagtgcacattcctggctcaccattcaaggccgatattgagatgccatttgacccctctaaagtagtcgccagcggaccagggttagagcatggtaaggtcggtgaggccggtttactgagcgtcgactgctcagaagcaggcccaggggctctgggcttggaggcggtctctgattctggtaccaaggcggaggtgtcgatacaaaataacaaagacgggacgtacgcagtaacttatgtgccactgacagccggtatgtataccctgaccatgaaatacgggggtgagctggttccccacttccccgctcgggtaaaagtggaacccgcagttgatactagtcggatcaaagtgtttggcccaggaattgaaggcaaagatgtgtttcgagaagcaacaacagactttacagtggatagccgccctctcacacaggtcggcggtgaccatattaaggcccacattgccaacccttctggtgcgagtacagagtgtttcgtgaccgacaatgctgatgggacctatcaggtcgaatacactccattcgagaaggggcttcatgtagtggaagttacctatgacgacgtgcctattcctaattccccatttaaagtggccgtgacagagggctgccagccttcccgggtccaggctcagggacctgggctaaaggaagcctttacgaataagcccaatgtgttcacggtggtaacccgaggtgcagggatcggcggtcttggcataacagttgaaggcccatctgaaagtaagatcaattgtagggataataaagacggctcttgttcagcagagtatattccatttgcacccggtgattacgacgtgaacatcacatacggtggagcgcacataccagggagccctttcagggtgcccgttaaggacgtggtcgatcccagcaaggtcaagatcgctggcccaggacttgggagtggggtgcgagcaagagtgctgcagtcctttaccgtagacagtagcaaagcaggccttgcaccgctcgaggtacgtgttttgggcccacgcggtttagtagagcccgtaaacgtagtcgacaacggcgatgggacgcataccgttacttacaccccatcacaagagggcccttacatggtgtcggttaaatacgccgacgaggagattcctcgcagtcccttcaaggtgaaggtgctgccgacttatgacgccagtaaagtcaccgcttcagggcctggtttatcaagctatggagtaccagcctcccttcccgtggatttcgccatcgatgcaagggatgctggcgaggggctgctggctgtccagattaccgatcaagaggggaagcccaaacgcgcaattgtccacgacaacaaggacggaacctatgcagttacatacatcccagataagacaggccgatacatgataggtgtcacttacgggggagatgatatcccactctccccttacagaatcagagctacccagactggcgacgcctctaagtgtctggctacaggcccagggatcgcgagcacagtgaagaccggggaggaggtaggctttgtcgtcgacgcgaaaaccgccggaaaagggaaggtgacatgcaccgtgctcacaccagatggcactgaagctgaggcagatgtaattgagaatgaggatgggacctatgacatattctacaccgccgctaaacccggaacctatgtgatctacgtgcggtttgggggagttgatattccgaacagcccgttcacggtaatggccaccgacggtgaggtgacggcagtggaggaagctccagttaatgcctgcccacctgggtttcggccttgggtaaccgaggaggcctacgtgcctgtgtctgacatgaacggtctgggtttcaagccctttgacctcgttattccatttgccgtcaggaagggcgagattaccggggaggttcatatgcccagtggtaagaccgccacccctgagattgtcgataacaaggacgggaccgtaaccgtcaggtacgcccctactgaggtaggccttcatgagatgcatataaagtatatgggctcacacatccctgaaagcccccttcagttctacgtgaactacccaaactccggtagcgtctctgcatatggacccggattggtctatggtgtcgccaataaaaccgccacattcaccatcgtgactgaggacgcaggggagggcggactggacctggcgattgaagggccttccaaggccgaaatcagttgtatcgacaataaggacgggacctgcaccgtgacatatctccctacattgcctggagactattccatcttggtgaagtacaacgacaagcacatcccagggtcaccgtttaccgctaagatcaccgacgattctagaaggtgtagtcaggttaaactcggaagcgcagcggatttcctcctggacattagcgaaaccgatctgagcagtttgaccgccagcataaaagcgccttcgggaagggacgaaccttgtctgctcaaacgcctccccaataaccacataggaatcagctttataccacgggaggtgggggaacacctggtctcgattaaaaaaaatggtaatcacgtggcgaacagcccagtgtctattatggtggtgcagagcgaaattggtgatgcgaggcgagctaaagtctacgggagaggcctgagcgaaggcagaacattcgaaatgagcgactttatcgtagatactcgcgacgcaggctacgggggtatcagtttagcagtcgagggtcctagtaaagtcgatatacagactgaagatttagaagatggaacttgtaaggtgtcctatttccccaccgtgcctggagtatacatagtgagcacaaagtttgccgacgagcacgtacccggaagcccgttcaccgtgaagatatctggagagggtagggttaaagagagcattacacgaactagtcgagccccatcagtcgcgacggtgggttccatttgtgatcttaatctgaaaatccctgaaattaacagttccgacatgagcgcacacgtgacaagcccttctggaagagtgaccgaggccgaaattgtccccatgggcaagaattcacattgcgtgcggtttgtcccccaggagatgggtgttcatacagtgtccgtgaagtaccggggacagcatgtgaccggatcccctttccaattcactgtcgggcctctaggagagggcggagctcataaggttcgcgctggcggacctggcctggaacggggagaggccggagttcctgccgagttttcaatctggacacgtgaagccggagcaggcggtctgagtatcgccgtggagggaccatcaaaagccgagataacgttcgacgatcacaagaacgggtcttgtggggtatcatatatcgctcaggagccaggtaactatgaagtttctatcaagtttaatgatgaacatattcctgaaagcccctacctggtccccgtcattgccccatctgatgacgctaggcgacttactgtaatgagtttgcaggagtcgggcctgaaagtaaaccagccagcatctttcgcaattcggctgaatggcgctaaggggaaaatagatgctaaagtgcactcaccctctggcgctgtggaggaatgccacgtgtccgagttggaacccgataaatatgccgtccgcttcataccccacgaaaatggcgttcacaccatagacgtgaaatttaatgggtcccatgtagtcggctccccttttaaggtgcgcgtaggggagcccggacaggcgggaaaccctgcgctcgtctccgcctatgggactgggcttgaggggggtacaaccggtattcagagcgaatttttcattaacactaccagagctggacctggcaccctgagcgtgaccattgagggcccttctaaagttaaaatggattgccaggagacacctgaaggatacaaggtgatgtacactccaatggcccctggcaattatcttattagcgtcaagtatggaggccctaaccacatcgtgggcagccccttcaaggccaaggtcactggacaaaggctggtgtctccaggatccgcgaacgagacttccagcattttggtggagagcgtgactcggtcatccactgagacttgctactctgccatccctaaggcctcttccgatgcctccaaagtaacctccaagggtgctggcctctcaaaagcgtttgttgggcagaagtcatcttttcttgtggattgttccaaggcaggaagtaacatgctgttgattggggtgcacggacccactactccctgtgaggaagtaagtatgaagcatgtggggaatcagcagtacaacgtgacatatgtcgtaaaggagcgtggagactatgtcttggctgtcaagtggggggaggaacacattccgggatcccctttccacgttaccgtgccgta

SEQ ID NO: 223344 - DNA, 7685 bp, synthetic construct
  misc_feature 1..7685: note = Description of Artificial Sequence: Synthetic coding sequence
  source 1..7685: mol_type = other DNA
atgcccgttacagaaaaggatctggcggaagacgcaccgtggaaaaaaatccagcaaaacaccttcacccgatggtgcaacgaacacctgaaatgcgttaacaaacgaattggaaacctgcaaacagacctgtctgatggcctcaggctgatcgccctcctcgaagttctctctcaaaaaagaatgtacaggaagtatcaccaacggccaacgttcaggcagatgcagctcgaaaatgtctctgtcgcccttgagttcctggatcgggagagtattaagctcgttagtattgactccaaagcaattgtcgatgggaatttaaagttaatccttggcctggtgtggaccctgatcctgcactactcaatctcgatgccggtttgggaggacgaaggcgacgacgatgccaagaaacagacaccaaagcagcgcctgctgggatggatacagaacaagatcccgtacctcccaatcacaaatttcaatcagaactggcaggatgggaaggcacttggtgccctggtggattcctgtgcccctggcctgtgccctgattgggaaagctgggacccacaaaagcctgtcgataacgccagggaggcgatgcagcaggcggacgactggctaggggtgccgcaggttatcacacccgaagaaatcatccatccggacgtggatgagcactcggtcatgacatacttaagccagtttccgaaagccaagctaaaacctggagccccattaaaacccaaactcaaccccaagaaagcaagggcatatgggcgagggatcgagcctacaggtaacatggtcaaacagccagctaaattcactgtcgatacaatcagcgccggacaaggagacgtgatggtcttcgttgaagatccagaaggcaacaaggaggaagcacaggttacccctgactcagacaaaaataagacctattctgtggagtacctccccaaagtgaccggactccacaaggtcaccgtgttgtttgctggccaacatatcagcaaaagcccatttgaggtttcagtcgacaaggctcagggcgatgcttcaaaagtgaccgcaaaaggtcctggattagaggcagtcggaaacatcgcaaataagcccacttactttgacatctacaccgctggcgctggcgtcggagatattggagtggaggtggaagatccccaaggcaagaataccgtcgagttgctggtggaagataaagggaatcaggtgtacagatgcgtgtacaaaccaatgcagcccggaccccacgtggtgaaaatcttttttgctggcgacactatccccaagtccccattcgtcgtccaggtgggagaggcttgtaatcccaatgcctgcagagcttccggtcgaggactgcagccaaagggcgttcgcattcgggagaccactgatttcaaagtcgacactaaggccgcaggatcaggcgagctgggcgtgaccatgaaagggccaaagggcctcgaagagcttgtcaagcaaaaagactttctggacggggtgtacgcttttgaatactatccctcaacaccaggacgctacagcatcgccatcacttggggaggacatcatatcccaaagtcgcctttcgaagttcaggtgggtcctgaggccggtatgcagaaagtacgagcctggggaccaggcctccacggcggaatcgtaggaagatcagctgacttcgtagtggaatcaatcggttcagaggtgggcagcctgggcttcgccatagagggcccttcccaggctaagattgaatataatgaccagaatgacggctcctgcgatgtgaagtattggccaaaggagcccggagagtacgcagtccacataatgtgcgatgacgaagatataaaggattccccatacatggctttcattcaccctgcaaccggcggttataatccagatctcgtgagagcctatggaccaggcttagagaagagcggctgcatcgtgaataacctcgcagaatttaccgtcgaccctaaagacgccggtaaagcccctctgaagattttcgcccaggatggcgaaggtcagcggatcgatatacaaatgaagaatagaatggacggcacatacgcttgttcatatacaccagtgaaggccatcaagcacaccattgcagtcgtgtgggggggtgttaatatcccccactctccctacagggtgaatattggacaggggtcacaccctcagaaggtcaaggtattcggcccaggggttgaacgttctggactcaaagccaacgaacccacccactttacagtggattgcacagaagctggggagggggatgtgtccgtcggcatcaagtgcgacgccagagtattgtctgaggacgaggaagatgtggactttgacatcattcacaatgccaacgacaccttcacagtgaagtatgttcccccagcagcaggacggtacacgattaaagtcctcttcgcgtctcaggagatcccggcatcacctttccgcgttaaggtcgacccatcacatgatgcctccaaagtcaaggccgaaggacctggactgagtaaggcaggcgttgagaacggaaaaccgacacattttacagtgtacacaaagggagcagggaaggcacctcttaacgtgcaatttaactcccctttaccgggagacgcagttaaggacctcgatattatcgataattacgactactcccacacagtgaagtacacccctactcaacaaggaaatatgcaggtgctggttacatatggcggtgaccccattccgaaaagtccttttacagtgggagtggccgctcctttggatctgtctaaaatcaagttaaacggcctggagaaccgggtggaagtaggaaaggatcaggagttcacggtggacacccgtggagccggaggtcagggcaagctggatgtaaccatattgtccccaagccggaaagtcgtaccctgtctagtcactcccgtaactggaagggaaaattctactgccaaattcattccccgtgaagaaggactctacgcagttgacgtaacgtacgacggacacccagtacccggttccccctacaccgtggaagctagtctgcccccagatccctcaaaggtcaaggcgcatggacccggtctggaggggggactggtcggtaaaccggctgagttcaccatcgacaccaagggcgctggaacaggcggtctaggcttaaccgtggagggcccatgtgaggcgaagatcgaatgcagcgacaatggcgacggtacctgttctgtctcataccttcccacaaagcctggggaatactttgttaatatcctcttcgaagaagtgcacattcctggaagtccctttaaagcggacatcgaaatgccttttgacccaagtaaggtcgtcgcatctggcccagggttggagcacggaaaagtcggagaggctggcctgttatccgtcgactgtagtgaagctggacctggtgctttaggcctggaggccgtgtcagacagtggcacgaaggctgaagtgtcaattcagaataacaaggatggcacctacgcagtgacttatgtgcctcttactgctggaatgtacactttgacaatgaagtatgggggtgagcttgttccgcactttccggcaagggtgaaggtggaacccgctgtggacacatcccggattaaggtgttcggacctggtatcgagggcaaagacgttttcagggaggcgacaacggatttcaccgtcgatagccgccctctgacccaggtgggtggcgaccacataaaggcacacattgctaacccttccggagcatcaaccgagtgctttgtgaccgacaatgccgacggcacataccaggtagaatacactccattcgagaaagggctccacgtcgtggaggttacctacgatgacgtgcctattcccaattccccatttaaagtagccgtcactgagggatgtcagcctagcagggtgcaggcacaaggacccggtttaaaagaggcctttaccaataaaccgaatgtgtttacggtcgtgacacgaggcgctggaattgggggactgggaataacagtcgaaggacccagcgagtcaaaaatcaattgccgggacaataaggacggttcttgctccgccgagtacatcccctttgcccctggagattacgatgttaatattacctatggcggtgctcatatccccggatctccttttcgggtacccgttaaggacgtggtggacccaagcaaggtgaaaatcgccggaccgggactgggatccggagtgcgtgcgagagttctacagtcctttacagtggatagcagtaaagccggtctagcgcctctcgaggtacgcgtgctgggtcccagggggctggttgagccagtgaatgtggtcgacaatggggacgggacacacacggtgacctatactcccagtcaggaaggcccttatatggtgtctgtgaagtacgccgatgaggagattccaagaagtccattcaaagtgaaagtgctacccacgtatgatgctagcaaggtcaccgcttcgggacccggtctaagttcatacggtgttcccgcttccctgcccgtcgactttgctatagatgcacgcgatgccggagaggggttgctggctgtccaaatcacagatcaggaagggaagcctaagagagccatcgtgcacgacaacaaggacggaacatacgcagttacatatattccagataaaacaggacggtacatgataggagtgacgtacggtggcgacgatattccactaagcccttaccgaattagagctactcagaccggcgatgcatccaagtgcctggccaccggacctggaatagcatctactgtgaagactggggaagaggtcgggtttgtggttgatgccaagacagctggtaagggaaaggtgacgtgcaccgtcctgacgccagacggaacagaagctgaagctgacgtgatcgaaaacgaggacgggacatatgatatcttctataccgccgctaaacccggaacttacgtgatctacgttaggtttggcggagtggatatccccaacagtccttttacagttatggccacagacggcgaggtgacagcagtggaggaagcaccagtcaacgcctgtcctccaggctttagaccctgggtaacagaagaggcatatgttccagtgtcagatatgaacggcctgggcttcaagccgtttgatcttgtgattccatttgctgtgaggaaaggcgagatcaccggtgaagtgcatatgccgagcgggaagactgctacaccagaaattgtagacaataaagacggtactgtgaccgtaagatatgcccctacggaggtgggattgcacgagatgcacatcaagtacatgggtagtcacatcccagagtctccgttgcagttctacgttaattaccccaacagcggctcggtctcagcctatggtcctggcctggtatatggcgtagccaataaaacggccacttttacgatagtcactgaagacgctggcgaaggtggactggacctggctatagagggtccttcaaaggcagagatctcatgtatcgataacaaagacggcacttgcacagtgacttatctccccactttgcccggtgactacagcatccttgtgaagtacaacgataaacatatacccggttcaccctttaccgcgaagataactgatgacagcagaagatgttcacaagtgaagcttggaagtgccgctgacttcctgcttgacatttcagagacagatctatcgagtctgacagcgagtattaaggcccctagcgggcgagacgagccttgcctgcttaagcgactcccaaacaaccatattggtatttcttttatcccgagagaggtcggggaacatctggtgagtatcaagaagaacggcaaccacgtagcaaatagcccggtgtcgatcatggtcgtgcaaagcgagattggagacgcaaggagagccaaggtctacggcaggggcttgagcgaaggcagaacattcgagatgtcagactttattgtggacacacgggacgcgggatacggcggaatctctctggccgttgagggcccatcaaaagtggatatccagacagaagatctcgaagacggtacttgtaaagtctcttattttcctacagtgcccggagtgtatattgtgtctaccaagtttgctgacgagcacgtacccgaaattaatagttcggacatgagtgcccacgttacctctccttcaggacgggtaaccgaggcagaaatcgtgcccatgggcaaaaattcccattgtgtgcggttcgtaccacaggaaatgggggtgcacacagttagcgtcaaataccggggtcaacatgtaaccggtagtcctttccagtttacagtcgggccactgggcgagggcggagcacacaaagttcgcgcaggaggcccaggactggaacggggagaagctggtgtgcctgcagagttttccatctggacgcgggaggctggggctgggggactctctattgcagtggaaggccctagtaaggctgagatcacctttgatgatcataagaatgggagctgtggtgtcagctatatagcacaggagcctgggaattacgaggtttcaattaagtttaatgatgaacacatacccgaaagtccgtatctagtcccggtgatcgccccttctgatgacgcccgacgcctcactgtgatgagtctccaggagtcagggctcaaggtgaatcaacctgccagcttcgctataaggcttaacggtgcaaagggcaagatcgacgctaaggtgcatagccccagcggagccgttgaagagtgccacgtttctgaactagagcccgacaagtatgctgtacgtttcatcccccatgagaatggcgtccacacgattgacgtgaagttcaatggctcacatgtagtggggtcacctttcaaggtgcgagtgggcgagcctggacaggccggaaatccagccctggtgagcgcatatggtactgggctggaaggcggaaccacaggcatccagtccgaatttttcatcaataccaccagggctggaccgggtaccctatctgttactattgaaggtccttcgaaagttaaaatggactgccaagagacccctgaagggtataaggtcatgtacaccccaatggcccctggtaactatctgatttctgtgaaatacggcggacccaatcacatcgtgggttccccgtttaaagccaaagtaactggtcagaggcttgttagtcccggttccgccaacgaaactagttccatcctggtggagagtgttacccgctcttcaaccgagacttgttacagcgctattcccaaggcttcttccgatgcgtccaaggtgacatccaagggagctggactcagcaaagcctttgtgggccagaaatcctcattcctggttgactgttctaaggccggtagtaacatgttgcttattggagtccacggccctactaccccctgtgaggaggtgtcgatgaaacacgtgggcaaccaacagtataatgtcacttacgttgtaaaggagcgtggggactatgtgcttgcagttaagtggggagaggaacacattccagggtcaccatttcatgtgaccgtgccata

SEQ ID NO: 223345 - DNA, 6452 bp, synthetic construct
  misc_feature 1..6452: note = Description of Artificial Sequence: Synthetic coding sequence
  source 1..6452: mol_type = other DNA
atgcccgttacggagaaggacctggccgaggatgccccatggaagaagattcagcagaacacatttaccaggtggtgcaatgaacacttaaagtgtgtgaataagcgaattggcaatctacagactgacctgtccgatgggctgcgcttaatagccctgttagaggttctgtcccagaagcggatgtatcgcaagtaccaccagcggcctactttcagacaaatgcagctcgagaacgtgtctgtcgccctagaatttctggatcgtgagtccataaaactggtgtccatcgacagcaaagcgatagtagacggaaatttgaaactgattttgggcttggtatggacgttgatcttacactactccatcagcatgcctgtgtgggaagacgaaggcgacgatgatgcgaagaaacagactccgaagcaacgtctcctggggtggattcagaacaagatcccgtacctccctatcacaaattttaatcaaaactggcaagatgggaaagcgctcggggcactagtcgattcctgcgctcccggtttatgtcctgactgggaaagctgggatccccaaaagcctgttgacaacgccagggaagctatgcaacaggctgatgattggctcggcgtgccacaagtcataacaccggaggagattatccaccctgatgtggacgagcattcagtgatgacctacctttctcagttccccaaggccaagctcaagcccggagctcccctgaagccaaagctaaatccgaaaaaggcaagggcttacgggcgaggtattgagcccaccggcaatatggtcaagcagccggcaaaattcacagttgacactatcagtgcagggcagggagacgtcatggtgtttgtcgaagaccctgagggtaacaaagaggaggcccaggtgacacctgacagcgacaaaaacaaaacctactccgtagagtacctgccgaaggtgacgggattgcataaagtgactgtgctattcgcgggacagcatatcagcaagtctcccttcgaagtgtccgtggacaaagcccaaggcgacgccagtaaggttacagcgaaggggcctgggctcgaggccgtgggtaatattgcaaataagcccacatactttgatatctacactgccggagctggcgtgggggacatcggcgtggaagttgaagatccccagggtaagaacaccgtcgaactgctcgtcgaggacaagggaaaccaggtgtaccgctgtgtctataaaccgatgcagcccggacctcacgtagtgaaaatatttttcgccggagacacgattcccaaaagcccattcgtggtgcaggtgggcgaagcatgcaaccctaatgcctgtcgagccagcgggcgaggtctgcagccaaaaggtgttcggatacgtgaaaccaccgactttaaagtggataccaaggccgctgggagcggagagctaggagttaccatgaagggaccaaagggattggaagaactggtcaagcagaaagatttcttggacggggtctacgccttcgagtattacccttccacacccggacgatattccatcgccataacatggggtggacatcatatccccaaaagtccgttcgaagtgcaggtgggacccgaagcaggcatgcagaaggtgagagcttggggtccagggcttcatggaggtatcgtgggacgatcagccgacttcgttgtggagtccatcgggtccgaagtagggtctctgggattcgctattgagggaccctcacaggcgaaaatcgagtacaacgatcagaacgatgggtcctgcgacgtgaagtattggcccaaggaaccaggagagtacgccgtccacattatgtgtgatgacgaagacatcaaggacagcccttatatggcgtttatccaccccgctacagggggttataaccctgacctggtccgagcatatggtcctggcctcgagaaatcagggtgcatcgtgaataatttggccgaattcactgtagatcccaaagatgccggaaaggccccacttaaaatatttgcgcaggatggtgaagggcagaggatcgatatacagatgaagaacaggatggatggcacctacgcttgcagctatacccccgtgaaggctatcaaacatactatcgccgtggtttggggtggcgtgaacattccccactctccttaccgcgtcaatattggtcagggctcacatcctcagaaggtgaaagtttttggcccaggcgtggagcgtagtggcctgaaggccaatgaacccacgcacttcacggtggactgcacggaggccggagagggggatgtgagtgttggcattaagtgcgatgcacgggtgttgagcgaagacgaggaggacgtggattttgatattatccacaatgcaaatgacacttttacagtgaagtatgtgccccctgctgcaggccgatatactataaaagtcctgttcgccagccaggaaatccccgcaagcccgtttagagtgaaagtggacccctcgcatgacgcctccaaagtgaaggctgaaggcccagggctcagcaaagccggagtggaaaatgggaaaccaactcatttcaccgtgtatacaaagggagcgggaaaggcaccgctgaacgtgcagttcaatagcccccttccgggtgatgccgtgaaagatcttgacattatcgataattacgattattcccacacggtgaagtatacccctacacaacaggggaacatgcaggttttggtgacatatggcggagatcccatcccaaagtcccccttcacagtgggagtggccgctcctctagacctttccaaaataaaacttaacgggcttgagaatcgggtagaggtgggaaaagatcaggagttcactgtggatactcgtggcgcaggcggacagggaaagctcgacgtgacaattctctctccatcaagaaaagttgtgccatgtctcgtaacacctgtgaccgggcgtgaaaattccactgcaaagtttatccctcgagaggaggggctttacgccgtcgatgtgacttatgacggccatcccgttcccggttcaccgtatacagttgaagccagtctgccccctgaccctagcaaagttaaagcccacggcccaggtctggagggcggactggtcggtaaacctgctgaattcacaattgacacaaagggtgctggtacagggggactggggttaacagtcgaagggccttgtgaggctaaaatagaatgctccgataacggcgatggtacttgcagcgtgtcatacctgcccaccaaaccaggcgaatacttcgtcaacattctctttgaggaggtgcacatccccggaagtcctttcaaagcagacatagaaatgccattcgatccttctaaggtcgtcgcctcgggacctgggctggaacacggcaaggtgggcgaagccggattactgagcgtcgactgctctgaggctggccctggtgccctgggcctcgaggccgtatccgattcaggcacaaaggctgaagtatcaatccagaataacaaggatggaacatacgcagtgacttacgttccattaaccgctggtatgtatactctgaccatgaagtatggtggggagctggttcctcattttcctgctcgagtaaaagtggagccagctgttgatacctcacgcattaaggtgttcggacccggaattgagggcaaggacgtctttagggaagccaccacggatttcactgttgatagcagacctctgacccaggtgggaggagaccacatcaaagcgcacatcgcgaacccatccggcgcttccaccgagtgcttcgtcactgacaatgctgacggaacctaccaggttgagtacacgccctttgagaagggactacacgtcgtggaggtgacatacgacgacgtgcccatccctaactctcctttcaaagttgctgtgactgaaggctgtcagccctcaagggtgcaggctcagggaccgggtttgaaggaagctttcacaaacaagccgaatgtttttactgtggtcaccaggggtgctggcatcgggggtcttggtattaccgtagagggaccttcagagagcaagattaactgcagagataacaaggacgggagttgctccgccgagtacatcccttttgcccctggggattacgacgtgaacattacttacggaggagctcatataccgggttcccctttccgtgtgccagtaaaagatgttgtagatccgagtaaggttaaaatagctggaccaggcttagggtccggcgtccgagccagagtactgcagagcttcacggtggactcgtccaaggcaggcctggcccctctcgaagtgagggttcttgggcctcggggtctcgtcgagcctgttaacgtcgtggataatggggacggaacgcatacggtaacctacactccttctcaggaagggccatacatggtgtcagtgaagtacgcagatgaagaaatcccgaggtctcccttcaaagtcaaagtgttgcccacctatgatgcatcaaaggtgaccgcctcggggccaggcctgagctcttacggagtgcctgcctcactccccgtggacttcgcaatcgacgcaagagacgcgggtgaagggctccttgcggtgcagatcactgaccaagagggcaagcctaaacgcgcaatcgtgcacgataataaagacggaacatacgccgtaacctacattcctgacaaaaccggacgctatatgattggcgtgacctacggtggggatgacatcccactgagtccgtataggataagagcgacacagaccggggacgcctctaagtgcctggccactggtcctggcattgcatccacagtcaagacaggggaagaagtgggcttcgtcgtggatgcaaaaacagcgggaaaaggtaaggtaacatgcactgtgctgacaccggatgggacagaagcagaggctgatgtgatcgaaaatgaggacggtacctacgatatcttctacacagccgctaaacccggtacctacgtgatttacgtccgattcggaggcgttgatatcccaaacagtccctttactgtaatggctaccgatggcgaggtcacagctgttgaagaagcgccagtgaatgcgtgcccacccggttttagaccctgggttaccgaggaagcctacgtgcccgtgtccgatatgaatggcttaggctttaaaccattcgaccttgtgatcccgtttgccgtccgcaaaggtgaaattacaggcgaggtgcatatgccgtccgggaagacggctactccggagattgtagataacaaggatggaacggtcactgtgcggtacgcccctactgaggtcgggttacacgagatgcatattaagtatatgggctcccacatccccgaaagccctcttcagttttacgtgaactatccaaattcaggctctgtctctgcttacgggccaggcctggtatatggggtagccaataaaaccgccacctttacaattgttacagaggacgcgggtgaaggcggactggacctggcaatcgaaggcccatctaaagccgaaattagctgcattgacaataaagatggcacctgtactgtcacttatctccctactctgccaggagattacagcattctggtgaaatacaacgataaacatattcctgggtccccatttacagctaaaataacagatgacagccgaagatgctcgcaggtaaagttaggatccgccgcagattttctactggatatcagcgagaccgatctaagctctctaacagccagcatcaaagccccttccggcagggacgagccctgccttctcaaaaggctgccaaacaaccacatagggatatcttttattcctcgggaggtgggggaacatctcgtcagcattaaaaagaacgggaatcacgtggccaattcccctgtaagtataatggtggttcagtccgaaatcggcgatgcccgtagagctaaagtctacgggaggggactgtcagagggcagaaccttcgagatgagcgatttcattgtagatacccgcgatgcgggatacggaggcatcagtctagcggtagaggggccatcaaaagtggacatacagacggaggacttagaggacggtacatgcaaagtcagctacttccctaccgtacccggtgtctatatagtgtccaccaagtttgcagacgagcacgtccccggttccccttttaccgtgaagatcagtggcgagggcagagttaaggaaagtataacaaggacatcaagagcccctagcgtcgcaacagtagggtcgatttgcgacctgaatctgaagattcctggtgtgagagtgatgaactgtagcgcgcagatcctgtggggatggcgtgtgcagtttcatactggctctagaaaccaacagcaata

SEQ ID NO: 223346 - DNA, 7736 bp, synthetic construct
  misc_feature 1..7736: note = Description of Artificial Sequence: Synthetic coding sequence
  source 1..7736: mol_type = other DNA
atgcctgtcacagaaaaggacttagccgaggatgcgccttggaagaaaatccaacagaataccttcacacgctggtgtaatgagcatctcaagtgtgtaaataagaggattggaaacctgcagactgacctctccgacgggctccggttaatcgccctgctggaagttctatcccagaagaggatgtatcgtaagtaccatcagcgcccaacctttcgccagatgcagctggaaaatgtgtcagtcgctcttgagttcctcgacagagaatctatcaaactggtcagtattgactccaaagcaattgtggacggtaatctgaagctcatcttgggtttggtgtggaccctgatcttacactatagtatcagcatgcctgtctgggaagatgagggtgatgatgatgccaaaaagcagacgccaaagcagcggctgctgggatggatccagaataaaattccttacctcccaatcaccaatttcaaccaaaactggcaggacggcaaggctctgggggctcttgtggatagctgcgcccctggcttgtgcccagattgggagagttgggacccgcagaagcctgtggacaacgcccgagaggctatgcaacaggcagacgattggttaggagtaccacaggttatcactcccgaggaaattatacaccctgatgtagatgaacactctgtgatgacctacctgtctcaatttcctaaagcgaagctcaaacccggtgcacctctgaaacctaagttaaaccccaaaaaggcgagggcttacgggagggggatagagccaactggcaacatggtcaaacaaccagcgaaattcactgtggacacaatttctgctggacagggtgatgtcatggtcttcgtggaggaccccgagggaaataaagaggaggcccaggtgacccccgactcagataaaaataagacttactcagtggagtatctgcccaaagtgacgggacttcacaaggtgactgtgctgtttgctgggcagcacataagtaaatctccctttgaggtatctgtggacaaggctcagggggacgcctccaaggtgacagctaagggaccagggctagaggccgtgggaaacattgccaacaaaccaacctacttcgacatttataccgccggtgctggcgtcggcgacatcggtgtcgaggtggaagatccccagggcaagaacacagtagagctgctggtggaggacaaaggcaatcaagtgtatagatgtgtctataagcctatgcagcccggtccacacgtggtgaaaattttttttgccggtgatacaattcctaagtctccttttgtcgttcaagtcggggaggcctgtaacccaaacgcctgccgggctagcgggagaggattgcagcctaaaggcgtccgaattagggagaccaccgactttaaggtcgatacaaaggctgccggaagcggagagctaggcgttaccatgaaaggccctaaaggcctggaagaactggtgaagcagaaggatttcctggatggcgtgtacgccttcgagtactacccctcaacacccggtcggtattcaatagcgattacatggggcggacaccacatcccgaaatctccgttcgaggtgcaggtagggccagaagcgggtatgcaaaaggtgagggcctgggggccagggctccatggtggaatcgttggaagatcagctgattttgtggtggagagtatcggaagtgaagttggctccctcggtttcgcaatcgaaggaccttcacaggcgaagatcgaatataacgatcagaacgacgggagttgtgacgtgaagtactggcctaaggaacccggagagtacgccgttcacataatgtgcgatgatgaggacatcaaggacagtccatacatggcatttatccatcccgctaccggaggatataatcctgacctcgtgagagcttatggtccgggtttggagaagagcggctgcattgttaacaatttggcggaattcacagttgaccctaaggatgcaggtaaggccccactgaagatttttgcccaggatggggaggggcaacgtatagacatccaaatgaaaaaccgaatggacggcacatacgcctgttcgtacacccctgtgaaggccatcaaacacacgattgcagtggtgtggggcggagtgaacatcccacattccccctaccgggtaaacatcggacagggaagccatcctcagaaggttaaggtgttcgggccaggggtcgagaggagtgggttgaaagcaaatgaacccacacactttacggtggactgcactgaggctggggagggcgacgtttccgtcgggattaagtgcgacgccagggtcctgtccgaagatgaggaggatgttgatttcgacataattcataatgcaaacgacacattcaccgttaagtacgtgccccctgccgctggcaggtatacaataaaagttctctttgcgtcccaagaaatcccagcaagccccttccgcgtaaaggtagaccctagccatgatgcgtctaaggtgaaggccgagggtcccggactgtctaaggcgggtgtggagaacgggaagcccactcactttacagtctatacaaaaggggctggaaaagcgccactcaacgtacagttcaattcacccttgcctggtgacgccgtgaaagaccttgacataatcgacaattacgattactctcacaccgtgaagtatacgcccacacagcaggggaatatgcaggtgctggtaacatatggaggcgaccctattcctaaatcaccctttactgtcggtgtggctgccccactggacctctccaaaatcaaactgaacgggctcgaaaatagagtggaagtcggaaaggatcaggaattcacagttgacaccaggggggctggagggcagggcaagctggacgttacaattttatcacccagccggaaggtggtaccatgcctggtgactcctgtgaccggcagggaaaactcaacagccaaatttatcccaagagaagaaggcttatacgccgtggacgtcacttacgacggccaccctgtgcctggatctccatatactgtggaggcgagcctgcctccagatccctcaaaagtgaaagcccacgggcctggccttgaagggggattagtcggcaagcccgctgagttcactattgacaccaaaggagcaggtacaggtggattagggctcaccgtggaagggccttgcgaagccaagattgagtgctctgataacggcgatggaacatgtagcgtctcctatctgcctaccaagcctggcgaatacttcgtgaatattttattcgaggaggtccacataccaggcagccccttcaaggcagatattgagatgccatttgatccttccaaagtggtcgccagcggtccagggctcgaacatggcaaagtcggggaggccggactcctctctgtcgactgtagcgaggccggacccggagccctggggttagaggccgtcagcgacagcggaaccaaagcggaggtcagcatccagaacaacaaagacggtacttatgctgttacctatgtcccgctcaccgctggaatgtacacacttacaatgaagtacggtggtgagctggtgccccatttccctgcccgtgttaaagtagaacctgctgttgacacctcaagaataaaagtgttcgggcctgggatcgaaggcaaggatgtgtttagagaggccacgacggattttaccgtcgatagcaggcctttgacccaagtcggtggagatcatatcaaagctcacatcgccaatccgtccggcgcatctacagagtgtttcgtgaccgataacgctgatggcacttatcaggtggagtatacaccattcgaaaaaggcctacatgtggtagaagtcacttacgacgacgtgccaatccccaactcaccttttaaagtggcggtgacagagggttgccaaccttcccgcgttcaggcccagggccctggcctgaaggaggcctttaccaacaaaccaaacgtcttcaccgttgtgactagaggtgctggcattgggggtctggggatcacagtcgagggcccttccgagtccaaaattaactgtcgagataacaaagatggcagttgctctgcggaatacatcccgttcgcccctggcgactacgacgtgaacattacctacggtggagcacacatacctggctcccctttccgcgtgcctgttaaagatgtggttgatcccagcaaagtcaagatcgccggtccgggtctgggatctggtgttcgtgccagagtcttgcagtcgttcaccgtggatagttccaaagccggactcgcccctctggaagtgagggtgttgggaccccgaggcttagtcgagccagtgaatgtcgttgataatggggacggaacccacacagtaacttacacgcctagccaagaaggcccttacatggtaagcgtgaagtacgctgacgaggaaatccccagatcacctttcaaagtgaaagttttaccgacttatgatgcaagtaaggtgacagcgagcggtcctggtttatcttcctacggggtaccagcctccctgccggttgacttcgccatcgacgcacgggatgctggcgaaggcctactggccgtgcagattaccgaccaagaaggtaaacctaaacgagcaatagtacatgataataaagatgggacttacgccgtgacctacatacccgataagactggtcggtatatgatcggcgtgacttatggaggggacgatatcccactcagcccttatcgtatcagagcaacacagacaggcgatgcctcaaagtgcctggccacaggacccggtatcgccagcactgtcaaaacaggtgaagaggtgggtttcgtcgtggacgcaaaaacggctggtaaggggaaagtgacctgcaccgttcttacacccgacggaaccgaggccgaagccgatgtgattgagaatgaagatggaacatacgatattttctacactgctgcgaagccgggaacctatgtcatctatgttagatttggaggtgtcgatatccctaactctccttttactgtgatggtaacagaggaggcatacgttcccgtctccgatatgaacggccttggcttcaagccattcgatctggttatccctttcgccgtgagaaagggtgagattaccggcgaggttcatatgccatcagggaagacagctacccctgagatcgtcgacaacaaagacggtaccgtgacagtccggtatgcccctacggaagtgggcctccacgaaatgcacataaagtatatgggctcccacattcctgaatccccactccagttctatgtgaactaccctaactccggctcagtttcagcttacggacccggactggtgtatggcgttgcgaacaaaactgctacttttactatcgtcaccgaggatgctggggagggtggcctggatctggcaattgaaggaccaagtaaggctgaaattagttgtatcgacaacaaagatgggacctgtacggtcacctacctgccgacactgcctggagactacagcatcctggtgaaatataatgataagcacattccaggaagcccattcaccgctaagattaccgatgacagccgcagatgctcccaagtcaaactgggctccgccgctgacttcctgctggatatctcagagacagatctatcatcgctcacggcttccatcaaagcacctagcgggagggatgagccgtgcctacttaagaggcttcccaacaatcatatcggtatttcttttatcccgagggaagtgggcgagcatctggtatcaattaagaaaaacggtaaccacgtggccaattccccggtctctatcatggtggttcagagcgagatcggggatgcccgacgggctaaggtctatgggcgagggctgagtgaggggagaaccttcgagatgagcgatttcatagtggatacaagggatgcaggctatgggggaatttccttggccgtggagggcccttccaaagtagatattcagacagaggacttggaggatggaacatgcaaggtgtcgtacttcccaaccgtgcccggagtgtacatagtttcaactaaattcgctgatgaacacgtcccgggtagtcctttcacagtgaaaatatccggggagggacgggttaaggaaagcataacacgcaccagcagggctcctagtgtggcaaccgtcggaagcatatgtgacttaaatctgaagattccagagatcaattcctctgacatgtctgcacatgtgacctcacccagcggacgcgttactgaagccgagattgttccgatgggaaaaaacagccactgcgttagatttgtgccccaggagatgggggtgcacaccgtttcggttaaataccggggtcagcatgtgactggttccccttttcaattcactgtcgggcctctgggggagggaggcgcacataaggtgcgagcaggtggccctggtttagaaagaggagaggccggagttcctgccgagttctctatctggacgagggaggccggtgcgggaggactgtccatagccgtggaaggcccatctaaagctgaaatcacctttgacgatcataagaatggcagctgcggggtctcttatatcgctcaggaacctgggaattacgaggtatcaatcaagttcaacgacgaacatatccctgagtccccttacctggtaccagtgatagccccttccgatgacgcaaggcggcttacggtcatgagtctgcaggagagcggactcaaggttaaccagccggctagtttcgctatacgcctcaacggcgcaaaggggaagattgacgctaaggtccactctccatctggagctgtcgaggagtgtcatgtttctgaattagagccggataagtacgcagtccgcttcatcccccatgaaaacggcgttcatacaatagacgtcaagttcaatggtagccacgtcgtgggaagtcccttcaaagttagagtcggcgaacccggtcaggccggaaaccccgcactggtgtcagcttatgggactggtctggaaggagggacaacaggtatccagagtgagttttttataaatactacaagagccggaccgggtaccctcagcgttacaattgaaggaccatctaaggtaaagatggactgccaagaaactccggagggctacaaggtcatgtatactcccatggccccaggcaattacctaatttccgtgaaatatggcggtccaaatcacatagtcggaagcccgttcaaagctaaggttacgggtcaacgccttgtgtctccaggaagcgctaatgagactagcagcatattggtggaatcagttactagatcctctacagagacttgttattctgccatcccaaaggcttcaagcgatgcttctaaagtgacctctaagggtgccggtctctctaaagcctttgtaggccagaagtctagtttcctggtcgattgcagcaaggccggaagcaacatgttgctcatcggggtgcacgggccaactacaccctgtgaggaggtgagcatgaagcacgtggggaaccagcagtacaacgttacctacgtggtgaaagagcgtggagactacgtcttagccgtgaaatggggagaagaacatatcccaggtagtccatttcatgtgacagtcccata

SEQ ID NO: 223347 - DNA, 7268 bp, synthetic construct
  misc_feature 1..7268: note = Description of Artificial Sequence: Synthetic coding sequence
  source 1..7268: mol_type = other DNA
atgcaggaacattccaccagaagaagatctctgtccctgtgtccagattgggaatcctgggacccacagaaaccggtagacaacgccagagaggccatgcaacaggctgatgattggctgggagttcctcaggtcatcacccccgaggagatcatccatcccgacgtcgacgagcacagtgtgatgacttatttatcacagtttcccaaagctaagctcaagcccggagctcctctgaagccaaaactgaatcccaaaaaggcacgagcatacggtcggggtattgagccgacggggaacatggtgaagcagcctgcgaaattcacagtagacactatatctgccggtcagggggacgttatggtatttgtggaagatcctgaaggcaacaaggaggaggcccaggtgacacccgactctgataagaataaaacatattcggttgagtatcttcccaaagtaactggtctccacaaagtcaccgtgctcttcgccggtcagcatatttcaaagtctcccttcgaagtcagtgtcgacaaagcgcagggcgatgcaagcaaagtgacagccaaaggcccaggactggaggccgtgggtaatatcgcaaacaagcctacatacttcgatatctataccgccggtgctggggtgggtgacatcggcgttgaagtggaggacccgcaggggaaaaacacagttgaactcttggtcgaggataaaggtaaccaggtctaccgttgtgtctacaagccgatgcagccgggtcctcacgtggtgaaaatcttttttgccggtgacacgattcctaaaagtccatttgtggtccaagttggagaggcttgcaaccctaacgcctgccgcgctagcgggcgtggcctgcagcctaaaggcgtaagaatcagggaaaccactgactttaaggtagatacgaaggccgcaggatccggagagctaggcgtcactatgaagggacctaagggccttgaagaacttgtcaaacagaaggattttctagacggagtgtatgcttttgagtattatccgagtacacccggacgctactccattgccatcacctggggcggacatcatatccccaaaagccccttcgaagtacaagttggtcctgaagccggaatgcagaaggttcgggcttggggacctgggctgcatggcggtattgtcgggcgaagtgctgatttcgtcgtggagagtatcggatccgaagtcgggtccttaggcttcgccatcgagggtccgtcccaggccaaaatcgaatacaatgatcaaaatgacggcagctgcgatgtcaagtattggcccaaagagcctggggagtacgctgtgcacatcatgtgcgatgacgaagatatcaaggactccccatacatggccttcatccatcctgccactgggggttacaatccagacttggtgcgcgcttacggccctggattagagaaaagcggttgcattgtgaacaatctggccgaatttaccgtggatccaaaggacgctggcaaagctccgctcaagatttttgcgcaggacggggagggccagcggatagacatacagatgaaaaaccgaatggacggaacgtatgcctgttcgtacacacccgttaaggcaattaagcacaccatcgctgtggtctggggtggcgtgaatatcccgcattctccctacagggttaacatcgggcaggggtcccacccacagaaggtcaaggtatttggaccaggcgtcgagaggagcggacttaaagcaaatgaacctacacactttaccgtggattgcacggaggccggtgagggtgatgtctctgttggcattaaatgtgatgcaagagtactgtcagaagacgaggaagatgtggatttcgatatcattcataatgctaatgataccttcaccgttaaatatgtgcccccagctgctggaagatatacaatcaaggttctctttgcatctcaggaaattcccgcttcgcccttccgggttaaggtggacccatcccacgacgcatcaaaagtgaaagcagaggggcctggtctgagtaaagccggtgtggaaaatggcaaacccacacactttactgtgtatacaaagggagctgggaaggctcctctgaatgtccagttcaattctcccctacctggcgacgcagtcaaagatctcgacataatagataactatgattactctcacaccgtgaagtatacacccacccagcaggggaacatgcaggtcttagtaacctacgggggagacccaattccgaaaagcccattcaccgtgggggttgctgcaccactggacctgtctaagattaaactaaatggcctcgagaatagagtcgaggttgggaaggaccaggagttcacagtggacacccgcggagctggcggacagggtaaactggacgtcaccatcttgtctccatccagaaaagtcgtaccctgcctggttactcccgtgactggcagggagaacagtaccgccaagttcattcctcgggaagaaggactgtacgcagtggatgtgacttatgatggtcacccagtgccgggatccccttatacagtcgaggcaagcctgccaccagacccttctaaagtgaaggcacacggcccaggactggagggagggttagttggcaagcccgctgagtttactatcgacacgaagggggcagggacgggcggtctaggattgacggttgaggggccatgcgaagccaagatcgaatgttccgataatggagatggcacgtgtagtgtttcttacctcccaacgaagcccggagaatactttgtcaatatcctgttcgaggaggtgcatataccagggtccccctttaaagccgatatcgagatgccctttgatcccagcaaggtggttgcatcgggcccaggtctcgaacatggcaaggtcggggaggccggactgctgtcagtcgattgtagtgaagccggaccaggcgctctcggcttagaggctgtgtctgatagcggtacaaaggcagaggttagtattcagaacaacaaggatgggacctacgcagtcacctacgttcccctgactgctggcatgtacacactgacgatgaagtacggcggtgaactcgtcccacattttccggctcgcgttaaggtggaaccagccgtcgataccagtaggattaaagttttcggccctggcatcgagggaaaggacgtattccgggaagcaactaccgacttcaccgtggattccaggccactgacgcaggtcggtggggatcatatcaaggctcacatcgctaacccatctggtgctagtacagagtgcttcgtcacagacaacgccgacggaacatatcaggtcgaatataccccattcgaaaaaggccttcatgtggtggaggtcacttacgatgacgtgcccatccctaattccccctttaaagtggcagtcacagaagggtgtcagccatccagggtgcaggcccagggacctggtctcaaagaggcctttaccaataagcccaatgtgtttaccgtagttacccggggagccggaattgggggactgggtatcacagtggaaggcccaagcgaatcaaagattaattgccgcgacaacaaagacgggtcatgttccgccgagtacataccttttgccccaggggattatgatgttaatatcacctatggcggagcccatatccccggttccccttttcgggtacccgttaaggacgtggtggatccttctaaagtgaagatcgctggacccggattaggtagcggcgtccgggcaagagtactccagtcattcacagtcgacagtagcaaggccggactggcccctctggaagtccgcgtgctgggaccccgtggactggttgagcccgttaatgtggtggataatggcgacgggacacacaccgttacatatacgccatcacaggagggaccctatatggtttctgtgaaatacgccgacgaagaaataccaagatcccccttcaaggttaaggtcctccccacgtatgacgcatctaaggtcactgccagcggacctggcttgtcttcatatggagtcccagcctccctgccagtggacttcgcgattgacgcccgagacgctggggagggactcctggccgtgcagatcaccgatcaggagggcaagccaaaaagggcaatagttcatgataataaagatggaacgtacgctgttacatacatcccggataaaaccggcaggtatatgatcggagttacttacggcggagatgatataccactatccccctatagaattcgggctactcagactggcgacgcctctaaatgcctggctaccggaccagggattgcctcaacagtgaagacaggagaagaagtggggtttgtagtggacgctaaaactgccggaaaagggaaagtgacgtgcaccgtactaactcctgacggcacagaggccgaagccgatgtgattgaaaacgaagatggcacatatgatatcttttatacagccgctaaaccaggaacatacgtgatatatgtgcgatttgggggagtggacattccaaatagtcctttcactgtgatggcaacagatggggaggtgacggccgtcgaagaggcacccgtgactgaggaagcctacgtccccgtgagtgatatgaatggcttgggcttcaagccctttgaccttgtcatcccatttgccgtacggaagggggaaatcacgggcgaggtgcatatgccatctggtaagacagcaacacctgaaatcgtcgacaacaaagatggtacagtaacagttcgatacgcccctaccgaggttggtcttcacgaaatgcacataaagtatatgggctcacacatccccgagtctccactgcagttttacgttaattacccaaactctgggagcgtatccgcgtatggacccggactggtgtacggggtggccaataaaacagccacgtttactatagtcactgaggatgccggtgaagggggacttgacctggccatcgaaggacctagcaaagccgaaattagttgcatcgataacaaggatggtacttgcaccgtgacttacctccccacgttgcctggagactactctattttggtgaaatacaatgacaagcacatccccggatctccatttaccgccaagatcactgatgatagcagacgttgttctcaggttaagctgggaagcgccgcagattttctgttggacattagtgaaactgatctgtctagtctcacggcctcaattaaagcccctagtggcagggatgagccttgtctgttaaaaagactccccaacaatcacattggcatatcatttattcccagagaggtgggcgagcatctcgtttccatcaaaaaaaatggaaatcacgttgccaacagccccgtctccataatggtcgtccaaagcgaaataggagacgcacgcagggccaaggtatacgggcgtggattatctgaggggagaacctttgaaatgtcggacttcatcgtagatactcgcgatgccggttacggaggaattagcctggcggtcgaagggccatccaaggtggacatccagacagaagatctcgaagatggtacgtgtaaggtaagctattttcctacggtgccaggtgtttacattgtgagcactaagttcgccgacgagcacgttcctgggtcaccatttacagtcaaaattagcggagaaggcagagtgaaagaatccatcacgaggacaagccgagctccgtcggtggccactgtgggctctatttgtgacctcaatctcaagatccccgagattaactcaagtgacatgtcagctcacgtgacaagccccagtggtcgcgttacagaagcagagattgttcctatggggaaaaactcccattgcgtgcggtttgtgcctcaggaaatgggggtccatacagtgagtgtcaagtatcgaggacagcatgtcacgggcagcccctttcagttcacagtggggcctctgggggaaggcggtgcccacaaagtcagggccggaggaccgggtcttgagaggggagaggccggagtcccagctgagttttccatctggacgcgcgaggccggtgcaggaggattgagcatcgcagtagaaggtccaagcaaagcagagatcacgttcgacgaccacaaaaatggatcatgcggagtctcatacatcgcgcaggagcccggaaactacgaagtgtccataaaattcaacgacgaacacatccccgagtcaccttacctcgtccccgtgatcgctccctcagacgatgctaggcgactgaccgtgatgtccctgcaggaaagcggactgaaagtgaaccagccagcctcttttgcaattcgcctgaacggggcaaaaggtaaaatagacgcgaaggtccattcaccaagcggcgctgtggaggagtgtcacgtatcagaactcgagcctgacaaatatgctgtccgtttcatcccccatgagaacggagtgcacaccatcgatgtcaagttcaatggcagccacgtagtgggttcacccttcaaagtaagagtgggggagcccggtcaggccggaaaccctgcattggtgtctgcttacggaacgggcctagaagggggaacaactggaatacaaagcgaatttttcataaacaccaccagggctggacccggtacactaagtgtcacgatcgaaggaccatcgaaagtcaagatggattgccaggaaacacctgaaggctataaggtgatgtatacccccatggcccctgggaattacctcatctctgtcaaatacggcggacctaatcacatcgttggaagcccctttaaggcgaaggttacaggccagaggttggtctcgcccggtagcgccaatgagacatccagcattctcgtggagagtgttacacggtccagtaccgaaacttgctattctgccatacctaaagcctccagtgatgcaagcaaggtgacaagcaagggtgctggattgtccaaagcgtttgtaggacaaaagtcttcctttttagtggactgtagcaaggccggtagcaatatgttgttgataggcgtgcacggacctacgaccccttgcgaggaggtgagcatgaagcacgtcgggaaccagcagtacaatgttacatacgtcgtcaaagagcgaggggactacgttcttgccgtaaagtggggagaggagcatatccccggaagtccatttcatgtcaccgttcctta

SEQ ID NO: 223348 - DNA, 7775 bp, synthetic construct
  misc_feature 1..7775: note = Description of Artificial Sequence: Synthetic coding sequence
  source 1..7775: mol_type = other DNA
atgcctgtaacagagaaagacttggcggaggacgccccttggaagaaaatccaacaaaatacattcaccagatggtgtaatgaacatttaaagtgcgtgaacaaaagaatcggaaacttgcagacggacctgtctgacggcttgcggctcatcgcactcctggaggtgctcagccagaagaggatgtacagaaagtaccatcagcgtcctacatttcggcagatgcagctcgaaaatgtgtctgtagcgctggagtttctcgacagggaatccataaaactggtgtccatcgatagcaaggcaatagtggatggcaacctgaagctgattctggggttagtttggacgttgatacttcactattccatcagcatgcctgtatgggaggatgaaggtgatgatgacgcaaagaagcagacgcctaagcagcggctgctcggatggatacagaataagattccctatctgcctataacaaacttcaaccaaaactggcaagatggcaaagcccttggtgcactggttgattcatgcgcacccggtctctgccctgattgggagtcttgggaccctcagaagcccgtggataacgccagagaggcaatgcagcaagcagacgattggctcggcgtgcctcaggttatcacacctgaagagatcatacacccagatgtggacgagcattctgtgatgacttatttaagccagtttccaaaagccaaactgaagcccggagcgccactgaagcccaaactgaatccgaaaaaagcaagagcctacggcagaggcatagagcccaccggcaatatggtgaagcaacccgcaaaatttactgtggatacaatcagcgcaggtcaaggcgacgtcatggttttcgtcgaagaccctgagggcaacaaggaagaagcgcaggtcacccctgactctgataagaacaagacttactcggtagagtatttgcctaaagtgacagggctgcacaaggtcaccgtgctctttgccggacagcacatttcaaaatcaccattcgaggtatcagtcgataaggctcagggtgacgcctccaaggtcaccgccaagggacccggtctggaggcagtggggaacattgccaacaaacctacgtatttcgacatatatacagcgggagccggtgtgggggatataggggtggaggtggaggacccacaggggaaaaataccgtcgaactgctggtggaagataaggggaatcaagtgtatcgctgcgtttacaagcctatgcagccagggccacacgtagttaagattttctttgcgggagatactataccaaagtctccattcgtggtccaggtcggtgaggcctgtaatccaaacgcatgccgtgcctctggccgtggactgcagcctaagggggtgcggatccgcgaaactactgatttcaaagtagacacaaaagcagctggatctggcgaattgggggtgaccatgaaggggccaaagggcctcgaagagttggtgaaacagaaggacttcctggatggagtgtatgcgtttgagtattacccaagcactccgggtagatactctattgccattacttggggcggacaccacatccccaagtctccctttgaggtccaagtcggccctgaggccggtatgcagaaagtgcgagcttggggcccaggtttgcacggtgggatagttggtcggtcagcggactttgttgtggaatcgattggctccgaggtgggtagcctgggattcgctatcgaaggtccatcccaggccaagatcgagtacaatgaccaaaatgacggatcctgcgatgtaaagtactggccaaaggaacccggtgagtatgctgtccacatcatgtgcgacgatgaggacattaaagattccccttacatggcttttatacatcctgctacaggcggatataaccccgacctggtccgcgcttacggaccaggcctggaaaaatctggatgtatcgtgaataacttggccgagttcactgtagacccgaaggatgcaggcaaagctccattgaagatcttcgcccaggacggcgaaggtcaacggatcgacattcagatgaagaatcggatggacggtacgtacgcttgtagttataccccggtgaaggccatcaaacacactattgctgtggtctggggaggtgtcaacatcccgcatagcccttatagagtaaacatcggccagggctctcatccacagaaagtgaaggtgtttggtccaggtgtagaaaggagtggactcaaggccaatgagcctacacacttcaccgttgattgcacagaggctggagagggagacgtcagcgttggaattaagtgcgacgcacgggtgttgagcgaggacgaggaagatgtggactttgacattatccataacgcaaatgacacctttaccgtcaagtacgtcccccctgcagccggaagatatactataaaggtgttatttgcatcccaggaaatcccagcctcacctttccgggtgaaggtcgacccatcccatgacgctagcaaggttaaggctgaaggccctggcttgagcaaagctggagtcgagaatgggaaacctacccactttacagtctataccaagggagccggtaaagccccactcaacgtgcagtttaacagcccgctgccaggcgatgcagtaaaggacttagacataatagacaattatgactactctcacaccgtgaaatatacacccacacagcagggcaacatgcaggttttagttacatacgggggagatcctatacctaagtcacccttcaccgtcggggtcgccgcaccgcttgatttgagcaaaatcaaactgaatggcctggaaaatagggtggaagtcgggaaggaccaggaatttactgtcgataccagaggggcaggcggtcaggggaaacttgatgtgaccattctgtcaccaagcagaaaagtcgtgccatgtttagtaacacctgtgactgggagagaaaatagcacagccaagttcattcccagggaggagggcctctacgccgtggacgtgacatatgacggccacccggtgccgggtagcccttatacagttgaggcctcgctgcccccagacccaagtaaggttaaggcccacggtcccggactggaaggaggcctcgtcggtaagcccgcagagttcactattgataccaagggcgcaggtacaggcggtcttgggctcacggtagaaggcccttgcgaagccaagatcgaatgttctgataatggtgacggcacatgttccgtgagctatctgcccaccaaacccggtgagtattttgtgaacatcctatttgaggaagtgcacatacccggaagcccgttcaaggccgatattgagatgccctttgatccttcaaaggtagtggcctctggacccggtctggagcacggaaaagtgggagaagcgggattgctgagtgtagattgtagtgaggccggacccggtgctctcgggctcgaggctgtgtctgattcaggaacaaaagcggaggtgtcgatacagaataataaggatggaacatacgccgttacctacgtaccccttacggcaggcatgtacactttgacgatgaaatatgggggtgaacttgtgcctcacttcccggcacgagttaaggtggagccagccgttgacacatcacggatcaaggtctttggtcctggaatcgagggaaaagacgtgtttagagaagccacaacagactttacagtggacagccggcctctgactcaggtcgggggtgaccatatcaaggcccacattgccaacccttccggggcttcaacagaatgctttgtaacggacaatgccgacggaacttatcaagtagagtataccccgttcgagaaggggttgcacgtggttgaagtcacttatgatgacgtaccaatacccaattcgccctttaaggtcgccgtgaccgaagggtgtcaaccctccagagtacaagcacagggtcctgggctgaaggaggcattcactaacaagcctaacgtgttcactgtcgtgacaagaggcgcaggaataggaggcttagggatcacagtggagggaccttccgagagcaaaataaattgtcgggataataaggatggcagttgctcagcagagtacatcccgtttgcccctggcgattacgatgttaacataacttacggtggcgctcacataccgggaagtccatttcgggtgcctgtgaaggacgtagtggatccgtccaaagttaagatagcgggacctggcctcggttccggggttcgggctcgggtccttcagtcttttaccgtggatagcagcaaggcaggactagcccctcttgaggtgcgcgtgctagggcctcgaggtttagtcgagccagtgaatgtcgtggataatggggatggcacacatacggtgacttatacaccaagccaggaaggaccctatatggtttcagtaaagtacgccgatgaagagataccacgatcccccttcaaagttaaagtgttgccaacatatgacgccagcaaagtcacagcctcaggaccaggactgagttcctacggcgtgcccgcatcactcccagtggactttgctatagacgccagagatgcaggcgaggggctgctggccgttcagattactgatcaagagggcaaacccaaacgcgcaatcgtacacgacaacaaggacggaacctatgccgtgacctacatccctgacaaaaccggacgttacatgattggcgtaacatacggcggagatgacattcccctgtctccctacagaatccgtgctactcagaccggggacgcctccaagtgtcttgcaacaggacctggaattgccagtaccgtcaaaaccggtgaggaagtgggcttcgtggtagacgccaagactgcaggcaagggtaaggtcacctgtactgtccttacacccgacggaaccgaggcagaggccgacgtcattgagaatgaggatggtacctatgacattttctacactgccgctaagcccggtacttatgtgatttacgtgcggttcggtggagtggacatccctaatagcccttttaccgtgatggcgacagatggggaagtcacagctgtagaagaggcccctgtgaccgaagaagcatacgtgcccgtgagcgatatgaatgggctagggtttaaacctttcgacctggttattccttttgcagtgaggaagggtgaaatcaccggggaagttcatatgccgtcaggcaagacagcaacccctgaaatcgtcgacaacaaggacgggaccgtcactgtccgctatgcacctacagaagtaggcctccacgagatgcacattaagtatatgggcagccatattcccgagtcacccctgcagttctatgtcaactatcccaactcaggctccgtgagcgcctacggtcctggactggtctacggcgttgctaacaagactgcaacattcacaatcgtgactgaggacgcaggtgagggcggtttggatctcgccatcgaagggccttcaaaggccgagatctcttgtattgataataaggacggaacgtgtacagtaacctatctacccacactgcctggtgactatagcatcttagtgaagtacaatgacaagcatatcccaggatccccctttactgcgaagatcacagatgatagccgtcgctgctcccaggtgaagttgggtagtgccgctgattttcttttggatatatcagaaactgacctgtcttcgctgacagcctctattaaagctccatccggacgcgatgaaccatgtttactaaaacgtctcccaaacaaccatattggaatctcatttatacccagagaggtaggtgagcacctggtgtctatcaaaaagaatggaaaccatgtggccaactccccagtgagtatcatggtcgtgcaatcggagatcggcgacgccagaagggctaaagtctacggtaggggcctatctgagggtcggacatttgaaatgagtgatttcattgtggacacgcgagatgcgggatacggaggaatttcactagcggtagaggggccttctaaagtggatatacagactgaggacctggaggatggtacatgtaaggtgtcctattttcccacggtccccggtgtgtatatagtgagtaccaagttcgcagacgagcatgttccgggatccccgtttacagtcaaaatctctggggaaggacgtgttaaggaaagcataactcgcaccagtcgtgcccctagtgtggcgaccgtcggctccatttgtgatctgaacttgaagataccagaaataaattcaagtgacatgagtgctcacgtcactagcccatccgggagagtgacagaggctgagattgtgccaatggggaagaactcccactgcgtccggtttgtcccccaagaaatgggcgtgcacacggtgagcgtcaaataccggggtcagcatgtgaccgggagtccattccagttcactgttggaccactgggtgaaggtggcgcacacaaagtcagggccggtggtcctggtcttgaacgcggagaagccggagtgccagccgagttctccatctggaccagagaggccggagcagggggactgtccatcgctgttgaaggcccatccaaagccgagataactttcgacgatcacaaaaacggaagctgcggggtgagctacattgctcaggaacctggcaattatgaagtttctataaagtttaacgatgagcacattccagagtcaccctacctggtgcccgtaatagccccatccgacgacgcacgaaggctcactgtgatgagcctccaggagagcgggctcaaagttaaccagccggcttcattcgctattcgcctaaacggcgcaaaaggtaaaatagacgccaaagtacattcacccagcggagccgtcgaggagtgccatgtcagtgaactggagcccgacaaatacgccgtgagatttataccccatgagaatggagttcataccatagacgtcaagtttaacggctcacatgttgtggggtcaccgttcaaagttagggtgggggagcccggacaggctgggaatcccgctttagttagtgcctacggaacaggtttagaggggggtactacaggtattcagagtgagttttttattaatacaacacgcgctggaccgggaaccctgagcgttactattgagggtccttcaaaagtgaaaatggattgccaagagaccccagaagggtacaaggtgatgtacactcccatggccccaggaaactatctcatatctgttaaatacggcggtcccaatcatattgtggggtcgcctttcaaggcgaaggttacagggcagcgtttggtgtcaccagggtcggctaatgaaacgtctagcatcttagtggagtccgtgactagatcaagcaccgagacatgctatagcgctataccaaaagcttcatccgacgcttcaaaggtgacaagtaaaggagccggactaagcaaggccttcgtgggccagaaatccagcttcctggtggattgctccaaggcgggatcaaatatgctgttaattggcgtacacggtccaacaaccccctgcgaagaggtgtccatgaaacatgtaggcaaccaacagtacaatgtgacatacgtggtcaaagagcgtggagactacgttctcgcagtgaagtggggggaagaacatattcccggtagtccgtttcacgtgacagtacccta

SEQ ID NO: 223349 - DNA, 408 bp, synthetic construct
  misc_feature 1..408: note = Description of Artificial Sequence: Synthetic coding sequence
  source 1..408: mol_type = other DNA
taactggctgtagaaggtcccagcaaagtggacatccagactgaagacttggaggatggaacctgtaaggtgtcgtacttccccacggttcctggagtctatattgttagcaccaagtttgccgatgagcacgtgcctgagatcaatagttctgatatgagcgcgcacgtaacatcacctagtggacgggtgacagaggcagaaatcgtcccaatgggcaaaaactcccattgtgtgcggttcgtgccacaggagatgggggtgcacaccgtgagtgtgaaatatcggggtcagcacgtcactggaagcccatttcagttcaccgtaggcccactgggggaaggaggcgctcacaaggtacgagcagggggtcctggcctggagcggggagaagccggagtgccatag

SEQ ID NO: 223350 - DNA, 7901 bp, synthetic construct
  misc_feature 1..7901: note = Description of Artificial Sequence: Synthetic coding sequence
  source 1..7901: mol_type = other DNA
atgcccgtgactgagaaagatctcgcagaggatgcgccatggaagaagattcagcagaacacatttacacggtggtgtaatgagcacctaaaatgcgttaacaaacgcattggaaatctgcagactgatctgagtgatgggctgaggctcatcgcgcttctggaagtgttgtctcagaagcgcatgtaccggaagtatcatcaaagaccaacttttaggcaaatgcagctagaaaatgtcagcgtggcccttgaatttcttgatcgggaatcaattaagctcgtgtccatcgacagtaaggctattgtggacggcaacttgaaactcatcttgggactggtttggacactgatcctccactattctatctcaatgccagtgtgggaggatgagggcgacgatgacgccaaaaagcagacacctaagcagcgacttttaggctggatccagaacaagatcccatacctccctatcactaacttcaaccagaactggcaggacggtaaggcacttggagccctcgtggatagctgcgcgcctggattgtgccccgactgggaatcctgggacccccagaagccagtggataatgctcgggaagccatgcaacaggcggatgattggctcggggtgcctcaggtgataactcccgaggagattatccatccggacgtagacgagcactcagttatgacgtacctcagccaattccctaaagccaagcttaaaccgggtgcaccactgaaacccaagctaaatcccaagaaggcaagggcctatggtcgcggaatcgagcctactggtaatatggttaaacagcccgcaaaatttacagtggacactatttctgctggtcaaggcgatgtcatggtgtttgtggaggaccctgagggaaataaagaagaggcccaggtcacaccggatagtgataagaataaaacctacagcgtggagtacttacccaaggtgacaggcttgcacaaggtcactgtgctcttcgccggacaacatatctcaaagtctccttttgaggtgtcagtggataaggctcagggggatgcgagtaaggttactgctaagggcccagggctcgaagccgtgggcaacatcgccaacaagcccacctactttgatatctataccgccggtgcgggtgtaggtgacatcggcgtggaagtcgaagatccacaggggaagaataccgtcgagcttttggtagaagacaaaggcaaccaggtgtaccgatgcgtatacaagcctatgcagcctgggccacacgttgtaaagatatttttcgccggagataccattcccaagtccccctttgtggtccaggtgggcgaggcttgcaatcccaatgcttgccgggctagcgggaggggactccaacctaagggagtacggatacgagagactacagacttcaaggtcgacaccaaagcagctggctccggcgagctcggtgttacaatgaagggacctaagggtttggaagagttggtcaagcagaaagatttccttgacggggtatacgctttcgagtactaccctagtaccccagggaggtacagcatcgccattacatggggcggacaccacatccccaagtcaccattcgaagtccaggtcgggccagaggccggaatgcagaaggtgagagcttggggtccagggctgcacggagggatcgtgggacgaagcgcggacttcgttgttgagagcattggtagcgaagtgggctcccttggatttgctatagaaggccctagtcaggctaagatcgagtataatgaccagaacgatggctcttgtgatgtgaaatactggccaaaagaaccaggcgagtacgctgttcacattatgtgtgatgacgaagacatcaaggactccccttatatggcatttatccatcccgctactggcggttacaaccctgacctggtacgcgcatacggtcctggactagaaaaaagtggatgtatcgtgaacaacttagcagagttcaccgtcgacccgaaggatgccggtaaggcccctctcaagattttcgcccaggacggtgaagggcaaaggatagatattcagatgaagaaccgcatggacggtacctacgcctgttcgtatacaccagtgaaggccatcaagcatacgatcgctgtggtatgggggggagtaaatatccctcacagcccttaccgcgtgaatatcgggcagggctctcacccacagaaagtcaaggtgttcggtccaggcgttgagagaagtggtctgaaggcaaatgagccaactcacttcaccgttgactgtaccgaggcaggcgagggtgacgtctccgtcggtatcaagtgcgatgcgagggtgttatccgaggatgaggaagacgtggacttcgatatcatccacaatgccaacgacacattcaccgtcaagtatgtccctcctgccgcaggccgatacaccatcaaggttctctttgcttcccaggaaattcctgcttctcctttccgcgtgaaagtggatccttctcacgatgccagcaaggtgaaagcagaggggcctggtctgagtaaggcaggagtcgaaaacggcaaacccacccacttcaccgtctacacaaagggggctggcaaagcccctctcaatgtccagtttaattctccattgcctggagatgctgtgaaggacctcgatattattgacaactacgactacagtcacaccgtaaagtacacgcccacacaacagggaaatatgcaggtcttagtaacttacggaggagacccgatccctaaaagccccttcaccgtgggagttgccgcacctctggacctctccaagattaagctgaacgggctggagaatcgtgtagaagtgggcaaagatcaggagttcacggtggacacaagaggggctggtggccagggaaagctggacgtaactatcctttcaccctcccgtaaagttgtcccgtgcttggtgacccctgttaccggcagggagaacagcacagccaagttcatccccagggaagaaggcctctacgccgtggatgtcacatacgacggacatccggtgcccggatctccttacaccgtggaagcaagcttgccacccgaccctagcaaagtgaaggcccacggaccagggctggaaggtggcctggtaggaaaacctgctgaattcacaatagacaccaagggggctggcacaggaggacttggactgactgtggagggcccatgcgaggccaaaattgaatgttccgacaatggggatggcacctgttctgtttcttatctacctactaagcccggagaatactttgtcaatatcctgttcgaggaggtgcacatccctggctccccttttaaggcagacatcgagatgccctttgacccttctaaggtcgtggcaagcggcccaggtctggagcacggcaaggtgggagaagcaggactgctgtctgtcgactgctccgaggccggtcctggcgctctggggttggaagcagtttccgattccggcactaaggcagaggtgagcattcagaataacaaggatggcacatacgctgtgacctacgtccctctgactgccggaatgtatacgctgacaatgaagtacgggggagaactggtgccgcacttccccgcacgggtcaaggtcgaaccagccgtggatactagtaggatcaaggtgtttggtccgggaattgagggcaaggatgtcttcagggaagcgaccacagattttaccgtcgattctaggccactgacccaggtgggaggggatcatatcaaggcccacattgccaatccatcaggcgcaagtaccgaatgttttgtgacagacaatgcggacggcacttatcaagtggagtacacaccgttcgagaaaggcttgcacgtcgtggaggtgacatacgacgatgtgcccattcctaacagcccgtttaaagtggccgtcacggaaggatgccaacccagccgcgtgcaggctcagggccctggcctgaaggaagccttcactaataaacccaatgtcttcacggtggtgactcgtggggctggcatcggtggcctcggaattacggtggaaggtccatctgagtccaagattaactgccgggataacaaggacggaagttgttcagcagaatatattcctttcgctcctggagactatgacgtcaatatcacttacggcggagcccatatcccaggctccccttttagggtgccagtcaaagacgtggtggaccccagtaaagttaagatcgctgggcctggcctgggctccggagtacgcgcaagagtcctgcagtctttcacggtggacagctcaaaagccggactcgcgcctctggaagttagagttctggggcctcgtgcagacgatacagacagccagtcatggcggtcccccctgaaagcactgtccgagttttttaaaggggacccaaagggagatttcaataagacagggctggtggagccagtcaatgtggtcgacaatggggatgggacccacacagtgacctatacaccatcccaggagggtccttacatggtctccgtcaaatatgctgatgaggagatcccgaggtctcctttcaaagtgaaagtgctccctacgtacgacgccagcaaagtcacggctagtggaccaggactgagcagttacggggtccccgcttccctgccagtagacttcgcgattgacgctagggacgcgggagaaggtctgctcgcagttcagattacagatcaggaagggaaacccaaacgggcaatcgtgcatgataataaggacggtacatacgcagtcacatacatccctgacaaaactgggagatatatgatcggcgtgacatacgggggagatgacatcccactctccccttataggatacgcgcaacccagaccggtgatgcttctaagtgcctagctaccgggccagggatcgcgtctacagtcaagacaggcgaggaggtcgggtttgtcgtcgacgccaaaacagcgggaaaaggaaaagttacctgcacagttctcacccccgacgggaccgaggcagaggccgacgtgatcgagaatgaggacggtacctatgacatcttttacaccgcggcaaaacctgggacttacgtgatctacgtacgcttcgggggagtagacatccccaacagccccttcactgttatggccaccgatggggaagttacggccgtcgaagaggcccctgtcaacgcctgccctcccggattcaggccatgggtgaccgaggaggcctacgtgcccgtgtctgatatgaatggtttagggtttaagccattcgatctggtcatcccattcgctgtccggaagggcgagataactggcgaagtccacatgccctctggcaaaacagctactccagagattgtagataacaaagatggtaccgtgaccgtgcgttatgccccaactgaagtaggcctccacgaaatgcacatcaagtatatgggcagccatatacccgaatccccattgcagttctatgtgaactacccaaattctggaagcgtcagtgcatacgggccaggactcgtgtatggtgtcgcgaacaaaactgctaccttcaccatcgtgactgaagatgctggggaaggcggactcgacttagccatcgaaggtccctccaaggccgagatctcttgcatagacaacaaggacggtacttgcacagtgacatatttaccaaccctgcctggagattactccatcctggtgaaatataatgataagcacatcccaggttctcccttcaccgctaagattactgacgattcccgcagatgttcccaggtcaaactcggttccgctgctgactttttactggatatctcagagaccgacctgtcgagcctgactgcatccattaaagcaccctctggtagagacgagccctgtctgcttaaacgtttgcccaataatcatattgggattagctttattcctcgcgaggtcggagagcatctagtatcgatcaaaaaaaacggcaaccacgttgcaaactccccggtttcaataatggtcgtccagtccgaaatcggtgatgccagaagagccaaagtgtatggtcgcggactgagcgagggtaggacgttcgagatgagtgactttatcgtagatacccgagatgccggatatggtggcatcagcctggccgtcgaaggcccaagtaaagttgatattcagaccgaagacttggaagacggcacatgcaaggtctcttacttccctactgttccgggtgtgtacatcgtctcgacaaaatttgcagatgagcatgtgcccggatcaccattcacagtcaagatttcaggtgaaggtcgagtaaaggaaagcataacacggacgagtcgggctccatcagtggctaccgtcggcagtatttgtgatctgaacctgaaaatacctgaaatcaattcgagcgacatgtccgcacacgtgaccagtccgagcggccgtgttaccgaggcagagatagttccgatgggcaagaactcccactgtgttcgattcgtaccgcaggaaatgggagtccacacagtttccgtcaagtaccgcggacagcacgttaccgggagccccttccagtttactgtgggacctctgggtgaaggaggcgctcacaaagtcagggccggaggacctggcctggagcgaggggaagccggtgtgcctgctgagttcagtatttggactagagaagctggagcaggcggactgtcaatcgctgtcgaaggccctagcaaagccgaaattacatttgatgaccataagaatggatcttgcggagtatcctacatagctcaagagcctggaaactacgaagtgtctattaagtttaatgatgagcacatccctgaatccccgtacctggtaccggtgatagcaccctcggatgatgctagaaggctcacagttatgtctcttcaggaaagtgggctgaaagttaaccagccagcatcgtttgctattagactaaacggtgctaaggggaaaatagatgccaaggtgcactccccttccggcgctgtggaggagtgccatgtgtccgagcttgaacccgacaagtacgcagtcagattcattccccatgagaatggtgtacacacgatcgacgtgaaatttaatggcagccatgtcgtgggctcccccttcaaggtgagggttggagaacccggtcaggctggcaaccccgcactggtgtctgcctatggaactggcctggagggcggaaccactgggatccagagcgaattcttcattaatactaccagggccggacctggtaccctctcagtgacgattgagggcccatcaaaggtgaaaatggactgccaggagacaccagagggatataaggtgatgtacactcctatggctcctggaaactacctcatatctgttaaatacggtggcccaaaccacatcgtggggagcccgttcaaggcgaaagttaccggccaacgtcttgtatcgccagggagtgctaacgagacctcctccatcctggtcgaaagtgttaccagatcaagtaccgaaacatgttactccgctattcctaaagcttcttctgacgcgtcaaaggtgacatcaaaaggtgccggactctctaaggccttcgttggacagaagtcctcattcctggtcgactgtagtaaagcaggctccaacatgcttctgattggcgtccacgggcctaccactccgtgcgaggaggtcagcatgaaacatgttgggaatcagcagtacaacgtgacatatgtagtaaaggagaggggcgattatgtgctggcggttaaatggggagaggagcatattccgggaagcccatttcacgtcaccgttcccta

SEQ ID NO: 223351 - DNA, 8177 bp, synthetic construct
  misc_feature 1..8177: note = Description of Artificial Sequence: Synthetic coding sequence
  source 1..8177: mol_type = other DNA
atgatgaataattctggatatagcgatgccggattggggttgggcgacgaaaccgacgagatgccatctactgagaaggacttggccgaggatgcgccttggaaaaagatccaacagaacacatttactagatggtgcaacgaacacctcaagtgtgtaggaaaaaggcttaccgatcttcaaagagacctatcagatgggcttcggctgattgcgttgctcgaggtcctgtcccagaaaagaatgtatagaaaatttcaccccaggcctaattttcgccagatgaaactcgaaaacgtgtccgtcgctctggaattccttgagagggagcatattaaactggtaagtatcgattccaaggcaatagttgatggtaacctgaaacttatcctgggactaatatggaccctgatcctccattactctatctctatgcctatgtgggaggatgaagatgatgaagacgcgagaaagcagacgcccaagcagcggttacttggctggatccaaaacaaagtcccacagctccctattaccaatttcaatcgggattggcaagacgggaaggcgctaggggcactggttgacaattgcgctcccggattgtgccccgattgggaagcatgggacccgaaccagcctgtagaaaacgcacgtgaggctatgcagcaggctgatgactggttaggtgttccccaagtgattgcacctgaagaaattgtcgacccgaacgtggatgaacacagcgtcatgacgtacctaagtcagtttcctaaagccaagctgaagcccggagcaccggtacgatcgaagcagttgaatcccaaaaaagccatcgcttatggtcccggtatcgagccccaaggaaacactgtcttgcagcccgctcatttcactgtgcagacagtcgatgccggagttggggaagttctggtgtacatcgaggacccagaaggacatacggaggaggctaaggtggtgcctaataatgacaaagaccgcacctatgccgtcagttacgtgccaaaggtagctggactgcataaagtaaccgtactgttcgccggacagaatatcgagcgatcgccattcgaggttaacgtgggcatggcgctgggagatgcaaacaaggtttccgctcggggtcctggcctagagccggtcggcaacgtagcaaataaacccacatacttcgatatctatacagccggagccggaactggagatgttgcggttgtcattgtggatccccagggacgcagagacaccgtcgaagtcgcgctcgaagataaaggtgactctacgttccggtgcacctatcgtccagccatggagggtccccacactgtgcatgttgcctttgcgggagctcctatcacccgcagcccatttccggtgcacgtctcagaagcttgcaaccctaatgcttgccgcgcaagtggacggggtcttcagcccaagggcgtgcgcgtgaaggaggtagccgactttaaagttttcacgaaaggtgccggaagcggggagttgaaggtgactgtgaaggggccaaaggggaccgaagagccagtaaaggttagagaggccggagacggggtattcgagtgtgaatactaccctgtggtgccagggaagtatgtagtgacaataacttggggtggctatgccatcccaaggtcaccttttgaggttcaggtgtcacccgaagccggagtacagaaggtgcgcgcatggggcccaggtctcgagaccggccaggtgggcaagtcagccgactttgtagttgaagccattggaacagaggtaggcaccctcggattttcaattgaaggcccatcgcaggctaaaatcgaatgtgatgataagggcgacggatcctgcgatgtgaggtactggcctacagaacctggggagtacgccgtgcatgtgatctgcgacgacgaggatatccgggactctcctttcattgcccacattttaccagctccgccagattgtttccctgataaggtgaaggcgttcggcccagggctggagcccacaggctgcattgtggacaaacccgctgaatttacgattgatgcacgagctgctggcaaaggtgacctgaagttatacgcccaggatgctgacggatgccctatcgatatcaaagtcataccaaatggggacgggacattccgctgctcctatgtgcccaccaaaccgatcaagcatactattatcatctcatggggaggagtgaatgtgcctaagtccccgttccgggtgaatgtaggtgaaggctctcaccctgaacgtgtgaaggtctatggcccaggagttgagaaaaccggactgaaagctaacgagcctacttacttcacagttgattgctcagaggccggacagggcgacgtatccataggaattaagtgtgcacctggagtcgtgggaccggcagaggctgacatcgatttcgatataatcaagaatgacaacgacacattcactgtgaagtacacacctcctggtgccggaagatacacaatcatggtgctgtttgcaaatcaggagattcctgccagtcctttccacattaaggtcgatccgtcccatgatgcgagcaaagtcaaggctgaaggaccaggcttgaatcgaaccggggttgaagtcggaaaacctacacactttaccgtactgactaaaggagcaggaaaggccaaattagacgtgcagtttgcgggtaccgctaagggggaagtcgttagggatttcgaaatcatagacaaccatgactactcttacaccgttaaatataccgccgtgcagcaggggaacatggccgtgactgtaacatacggcggagatcccgtgccaaagagtccgttcgtggtcaatgttgccccacccctagatctctcaaagatcaaggttcagggactaaatagtaaagtggccgtgggacaagagcaggccttcagcgtgaatactaggggagctgggggtcagggacaattggacgttagaatgacaagtccctcaagacgcccaatcccgtgtaaactggagcctggcggaggggctgaagctcaggccgttagatacatgccacctgaggaaggaccctacaaggtggatataacgtacgacggacaccccgtcccgggtagccctttcgcggtggagggggttctccccccagatccgagcaaagtttgcgcctatgggccagggctgaaaggtggcttagtgggaacgcccgcaccgttctccatcgacacaaaaggggctggaacagggggtttgggactgacagtcgagggaccgtgtgaagctaagattgaatgccaggataacggagacggcagttgcgctgtatcttatcttccaacagaacctggagagtatacaattaatattcttttcgctgaggcccatatacccggaagtccttttaaggctacaattcgacctgtgtttgaccccagcaaagtgagggcttctggccctggcctggagagaggaaaggtgggggaggccgcaacgtttactgttgattgcagcgaagctggcgaagcagagctgaccatcgagatcctttctgacgcaggagtgaaggctgaagtcctcattcataacaatgctgacggcacataccacataacctattcacctgcttttcccggaacatatacgattaccatcaagtatgggggtcaccccgtgccaaagttcccaacaagagtccacgtccagcctgccgttgacacctccggtgtcaaagttagcggaccgggagttgaaccgcatggtgtcttgcgggaagtcaccaccgagttcacggtggatgccagaagtctgactgccaccggaggcaatcatgtgactgccagggtactgaacccctccggggctaagactgacacttacgtgacagataacggagacgggacttaccgtgtgcagtacaccgcctatgaagagggagtgcacttggtggaggtcctgtacgacgaggtggccgtccccaagagtccattcagggtcggggtgaccgaggggtgcgaccctactcgggtgcgagcgttcggtcctggcctggagggtggcctagttaataaggctaacaggtttactgtggaaactcggggagccggaacagggggtctaggactggccattgaaggcccttccgaggccaagatgagctgcaaagacaataaggatggcagctgtactgtggaatacattcccttcaccccaggggattacgatgtcaatattacttttggtggtaggccaatcccagggagcccctttcgagtccctgtaaaggacgtagtagatccgggaaaggttaaatgcagcgggcctgggcttggcgcaggcgttcgagcaagggtccctcaaacatttaccgtggactgctctcaggctgggagggccccacttcaggtggccgtgctcggcccaaccggggtagccgaacccgtggaagtccgtgataatggcgacggaacacacactgtacattatacacccgcaaccgatggaccttacactgtggccgtgaagtacgcagatcaggaggtgcctcgttccccgtttaagattaaagtgctgcccgctcacgacgcgagcaaggttagagcaagtgggccaggactgaacgcctcggggattccagccagcctgccagtagagtttactattgatgctagggacgcaggggaaggcttgctcacagttcagatcttagacccggagggcaagcctaaaaaagcaaatatccgtgataacggggacggcacctacaccgtctcttacctgcctgacatgagtggaaggtatactattactattaagtacggaggagacgagattccatactcaccatttcgaatccatgccctgccaacgggtgacgcctcaaagtgcctggtaaccgtgagcatcggcggacatgggcttggggcatgcctcggcccacgaattcagattggccaggagaccgtcattactgtggacgccaaagctgccggagaaggtaaagtgacctgtaccgtctcaacacctgatggagccgaattagacgttgacgttgtggagaatcacgacggaacatttgacatatactacacggctccagaacccggaaaatatgtaattacaattcggttcggcggagaacatatcccgaattccccatttcacgtcctagcttgcgacccactgccgcatgaagaggagccttccgaggtgcctcagcttaggcagccttacgctccaccacggccaggtgccaggccaacccactgggcaaccgaggagcctgtggtgcccgtcgagcccatggaaagcatgctgcgcccattcaatctcgtgatcccatttgccgtccagaagggagaattaacaggcgaagtcagaatgccaagcggcaagacagcaaggcctaatatcaccgacaacaaagatggcactatcaccgtgaggtacgccccaacagagaagggactgcatcagatgggcataaagtacgatggaaatcatatcccgggatcccctctacagttttatgttgatgcgattaatagccgacacgtcagtgcctatgggcctgggttgagccacgggatggtgaacaaaccggctaccttcactatcgtgaccaaagacgctggggaaggcggactgagtcttgccgtggagggcccatccaaggccgagatcacatgcaaggataataaggacggcacttgcacagtgtcttacttaccaaccgccccaggcgactactctattatcgtgaggtttgacgataagcacatcccaggtagtccattcaccgcgaagatcaccggagacgattccatgcggacgagtcagcttaacgtggggaccagcaccgacgttagcctgaagattaccgaaagcgatctgagccaactgacagcttctatccgagcaccctcagggaacgaagaaccatgtctgctgaaaagattgcctaacaggcatatcggaatctccttcacgcccaaagaggttggcgagcacgtagtatccgtcaggaaatcaggtaagcacgtcacgaactccccgtttaaaatcctggtgggaccatcggagatcggggacgcctctaaggtgagagtttggggcaaaggcctgtccgagggtcatacattccaagtagctgagttcatcgtggacacacggaacgcgggatacggaggactagggttgtccattgaaggtccctcgaaggtcgacatcaactgcgaagatatggaagacggaacatgcaaggtaacttactgtcccactgaaccaggcacctatatcatcaatatcaaatttgccgacaaacacgtgccaggcagccctttcactgtgaaggtgaccggagaaggacggatgaaggagagtattactaggaggagacaggccccatccatcgctacaattggcagcacatgtgacctcaacctgaaaattcctgggaattggttccagatggtgtctgcccaggagcggctcacacgaaccttcactagatccagccacacctatacaagaaccgaaagaacggaaatttcaaagacgcggggtggtgaaacgaagcgtgaagtgagggtggaggagagtacccaggttggaggtgatccatttcctgcagttttcggcgacttcctggggagagaacggttagggtctttcggaagcattactagacagcaggaaggggaggctagctctcaggacatgactgcacaggtaacctccccttccggaaaggttgaagctgctgagattgtggaaggcgaagacagtgcctattcggtgagattcgtgccccaggaaatgggcccacatacagtcgctgtcaaatacagaggtcagcacgtacccggttccccatttcaatttacagtaggtcctctcggtgagggtggcgcacacaaagttagagcaggagggactggacttgagagaggcgtagccggtgtccctgctgaattcagtatttggactagagaggcgggagcagggggtctcagtattgctgtagaagggccatccaaagccgaaatagcttttgaagacaggaaggacggtagctgtggggtatcttacgttgtacaggaaccaggcgattatgaagtctcgataaagttcaacgacgaacatattccagatagtccatttgttgtgcccgtggcctctctctctgacgacgcccgacggttgactgtcacatcgctgcaggagacaggcttaaaggtgaaccaacccgcttcatttgcagtgcaattgaatggagctcgcggtgtgattgacgcccgtgtgcatacgccgtccggagccgtggaggaatgctatgtgagcgagctggacagtgacaagcacacgattcgctttatcccacacgaaaacggcgttcactccattgatgtaaagttcaatggagcacacatacccggttcaccgtttaaaataagggttggggagcagtcccaggcgggtgaccctggcctggtgtctgcttacggccctggcttggaagggggaaccactggcgtctcctcagagttcatcgtcaataccctgaatgcgggaagtggagcccttagcgttaccatagacgggccttcaaaggtgcaattagactgccgcgagtgtccagaaggtcatgtggtcacatacacgcctatggcaccgggaaactacttgattgcaattaagtatggaggacctcagcacattgtcgggagcccttttaaagccaaggtgactggtccccgtctgtctggcggacattccttgcacgagacaagtaccgtgctggtggagacagtgacgaaatcctcaagctcccgtggaagcagttattcttcaattcccaaatttagctctgatgccagcaaagtggtgacccgaggcccaggcttgagccaggcgttcgtaggacaaaagaattcctttaccgtggactgttccaaagccggaactaacatgatgatggtgggtgtacacggacctaagacaccttgtgaggaagtgtatgtgaagcacatgggaaatagagtgtataatgtaacatatactgtcaaggagaagggcgattatattttgattgtgaagtggggcgacgaatcagtcccgggttcaccctttaaagtgaaggttcctta

SEQ ID NO: 223352 - DNA, 8078 bp, synthetic construct
  misc_feature 1..8078: note = Description of Artificial Sequence: Synthetic coding sequence
  source 1..8078: mol_type = other DNA
atgatgaataattcaggctattctgacgcagggcttggattgggtgacgaaactgacgagatgcccagcaccgagaaggatttggccgaagacgccccttggaagaagatccagcagaacactttcactagatggtgcaacgagcacttgaaatgtgtgggcaagcggctgacagatctgcagagagacctcagcgatgggctgagactaatcgcccttcttgaagtgctgagtcagaagcgtatgtaccgcaaattccatcctaggcccaatttccgccaaatgaagctggagaacgtgtccgtggccctggaatttctggagagggaacatatcaagctcgtcagtatcgacagcaaagcaattgttgatggcaacttaaagctgatccttggcctgatatggactctgatcctgcactactctatttctatgcctatgtgggaggatgaggatgacgaggacgcccgtaagcagacccccaaacagagattactggggtggattcagaacaaggtccctcaactgcccattactaatttcaatcgggattggcaggacggcaaggctctgggcgctctagtagacaactgcgcacccggtctttgccctgactgggaggcctgggatcctaatcagccagtcgagaacgccagggaagctatgcaacaggctgatgactggcttggagttccccaggtgatagctcctgaggagatcgtggacccaaacgtcgacgagcactcagtgatgacatatttatctcagtttccaaaggccaaactgaagccgggagcccctgtgcggagcaagcagttgaatccaaagaaagccatagcttatgggcctggcattgagccccaaggcaacaccgtactgcagccagctcacttcaccgtacagaccgtcgacgccggagtaggtgaagttttggtctacatcgaggatcctgaggggcacaccgaagaggccaaggtggtgcctaacaacgataaagaccgcacgtacgctgtgtcttatgtgccaaaggtagccggtcttcataaagttactgtgctgtttgctgggcagaacatcgaacgcagtccattcgaagtgaacgtaggcatggccctgggagatgccaataaagtatcagccagagggccagggctagagcctgtgggtaatgtggccaataaacccacgtacttcgatatttacacagcaggtgccggaaccggggatgtcgctgttgtgatcgttgatcctcagggcagaagggacaccgtcgaggttgccctggaggacaaaggggactccacgttccggtgcacttacagaccagctatggaagggcctcacacagtgcacgtggcatttgccggagcacctattactcgctcaccgttccctgttcacgtgtcggaagcctgtaaccctaatgcttgccgcgctagtgggcgtggtctccagcccaagggcgtcagggtgaaagaggtggccgactttaaggtcttcaccaagggtgctggctctggcgaactgaaggtaaccgtaaaaggccctaaagggactgaggaacctgtgaaagttagagaggccggtgatggggtgtttgagtgcgaatattaccctgtggtgcctggcaagtacgtggtgacaatcacttgggggggttatgccattcccagatccccatttgaagtccaggtgtctcctgaggccggagttcaaaaggtaagggcttgggggcctggactagagacaggtcaggttggaaagtctgccgactttgttgtggaagcgatcgggacggaagtgggcacgttgggtttttccatcgagggcccaagccaggctaaaatcgaatgtgatgataagggagatgggagttgcgatgtgagatactggcccacggagcctggggaatatgccgtacatgtgatctgcgatgacgaggacatccgcgatagtccttttattgcacacatcctgccagctcccccagactgcttccctgataaagtgaaagcctttgggcctggtctagagcctactggctgcatagtagataagccggctgagtttacaatcgacgcgagagccgctggaaagggcgatctgaagctgtacgctcaggacgctgatggctgtcctattgatatcaaagtgattccaaacggcgatggcacgtttaggtgcagttatgtgcctaccaaacccataaagcatacaatcattataagctggggcggtgtgaatgtcccgaagagtccttttagagtgaacgtcggcgagggatcgcatcctgagcgggtgaaggtgtatggacctggcgtggagaagaccggcctcaaagcaaatgagcccacgtactttacagtcgattgctcagaggctggtcagggcgacgtctccatcggcataaagtgtgcacctggtgttgtggggcctgcagaagccgacatcgactttgatataattaaaaacgacaacgacactttcacagtgaaatacaccccaccgggtgccggacgctacacaataatggtgttattcgcgaaccaggagatcccagcttctcctttccacatcaaagtggacccctctcacgatgcttccaaggtcaaggccgagggtcctggactgaaccgcacaggggtggaggtcgggaaacccacacatttcacggtgttgaccaaaggggcaggcaaagccaagttggacgtgcagtttgcaggcactgccaaaggcgaggtagtgcgtgacttcgagatcattgacaaccatgactactcttacactgtgaaatacacagctgtacagcagggcaacatggccgtcacagtcacatacggcggtgaccctgtacctaaatctcctttcgtggtaaatgtggcccctccactggacctaagtaaaatcaaggttcagggccttaattccaaagtcgctgtcgggcaggagcaagcatttagtgtcaatactagaggcgcaggcggtcaggggcagctcgacgtgcggatgacgtctccctctcggcgtcccataccgtgcaagctcgagcctggcggtggggctgaagcccaggccgtccgctacatgccacccgaagaaggcccatataaggtcgacatcacttatgacgggcatcctgtgcctggaagtccgtttgcagtggagggcgtgctgcctcccgatccatcaaaggtgtgtgcatatggccctggcttaaagggcggtctcgtgggaacacccgctcccttctcaatcgatacgaaaggtgccggaaccgggggtttgggacttaccgtggaagggccttgcgaagcgaagatagagtgccaggataatggggatgggagctgtgccgttagctatctgcccaccgagcccggagaatacaccatcaacattctgtttgccgaagctcatattcctggcagtcccttcaaagcaacgatccggcctgtgtttgacccaagtaaggtcagggctagcggacctgggttggaaagaggtaaggtgggtgaggcagcaacctttacagtcgattgctccgaggcgggagaggctgagctgacaattgaaattctgtctgacgcaggcgttaaagccgaagtcttaattcacaacaatgccgatgggacctatcatatcacctactcccctgccttcccaggtacctatacaattacgatcaagtacggaggtcatcctgtgccgaaatttcccaccagggtacatgtacaaccagccgttgacacttcaggggttaaggtgagcggacccggagtagagccccacggcgttctgagagaggtcactaccgaattcacggtggatgccaggtcactgaccgcaaccggcggtaaccacgtaactgcccgtgtgctcaacccatccggcgcaaaaaccgacacctacgttaccgacaacggcgatggcacatacagggtgcagtatacagcctatgaagaaggcgtgcacttagttgaggtgttatacgacgaggtggcagttcccaagtcaccgtttcgggtgggggtaaccgaaggatgtgaccccacacgcgttcgggctttcgggccaggactcgaggggggtctggttaacaaggccaaccgctttacggttgaaactagaggagcaggaactggtggcctggggctcgcgatcgaggggccaagcgaggccaagatgagctgtaaagacaataaggatggttcttgcactgtcgagtatatcccctttacaccgggtgattacgacgttaatatcacatttggagggagacctatccccggatctcctttccgggttccagtgaaagacgtagtagatcctggcaaagtcaaatgttctgggccaggactgggcgctggagtgcgggctcgagtgccccagacctttacagttgattgctcccaggctggcagggccccacttcaggtcgctgtactcgggcctacgggggtggctgagccggtggaggtgagggacaatggggacgggacacataccgtgcactacacccccgcaacagatggcccttatactgtggctgtcaagtacgcggaccaggaagtgccccgatcaccctttaagattaaagtgctgcctgcgcatgacgcaagcaaagttcgggctagtggtcctgggctgaatgccagtggcattccagctagtctgccggtggaattcaccattgacgcccgagatgccggagagggtctactgacagttcagatccttgaccccgaaggaaagcccaaaaaggcaaacattcgggataatggagacggcacctatactgtcagctacctacctgacatgtccggcagatacaccataacgatcaagtacggtggtgacgaaattccctactcgcccttccgcattcatgctctgccaaccggcgatgccagcaagtgcttggtcactgtgagtataggaggccacggattgggggcatgcctgggccctagaatacagatcggccaggagaccgtgattaccgtagacgctaaggccgcaggagagggaaaagtgacttgtactgtctcaaccccagacggcgctgagttggatgtcgatgttgtcgaaaatcacgacggtactttcgacatatactataccgccccagaaccaggaaagtatgtgattaccatccgatttggcggagaacacatcccgaactcaccctttcacgtacttgcgactgaagaaccagtggtgcctgtcgaacctatggagagcatgctgcgcccatttaatttagttatcccttttgccgtgcagaagggagagttgaccggggaagtaagaatgccaagtgggaagacagcccgacccaacatcaccgacaacaaagacggtaccatcacagtgagatacgcaccgacagagaaaggcctgcaccagatgggcatcaagtatgacggcaaccatatcccaggcagccccctgcaattctatgttgatgctattaacagcagacatgtgagtgcttatggtcccggtttgtctcacgggatggtaaataagccagccaccttcacgatcgttacaaaggacgcaggtgaggggggactaagtcttgctgtagaggggcctagcaaggccgaaattacctgcaaggacaacaaggacggtacgtgtaccgtctcatatctgccaaccgctccaggcgactattctattatagtccggttcgacgataaacacatcccgggtagtccgtttacagccaaaatcactggggatgactctatgcggacctctcagctcaatgtgggtacctcaacagatgtgtccctaaagataacagaatcagacctcagccagcttaccgcgtcaattagagcgccttcgggcaatgaagaaccgtgcctgttaaaacgtctccctaacagacatattgggatcagcttcacccctaaagaagtgggggaacatgtggtttctgttcggaagtccggaaagcatgtcacaaactcccccttcaagatattagtggggccatctgaaatcggcgatgcaagcaaagtccgcgtatgggggaaagggctgagcgaaggtcacacatttcaggtggcagaattcatcgtggatacaagaaacgccggatatgggggactgggactcagcattgagggcccatctaaggttgatataaattgtgaggatatggaagatggaacctgtaaggtcacctactgtcccaccgaaccaggcacttatatcattaacatcaagtttgcggataaacatgtgcctggctctccgttcacagtgaaggttaccggagaaggccgtatgaaggaatcaattacccgcagaagacaggccccatccattgcgacaatcggctccacctgcgacttaaacctaaagatacctgggaactggttccaaatggtaagcgctcaggagcgcctcactcggacgtttacgcggagctcccacacctacacaagaacggagcgtacagaaatcagcaagactcggggaggcgagacaaagcgggaggtccgcgttgaagagtccactcaggtgggtggggatccctttccagcagtgtttggggattttttggggagagaaagactgggtagttttgggtcgataacaaggcaacaggaaggggaggctagctcacaggatatgactgcccaggtaacctcaccttccgggaaggtggaagcagccgaaattgtggaaggggaagattctgcctacagtgtccggtttgtgccacaagagatgggtccacataccgtggccgtcaagtacagaggccaacacgtgccgggatcgccatttcagtttacggtcggccctctgggcgaaggcggtgcccataaagtcagagcaggtggtactggcctcgaacgcggagtcgctggcgtcccagccgaattctccatttggacacgcgaggctggggcaggtggcctgtctattgcagtggaggggccatccaaggccgaaatagcttttgaagaccggaaggatggatcctgcggcgtgagctacgtggtgcaggagcccggtgattacgaggtttcaattaaattcaatgatgagcacattcctgactccccatttgtagtccccgtggcctccttgtccgatgacgcccgaagactgacagtcacaagtttgcaagagactgggctgaaagttaatcagcccgcaagctttgccgtacaattgaacggtgcacgcggagttatagatgccagagtgcacacaccatctggcgcagtcgaagaatgttatgtatccgagcttgactccgacaagcataccattcggttcattccgcatgagaacggtgttcactctatcgatgtgaagttcaacggagcccatatccctggctccccttttaaaatacgggtgggggaacaaagtcaagccggagaccctgggctggttagtgcatacggacccggacttgagggaggaacgactggcgttagcagcgaatttatagtcaacacactgaatgcaggatcaggagccctgtccgtgactatcgacggacccagtaaggtgcaactggattgccgggaatgcccagaaggacatgtcgtgacatataccccaatggcaccaggcaactatttaatcgccatcaagtacggcggtccacagcatatagtgggctccccttttaaggcgaaggtcacagggccacggctttccgggggacattcattgcacgaaacctccaccgtgctagttgaaaccgtcactaaatccagcagcagcaggggatcgagttatagcagcattcccaaattcagttcggacgcctccaaggtcgtcactcgaggcccagggctgtcacaagccttcgtgggacagaagaattcatttaccgtcgattgcagcaaggcaggaaccaacatgatgatggtaggtgttcacggccctaagactccctgcgaggaggtttacgtgaaacacatgggtaaccgagtctataacgtcacctacaccgttaaagaaaaaggggactatatactgatagttaaatggggcgacgagtctgtgccgggatccccatttaaggtcaaggtcccata

SEQ ID NO: 223353 - DNA, 264 bp, synthetic construct
  misc_feature 1..264: note = Description of Artificial Sequence: Synthetic coding sequence
  source 1..264: mol_type = other DNA
atgcagctctttgtacgggcacaagaattgcatacattcgaggttacaggccaggagactgtggcgcagatcaaagcacacgtggcctctttggagggcattgctccagaagatcaggtcgtgctacttgctggcgctccgttagaggacgaagccaccttgggtcagtgtggcgtcgaagctcttactactctagaagtggctggaaggatgctgggagggggacagaccggggaggaagaggaagaagataggtcaggttag

SEQ ID NO: 223354 - DNA, 228 bp, synthetic construct
  misc_feature 1..228: note = Description of Artificial Sequence: Synthetic coding sequence
  source 1..228: mol_type = other DNA
atgcagttgtttgtgcgagctcaggagttgcacacatttgaggttactgggcaggaaacggttgcacagataaaggctcacgtggcatctctcgaaggtatcgctcctgaggaccaggtcgtcctcctggccggtgctcctttggaggatgaggcaaccctcgggcagtgcggtgtagaagcgcttaccaccctggaggtggcagggagaatgctcggaggggaatag

SEQ ID NO: 223355 - DNA, 297 bp, synthetic construct
  misc_feature 1..297: note = Description of Artificial Sequence: Synthetic coding sequence
  source 1..297: mol_type = other DNA
atgcaactgtttgttagggcccaggagttgcacacctttgaggtgacaggccaggagacggtggcacagatcaaggccctgactacactcgaggtcgcaggcaggatgttgggcggaaaagtgcatggcagtctcgcacgtgccggaaaggtgagaggacagacaccgaaggtggcaaagcaagaaaaaaagaagaaaaagactgggagggctaaacggcgaatgcagtacaaccggaggttcgttaacgtggtgccaaccttcgggaagaaaaagggcccaaatgctaattcatag

SEQ ID NO: 223356 - DNA, 330 bp, synthetic construct
  misc_feature 1..330: note = Description of Artificial Sequence: Synthetic coding sequence
  source 1..330: mol_type = other DNA
atgcagctgtttgtgcgcgctcaggagctgcacacattcgaagtgactggccaggagaccgtcgctcagattaaagcgcatgtggcgagcctggaaggaattgctcccgaggaccaggtcgtcctgctcgccggagctccactggaggatgaggccactctgggacagtgcggggtggaggctcttaccactctggaggtggcagggcgtatgcttgggggtaaggtgcacggcagtctcgcccgtgcagggaaggtgagagggcagacgccaaaagttgcaaaacaggaaaagaagaagaaaaagacgggacgagcaaaacggaggtag

SEQ ID NO: 223357 - DNA, 402 bp, synthetic construct
  misc_feature 1..402: note = Description of Artificial Sequence: Synthetic coding sequence
  source 1..402: mol_type = other DNA
atgcagctgttcgttcgcgcacaagagctccacaccttcgaagtgactgggcaggaaaccgtggcccaaataaaagcacacgtcgcgagtctggaaggcatcgcgcctgaagaccaggtggtcctactcgctggtgccccactcgaagacgaagcaactctcggacaatgtggggtggaggccctcacgactctagaggtcgccggaaggatgctgggcggaaaagtgcacgggtctctggctcgcgcaggcaaggtgcggggtcagacgcctaaagttgccaagcaggagaaaaaaaagaagaagaccgggagggccaaaagaaggatgcaatacaaccgacggtttgttaacgtggtccctacattcggcaaaaagaaaggcccaaatgcgaactcttag

SEQ ID NO: 223358 - DNA, 228 bp, synthetic construct
  misc_feature 1..228: note = Description of Artificial Sequence: Synthetic coding sequence
  source 1..228: mol_type = other DNA
atgcagctgttcgttcgagcgcaggagctccacaccttcgaagtgaccggacaagaaaccgtggcacagatcaaggcacatgttgcgtctctggaaggcatagccccagaagaccaggtggtgctgctggccggagctcccttggaagatgaggcaaccctcggccagtgcggagttgaagccctcacaaccctggaggttgccggacgcatgctgggaggggagtag

SEQ ID NO: 223359 - DNA, 402 bp, synthetic construct
  misc_feature 1..402: note = Description of Artificial Sequence: Synthetic coding sequence
  source 1..402: mol_type = other DNA
atgcagctctttgtcagagcccaggaactgcacacttttgaagttacaggacaagagaccgtggcccagataaaagcacacgtggcctcactagaaggcatagcaccggaggatcaggttgtcctgctggcaggagcacctctggaggacgaggcaacattgggccaatgcggggtcgaggccttgaccacacttgaggtggctggccgaatgctcggaggtaaggtgcatggcagtcttgcacgcgctggcaaggtgaggggccagacccccaaggtggcgaagcaggagaaaaaaaaaaagaaaactgggagggcaaagcgtagaatgcagtacaaccgaaggtttgtgaacgttgtgccaacctttggaaagaagaagggacctaatgctaattcatag

SEQ ID NO: 223360 - DNA, 402 bp, synthetic construct
  misc_feature 1..402: note = Description of Artificial Sequence: Synthetic coding sequence
  source 1..402: mol_type = other DNA
atgcaactgttcgtccgggctcaggagcttcacaccttcgaagtgaccggccaggagacggttgcccagattaaggcacacgtggcttccttggaagggattgcccctgaagaccaggtcgtgttgctagccggagcccctctcgaggatgaggcgactctcgggcaatgcggcgtggaagcacttactaccctggaggtggctggaagaatgctgggcggtaaggtgcacgggtcactggccagggctggcaaggttagagggcagacacccaaagtggcaaaacaggagaagaaaaagaagaagactggacgcgctaagagaagaatgcagtataatagaagatttgtaaacgtggtccccactttcggaaaaaagaagggacccaatgcaaactcttag

SEQ ID NO: 223361 - DNA, 1563 bp, synthetic construct
  misc_feature 1..1563: note = Description of Artificial Sequence: Synthetic coding sequence
  source 1..1563: mol_type = other DNA
atgtctgctggggaggtggagcggctcgtatctgagctgtccgggggaactgggggtgacgaggaggaggagtggctctacggcgatgaaaacgaagtggaacgacccgaagaagagaacgcatcagcaaacccacccagtggcatagaagatgaaacagctgagaacggtgtaccaaaacccaaagtgactgagacagaggacgattctgattctgattctgacgacgacgaagatgatgtacatgtgaccatcggggacataaagaccggcgcaccgcagtacgggagctatggaaccgccccagtcaatctaaatatcaagacgggcggaagagtttacggaaccacagggactaaagtcaagggggtggaccttgacgcccctggctccataaatggcgtgccactccttgaggtggatcttgacagttttgaagataaaccatggcgcaaaccaggcgctgatctgtcagattacttcaactatggctttaacgaagatacctggaaggcttattgtgagaagcagaaacgcatccgcatggggcttgaagtaattcctgtcacctccactacaaacaaaattactgtgcagcaggggaggacaggcaatagcgaaaaagagactgcattacctagcactaaagccgagtttacgtcacccccatccttattcaagactggactccccccatcaagaaggctgccgggagcaatcgatgtgatagggcagactatcacgatcagccgagtcgagggacggaggcgcgcaaacgagaacagtaacattcaggtgctctccgagcgcagcgcaacagaggttgataataacttctccaagccccctcccttttttccaccaggagccccacccacgcatctgcctccacctccatttctgccccctcccccaactgtctctactgctccaccgctgattccgcctccaggctttccacccccacctggcgcacctccaccctcgctgatacctactatcgaatccggccactcctccggatacgactcgagatccgctcgagcttttccatacgggaacgtggcgtttccccatctgcccggtagcgcaccctcttggccctctctggtagacacttccaagcagtgggattattacgctcgtcgagaaaaagatcgtgacagggaaagagaccgggatcgggagagggacagagatagagatcgcgagcgagagcgcacccgagaaagagagagggaaagagaccactcgcccacacccagtgtgttcaactctgacgaagagcggtacaggtacagggagtacgcggaaagaggatacgaacggcaccgggcatcccgtgagaaggaggaacgccaccgcgagcggagacaccgcgagaaagaggagacgcggcacaagagcagtagaagcaacagcagacgaagacacgaatccgaggagggggactcccatcggagacacaagcataaaaaaagcaagagatcaaaggaggggaaagaggcaggctcagaacccgcacccgaacaggagtccacagaggccacgcctgccgaatag

SEQ ID NO: 223362 - DNA, 1785 bp, synthetic construct
  misc_feature 1..1785: note = Description of Artificial Sequence: Synthetic coding sequence
  source 1..1785: mol_type = other DNA
atgtctgcaggggaggtcgagaggctggtgagtgaattgtctggcggaactggaggtgacgaagaagaggagtggttgtatggaggcccttgggatgtacacgtgcatagtgacctcgcgaaagatctcgatgaaaacgaggttgaaagacccgaagaggagaacgcgtcggccaaccctccgtcgggcatcgaggacgaaacggccgaaaatggtgtaccgaagccgaaagtgaccgagacggaggacgactcagactcagactccgatgacgatgaagacgatgtgcatgtgaccataggagacattaagactggcgcaccacagtatgggtcctacggtaccgccccagttaatctcaatataaagacaggtggcagagtctatgggacaaccggcaccaaagtgaaaggagtggacttggacgcaccaggaagtatcaacggagtaccactgctcgaggtcgatctagactcgtttgaagacaaaccttggagaaaacctggggcagacctcagtgattacttcaattacgggtttaatgaggacacctggaaggcatactgcgaaaagcagaaacggatccgcatgggtctggaggtgatacctgttacctctacaaccaataaaattacagcagaagactgtactatggaggtaacccctggcgcagagattcaggacggtcggttcaacctgtttaaggtgcagcaggggcgtaccgggaatagcgaaaaggaaaccgcactcccaagtactaaggccgagtttaccagtcctccgtcactcttcaagactggactcccaccatcccgcaatagtacaagcagccagtcccagacgtcaacggcttcgagaaaagcgaacagcagtgtgggaaaatggcaggatcggtacgggagggccgagtccccggatcttcgtagactgccaggagctatcgacgtcatcgggcagaccataaccatcagccgggtagaggggagaagaagagcgaatgaaaacagcaatatacaagttctttcagagcggtcagctacagaggtggacaataacttttcaaagcccccacctttcttcccacccggagccccaccgacacacctaccgcctcctcctttcctgcctccaccaccaaccgtgagtacggcgccacctctgatccccccaccagggttccctcctccacctggagccccaccccctagcctgatacccaccatagagtctggacattcctccggatacgacagccgttctgcgagggctttcccctatgggaacgtagcttttcctcacctaccaggcagtgcaccctcttggccctcgctcgttgacacaagtaaacagtgggactattatgccaggagggagaaagacagagaccgcgaaagagatagggaccgggagcgagacagggatagagatagggagagagaacgcacaagggagagggagcgagaacgggatcacagccccacgcccagtgtgttcaattctgacgaagagaggtatagataccgcgagtacgcagagcggggatatgagcgccacagagcctcccgggaaaaggaagagcggcaccgagaacggaggcaccgagaaaaagaggagacccgtcacaaatccagcaggtctaactcaaggaggagacatgagagcgaagagggcgactctcatcgtcgacacaagcataagaaaagcaagagatctaaggaggggaaggaggctgggagtgaaccggcaccagagcaggaatccactgaagccacccccgctgaatag

SEQ ID NO: 223363 - DNA, 1767 bp, synthetic construct
  misc_feature 1..1767: note = Description of Artificial Sequence: Synthetic coding sequence
  source 1..1767: mol_type = other DNA
atgtcagctggcgaagtggaacgactggtatcagagctctccgggggaaccgggggagacgaagaagaagaatggttatacggagacgaaaatgaggtggaacgccctgaggaggagaacgccagcgcaaatccgccatccggaatcgaggacgagaccgcagaaaatggtgtgcctaaaccaaaggtcaccgaaacagaggacgattctgatagtgatagcgatgacgacgaagacgacgttcacgtaaccattggtgacatcaaaactggagcaccacagtatggttcgtacggaacagcgcctgttaacctgaatatcaagaccggcggtagggtttatggtaccacggggacaaaggtgaagggtgtagatttggatgcacctggcagtatcaacggcgttccactgctggaggtcgatctcgacagttttgaagacaagccttggcgaaagccaggggcagatctgtccgattatttcaattatggctttaacgaagacacctggaaagcctattgtgagaagcagaagcgtatcagaatggggttggaagttatacccgtcacatctaccacaaacaagataaccgcagaggactgcactatggaggtgacccctggggcagagatccaggacggcaggtttaatctcttcaaggtgcagcagggacgcaccgggaattccgagaaggagacagccctgccctccactaaggccgaattcacgtccccgccatccttatttaaaacaggactgcctccatctcgcaattctacgtcctcccagtcacagacgagcactgcgagtcggaaggcgaattcctccgtgggcaagtggcaggaccgctacgggagagctgagtccccagatctcaggaggctacctggagccattgatgtcataggacaaacaatcacaataagtagagtagaaggaaggcgacgtgctaacgagaactcgaatattcaagtcctgagcgaaaggagcgctaccgaggtggataataatttttctaagccgccacccttcttcccccctggtgcccctcccacccacctcccgccaccacctttcctccccccacccccaaccgtaagcacagctccgccactgattccaccgcctggaatccccatcaccgtacctcccccaggtttccctccccctccgggtgctccccctccatccctcattcccaccatcgagtctggccattcttctgggtacgattctaggagtgccagggcatttccctacgggaatgtcgcttttccacacctacccggttcagctccttcttggccgagcctggtggacacatccaagcagtgggattactacgcccgtcgagagaaggatcgcgaccgagagagagatagagatcgcgaacgcgacagagatcgggaccgggagcgcgagcgaactcgtgagcgagaaagagaaagagatcactcccctacaccaagtgtttttaatagtgacgaagaacgatatcgctatcgggaatacgctgaacgaggatacgaaagacaccgcgcaagccgcgagaaggaagagcgccaccgggaaaggagacatcgcgagaaggaagagactaggcacaagagtagtcgctcgaattctaggaggcggcacgaatccgaagaaggtgacagccatagacgccataagcacaaaaagtcaaaacgctccaaggagggcaaagaagctggctccgagccggctccagaacaggagagtactgaggccacccccgcagagtag

SEQ ID NO: 223364 - DNA, 366 bp, synthetic construct
  misc_feature 1..366: note = Description of Artificial Sequence: Synthetic coding sequence
  source 1..366: mol_type = other DNA
atggtagacatgatggacctacctcggtctagaatcaatgccggaatgcttgcgcagtttatcgataagcctgtgtgctttgtcgggcgtttagaaaagattcatcccaccggcaaaatgtttatactgtccgatggagaaggtaaaaacggaactattgagctgatggaacctcttgacgaagagatcagcggtatcgttgaggtggtcggccgagtgaccgccaaggcgacgatcctctgtacgagttacgtccaattcaaagaggactcacacccattcgacctggggctttacaacgaagcagtgaaaatcattcacgactttccccagttttatccactgggcattgtgcagcacgactag

SEQ ID NO: 223365 - DNA, 1413 bp, synthetic construct
  misc_feature 1..1413: note = Description of Artificial Sequence: Synthetic coding sequence
  source 1..1413: mol_type = other DNA
atgtttccggctggtccacctagccattcactgttaagactgcccctcctgcagctgctgctgctggtggtgcaggctgtggggagaggcctgggacgggcaagccctgcagggggacctcttgaggatgtagtaatagaacgatatcacatccccagagcttgcccacgtgaagtgcagatgggcgacttcgtacggtaccattacaatggaactttcgaggatggcaagaagttcgatagctcttatgacaggaataccctcgttgccatagtggttggggtgggacgcctcatcacaggcatggatagaggcctaatgggtatgtgcgttaacgaacggaggcgcttaattgtccctccacacttgggatatggttccatcggacttgctggcttgatcccgcctgacgccactctgtacttcgacgttgtgctgcttgacgtttggaacaaggaagacactgtccaggtatccacgctacttcgccctccccattgcccacgtatggtgcaggatggcgattttgtgcggtaccactacaacggcaccctactggatggtacttcctttgacactagctactcaaggaaccacacctacaacacctatatagggcaagggtacatcatacctggcatggaccaaggcctccagggagcatgcatgggagagcgcagaaggatcaccatccctccacacttggcttatggagagaacggaaccggcgacaagataccagggagtgccgttttgatcttcaacgtccatgtgattgactttcataaccctgccgacgtggtggagatacgcactcttagcaggccatctgagacctgcaacgagacaactaagcttggcgattttgtgcgctaccattataactgttccctgctggatgggacccagctgtttaccagccacgattacggagcaccacaggaggccaccctgggggcaaataaagtcattgagggactggacacagggctacagggtatgtgtgtcggcgaacgtagacaactcattgtgccaccccatctggcacacggagagagcggtgccagaggcgttcccggatccgcagtgttgctattcgaagtcgagttggtctcgcgcgaagatggcctgcccaccggctacctgtttgtgtggcataaggacccgccagcaaacctgttcgaggacatggacttgaacaaggatggagaagttccgcctgaggagttcagtaccttcatcaaggctcaggtctcagagggaaaaggccgacttatgcccggacaagatcccgaaaaaaccatcggggatatgttccagaatcaagacaggaatcaggatggtaagattaccgtcgacgaactgaaactcaaaagtgacgaagatgaagaacgggttcatgaagagttgtag

SEQ ID NO: 223366 - DNA, 1749 bp, synthetic construct
  misc_feature 1..1749: note = Description of Artificial Sequence: Synthetic coding sequence
  source 1..1749: mol_type = other DNA
atgtttccagccggacccccaagccacagtctgctgaggctgcctctcctgcagctgctgctgctggtggtacaggccgttgggaggggtctgggtagagcatctcctgcaggaggcccactggaggatgtggtgatagaacgataccacattccacgggcttgtccaagggaggtgcagatgggggacttcgtcaggtaccactataatgggacttttgaggatggcaaaaaattcgactcatcgtacgatcgtaacaccctggtggcgatagtcgtgggtgtgggccgactcatcactggaatggaccgcggactgatgggtatgtgcgtgaacgagcgacgcagactcatcgttccgccacatctgggctacggctccatcggtctggccggtctaatcccccctgatgccaccttgtatttcgatgtggtattgttggatgtgtggaacaaagaggacacagtgcaagttagcaccttactgcgtccacctcattgcccaaggatggttcaggacggtgactttgtgaggtaccattataatggcaccctcctggatggcacatccttcgacaccagctacagcaagggcggtacatacgatacttacgtcggatccggatggctgattaaaggcatggatcaagggttgcttggtatgtgcccaggcgaacgcaggaaaattattatcccccctttcctcgcctacggcgagaagggctatgggactgttattcctcctcaggccagtttagtgttccatgttctcctcatcgacgtccacaacccaaaagatgccgttcaactcgagacgctcgagctgccacctggatgcgttagaagagcaggcgcaggtgacttcatgcgataccattacaatggttctttgatggatggaaccctcttcgacagttcgtattctcgtaatcacacttataatacttatatcggacagggatacatcatccccggaatggaccagggactgcagggcgcatgtatgggcgagaggcgcaggataactataccgccacacctcgcctacggtgagaatggaactggagacaagatcccaggttctgcggtcctgattttcaacgttcacgtgatcgatttccacaaccctgccgatgttgtcgagattcgaactctgtctcggccatccgagacatgtaacgagacaaccaagctgggagactttgtcaggtaccattataattgttcactgctggatgggactcagctgtttacatcccatgactacggagcaccccaggaagcaaccctgggcgctaacaaggtgattgagggtctggatacaggactgcaaggtatgtgcgtgggagaacgccgtcagctgattgtccctcctcatctcgcccacggggaaagcggagcgcgaggcgtccccggatccgccgtcctcttgtttgaagtggagctggtctctcgagaggacggactacctaccggttatctatttgtgtggcataaggatcctcccgcaaatctctttgaggacatggacctgaacaaggatggtgaagtgcccccagaagagttctccacgtttatcaaggctcaggtgtcagaagggaaaggcagattaatgcccggtcaggaccccgaaaagactattggggacatgtttcagaatcaggatcgtaaccaggacgggaagatcaccgtggacgagttaaagctgaaaagcgatgaggatgaggagcgagtccatgaagaattgtag

SEQ ID NO: 223367 - DNA, 1629 bp, synthetic construct
  misc_feature 1..1629: note = Description of Artificial Sequence: Synthetic coding sequence
  source 1..1629: mol_type = other DNA
atgttccctgccggacccccatcacactctctcctgaggctcccactcttgcagcttctgctgctcgtcgtgcaggccgtaggccgtggccttggtagggcctccccagcaggcggacccctagaggacgtggtgatcgaaaggtatcacattccacgggcttgccccagagaagtgcagatgggagactttgtgagataccattataatggaaccttcgaggatggcaagaagtttgactcaagctacgaccggaacacactggtggccatcgtggtgggcgtaggcaggttgattaccggcatggataggggcctcatggggatgtgtgtcaacgagcgccgtcgtctgatcgttcctccacaccttggttatggctccattgggctcgcaggcctgattccccctgacgccacgctgtattttgacgtcgtgctgctagatgtgtggaacaaggaggacacagtgcaggtctccacgctgctacgaccccctcactgcccacggatggtccaagatggagattttgtgcggtatcattataatgggacattacttgatggaaccagttttgacacatcctattctaaaggtggtacctacgacacctatgtgggttccggatggttgatcaaggggatggaccagggcttgctgggtatgtgccccggtgagcgcaggaaaattatcatcccgccatttttggcctacggggaaaaaggctatggtactgtaatccctccccaggcttccctggtgttccacgtattgctgatagatgtccataaccccaaggacgcagtgcagctcgaaaccctagaattacctccgggttgcgtcagaagagctggggctggggacttcatgcggtatcactacaacggatcattgatggacggcactctgtttgatagctcctactctcgaaatcacacctataacacatatatcggacagggatatattatcccagggatggatcagggactgcagggtgcttgcatgggcgagagacggaggataacaattcctcctcatcttgcatacggcgaaaacggaacaggggacaagatccccggttccgccgtgctcattttcaatgtccatgtgatcgatttccacaatcctgctgacgtggtggagatcagaactctcagtaggccgagcgagacttgtaacgagaccacgaaattgggcgacttcgttcggtaccattacaactgtagccttcttgacggaacccagctttttacgtcgcacgactatggagcgcctcaagaggccacactgggggctaacaaggtaatcgaagggttggacacggggctgcaggggatgtgtgtcggcgagcggcgtcagctcattgttccaccacatttggcccacggagagtctggcgctcgaggtgtccccggtagcgctgttttgctctttgaggttgagctcgtgtcccgggaagacggtctgcccacagggtacctgtttgtgtggcataaagacccacctgcgaacctgttcgaggacatggatcttaataaagacggagaagtgccgcctgaggagttctccacctttattaaggcccaagtgtctgagggaaaaggcccacacgcatgggccggtccgtag

SEQ ID NO: 223368 - DNA, 246 bp, synthetic construct
  misc_feature 1..246: note = Description of Artificial Sequence: Synthetic coding sequence
  source 1..246: mol_type = other DNA
atgggggacttcgtccgttatcattataacggaacctttgaagatggtaagaagttcgattccagctatgaccgcaacacactggtcgctattgtggttggagtaggccgactcatcactggtatggaccgtggactgatgggaatgtgcgttaatgaacgacggagactaatcgtgccccctcatcttgggtatggctccattggcctcgccggtctgatcccacccgacgcaacactatattag

SEQ ID NO: 223369 - DNA, 1161 bp, synthetic construct
  misc_feature 1..1161: note = Description of Artificial Sequence: Synthetic coding sequence
  source 1..1161: mol_type = other DNA
tagatcgatgtgcataatccgaaggatgcggtccagctcgagaccctggaactgcctccgggatgtgtgcggagagccggagctggagattttatgaggtaccactacaatggatcattaatggacggcacgttgtttgactcctcttatagccgtaatcatacctataacacatacatcggccagggctatattatccccggaatggatcaggggctccagggggcttgtatgggagagcgcaggagaatcacaatccctccccacctggcttatggggagaacgggactgactcaatcggctttcttcaagggtccgctcctttacgaccattccggagtggggagggtcagcccagcctggggagggaaggcggttacgggaagaccgaaccagcataccctcaggacccagccgtgttaggagcgtctgtctcaagccccgtcaagtgggcctcacatgcggacccccagggcgacaagattcctggatcagccgtgctgatctttaacgtccacgtcatagacttccataacccagctgatgtggttgaaattcgcaccttatcccgcccaagcgagacgtgcaacgaaaccactaaactgggggacttcgtgaggtaccactataactgttctttgttggacggcacgcagctcttcacgtcacatgactacggggctcctcaggaggcgactctgggggctaacaaagtgattgaaggactggacacgggcctgcagggcatgtgcgtgggagaaaggcggcaattgatcgtgccgcctcacctcgcacacggggagagtggagccaggggagtcccaggaagcgcggtcctgctatttgaagtggagctggtgtcccgtgaggacggcctcccaactgggtacctgttcgtatggcataaagacccccctgccaatctcttcgaggatatggatctcaataaggatggggaggtccctccagaagaatttagcacattcatcaaagcccaggtgtcagaggggaaagggaggcttatgcctgggcaggatcctgagaaaaccattggtgacatgttccaaaatcaagacaggaaccaagacggaaaaattacagttgatgagcttaagctgaagtcagatgaggatgaagaaagagtccacgaagagttatag

SEQ ID NO: 223370 - DNA, 1068 bp, synthetic construct
  misc_feature 1..1068: note = Description of Artificial Sequence: Synthetic coding sequence
  source 1..1068: mol_type = other DNA
atgcgataccactacaatggaagtcttatggacggcaccctattcgactccagctatagtaggaatcatacttacaatacttacatcggccaggggtatattatacctgggatggatcagggcctccagggcgcttgcatgggggagaggcgtcgaataactattccaccccatttagcctatggtgagaacgggacagatagcatcggctttcttcaaggaagtgcccctctaagacccttcaggtctggcgaaggacagccaagccttggcagggaagggggatatggcaaaaccgagcctgcctatcctcaagatcctgcagttctaggagcctccgtgtccagccccgtgaagtgggcgagtcatgctgatccccagggcgacaaaattcctgggtccgcggtactgattttcaacgtgcatgtgattgattttcataatcccgctgacgtagtcgagatcagaaccctgagccgcccaagcgaaacatgcaacgagacaacaaagctgggggacttcgtgagataccactacaattgctcccttcttgacggcacccaactttttacgtcacacgattacggagccccacaggaagcaacactgggggcaaataaagtgattgaggggctggatacaggactccagggcatgtgcgtcggggaaaggagacaattgattgtacccccacacctggcgcacggggaaagcggagcacggggagtaccgggttcggcagtgctcttgttcgaggtagagctggtatcacgtgaggatgggctgcccactggttatctcttcgtatggcacaaagatcctcccgctaacctttttgaggatatggatctaaacaaggacggcgaagttccccctgaggagttcagcacgttcatcaaggcacaagtgagtgaagggaagggcaggcttatgcctgggcaggatccggagaagaccatcggggacatgtttcaaaatcaggaccgcaaccaagacggcaaaatcactgtcgatgaattaaagctgaagtccgatgaggatgaagaaagggttcatgaggaactgtag

SEQ ID NO: 223371 - DNA, 327 bp, synthetic construct
  misc_feature 1..327: note = Description of Artificial Sequence: Synthetic coding sequence
  source 1..327: mol_type = other DNA
atgggagtggagatcgagaccatttcgccaggtgatggcaggacattccccaagaaaggacaaacgtgcgtcgtgcactataccggtatgctgcagaacggcaaaaaattcgactcctcacgcgaccggaacaagcccttcaaattccggatcggcaagcaggaggtgatcaagggttttgaggagggcgctgctcaaatgtcactgggccaacgagcaaaattaacatgtacccccgatgttgcctatggcgctacggggcatcccggagtgataccaccgaacgcaacactgatctttgatgtggaactgttaaatctggagtag

SEQ ID NO: 223372 - DNA, 243 bp, synthetic construct
  misc_feature 1..243: note = Description of Artificial Sequence: Synthetic coding sequence
  source 1..243: mol_type = other DNA
atgggagtagagatagaaacaatatctccaggcgatggcaggacattccctaaaaagggacagacctgtgtggtgcactatactggcatgctgcagaatgggaagaagtttgattcttccagggaccgcaataagcctttcaagtttaggatcggtaagcaagaggttattaaagggttcgaagagggagcagctcaacttggaccactgtctccccttcccatctgcccacacccctgttag

SEQ ID NO: 223373 - DNA, 429 bp, synthetic construct
  misc_feature 1..429: note = Description of Artificial Sequence: Synthetic coding sequence
  source 1..429: mol_type = other DNA
atgagactctcatggtttcgggtgttgacagtcttaagcatctgtctcagtgcggttgcgacagcaacaggagccgagggaaagcgaaaattgcagataggagtaaagaaaagagtcgaccattgcccaattaaatcccgtaaaggagatgtgcttcatatgcactatacagggaagctggaggacggcacagaatttgactcctcactgcctcaaaaccagccctttgtatttagtctgggtactggccaagttatcaaaggatgggaccaaggcttgctgggcatgtgcgaaggtgaaaaacgcaagcttgtgataccaagcgagctggggtacggagaacgtggtgccccacctaaaatcccaggtggcgctaccctcgtctttgaggttgagctgctcaagatcgaacggagaacagagctctag

SEQ ID NO: 223374 - DNA, 429 bp, synthetic construct
  misc_feature 1..429: note = Description of Artificial Sequence: Synthetic coding sequence
  source 1..429: mol_type = other DNA
atgagattgtcctggtttagagtgcttaccgtactctccatttgcctgagcgcagtagcaacagcgacaggtgctgagggaaaacggaagttacaaatcggtgtaaaaaagagggtcgatcactgcccaatcaagtctcggaaaggcgacgtgcttcacatgcactataccggaaaattggaagatggcacagagttcgactcctcactcccacaaaaccaaccttttgtgttcagtctgggaaccgggcaggtaattaagggctgggatcagggattgcttgggatgtgcgaaggagagaagaggaagctggtaatcccgagtgaactggggtacggcgaaaggggcgctccaccaaagatccccggaggcgctactctcgtctttgaagttgagctgttaaaaattgagcggagaactgagttatag

SEQ ID NO: 223375 - DNA, 429 bp, synthetic construct
  misc_feature 1..429: note = Description of Artificial Sequence: Synthetic coding sequence
  source 1..429: mol_type = other DNA
atgaggcttagttggttcagggtgctgacagtgctgtctatttgtttatccgccgtggccacggcgacaggcgctgagggtaagcggaagctgcagatcggagtcaaaaagagagtggaccactgtcccatcaagtcgagaaagggagacgtgctccatatgcattacaccggcaagctggaggatggtaccgagttcgactcctccctaccacagaaccagcctttcgtcttctcactggggacagggcaggtgattaaaggctgggatcaggggttactggggatgtgtgaaggagaaaaacggaagctggttatcccttccgaactaggatatggagagcgcggagcccctcctaaaattcccggtggtgccaccctcgtatttgaggtggaactgttaaaaatcgagcgacgcaccgagctttag

SEQ ID NO: 223376 - DNA, 309 bp, synthetic construct
  misc_feature 1..309: note = Description of Artificial Sequence: Synthetic coding sequence
  source 1..309: mol_type = other DNA
atgcgtctgtcttggttccgcgtgctcacggttctgagtatctgcctttccgccgtagcgacagctaccggggctgaaggaaaaaggaagttacagatcggtgtcaaaaagcgagtagaccattgtccaatcaaaagcaggaaaggcgacgtccttcacatgcattataccggaaaactcgaggatggtacagaattcgacagttccctgcctcagaatcaacctttcgtgttttctctcggcactggccaggtgatcaaaggatgggatcagggactcctggggatgtgcgagggcgaaaagcggtag

SEQ ID NO: 223377 - DNA, 3144 bp, synthetic construct
  misc_feature 1..3144: note = Description of Artificial Sequence: Synthetic coding sequence
  source 1..3144: mol_type = other DNA
atggcagtgacactcgacaaggacgcctactaccgaagagtcaagcggctctacagcaactggcggaagggggaagatgagtatgcgaatgttgacgcaatcgtcgtgagcgtgggcgtggacgaggagatcgtctatgcaaagtctactgcactgcaaacgtggctctttggctacgagctcactgacaccatcatggtattctgtgacgataagattatttttatggccagcaagaagaaggtggaatttctgaaacagatagccaacaccaaagggaacgaaaacgcaaacggggcacctgccatcaccctcctgataagggaaaagaatgaatctaataagtcttccttcgataagatgatagaggccatcaaggagtccaagaacggcaagaagattggcgtgtttagcaaggacaagtttcccggagagtttatgaagtcctggaatgattgcttgaacaaagaaggtttcgataagatcgatatatcagccgtagtagcctacaccattgcagtgaaggaagatggggagctgaacctgatgaaaaaggccgctagcattacgagtgaggtattcaacaagtttttcaaagagcgagtgatggagatagtggacgctgatgaaaaggtgaggcacagtaagctcgccgagtctgtggagaaggccattgaagaaaagaagtacttggcaggcgctgaccctagtaccgtggagatgtgctacccccctattatacagtccggtggaaattataatcttaagttttcagtggtgagtgacaaaaaccatatgcactttggcgctattacctgtgcaatggggatccgttttaagtcttactgcagtaacttggtgaggacactgatggttgatccatcacaggaagtgcaagaaaattataacttcctgctgcaactccaggaagaactgctcaaagaactcaggcacggtgtaaagatttgcgatgtttacaatgcggtgatggacgtggtaaaaaaacagaaacccgagttattgaataaaatcacaaagaatctgggattcggaatgggcatcgagttcagggagggaagtctggtaattaactctaagaaccagtataagttgaagaaaggtatggtcttttcaatcaatctcggattctctgacctaaccaacaaggagggaaagaaaccagaagagaaaacttacgcactgtttataggtgacactgtcctggtcgacgaagacgggccagccacagtcctgacgtcagtcaaaaagaaggtgaagaacgtgggtattttccttaagaacgaagacgaggaagaggaggaagaagagaaggatgaagcagaagacttacttggacgcggttcaagggctgctctgctgactgagcgtaccaggaacgagatgaccgctgaagagaaacggcgagctcaccaaaaggagcttgctgcccagctgaacgaagaagcaaaaaggcgactcaccgaacagaagggtgaacaacagatccaaaaagctaggaagtcaaacgtgtcgtataagaaccccagtctgatgcccaaggaacctcatatccgagagatgaagatctatatcgacaagaaatatgaaaccgtcatcatgcctgtcttcgggatcgctacaccatttcacattgcaactatcaaaaacatctccatgtctgtagaaggggactacacttatctgcgtattaacttttactgtcccggaagcgctcttggcaggaatgaaggaaacatctttcccaaccccgaggctactttcgtgaaggagatcacctatagagcttccaatatcaaagcccctggcgagcagactgtccctgccctgaacctccaaaacgcctttagaatcataaaggaagtgcaaaagcgatataagacaagagaggccgaagaaaaggagaaggaaggtattgtcaagcaggattctttggttatcaatctgaatagaagtaatccaaagttaaaggatctctacattaggccgaatatagcacagaaacgaatgcaggggagtcttgaagcgcacgttaacggattccggttcaccagtgtgaggggcgacaaagtggacatcctgtataataacattaagcatgcactttttcagccatgtgatggtgaaatgattattgtgctgcattttcacctgaagaacgccatcatgttcggtaaaaaacgtcataccgatgttcagttttacactgaggtgggggagataaccacagacctgggtaagcatcaacatatgcacgaccgagatgacttgtacgccgaacaaatggagcgggaaatgcgccacaagctgaagaccgcctttaagaactttatcgagaaggtcgaggcactcacaaaggaagagctggaatttgaggtgcctttccgagacctcggctttaatggggctccttaccgcagtacctgcctgctgcagcctacaagcagcgccctcgtcaacgctactgaatggcccccttttgtggtaacacttgacgaggtggaactaatccattttgaaagggtccagttccacctcaagaatttcgatatggtgattgtctataaggattactcaaaaaaggtgacgatgataaatgccatcccggtcgcaagcctggaccctatcaaagagtggctgaattcctgcgatctgaaatacactgaaggcgttcaaagtttgaactggacgaagatcatgaagacaattgttgatgatcccgagggcttttttgagcagggcggatggtcctttctggagcctgaaggtgaaggttcggatgccgaggagggtgacagcgagtcagagattgaggacgagacgtttaacccatcagaggacgattacgaagaggaagaagaggattccgatgaggattattcttccgaagccgaagagagcgattactccaaagagtctctcggaagcgaagaggaatccggaaaagactgggatgagctggaagaggaggccaggaaagctgacagagagagccgttatgaagaagaggaggaacagagcaggagcatgagccgcaaaagaaaggcctcagtacactcctcaggacgaggctccaatagggggtctcgtcattcttccgccccacccaagaaaaaaagaaagtag

SEQ ID NO: 223378 - DNA, 675 bp, synthetic construct
  misc_feature 1..675: note = Description of Artificial Sequence: Synthetic coding sequence
  source 1..675: mol_type = other DNA
atggccgctgcagtgccgcaacgcgcttggacagtcgagcagctccgatccgaacagctccccaagaaagatattattaagtttctgcaggagcacggctcagacagcttcctagctgagcataagctgctggggaatatcaagaacgtcgcgaaaacagctaataaggatcacctagtcaccgcatacaatcacctcttcgaaactaaaaggtttaaaggcactgaatcaatctcaaaggtctcagagcaggtaaaaaacgtgaagcttaatgaggacaagcccaaggaaaccaagagtgaggagactctcgacgagggacctcccaagtacaccaagtcagttctcaaaaagggagataagacaaactttcctaagaagggagatgttgtgcactgctggtatactggaacactgcaggacgggacagtgtttgacacaaacatacagacaagtgccaagaagaagaaaaacgccaaacctctttcttttaaggtcggtgtagggaaggtgatccgcggatgggacgaggccttgttgaccatgtccaagggtgaaaaggcaaggctcgagatcgagcccgaatgggcatacggcaagaaagggcagcctgacgctaaaatcccaccaaacgccaaactgacgtttgaggtggagctggtcgatattgattag

SEQ ID NO: 223379 - DNA, 1374 bp, synthetic construct
  misc_feature 1..1374: note = Description of Artificial Sequence: Synthetic coding sequence
  source 1..1374: mol_type = other DNA
atgaccaccgatgaaggcgcaaaaaataatgaagagtccccgaccgccaccgtagctgaacagggtgaggacataacgtctaagaaagacagaggtgtcctaaaaatcgttaaacgggttgggaacggagaagaaacgcccatgattggggacaaagtatatgttcactacaaggggaagctgagcaatggcaagaagtttgacagctcccacgaccggaacgagccctttgtgttttccttaggtaagggccaggtgattaaggcctgggacatcggcgtggccactatgaagaagggagaaatctgtcatcttttatgtaagccggaatacgcttacgggtcagcaggcagcttgcccaaaatcccttccaacgccaccctgttttttgaaatcgaactgctggactttaagggtgaagatctgtttgaagacgggggaattattaggaggacgaagcgaaagggtgaaggctacagcaatccaaatgagggcgcaactgtggaaatccatttggaggggcgatgtggcggaagaatgttcgactgccgcgatgtggcgttcaccgtgggcgagggggaagatcacgacatccccataggaatcgataaggctttggaaaaaatgcaacgtgaggagcagtgtatcctctatctggggcctcgatacggttttggcgaagcgggtaagcccaaattcggcattgaacctaacgccgaactgatctatgaagtgacactgaaaagcttcgaaaaggccaaagaaagctgggaaatggacactaaagaaaagttggaacaggccgctatcgtcaaagaaaagggtacagtgtatttcaaggggggaaagtacatgcaggcagttattcagtatggaaagattgtatcctggctggagatggagtacggcctgtccgagaaggagagtaaggcctccgaatccttcttgctcgctgccttcctgaatctcgccatgtgttatttgaagctcagggaatacaccaaggctgtggaatgctgtgacaaggcactcgggctcgattccgcgaacgaaaagggtctatacaggcgcggagaggctcagttgctgatgaatgagttcgaatcagcaaaaggcgattttgagaaagtgctcgaggttaatcctcaaaataaggccgctcggcttcagatctcaatgtgccaaaagaaagctaaggaacacaacgagcgagataggagaatttacgctaacatgttcaagaagtttgctgaacaggacgcgaaagaggaggccaataaggcaatggggaaaaaaacgtcagagggggtgaccaatgaaaaaggcacggactctcaggctatggaggaggagaagcctgaaggacacgtctag

SEQ ID NO: 223380 - DNA, 1374 bp, synthetic construct
  misc_feature 1..1374: note = Description of Artificial Sequence: Synthetic coding sequence
  source 1..1374: mol_type = other DNA
atgacaacagatgagggggcaaaaaataatgaagaaagccccacagccaccgtagcagagcagggtgaagacattaccagtaagaaggaccggggtgtgcttaagatcgtcaagcgcgtggggaacggagaggagaccccgatgatcggcgataaagtgtacgttcactacaagggcaagctttccaacggcaagaagtttgacagcagccatgaccggaatgagccctttgtgttctctctcgggaaaggccaggtcatcaaagcatgggacatcggggttgccacaatgaagaagggtgaaatctgtcatctgctgtgcaaaccagagtacgcttatgggagtgcaggctccctgccaaagatacctagcaatgcgactctctttttcgaaatagagcttttggactttaagggagaagacctattcgaggacggtgggatcatccggcgtactaaaaggaagggcgagggttacagcaacccaaatgaaggcgctacggtcgaaattcatctggagggtcgatgcggcggacgcatgtttgactgccgcgatgtggcatttacagttggtgaaggggaggaccacgatatccctatcgggattgataaggcactagaaaagatgcagagggaggaacagtgcatactatatttgggcccacggtatggattcggggaggcagggaaacccaagtttggtattgagccaaacgctgagttaatctacgaagtcaccctgaaatcttttgagaaagctaaagagagttgggaaatggacaccaaggagaaattggagcaggcagctatagtgaaggagaagggaactgtctatttcaaaggcggaaaatatatgcaggccgtcatccagtacggcaaaatcgtctcctggctcgaaatggagtacggcctgtctgagaaggaatctaaggcctcagaatctttcctccttgccgcttttctgaacctggccatgtgttacctgaaactccgagagtatactaaagctgttgagtgctgtgataaagctctggggctggattccgcaaacgaaaaaggcctataccggagaggggaggcccagctgctcatgaacgaatttgaatccgctaagggggatttcgagaaagtgcttgaggttaaccctcaaaataaggcggctaggctccaaattagcatgtgtcagaagaaggcgaaggaacacaacgaacgcgacaggagaatatatgcaaatatgttcaaaaagtttgcagaacaggacgctaaggaagaggctaacaaagctatgggtaaaaagacttctgagggcgtaacaaacgagaagggtaccgacagtcaggccatggaggaagagaaaccagaaggacatgtttag

SEQ ID NO: 223381 - DNA, 801 bp, synthetic construct
  misc_feature 1..801: note = Description of Artificial Sequence: Synthetic coding sequence
  source 1..801: mol_type = other DNA
ttgcttatgaaggtaccacgcacaatgaagaaggcaccgcagccactcctgctgagtagggagcgcatcctgcccccaaaagataggggggtactgaaaatcgttaagcgagttggtaacggtgaagaaacccccatgataggcgataaggtttatgtccattacaaaggcaaactttctaatgggaagaaattcgatagtagccacgaccgcaatgaaccctttgtattcagcctaggcaaaggtcaggtaattaaggcatgggatatcggagtagccactatgaagaagggggaaatctgtcatctgctctgcaagcccgagtacgcatatgggtctgccggtagtcttcccaagatcccaagtaatgccacgctgttcttcgagatcgagctgctggactttaaaggcgaggatctgttcgaagacggtggcatcatccggaggaccaagaggaagggagagggctacagcaaccctaatgaaggcgctacagtagagattcacttggaaggacgttgcgggggacggatgttcgactgtagggatgtcgccttcacggttggagaaggtgaagaccacgatattccaatagggattgacaaagcccttgaaaaaatgcagcgcgaagaacagtgcatcctatacctgggacccagacctaagaatcccggaaggtggatcccaaagaaaaactggtctcggctacccctgtctaagaggagagagccctacaccagcagatgcgtgtccccctacgccattttgagtatatccaaaaatctcttcaaatgctggtag

SEQ ID NO: 223382 - DNA, 1374 bp, synthetic construct
  misc_feature 1..1374: note = Description of Artificial Sequence: Synthetic coding sequence
  source 1..1374: mol_type = other DNA
atgactaccgacgaaggagcaaaaaacaacgaagagtcccctacagcaaccgttgcagagcagggggaagatattactagtaagaaagatcgaggggtcttgaagatcgtaaaacgtgtgggcaacggggaggaaacaccaatgatcggggataaggtctatgtgcactacaagggaaagcttagtaatggcaaaaagttcgacagtagccatgaccgcaatgaaccctttgtgttttctctcgggaaggggcaggttattaaggcttgggacattggtgtcgctacaatgaagaaaggcgaaatttgtcacctcttgtgcaaacccgaatatgcttatgggtctgccggatcgctgcctaagatcccatctaatgccaccttgttcttcgagatcgaattactcgatttcaaaggagaggacctctttgaagacggcggaatcataagacgaaccaaacggaagggagaggggtattctaatccaaacgaaggagctaccgtcgaaatacacctggaaggccgttgtggcggtcgtatgtttgattgtagagacgttgctttcacagtcggcgagggcgaggaccatgacatccccattggtatagataaagctctagagaaaatgcagagggaggaacaatgcatcctctatttggggcctaggtacggcttcggagaagccggaaaaccaaagttcgggatcgagcccaacgctgagctcatctatgaggtgacgttaaaaagcttcgagaaggccaaggagtcctgggagatggacactaaggaaaagttagagcaagctgctatcgtgaaggagaagggcaccgtatactttaaagggggaaagtacatgcaggccgtaatccaatacggtaagatcgtgtcttggctcgagatggaatacggtctgagtgaaaaggaatccaaggcatctgagtcctttcttcttgctgcttttttgaacttagctatgtgttatctgaagctgcgggagtacactaaggcagtagaatgctgtgacaaagcacttggcctcgattccgccaacgagaaaggcctataccgaagaggggaggctcagttactcatgaatgaattcgagagcgccaaaggggatttcgaaaaggtgctggaagttaatccccagaataaagccgctcggctgcagatttcaatgtgtcagaaaaaggcaaaggagcacaacgagcgggatcggagaatttatgccaatatgtttaagaagtttgcagagcaagacgcaaaagaggaagccaataaggccatggggaaaaagacttccgagggagtgactaatgaaaagggcacagactcccaggctatggaagaagaaaagcccgagggccatgtttag

SEQ ID NO: 223383 - DNA, 1374 bp, synthetic construct
  misc_feature 1..1374: note = Description of Artificial Sequence: Synthetic coding sequence
  source 1..1374: mol_type = other DNA
atgacaactgatgaaggggctaagaataacgaggagagcccaacagcaactgtggcagaacaaggggaagacatcacctccaaaaaagacaggggagtgctgaagatcgtgaagcgcgtgggcaacggtgaggagacgcctatgatcggcgacaaagtctacgtgcactacaaaggcaagctgagtaatggcaagaaattcgatagctcacatgacaggaatgaaccattcgtgttttccctggggaaggggcaagtaataaaggcctgggacataggggtggcaaccatgaagaaaggcgagatttgccacctgctgtgtaagccagaatatgcatatggctccgctggttccctgcccaagatcccgagtaatgcaactctattcttcgaaattgagctcctagacttcaaaggcgaggacctgttcgaggacgggggaatcatacgcagaaccaagagaaagggggagggctacagtaaccctaacgagggcgcaacggtagaaattcacttagagggcagatgcgggggtcgtatgtttgactgcagggacgtggccttcacagtgggcgagggagaggaccacgatatccctatcgggatcgacaaagcgctcgagaaaatgcagcgggaggagcagtgcattctgtatctgggtcctcgatatgggttcggggaggctggaaaacccaagtttggaatcgagcctaacgcagaactgatttacgaagtcactctcaagagcttcgaaaaggccaaagagagctgggagatggatacaaaagaaaaattggaacaagccgcaatcgtcaaagaaaaggggactgtatatttcaaaggcggaaaatacatgcaagcagtaattcaatatggcaaaattgttagttggttagaaatggagtacggtctgtctgagaaagagtctaaagccagtgagtctttcctgctggcggcatttttgaaccttgcaatgtgttatctgaaactccgggaatatactaaagcagtcgagtgctgcgacaaagcgttaggcctagacagtgctaacgagaaagggctttatcgcaggggggaggctcagctgttaatgaacgaattcgagtccgccaagggggactttgagaaagtgctcgaagtgaacccacagaacaaggcagccagattgcagatctcaatgtgtcagaaaaaagcgaaggagcataacgaaagagatcgtagaatatatgccaatatgttcaaaaaattcgccgaacaagacgcaaaggaggaagcgaataaggcaatggggaaaaagacaagcgagggcgttactaacgaaaagggcacagattctcaggccatggaggaggagaagcccgagggacacgtgtag

SEQ ID NO: 223384 - DNA, 837 bp, synthetic construct
  misc_feature 1..837: note = Description of Artificial Sequence: Synthetic coding sequence
  source 1..837: mol_type = other DNA
atgtttgactgcagagatgtggcctttactgtgggggagggcgaagaccatgacataccgataggcattgataaagcgctggaaaaaatgcaaagagaggaacaatgtatcttatacctcggacctcgatatggttttggggaggcaggcaagccaaaatttggaattgagccgaacgccgaactgatctacgaggtgactctgaagtccttcgaaaaagctaaagagtcatgggagatggataccaaggagaagttagagcaggcagccattgtgaaagagaagggaaccgtctatttcaaaggagggaagtatatgcaggctgttattcaatacgggaagatcgtgagctggctggagatggaatacggcctgagtgagaaggaatcaaaggcaagtgagagcttcctcctggcggctttcctgaacctggcaatgtgttacctgaagcttcgtgagtatacaaaagctgttgagtgctgtgataaggcactaggactcgactctgccaacgaaaaagggctctatcgcagaggcgaggcacagcttctgatgaacgagttcgagagtgccaagggtgacttcgaaaaggtgcttgaagtgaatccccagaacaaagcagcacgtctgcagataagcatgtgtcaaaagaaagcaaaggagcacaatgagagggaccgcaggatctatgcgaacatgtttaaaaaattcgccgaacaggatgcaaaggaagaggcaaacaaagcgatgggaaagaagacatctgaaggggtgaccaatgagaagggcactgattcccaagcaatggaggaggagaaaccagaaggacacgtatag

SEQ ID NO: 223385 - DNA, 807 bp, synthetic construct
  misc_feature 1..807: note = Description of Artificial Sequence: Synthetic coding sequence
  source 1..807: mol_type = other DNA
atgacgactgacgagggagctaaaaacaatgaggagagccctacggctacggttgccgaacaaggtgaggatataacaagcaaaaaggatagaggggtgctgaaaatagtcaagagggtcggaaatggcgaagagacaccaatgattggtgataaagtctacgtccactataagggtaagcttagcaatggcaagaaattcgattcttcccacgatagaaacgagccattcgtgttttctctaggaaaaggacaggtcataaaggcctgggacatcggcgtcgccaccatgaaaaagggagagatttgccatctgctctgcaagccggaatacgcttacgggtcagccggaagcttgccaaagatcccgagcaatgccacgctgttttttgagattgaactcctcgactttaagggcgaggacctgtttgaagatggcggaattatccggagaacaaaacggaagggtgagggctatagcaatcctaacgagggcgcaacggtggaaatccaccttgaggggaggtgcgggggtaggatgttcgattgtagagacgttgcattcaccgttggcgaaggagaagatcatgatataccaataggaattgataaagccctggaaaagatgcaacgcgaggagcagtgtatactctacttggggccacggcctaaaaacccaggccgatggatccccaaaaagaattggtcaaggctgccgttgagcaagagaagggagccatacacgagtagatgcgtgtctccgtatgccatactgagcatatcaaagaacctgtttaagtgttggtag

SEQ ID NO: 223386 - DNA, 1263 bp, synthetic construct
  misc_feature 1..1263: note = Description of Artificial Sequence: Synthetic coding sequence
  source 1..1263: mol_type = other DNA
atgactacggagcagggcgaggaaactcccatgatcggcgataaggtgtatgtccattacaagggcaagctatccaatggcaagaagttcgacagctcccacgatcgcaacgagccatttgttttcagtctgggaaaaggacaggtcattaaagcttgggacattggggtcgcaaccatgaagaagggggaaatttgtcatctgctctgtaagccagaatacgcttacggttccgctggtagcttacctaagattccgagtaacgccacactattcttcgaaatcgagctactcgatttcaaaggcgaagacctcttcgaagacggcggtatcataagacgtactaagcggaaaggcgaaggttatagcaatcccaatgagggggctacagttgaaatccacctggagggcagatgcgggggaaggatgtttgattgccgggacgtggcgttcacagtcggggaaggcgaggaccatgatattcccattgggatcgataaggctttagaaaaaatgcagagggaggagcagtgcatcctctacttggggcctagatatggctttggagaggccggaaagcctaagttcggaattgagccaaacgcagagcttatctatgaggttaccctgaaatcatttgagaaggccaaggaatcctgggagatggacaccaaggaaaagctcgagcaagctgcgattgtcaaagagaaaggcacagtttatttcaaagggggaaaatatatgcaggcagtgattcaatacgggaagatagtttcatggctggagatggaatacggactgtctgaaaaagaatctaaggcttccgagagttttttactggcagctttcttgaacctcgcaatgtgttatcttaagctccgagaatacacaaaggcagtggagtgctgcgataaagccttgggattggacagcgctaatgaaaaaggcctctaccgcaggggcgaggcgcaactgctgatgaacgaatttgagagcgcgaagggcgattttgagaaggtgcttgaagttaatccacagaacaaggccgcacggcttcagattagcatgtgtcagaaaaaggccaaagaacataatgaacgggataggagaatctatgctaacatgttcaagaagtttgccgagcaagacgcaaaagaggaagcgaataaggctatgggtaagaagacatctgaaggcgttaccaacgagaaggggacagactcacaagccatggaggaggagaagccggagggtcacgtgtag

SEQ ID NO: 223387 - DNA, 984 bp, synthetic construct
  misc_feature 1..984: note = Description of Artificial Sequence: Synthetic coding sequence
  source 1..984: mol_type = other DNA
atggggggtagtgcacttaaccagggcgtgctggaaggagatgatgctcctgggcaaagcctgtacgagcggctcagccaaagaatgctagacatctcaggcgacaggggtgttctgaaagatgtgatcagggagggcgctggcgacctggtggcaccagatgcatccgtgttggttaagtacagcggctatctggaacacatggaccggccattcgacagcaactatttccgcaagacgccaaggttaatgaaattgggagaagatatcacgttgtggggcatggaactggggcttcttagcatgcggcgtggcgagctggccagattcctatttaagcccaattatgcttacggtacattgggctgtccaccactgataccccctaacacaacggtactttttgaaatcgagcttctagactttctggattgcgccgaaagtgataaattctgcgcgctttctgccgagcagcaggatcagtttccactgcaaaaggtgctaaaggtggccgcaacagagcgggagtttgggaactatctattccggcagaataggttctatgacgccaaagtgcggtacaagcgggctctgctgttactacgcagacggtcagccccaccggaggagcagcatctcgttgaggccgctaaactgcccgtgctgttgaacctaagttttacctatttgaagctagatcggcctactatcgccctgtgctatggagaacaggccctaattattgatcagaaaaacgccaaggccctatttcggtgcgggcaagcttgtctactcctcaccgagtatcagaaagcgcgagacttcctcgtgagggctcagaaagaacagcccttcaatcatgacatcaacaatgaactgaaaaagctggccagttgctaccgggattacgtagacaaagaaaaagagatgtggcatcggatgttcgctccttgtggcgatggttctactgcaggagaaagttag

SEQ ID NO: 223388 - DNA, 969 bp, synthetic construct
  misc_feature 1..969: note = Description of Artificial Sequence: Synthetic coding sequence
  source 1..969: mol_type = other DNA
atgtctgcaagcagttggcctcaaaatgggatgcctccttcatcgctgtacgagcggctcagccaaaggatgttggatatcagcggggaccgcggagtcttaaaagacgtaatcagagaaggagccggagacctagtggcccctgatgcatctgtgcttgtgaagtactcaggctacctggagcatatggaccgcccttttgacagcaattattttaggaaaacgccacgactcatgaaactgggtgaggatatcaccctgtggggaatggaactgggcctgctctcgatgagaagaggcgaattggctagattcctctttaagccgaattatgcctacggaacattaggctgtcctcccctgataccacccaacactacagtcctgtttgagatagagctgctcgacttcttggattgcgctgaaagcgacaaattctgcgctctgtcagccgagcagcaggaccagtttccactccagaaggtgctgaaggtcgcagccaccgaaagggagtttggaaattatttgtttaggcagaacagattctacgatgccaaggtccggtataagcgtgccctgctgttgctgcggagacgttcagcgcctccagaagaacaacatctggtcgaggccgctaaactgcctgtcctgttgaatctatccttcacgtacctgaaactggatcgacctactattgctctttgttacggcgagcaggctttaatcatcgatcagaagaatgcaaaggcactgtttaggtgcggtcaggcctgcctgctacttaccgagtatcaaaaggccagggattttctggtccgggctcagaaggaacagccgttcaaccacgacattaacaatgaactcaaaaaattagcaagctgttaccgtgactacgtcgacaaagaaaaggaaatgtggcatagaatgttcgctccttgcggggatggatctacggctggcgagtcctag

SEQ ID NO: 223389 - DNA, 531 bp, synthetic construct
  misc_feature 1..531: note = Description of Artificial Sequence: Synthetic coding sequence
  source 1..531: mol_type = other DNA
atggacttgcccgactccgcgtctagagtcttttgtggcaggatcctgagtatggtgaacaccgacgacgtgaatgcgattatcttagcgcaaaaaaatatgctggaccgctttgagaaaactaatgagatgctactcaatttcaataacctgagtagcgctaggcttcagcagatgtccgaaaggtttctgcaccatactcgcacactcgtcgaaatgaagcgcgatctcgactccattttccgtcggatcaggaccttgaaaggcaagctcgccagacaacaccctgaggcattttcacatattccggaggcgtctttcctggaggaggaagacgaggaccccattcctcctagcaccacgaccacgatcgccactagcgagcaaagcacgggatcctgcgacacttcacctgatactgtgagcccctccctgtcacccggatttgaagacctgtcacacgtacagccaggaagccccgctattaatggccgatctcagacagatgatgaagagatgacaggagagtag

SEQ ID NO: 223390 - DNA, 1326 bp, synthetic construct
  misc_feature 1..1326: note = Description of Artificial Sequence: Synthetic coding sequence
  source 1..1326: mol_type = other DNA
atgggcgtgggggcaggcagagttagccaaagcggggctccatccccgggaggtgccggtcgggctaattcttgcccaccatctagcatggcatcgtgtgctgaaccatcagagccaagtgcgcctcttccggcaggtgtacctccattagaggattttgaggtgttggacggagtagaagacgctgagggcgaggaagaggaggaggaggaggaagaagaagaggatgacctcagcgagcttccacctctggaggatatgggccagccgcctgccgaagaggctgaacaacctggtgctctggcaagagagtttttagcggcaatggagcccgaaccagctccagcccctgccccagaggaatggttggacattctgggaaatggactgctgcgtaagaaaaccttagtccccggtccccctggctcatcaagaccagtcaaaggacaggtggtcactgtgcacctgcagacctctcttgagaacggaaccagagtgcaagaggaacccgagttggtgttcactctgggcgattgtgacgttattcaggccctggacctttccgtgccgctcatggatgtgggtgaaacggctatggtgactgcagactctaagtactgctacggaccacagggtcgctctccgtacattccaccacacgcagcattatgtctcgaggtcaccctgaagaccgccgtcgacgggccagatcttgagatgcttaccgggcaggagagggtcgctttagccaatcgtaagagagagtgcggtaatgcgcactaccagcgggcagattttgtccttgccgcaaacagctatgatctggccataaaagccatcacctctagtgctaaggttgatatgactttcgaggaggaagcacagctcttgcagcttaaggtgaaatgcctgaacaatttggcagccagccagctcaaactggaccattatagggccgcactgcgttcttgctcacttgtcctagagcaccagccagacaatatcaaagcgttatttagaaaaggcaaggtgcttgctcaacagggagaatactccgaggcgatccccattttgagagctgcactgaaactcgagccctcgaataaaaccattcacgccgagctttctaaactggtaaagaagcacgcagcccagcgttcaacggaaaccgcattgtaccggaagatgctggggaaccccagccgccttcccgcaaagtgccccggtaagggggcatggagcatcccctggaaatggctgtttggggcaactgccgttgccctgggaggcgtggcactatccgttgtgatcgccgctcggaactag

SEQ ID NO: 223391 - DNA, 762 bp, synthetic construct
  misc_feature 1..762: note = Description of Artificial Sequence: Synthetic coding sequence
  source 1..762: mol_type = other DNA
atggcaagttgtgccgagccatccgaaccctccgcgcctcttcctgctggcgtgcccccactggaggattttgaagttttagacggagtggaagatgccgagggggaggaagaagaagaagaagaagaagaagaggaagacgacctgtccgagttaccaccactcgaggacatgggacagcctcctgcagaggaggcagaacagcccggtgcgctggcaagggagttcttagctgcgatggaacctgagcctgccccagctcccgcacctgaagagtggctcgatatcctcgtcgatatgactttcgaggaagaagctcagctcttgcagctgaaggttaagtgcctcaataacctggcagccagtcagctgaagttggatcattaccgcgctgctcttaggtcctgcagccttgtcctggagcaccagccagataatataaaggccctcttccggaaaggcaaggttttggctcagcagggggagtactctgaggccattcccatactcagggcagcccttaagctcgaaccaagcaataagacaatccatgctgaacttagcaagctagtaaaaaaacacgctgcccagcggtccactgaaacggcgctgtaccgcaagatgctgggaaatccaagccgcctacctgctaaatgccctggcaagggtgcctggtcaattccctggaaatggctgttcggtgccaccgccgtggcccttggaggcgttgctctttctgtagttatcgccgcacgcaactag

SEQ ID NO: 223392 - DNA, 1599 bp, synthetic construct
  misc_feature 1..1599: note = Description of Artificial Sequence: Synthetic coding sequence
  source 1..1599: mol_type = other DNA
atggccaagcgcgttgctatcgtgggggcaggagtctccggactcgcctccattaaatgttgcctggaagaaggcctcgagcccacttgtttcgagaggtctgatgacttgggaggtctctggaggtttaccgaacacgtcgaggagggaagggcctccttgtataagagcgtggtgtcaaattcgtgtaaagagatgtcttgttactcagacttccctttcccagaagactacccaaattatgttccaaacagccagtttctcgaatacctgaagatgtatgccaatcactttgacctactgaaacacattcagtttaagaccaaagtttgtagcgtgaccaaatgctcagactcagccgtctcaggccagtgggaggttgttacaatgcacgaagaaaagcaggaaagtgctatcttcgatgctgtaatggtttgtaccggcttccttactaatccataccttccgctggacagtttccccggtatcaacgcgttcaaggggcagtacttccacagcaggcagtacaagcatcccgatatctttaaggacaagcgggtgctggtgattgggatgggcaatagtggtaccgacatcgcagtggaagcaagtcaccttgccgagaaggttttcctttctacaaccggaggagggtgggtgatttccaggatttttgactccgggtacccttgggacatggtatttatgacaagatttcagaacatgctgcgcaacagcctacctaccccaattgtgacgtggctgatggaaaggaagatcaataattggctgaaccacgcaaattacgggctcatccctgaagaccggactcagcttaaggagtttgtccttaatgacgaactccctggacgcataattaccggaaaagtttttatcagaccatctattaaagaggtgaaggaaaactccgtcatctttaataacacatcaaaagaggagcctattgacatcattgttttcgctacaggctacacatttgcatttccattcctagacgagtcagttgtgaaagtggaagatgggcaggctagtttatacaaatacatctttcccgctcacttgcagaaaccaaccctggccataattggcctgatcaaaccccttggatccatgattccaacaggcgaaacacaagcgaggtgggccgttagagtgctcaaaggcgtgaataaactgccacctccctctgtaatgatagaagaaataaatgccagaaaagaaaataaaccttcatggttcggcctgtgttattgcaaagccctgcagagcgattacattacatacatagacgagctcctgacctacatcaacgctaaacccaatctgttcagtatgctcctgacggacccccacctcgccttgactgtatttttcggaccctgtagcccctaccagttccgactgacgggaccaggtaagtgggaaggagcacggaacgctatcatgacccagtgggaccgaacctttaaggtcatcaaggctcgggtagttcaagaaagcccctcaccttttgaaagctttcttaaagtgttcagtttcttggcattgcttgtcgcgatctttctaatttttctgtag

SEQ ID NO: 223393 - DNA, 1599 bp, synthetic construct
  misc_feature 1..1599: note = Description of Artificial Sequence: Synthetic coding sequence
  source 1..1599: mol_type = other DNA
atggccaagagggtggcaattgttggggctggagtctcaggtctggcatcgatcaagtgttgtctcgaagaaggactcgaaccgacttgctttgaacggtcggatgaccttggtgggctgtggcggtttactgaacacgtggaggagggcagagcctccctttataaatccgtggttagcaactcctgtaaagaaatgtcatgttactcagatttccctttccctgaagactacccaaattacgtcccgaactcccagttccttgagtacctgaagatgtacgctaaccactttgatctccttaagcacatacagtttaaaaccaaagtttgctcagtgacaaagtgcagtgattctgccgttagcggccaatgggaggtagtcaccatgcacgaggaaaagcaggagagcgctatcttcgatgccgtgatggtatgtactggcttcctaactaacccatacttgccactggacagtttccctggcatcaatgccttcaaagggcagtattttcactctaggcagtacaaacatcccgatattttcaaggacaaaagggtgctcgtgatcggcatgggcaacagtggaacagacattgcggtggaagcatctcacttggccgagaaagtcttcctatcaacgactggtggcggatgggtaatttcgcggatctttgattccggatacccctgggatatggtctttatgacaaggttccagaacatgttacggaactccctccctacgcctattgtcacttggcttatggagaggaagataaataattggctgaaccacgcgaactatgggctgatcccggaagatagaactcagctaaaggagttcgtattgaacgacgagctgcctggaaggatcattaccggcaaagtgtttattcgcccaagcatcaaggaggtgaaggaaaatagtgtcattttcaataacacttccaaggaagaaccaatcgatatcatcgtattcgctactggatacacatttgcattccctttcctggacgaatccgttgtgaaggttgaggacggccaggcgagtctctacaaatacatatttcccgctcacctgcagaaaccaacacttgcaataatcgggctcattaagcctctgggctcaatgatacctacaggagagacacaggctagatgggctgtgcgcgtgctgaagggtgtcaacaagttgcctccaccatctgtgatgattgaggaaattaacgcgaggaaagagaacaagcccagctggttcggcctgtgctattgtaaagcactacagtccgattatatcacttacattgatgagctgcttacgtacatcaacgctaaacccaacctctttagcatgttactaactgatccccacctcgcgcttaccgtattcttcgggccttgtagtccttatcagttccgacttaccgggcctggcaaatgggaaggcgctaggaatgcaataatgacgcagtgggataggacctttaaggtgattaaagcacgtgtagtacaggaatcaccctccccatttgagagctttctgaaagtattctcattcttagctctgttggtagccatcttcctcatttttctttag

SEQ ID NO: 223394 - DNA, 1410 bp, synthetic construct
  misc_feature 1..1410: note = Description of Artificial Sequence: Synthetic coding sequence
  source 1..1410: mol_type = other DNA
atggctaagcgggtggccatcgtcggagccggagtcagcggactggcatccataaaatgttgtcttgaggaggggcttgaaccaacttgctttgaaagatccgatgacctggggggtctttggcgttttaccacgaaagtctgcagtgtgacgaaatgctctgactccgcagtgtccgggcagtgggaagtggtgaccatgcacgaagaaaaacaggaaagtgcaatcttcgacgccgttatggtgtgtaccggattcctcacaaatccatatttgcccctggacagcttcccagggattaatgcatttaaaggccagtacttccactcaagacagtacaaacatccagacatatttaaagacaagagagtccttgtgatcggcatgggcaactcagggacagatattgctgtagaagcttcacacctggcggagaaagtgtttctgtccactaccggaggcggatgggttataagccggatattcgattctgggtatccatgggatatggtatttatgactcgattccagaacatgcttaggaacagcctcccaactccaatcgtgacctggctgatggaacgtaagattaataactggcttaaccatgccaactacgggctgattcccgaggaccgtactcagctcaaggaattcgtactgaacgacgaattgcccggaaggattatcactggcaaagtcttcattcggccttcaatcaaggaagttaaagaaaactcagtcatctttaacaacacatccaaggaagaacctatcgacattatcgtattcgctactggctatacgtttgcattcccgtttctggacgaaagtgtagtcaaagtggaagacggacaggccagcttgtataagtatatatttcccgcacacctgcaaaaaccaaccctggcgataattggcctgatcaaacctctcggttctatgatcccgacgggggaaacgcaggccagatgggctgttagggttttgaaaggcgtgaacaagctccccccacccagcgtcatgattgaagagattaacgccagaaaagagaacaaaccatcttggttcggactgtgctactgcaaagcactgcagagcgactacatcacgtacatcgacgagctgttaacatatataaacgcgaagcccaatttgttttccatgttgctgaccgatccccaccttgccttgacggtgttctttgggccttgtagtccgtaccagttccgactcactggcccaggaaagtgggagggtgcacgcaacgctataatgacgcagtgggatcgtacgttcaaggtaataaaggccagggtggtgcaggagagtcctagtccttttgagagctttctcaaagtgtttagctttctggcccttctggtggcaatctttctgatattcctctag

SEQ ID NO: 223395 - DNA, 627 bp, synthetic construct
  misc_feature 1..627: note = Description of Artificial Sequence: Synthetic coding sequence
  source 1..627: mol_type = other DNA
atggcaaaaagggtcgccatagtaggggctggagttagcgggctggcatcaataaagtgctgcttagaggaaggtctagagcccacctgctttgagcgctccgacgaccttggcggtctgtggaggtttactgaacacgtagaagaaggacgtgcttccctgtataagagcgtggtatcgaattcctgtaaggagatgagctgctactctgacttcccattccctgaggactacccaaattacgtccctaacagccagttcctggaatatctgaaaatgtacgccaaccacttcgaccttctcaaacatatccagttcaagacaaaagtgtgcagtgtgactaagtgttccgattccgcagtctccggccaatgggaggtggtgaccatgcacgaggagaagcaggaatctgccatctttgacgcagtgatggtgtgcactggattcctcacgaatccatatcttcctttggacagtttccccggtattaatgccttcaagggccagtactttcacagtcggcaatataaacaccccgatatcttcaaggacaaacgggtgttggtcattggcatgggcaattcagggactgacatagctgtggaggctagccacctcgccgagtag

SEQ ID NO: 223396 - DNA, 1830 bp, synthetic construct
  misc_feature 1..1830: note = Description of Artificial Sequence: Synthetic coding sequence
  source 1..1830: mol_type = other DNA
atggaagggaaacccatgaggaggtgcaccaacattcgacctggagagactggtatggatgttacttcaaggtgtacactgggcgacccgaacaagctgcccgaaggcgtaccccagcctgctagaatgccctatatatccgataagcatccacggcaaactctggaggttattaatctcctcaggaaacatcgtgaactgtgtgacgtggtgctggttgttggagcaaaaaagatctatgcccatagagtgatactatctgcctgcagcccatattttagagcaatgttcacaggtgagctcgctgaatccagacagacagaggtggtcattcgcgatatagacgagcgggctatggagctccttatcgacttcgcctacaccagtcaaattacagtggaggaggggaatgttcagacgctcctccctgccgcttgccttctccagctcgctgaaattcaggaggcttgttgcgagtttttaaagcggcaactggaccctagcaactgcctaggaattagagcgttcgctgatactcactcgtgccgtgagctgctgcgtatagcagacaagtttacccagcataacttccaagaagtgatggaaagcgaagaattcatgttgttgcccgcaaatcagctgatcgacataataagtagtgacgagttgaatgtgcggagcgaagagcaggtctttaatgccgtcatggcatgggtgaagtactccatacaagagcgcaggccccagctaccacaggtcttacaacatgtgaggctccccctcttatcaccaaaattcctagtgggcaccgtaggctctgacccccttataaagagtgacgaggaatgtcgagacctggtggatgaagcgaaaaattacctgttactgcctcaggaaaggccactcatgcagggtcccaggacgcggcctagaaaaccaattcggtgcggggaggtgctcttcgcggtgggaggatggtgttctggagacgctatctcaagtgtagaaagatacgacccacaaactaatgaatggagaatggtagcctcaatgagtaagaggaggtgcggagtgggcgtgtctgtactggatgacctgctgtacgcggtgggtggccatgacgggtcttcgtacctgaacagtgtagaaaggtatgatccaaagaccaatcagtggagtagcgatgtcgctccgaccagcacctgcaggacttcggtcggtgtggctgtcttggggggttttctgtacgccgtcggcggacaggatggagtctcttgtctcaatattgtggagcgctacgatcccaaggagaacaagtggacacgagtggcatcaatgagcactcgcagactgggggtggcagttgctgttcttggcggattcctgtatgcagttggaggatccgatggaacttccccattgaatacagttgaaaggtacaatccacaggagaacaggtggcataccatagcacctatgggcactaggcggaaacatctgggatgcgccgtctatcaggatatgatatacgccgtggggggaagggatgacacaacagaacttagcagcgcagagcgttacaacccacgcacaaatcagtggtcccccgtagtcgcgatgaccagtcggcgatccggagtggggctggctgtagttaacggccagctgatggcagtagggggattcgatgggacgacctacctgaaaactatcgaggtcttcgatcctgacgctaacacatggcgcctttacggtgggatgaactatcggagacttggcggaggtgtcggcgtgatcaagatgactcattgcgagtcccacatctggtag

SEQ ID NO: 223397 - DNA, 1416 bp, synthetic construct
  misc_feature 1..1416: note = Description of Artificial Sequence: Synthetic coding sequence
  source 1..1416: mol_type = other DNA
atggctaaaaaggtcgctgtcatcggggctggtgtctcaggcctgatttcacttaagtgttgtgtggatgagggactggagcccacatgctttgaaaggaccgaggatattggcggagtttggagattcaaggaaaacgtagaagacggcagagcgtctatttatcagagcgtcgtcactaacacaagcaaagaaatgtcatgcttttcggatttccccatgccagaggacttcccgaacttcttgcataatagcaagctgctggagtattttaggatttttgccaaaaaatttgacctgctaaagtacatacagttccagactacagtgttaagtgttcggaagtgccccgatttcagctctagcgggcagtggaaagtggtcacacagagcaatggaaaagagcaatccgctgtatttgacgctgtgatggtttgctctggccatcatatcctcccgcacatacccctgaagtcctttcctggcatggaacgtttcaagggccagtacttccactcccgtcagtacaaacaccccgacggcttcgaaggcaaacggatccttgttataggaatgggcaactcagggagcgacatcgccgtggaactaagcaagaatgcggctcaggttttcattagcactaggcatggcacttgggtcatgtctcggatatctgaggacggatatccatgggattcagttttccacacccgcttcaggtcaatgctgcggaacgttttgccccgtaccgccgtgaagtggatgattgagcagcagatgaatcgatggtttaatcacgagaattatggcctggaaccccagaataaatacatcatgaaagaaccagtattaaatgacgacgtgccctcacgcctgctatgcggggctatcaaagtcaaatccactgtcaaagaacttacagagacttctgccatatttgaggatggcactgttgaggagaatatcgatgttataattttcgccacagggtactccttcagtttcccattcctggaggatagcctcgtgaaggtggaaaataacatggtttccctctataaatatatattccccgcacatctggataagtcaaccctggcctgcatcgggctgatccagcctttaggctccattttccccaccgccgagctccaggccagatgggtgacacgggtgtttaaggggctgtgttccttaccctcagagagaaccatgatgatggacataatcaaacgcaacgagaagcgcattgatctatttggcgaatcccaatcccaaaccctgcagaccaattatgtagattacctggacgaactggctcttgaaattggcgctaaaccagatttttgttccttactattcaaggacccaaagctggctgttaggctgtactttggaccttgtaattcatattag

SEQ ID NO: 223398 - DNA, 1599 bp, synthetic construct
  misc_feature 1..1599: note = Description of Artificial Sequence: Synthetic coding sequence
  source 1..1599: mol_type = other DNA
atgggaaagaaggttgcaatcatcggcgcaggggtgagcgggttggcatcgatacgttcctgcctggaggaggggctggagccaacgtgtttcgagaagtctaatgacataggtggcctttggaaattctctgatcacgccgaagaagggagagcatccatttataaaagcgtcttctctaactcgtctaaagagatgatgtgcttccctgatttcccctttcccgatgattttccaaatttcatgcacaacagtaagatccaggagtacatcatcgcgttcgccaaagaaaagaacctgttgaagtatatccagtttaaaacgttcgtttcctcggtgaataagcacccagattttgctacaacaggacagtgggatgtgaccactgaacgggacggaaagaaagagagcgccgtttttgatgccgtgatggtgtgtagcggccatcatgtttatcctaacctgcctaaggagagtttccctggactgaatcatttcaagggtaagtgctttcattcacgggattataaggaacctggggtgttcaatggaaaacgcgtcctggtggtggggctgggaaactcagggtgtgacatcgcaacagagttatcaagaaccgctgaacaggtcatgatttcaagcaggagtgggagctgggtaatgtcacgggtttgggacaacggatacccatgggatatgctcctggtgaccagattcgggaccttcctcaagaacaacctcccgactgccatctccgactggctctacgttaagcaaatgaatgccagattcaagcatgaaaattatggactcatgcccctgaacggcgtgctgagaaaggagccagtcttcaatgacgaactgcctgcatccatcctatgcggcatcgtttccgtgaagcctaatgtgaaggagttcactgagacctcggctattttcgaagatgggactatctttgaagggatcgactgcgtcatttttgcaacaggatactctttcgcctacccttttcttgacgagagcattataaaatctagaaacaatgaaattattctgttcaagggggtcttccctccacttctggagaagagcactattgctgtgattgggtttgtgcagtcactcggggcagccatacccacagtcgacctgcagtcccggtgggcggcacaggttatcaaaggaacttgcaccctgccatccatggaggatatgatgaacgacattaacgagaaaatggaaaagaagcggaaatggtttggtaaaagtgagacaatccagactgattatatagtttatatggatgaactgtcttctttcatcggcgctaagcctaatattccatggctctttctcaccgatcctaaattagccatggaggtatactttggcccttgttctccttaccagtttcggctcgtaggtcctggccagtggcccggtgctcggaacgccatcctgacccagtgggaccggtcccttaagccaatgcagactagagttgtgggcagactccaaaaaccttgctttttttttcactggcttaaactgttcgccattccaatactcctcattgcggtgtttctggttttgacttag

SEQ ID NO: 223399 - DNA, 1599 bp, synthetic construct
  misc_feature 1..1599: note = Description of Artificial Sequence: Synthetic coding sequence
  source 1..1599: mol_type = other DNA
atggggaaaaaggtagcaattatcggggctggagtcagtgggcttgcctccattagatcatgcttggaagaaggcctcgaacccacatgcttcgaaaaaagcaacgatatcgggggtctctggaagttttctgaccacgcagaagaagggcgtgcgtccatatataagtctgttttcagtaacagctctaaagagatgatgtgcttcccagatttccctttcccggatgacttccctaacttcatgcataattcgaaaatccaagagtatattatcgcatttgctaaagagaaaaatttactgaaatatattcagtttaagacgttcgttagttccgtgaataagcatccagactttgctactactggccagtgggatgtcaccacggaacgggatgggaaaaaagaatccgctgtgtttgacgcagtgatggtctgtagcggccaccatgtttaccctaacctgcctaaagaatcttttcccggactgaatcacttcaaggggaaatgtttccacagccgggattataaggaacccggagtgttcaatggcaagcgtgtattagtggtcgggctggggaactccgggtgcgacatcgcgacggagctgtcacgaaccgcagagcaggtcatgatcagctcaagaagcgggtcttgggttatgtctcgagtctgggacaacggctatccatgggatatgctcttagtcacacgattcggcacttttttaaagaacaatcttccaacggctatttcagactggttgtatgtaaagcagatgaatgctaggttcaagcacgagaattatggtctgatgcccctgaatggtgtgctgaggaaagagcccgtctttaacgacgaacttcctgccagcatcctatgcggcatcgtgtctgtcaagccaaacgttaaagagtttaccgagacctcagccatattcgaggatgggacaatctttgaaggcatcgattgtgttatctttgctactggctatagcttcgcctacccctttctggatgagagtattatcaagtctcggaacaacgaaattattttattcaagggcgtctttcctcccctactggagaagtcaacaatcgccgtgattggcttcgtgcagtcgcttggcgcagcaattcccactgtcgacctgcagagtcggtgggccgcacaggtcattaaggggacttgtaccctgcccagcatggaagacatgatgaacgacatcaacgaaaagatggagaagaagaggaagtggttcggaaaaagcgaaacaattcagaccgactacatcgtgtatatggatgagctcagcagcttcataggagcaaagccgaacattccatggcttttcttgacagacccgaaacttgcaatggaagtctactttgggccatgctccccttaccagtttcgtttagtggggccaggccagtggcccggagctcggaacgctattctcacacaatgggaccgctccctcaagcctatgcaaacccgggtggttgggaggctccagaaaccctgttttttctttcactggctcaaactattcgcaatccctatcctcctgattgcagtgtttctggtgttaacatag

SEQ ID NO: 223400 - DNA, 1410 bp, synthetic construct
  misc_feature 1..1410: note = Description of Artificial Sequence: Synthetic coding sequence
  source 1..1410: mol_type = other DNA
atgggcaagaaagttgcaatcatcggtgcaggcgtttctgggctggcctccatccgatcctgcttagaggaaggacttgagcctacctgtttcgaaaaaagcaatgatatcgggggtctgtggaaattctccacttttgtatcttccgttaataagcaccccgacttcgccaccaccggtcagtgggacgtcacaaccgaacgtgatggaaagaaggagagcgctgtcttcgatgccgtcatggtatgtagcggccaccatgtgtatccaaacctgcccaaggaatcctttcccggactgaaccacttcaaaggcaagtgcttccattctcgcgactataaagaacctggagtgttcaatggaaagcgcgtgctcgtggtgggtctgggcaattccgggtgcgacatcgccacagagctttccagaacggcagagcaggttatgatttcgtccaggtcagggtcttgggtcatgagccgagtgtgggacaacggatacccctgggacatgttgttggtgacacggtttggcaccttcttgaaaaacaacctgcccactgcaatttcggactggttgtacgtgaagcagatgaacgcacggtttaaacatgagaactacgggctgatgccactgaatggcgtgttgagaaaagagccagtcttcaatgacgaactccccgctagtattctctgtgggattgtctctgttaaaccgaatgtgaaggaattcaccgagacatcagctattttcgaggacggaaccatcttcgagggtattgactgcgttatctttgctactgggtacagttttgcctatccatttctcgacgagagcatcatcaagagtcgcaataatgaaatcatattgttcaagggggtttttcccccactgctggagaagagtaccatagctgtgatcggattcgttcagtctttaggcgctgcaatccccactgtggacctccagagccggtgggctgcgcaggttattaaagggacgtgcaccctgcccagcatggaggacatgatgaacgacattaacgagaaaatggagaaaaaacggaaatggttcgggaagtctgaaactattcaaactgattatatagtctatatggatgagctgtcatccttcattggcgctaaacctaatatcccctggctgtttctgacggatccaaagctggcaatggaggtctacttcggtccctgtagtccataccagtttcggctcgtggggcctggtcaatggcccggtgccaggaacgcaattctgacgcaatgggatcgatctctcaagcctatgcaaacgcgggtggttgggagattgcaaaagccatgcttcttcttccattggctcaagctttttgcaattcccatcctgctaatagccgtcttcctagtgttaacatag

SEQ ID NO: 223401 - DNA, 1539 bp, synthetic construct
  misc_feature 1..1539: note = Description of Artificial Sequence: Synthetic coding sequence
  source 1..1539: mol_type = other DNA
atgccggcttccacccgctcacagaaacgacaggggatggactccctgctggagcctctaaagatgaacatggatcacgcagaggaaggccgagcctccatatataagagtgtgttttcaaatagtagtaaggagatgatgtgttttccggactttccatttcctgacgacttcccaaattttatgcataacagcaagatccaggaatatatcattgcttttgccaaagagaagaatctgttgaagtatatccagtttaagactttcgtttcctcagtgaacaaacatccagacttcgccactactggtcagtgggacgtcacaaccgagcgcgacggaaagaaggagtcagctgtgttcgacgcagtcatggtgtgctcaggccatcacgtgtacccaaatctcccgaaagagagctttccaggtctaaaccacttcaaggggaaatgcttccattccagagactataaggagcctggcgtcttcaacgggaagagagtgttagtggtagggctgggaaattccgggtgcgatattgcgacggagctctcgcgaacagctgagcaggttatgatcagtagtcggtcgggatcttgggtcatgagtcgcgtgtgggataacggctatccatgggatatgttgctggtcacccggttcggtacttttctgaaaaataatctgcctactgctatctctgactggctgtacgtgaagcagatgaacgccaggtttaagcacgagaactacggcttgatgcccctgaacggcgtgctgaggaaggagccggttttcaacgatgaactccctgcctccattctgtgcggtatcgtgtctgtgaaaccgaacgtcaaggaattcaccgaaacatccgcaatcttcgaggacgggaccatttttgaaggcatcgactgcgtcatttttgctacaggctactcatttgcctatcccttcttggacgaatccattatcaaatctcgtaataacgagattatcctctttaagggcgttttccccccattacttgagaaatccactattgcagtgattggatttgtacagagtctgggtgccgcaataccaaccgtcgacttacagtctcgttgggcagcacaggtgataaaggggacttgcacccttccaagcatggaagacatgatgaatgacattaacgaaaaaatggagaagaagagaaaatggttcggcaagtcagaaaccatccagacggattacatcgtgtatatggatgagttaagctcctttatcggggctaagccgaacatcccttggctattcctcaccgaccccaagctcgccatggaagtgtacttcgggccttgtagcccgtaccagtttaggttggtgggacccggacagtggcccggtgccagaaatgccatcttgacgcagtgggatcggtcattgaaacctatgcagacccgcgtggtcggcagactccagaaaccctgcttttttttccactggctgaagctttttgccatccccattctgctgatagctgtgttcctggtgcttacctag

SEQ ID NO: 223402 - DNA, 1677 bp, synthetic construct
  misc_feature 1..1677: note = Description of Artificial Sequence: Synthetic coding sequence
  source 1..1677: mol_type = other DNA
atggccaagaaggttgccgtcattggagccggtgtttctgggctgtcctcaattaagtgttgtgttgatgaggatctggaacctacatgttttgaaaggtccgatgacatcggcggtctgtggaaatttactgagagttcaaaagatgggatgacaagggtgtataaatctttagtaaccaatgtgtgtaaagaaatgtcgtgctattcagattttccgttccatgaagactatcccaatttcatgaaccatgaaaaattctgggattaccttcaggaatttgccgaacattttgatttgcttaaatacattcagttcaagacaaccgtgtgcagtataaccaagcgtcctgattttagcgagactggacaatgggacgtcgtgactgaaaccgagggaaaacagaatcgggctgtcttcgacgctgtgatggtctgtactggccactttcttaatccccacctccccctggaagcctttccaggcatccataagttcaaggggcaaatcctgcactcccaggaatacaagattcccgagggattccagggcaaaagagtgcttgtgattggtctggggaacactggtggagacatagccgtggaactgtccagaactgccgctcaagtgctgttatcaacgcggaccggcacttgggtcctaggcaggtcatcggactggggatatccgtacaacatgatggtgacccggagatgctgtagcttcattgcccaggtgctgccgagcagatttctgaactggatccaggagaggaaactcaacaaacgcttcaaccatgaggactacgggctgagcataacaaaaggcaaaaaggctaaatttatagttaatgatgaactgccaaactgcatcctctgtggagccataacaatgaagacaagtgttatagagtttaccgagacctccgctgtctttgaggatgggaccgtggaggagaatatagacgttgtgatctttaccaccggatatacgttctccttcccgttctttgaagaacccctaaagtctctctgcaccaaaaagatctttttgtacaagcaggtgtttcctctgaacctcgaaagggccaccttggccattatcgggttaatcggcctgaaagggagcattttatctggaacagaacttcaggcccgatgggtgacaagggtcttcaaaggcctttgtaaaatccccccttcccaaaagctgatgatggaagccacggagaaggagcaactcattaaacggggagtgtttaaggatacatctaaagataagttcgattatattgcatatatggatgacattgctgcctgcatcggtacaaagccctcaattcctttgctgtttttgaaagacccacgcctggcctgggaggtgttcttcgggccttgcaccccctatcagtaccggctgatgggccctggaaaatgggatggcgcaagaaatgccatacttacgcagtgggatcgaacactgaaacctttgaagacaagaattgtgcccgactcctcaaagcctgcatcaatgagccattacttgaaggcttggggagcgccagttctgttagcctcactgctacttatatgtaagagtagtcttttccttaaattggtcagggataagctgcaagataggatgtctccatatctggtttccctatggcgtgggtag

SEQ ID NO: 223403 - DNA, 1602 bp, synthetic construct
  misc_feature 1..1602: note = Description of Artificial Sequence: Synthetic coding sequence
  source 1..1602: mol_type = other DNA
atgactaagaaaagaatagctgtgattggaggaggtgtctccggactgagttcaatcaaatgttgcgtcgaggagggcctggaacctgtgtgcttcgagaggaccgatgatatcggtggactgtggcgtttccaggagaatcctgaagaggggagagcctcaatatacaaaagcgtgattatcaataccagcaaggagatgatgtgcttcagcgattaccccattcctgaccactaccctaacttcatgcataacgcacaagtcttagagtactttcggatgtatgctaaagagtttgatcttctgaaatacatcaggtttaagaccaccgtttgcagcgtcaaaaaacagccagactttgctacttcggggcagtgggaagtggtaactgaatctgaaggcaaaaaagagatgaacgtattcgacggggtgatggtgtgtactggccatcacaccaacgcacacttgcccctggagtcctttccaggcatcgagaaattcaagggtcagtattttcacagtagggattataagaaccctgagggctttaccggtaagagagttattatcattggaattggtaatagcggtggggacttggccgttgagatcagtcagacggccaaacaagtgttcctctccactaggcgaggggcatggattctcaaccgcgttggggactacggatacccggctgacgttttgttctcttctcggttgacccacttcatctggaagatttgtggccagtccctcgccaacaaatacttggagaagaaaatcaatcagcgctttgaccatgaaatgtttgggctgaagccgaagcacagagctttgtcacagcatccgacattgaacgatgacctaccaaatcgaatcatcagcggtttagtaaaagtgaaagggaatgtcaaagagttcactgaaacagcggctatattcgaggacgggtcccgtgaagatgatattgacgccgtcattttcgctacggggtactcttttgactttccatttttagaagacagcgtgaaggtcgttaaaaacaaaattagcctgtacaaaaaggtgtttcccccaaacctcgagcgacccactcttgcaattattggcctcattcagcctcttggggctatcatgcccatctccgagctgcagggacggtgggccacccaggtgtttaagggcttaaaaacgttgccgagccagagtgagatgatggccgaaatttcaaaggctcaggaggagatcgataagaggtacgttgagtcacagagacacactatccagggcgactacattgatactatggaagagctggcagatttagtgggcgtgaggccaaatttgctgtcgttagcatttacagatcccaagttggccttgcatttactgcttggcccttgtacaccaattcactacagagtgcaggggcctgggaagtgggacggcgctagaaaggccattctcaccaccgacgataggatccgcaagccacttatgacgcgtgtagtggagagatccagtagcatgacatctacaatgactattggtaagttcatgcttgccctggcatttttcgccataatcatcgcctatttctag

SEQ ID NO: 223404 - DNA, 858 bp, synthetic construct
  misc_feature 1..858: note = Description of Artificial Sequence: Synthetic coding sequence
  source 1..858: mol_type = other DNA
atgaccaaaaagaggatcgccgtgatcggaggtggcgtcagtgggctgtcgagcattaagtgttgtgtggaggagggtctagagcctgtgtgctttgagcgaacggacgatatcggcggactctggaggttccaggaaaaccctgaggaagggagagcttcaatttacaaatccgtgatcatcaatacaagcaaggagatgatgtgcttttctgactatcctattccggatcactacccaaactttatgcataatgcccaagttctcgaatattttaggatgtacgccaaggaatttgatctgctcaaatatatccgatttaagacaacagtgtgctctgtgaaaaagcaacctgacttcgctacaagcgggcagtgggaagtggttaccgagtctgagggcaagaaggaaatgaacgtgtttgacggagtaatggtatgcaccggtcaccacaccaacgcccacttgcctctggaaagtttccctggcatcgaaaagttcaagggtcagtatttccacagcagagattataagaaccctgagggcttcaccgggaagcgtgtaataattataggaatcggcaacagtggcggagacctcgcggtggagatttctcagaccgcgaaacaagtcttccttagtacacggcgaggggcatggatcctcaaccgcgtgggagactatggataccctgccgatgtcctgttctcctctagactcacacatttcatctggaagatttgcgggcagtctctggcgaataaatacctggagaagaaaatcaaccagagattcgatcacgaaatgttcggattaaagccaaagcatcgcagcaaagacatcgctctcaccgaatag

SEQ ID NO: 223405 - DNA, 1395 bp, synthetic construct
  misc_feature 1..1395: note = Description of Artificial Sequence: Synthetic coding sequence
  source 1..1395: mol_type = other DNA
atgactaagaaaagaattgcagtaatcggaggcggagtctctggactgagttctattaagtgttgcgtggaagaggggttggaacccgtatgcttcgagcggactgacgacatcggcggactgtggcgcttccaagaaaatccagaagagggaagggcaagtatctacaagtcagtgattattaacacgtccaaagagatgatgtgtttctcggactatcctatcccagatcattacccgaactttatgcacaacgcccaagtcctagaatactttcgcatgtatgctaaagaattcgacttgctgaagtacattcggttcaagaccaccgtatgctcggtgaaaaagcaacctgactttgccaccagcggccagtgggaggtagtgactgagtctgaagggaaaaaggaaatgaatgtttttgatggagttatggtatgcacgggacaccacaccaatgcccatctgccattggagtctttccccggtatagagaaatttaagggacaatacttccacagtcgcgactataaaaacccagagggtttcaccggaaaaagagttatcataatcgggataggcaactccggaggcgacttggccgtcgaaatatcacaaacagccaagcaggtctttctgagcactaggcgcggtgcatggattctcaaccgggttggagactacgggtatcccgctgacgtactgttttctagtcgccttactcactttatatggaagatctgtggccagtcactggctaataagtacctggagaagaagataaaccagagattcgatcacgagatgttcggcctgaaacccaagcaccgggcactgtcccagcaccctaccctgaatgatgatctccctaacaggataatatctgggctcgttaaggtcaaggggaatgtgaaagaattcacagagaccgccgcaatttttgaagatggatctagggaagatgatatcgacgccgtaattttcgcgactggctatagctttgacttcccgtttctcgaggatagtgtgaaagttgtcaaaaataaaatttcgctgtataagaaagtctttccacctaacctagagcgtcccacgcttgctattatcgggctgatccaaccattaggggcaattatgcccatcagtgaacttcagggcagatgggcaacgcaggtctttaagggactcaagaccttaccaagccagtctgagatgatggctgaaatttcaaaagcacaggaagaaatcgacaaatccctgactatgcgcaagacttcggacaagcctaaactgaagaacatcctccagatacccgactacctaaaaacggttaaaatcataaataaggagagcctgagaaactgtccaggaataaagggcccaaaagagacctag

SEQ ID NO: 223406 - DNA, 579 bp, synthetic construct
  misc_feature 1..579: note = Description of Artificial Sequence: Synthetic coding sequence
  source 1..579: mol_type = other DNA
atgactaagaagagaatcgccgtgatcgggggaggagtgagcgggctgtcctctattaagtgttgcgtcgaagaaggcctggagccagtgtgcttcgagcggaccgatgacattgggggactatggcgctttcaggaaaatcccgaggaaggcagagcttctatttacaagtcagttattatcaataccagcaaagaaatgatgtgcttttcagactatccaattccagatcactaccccaacttcatgcacaacgcccaggtgctcgaatacttcagaatgtatgcaaaagagtttgatctgctgaaatacataaggtttaagactactgtttgttctgtgaaaaaacagccagacttcgccacctcaggacagtgggaagttgtaaccgagagcgaaggcaagaaggagatgaacgttttcgacggggtgatggtgtgtactggacaccacactaacgcacacctccctctggagtcttttcccggtattgagaagttcaaaggacaatactttcactcacgagattacaagaatccagagggctttacaggtaagagggtgattattatcgggtag

SEQ ID NO: 223407 - DNA, 438 bp, synthetic construct
  misc_feature 1..438: note = Description of Artificial Sequence: Synthetic coding sequence
  source 1..438: mol_type = other DNA
atgaccaaaaagcggattgctgtcatcggcggtggagtcagcggcttgtccagtatcaaatgttgtgtggaggaggggctagaacccgtgtgttttgaaaggactgacgacatagggggactttggagatttcaggagaaccccgaggaaggacgagctagtatttacaagagcgtgattatcaacacatcaaaggaaatgatgtgcttctctgactaccccatacccgaccattacccaaacttcatgcacaatgcccaagtactggagtacttccggatgtacgccaaagaattcgacttgctcaagtacataaggtttaagaccaccgtctgtagcgtcaaaaaacagcccgacttcgccacttccggccaatgggaagttgttaccgaatccgagggtaaaaaagagatgaatgtcttcgacggagtaatgtag

SEQ ID NO: 223408 - DNA, 3810 bp, synthetic construct
  misc_feature 1..3810: note = Description of Artificial Sequence: Synthetic coding sequence
  source 1..3810: mol_type = other DNA
atggaggcaacaggcgtgcttcccttcgttagaggcgtggatctgtctggcaatgattttaaggggggatattttccggaaaacgtaaaagccatgacttctttacggtggctgaaactgaatcgaaccgggctgtgttacctgcctgaggagctggcggcactgcagaagctggagcacttgagtgtgtcccataataatctgactacactccacggtgagctctcatcgctgccatctctgagagcgattgtggctcgcgctaatagcttgaagaatagcggagtgcccgacgatatattcaagttggacgacctttctgtgctggatctgagccataatcagcttaccgagtgcccaagggaactagagaacgctaagaacatgcttgtcctgaacctgtctcacaattctattgacactatccctaaccagctttttattaacctgacggacttgctctatttagacctgtctgagaatcgactggagagtttgccaccacagatgcggagactggttcacctccagaccttagttctcaatgggaaccctctgctgcatgcccaactgcgccagcttcccgcaatgaccgctttgcagactctccatttgcgctctacgcagagaactcagagcaacctccccaccagcctggagggactgagtaacctggccgacgtggaccttagctgtaatgatctgacacgtgtcccagagtgtctgtacactttgccttcacttaggaggctcaatctaagttctaaccagattaccgaactgtcactctgtattgaccagtgggtacacgtggaaaccctaaacctgtctaggaaccagctcaccagtctcccctcagccatatgcaagctcagtaaacttaaaaaactctatctcaattccaacaagctggatttcgatggtctgccatctggaatcggcaaactgactaatcttgaagagttcatggcggctaataacaatcttgagttggttcctgaaagcctgtgccggtgtcccaaattgcggaagctggtgttaaacaagaatcacctggttacgctgcctgaggccatccattttttgaccgagatagaggtgctcgacgtccgcgaaaatcctaaccttgttatgcctccaaaacccgctgaccgggcagccgaatggtacaatatcgacttctctctgcagaaccagcttcgtctggcgggagccagccctgccacagtcgcggcagctgccgctgcaggctccggccctaaggatcccatggccagaaaaatgcgtctgcggagaaggaaagactcagcccaggacgaccaggcaaaacaggtcctgaaggggatgagcgatgtggctcaggagaagaacaaaaaacaagaagaaagcgcagatgcgcgagcgcctagcggcaaagtccgacgctgggatcagggactggagaaacctagactcgactattctgaatttttcacagaagacgttggtcagctacccggtctgaccatctggcaaatcgagaactttgtccccgtgctcgtagaagaggcttttcatggtaagttttacgaagccgattgttacatcgtgctgaaaacattcttagacgactccggcagcttaaactgggagatatattattggattggtggagaggccaccctagacaaaaaagcatgctctgcaattcatgcagtgaacctcaggaattatctaggcgctgaatgccggactgttcgcgaggaaatgggcgatgagagtgaggagttcttgcaagttttcgacaatgatattagctacattgagggtggtaccgcatccggtttttacactgtggaggatacccactacgtgacgcggatgtatcgcgtgtatggaaaaaagaacatcaagcttgagccggtgcctcttaaaggaactagtctggatccacgctttgtgttcttactagaccggggactagatatttacgtgtggcgtggcgctcaggccaccctcagcagtactaccaaagcccgactgtttgctgagaagataaacaaaaatgagcgaaagggtaaagcggagattactctgttggtgcaggggcaggagcttcccgagttttgggaggccctgggaggagagcccagcgaaatcaagaaacacgtgccagaggacttctggccccctcagcccaaattgtataaggttgggcttggccttggctatctagagctgccgcagatcaactacaagcttagcgtcgaacacaagcaacgccctaaggtcgaactcatgccgagaatgcgacttctgcagtcccttctcgataccagatgcgtgtacattctggactgttggtccgatgtgttcatctggctgggaagaaagtctcccaggctggtccgggctgctgccctgaagcttggccaggaactgtgtggcatgctgcacagacctcggcatgctactgtgtcccggtcactagagggcacagaggctcaagtgttcaaggctaagttcaagaattgggacgatgtcctcacggtagattacacccggaacgctgaggccgtgttacagtcccctggcctatccggtaaagtcaagagggatgccgagaaaaaggaccagatgaaggccgatctgactgcactgtttctgccaagacagccaccaatgtcactcgctgaggcagaacagcttatggaggagtggaatgaggatttggacggaatggagggtttcgtgctcgaaggcaaaaaatttgccagactgcccgaggaagagtttggacacttttatactcaggactgttacgttttcctttgccgttactgggtccctgtggagtatgaagaggaggagaaaaaggaggataaggaagaaaaggccgaaggaaaagaaggggaagaagccaccgccgaggccgaggagaaacaacctgaggaggactttcagtgcatcgtctacttttggcaggggcgagaagccagtaacatgggttggctgacctttacattctctttacagaagaagttcgagagcctatttcctggcaaactggaagtggttcgtatgacgcagcagcaagaaaatccaaaattcctgtcccattttaagagaaagttcatcatccaccggggtaagaggaaagccgttcagggtgcacaacaaccctccctgtaccagattagaaccaacggctctgccttgtgtactagatgtatacagataaacactgactccagcctgctgaactctgaattttgtttcattctcaaggtgccctttgaaagcgaggacaatcagggcattgtgtatgcctgggtcgggagggcctcagaccctgatgaagctaagctggcggaggatatattaaacacgatgttcgacacttcctacagcaagcaggtcatcaacgagggcgaggagcccgagaacttcttttgggtcgggatcggcgctcagaaaccctacgatgacgatgccgaatacatgaagcacacccgcctgttcagatgctccaacgagaagggttactttgcagtgactgaaaagtgctccgatttctgccaagatgacctggcagacgacgacataatgctgttggataatggccaagaagtgtacatgtgggtggggacgcagacttcccaggtcgagataaaactctcattgaaggcatgccaggtgtacatccagcacatgcggtcaaaagaacacgagcgtcccaggaggctccgtttggttcgtaaggggaatgagcaacatgcatttacaaggtgctttcatgcttggtccgcgttctgtaaggcattagcttag

SEQ ID NO: 223409 - DNA, 3552 bp, synthetic construct
  misc_feature 1..3552: note = Description of Artificial Sequence: Synthetic coding sequence
  source 1..3552: mol_type = other DNA
atgacctccctgagatggcttaaattgaatcgtactgggctgtgttatctgcccgaggaactcgcagcgctgcagaagttggagcacctcagtgtctcacacaacaaccttacgacccttcacggagaactatcgtccttaccctcgttgagggccattgtggctagagcaaactcgctgaaaaattcgggcgtgcctgatgacatcttcaagttggatgatctgtccgtccttgacctctctcacaaccaactgactgaatgccccagggagctggaaaacgccaagaacatgctggtcctgaatctgtctcacaatcggcagctgcccgcaatgacagccttgcagaccctccacttgcggagtacccagcgaacgcaaagcaacttacctacctctctggaaggcctgtctaaccttgctgatgtggacctcagctgtaatgatctgacaagagtgcctgaatgcctttacactctgcccagcctccgacgtctgaatctgtccagcaaccagattaccgaactttcactctgcattgatcagtgggtgcatgtggaaaccctcaatttatcaaggaatcagctcacttccctgccttcagctatttgcaaattgtctaaactgaagaaactctatcttaattcaaacaaactcgacttcgatggcctcccttccggtattggcaagctgaccaatctggaggaatttatggcagccaataacaacctggaactggtgcccgaatcactgtgtcggtgtcccaaactaagaaaacttgtgcttaacaagaaccacctcgttacactgccagaggccatccattttctcaccgaaatagaagttctggatgtgcgcgaaaaccccaaccttgtgatgccacctaaaccagccgacagagctgcagagtggtacaatatcgacttctccctccaaaatcaactgcgactagctggggctagtcctgcaactgttgctgctgcggcagccggatccggcccaaaggacccaatggccagaaaaatgcgcctgcgccgaaggaaggactccgcgcaggacgaccaggctaaacaggtcctgaagggtatgtctgatgtcgcccaggagaagaataagaagcaggaggaaagcgccgacgccagagcaccctctggcaaagtgcggaggtgggaccagggcctggagaaacccaggcttgactattctgaatttttcactgaagatgtcggtcagctgccgggattgacaatttggcagatcgaaaattttgtgcccgtgctcgtcgaggaagcgttccacgggaagttctatgaagccgattgttacattgtcctcaagacattcctggacgactccggcagtctcaactgggaaatttactactggatcggcggtgaggccactcttgataagaaagcctgtagcgctatccacgctgtgaatctccgcaactatctgggggcagaatgccgcacagtccgcgaggaaatgggagatgagagcgaagagtttcttcaggtcttcgacaatgatatttcctacattgaagggggaaccgcaagcggcttttataccgtggaggatacacattatgtgactcgcatgtatcgagtctacggaaaaaagaacatcaaactggaacctgtcccacttaaaggaacaagcctggaccctcgctttgtgtttctgctagacagagggttagacatttatgtttggaggggcgcacaggctaccctttctagcaccaccaaagcgaggttgtttgctgaaaagatcaacaagaacgagaggaaaggcaaagccgaaatcaccctccttgtccagggacaggagctgccagagttctgggaggccttaggcggtgaaccatcagagattaaaaaacatgttcccgaggacttttggccaccacagccaaagctttataaggtaggcctgggcctcggctacctagagcttccccagatcaattataagttgagtgtagagcacaagcagagacccaaggtggaattgatgccccgtatgaggcttctccagagtctcttagacaccagatgtgtgtacattctggactgttggagcgacgtctttatctggctagggaggaaaagccctcggctggttcgcgctgccgcactgaagctcggacaggagttatgcggcatgctacaccgccctcgccacgcaaccgtgagccgcagtcttgaaggcactgaagcgcaagtctttaaggccaagtttaagaactgggatgatgtcttgacagtcgactatactcggaacgctgaagcagttcttcagtctccaggcctgtctggaaaagtgaaacgggacgcggagaagaaggaccagatgaaggccgacctcactgcccttttccttcctagacagcctcccatgtcccttgcggaggcggagcagcttatggaagagtggaatgaggacctggatggaatggaaggctttgttctggaagggaagaagtttgctcgtctgccagaagaggaattcggacacttctacacgcaggattgttatgtattcctgtgtaggtattgggtacctgttgaatacgaggaggaggagaagaaggaagataaagaagaaaaagctgaggggaaggagggggaagaggccacagctgaggcagaggagaagcaaccggaagaggactttcaatgtattgtgtatttctggcaggggagagaggcatccaatatgggttggcttacatttacatttagtcttcagaaaaaatttgaatctctttttcctggcaagctggaggtggtgcgtatgactcaacagcaggagaaccctaagttcttatcccatttcaagcggaaattcattattcacagagggaaacgaaaagctgtgcagggagcccagcagccctctttgtaccaaattcggacaaatggttccgcactatgtacaaggtgtatacagataaacactgattcttccctgctcaattcagagttctgttttatcctcaaggttccgtttgaatccgaggataatcaggggattgtgtatgcctgggttggacgagcctctgaccctgacgaggccaagctcgctgaggatattttgaacacaatgtttgacacttcctacagtaagcaagtgatcaacgagggggaagagccggagaacttcttctgggttgggatcggagctcagaagccttatgacgacgatgccgagtacatgaagcacacaaggctgtttagatgctcgaacgaaaaggggtatttcgccgtgaccgaaaagtgttccgacttttgtcaggacgacctggctgacgacgacatcatgctgcttgataacggacaggaagtgtatatgtgggtgggcacacagacgtctcaggtcgaaattaagctctccttgaaagcatgtcaagtttatatccagcatatgcggagtaaggaacatgagagacccagacggctgcgactggtccgcaagggcaatgagcagcatgcatttactcggtgctttcatgcctggtcggccttctgcaaagctctggcgtag

SEQ ID NO: 223410 - DNA, 3447 bp, synthetic construct
  misc_feature 1..3447: note = Description of Artificial Sequence: Synthetic coding sequence
  source 1..3447: mol_type = other DNA
atggaagcaacaggtgtgttgcctttcgtgaggggcgtggacttgagtgggaatgactttaaaggcggatattttcctgaaaatgtgaaagctatgacgtcactccggtggctcaagctgaatagaacgggtctctgctatctgccagaagagctggcagccctgcaaaaactggagcatttgtctgtcagccataataaccttacgacgctccatggagaattgtcatctctgccgtccctcagagctattgtggcgagagccaactccctgaaaaacagtggcgttcctgatgacatctttaagctggatgacctgtctgtgcttgacttgtcgcataaccagctgacagaatgcccgagagagttggagaatgctaagaatatgctagtgctaaatctaagtcacaacagtatcgacacaatacccaaccagttattcataaacctgacggatctgctctatctggacttgagtgaaaatcgcctagagagcctcccacctcagatgagaagattggtgcacctgcagacactggtgcttaacggcaatcccctcctacatgctcaattgaggcagttgccggctatgactgctctgcaaaccttgcatctgcgcagcacccagcgtactcaatccaacctgccaacctctctggaggggctttcgaatctcgccgacgtggacctgtcatgtaacgacctgacacgcgtgcccgaatgtttgtacacccttcccagtctcaggcggctcaaccttagcagtaaccagatcacagagttgagcctctgtattgatcagtgggtccacgtcgagactctgaatttatcacgcaaccagctcacatctctgcctagcgctatatgtaagctgtctaagcttaagaaattgtatctcaatagtaataaattggattttgacgggctgccgtccggaatcgggaagctgactaacctggaagaatttatggcagccaacaataatcttgaactggtgcctgaatctctgtgtaggtgtcctaaactcagaaagctcgtgctcaacaagaaccacctagttacccttccggaagcaatacacttcctcaccgagatcgaagttctcgatgtacgggagaatccaaacctggtgatgcctccaaaacccgcagatagggcggctgaatggtataacatagatttctcacttcaaaatcaactacgacttgcaggagcttctccagccaccgtggctgccgcagcagcggctggctctggacccaaggacccaatggctcggaaaatgaggcttcgccgaaggaaagattctgcccaggatgatcaggcaaagcaggtcctcaaggggatgagcgatgtggctcaagagaaaaataagaagcaggaagaaagtgccgatgccagagccccttccggtaaggttcggagatgggatcagggcctcgaaaaaccaaggttagattattccgagttttttacagaagatgtcggacagctgccagggctcacgatttggcagatagagaactttgtccccgtactggttgaagaagcttttcatgggaagttctacgaggcagactgctacatcgtgcttaagactttcctcgacgattctggatctctcaattgggaaatttattattggatcgggggtgaggccacgctggacaagaaggcatgcagcgccatccacgcggttaatttgcggaactacctcggggctgaatgtagaaccgttcgggaagaaatgggcgacgagtctgaagaatttctgcaggtgtttgacaacgacatttcctacatcgaagggggaacagctagcggtttctacacagtagaagacactcactacgtgacccgcatgtaccgtgtctacggcaagaaaaacatcaagctcgagcctgtccccctgaagggcacttcacttgaccctcggttcgtctttctgctggatcggggacttgacatctacgtgtggaggggcgcacaggctacactgtccagtaccaccaaggcaaggctgtttgccgagaagattaataagaatgagcgtaagggcaaagccgagatcaccctgttagtccagggccaggaactgcccgagttctgggaggctcttggtggcgaaccttctgaaatcaaaaagaactgggacgacgtgttgactgtggattacacccgaaacgccgaagccgttctacagtccccagggcttagtggaaaggtgaagcgggacgctgagaaaaaagatcagatgaaagctgacctgactgccctgtttctgcctcggcaacccccaatgtccctggccgaggccgagcagctcatggaagagtggaacgaagacctggatgggatggaaggcttcgtcctcgaaggcaaaaaattcgcaaggctcccggaagaggagttcgggcacttctatactcaggactgctacgtcttcctgtgccgctactgggtgcccgtggaatacgaagaggaggagaaaaaagaggataaagaggaaaaggcggagggcaaggagggtgaggaggccaccgcggaggcagaagaaaaacagccagaagaggattttcagtgcatcgtctatttctggcaggggcgtgaagcatcaaatatgggatggttgaccttcacctttagcctgcaaaaaaaattcgagagtctctttcctggcaaattggaggtggtgcgcatgacccagcagcaggagaatccaaagtttctaagccacttcaaaagaaagtttattatccaccgcggaaaacgcaaagctgtacagggagcacagcagccttcactgtatcagatcagaacaaatggcagcgcactttgcacacggtgcattcagatcaacaccgactcctccctactcaattcagagttctgcttcatcctcaaggttccattcgagagtgaagacaaccaaggaatagtgtacgcctgggtcggccgagcctctgatcccgacgaggcgaagctggctgaagatatcttaaatactatgttcgatacgtcttactccaagcaggtaataaatgagggggaggagcccgaaaactttttttgggtggggattggcgctcagaagccctatgacgatgatgccgagtacatgaagcacacccggttgtttcgctgttctaatgagaagggctacttcgccgtgactgaaaagtgcagcgatttttgccaagacgatctggcagacgatgatattatgctgctagacaacggacaggaggtgtatatgtgggtggggactcaaacaagccaggtggaaattaagctgagcctcaaggcttgccaagtctatattcagcacatgagatccaaagagcatgagcggcctagacggctccgactagtgagaaaagggaacgaacaacacgcctttacccgctgtttccacgcgtggtccgctttttgtaaggctcttgcctag

SEQ ID NO: 223411 - DNA, 1284 bp, synthetic construct
  misc_feature 1..1284: note = Description of Artificial Sequence: Synthetic coding sequence
  source 1..1284: mol_type = other DNA
atgttctttacctgtggacctaatgaagctatggtggtaagcggcttttgccggtcaccacccgtcatggtggcgggtggccgagtgtttgtgctgccctgcattcagcagattcagcgtatcagcctgaacaccctcactctgaacgttaaaagcgagaaagtgtatacccgccacggcgtcccgatctccgtcacaggcattgcacaggtgaaaatccaagggcaaaataaggagatgttagccgctgcctgtcaaatgtttttaggtaagactgaggcagaaatcgcccacatcgcccttgagacactggaaggacaccaaagagccataatggctcatatgacagtcgaagagatctacaaggatcggcagaaattcagcgaacaggttttcaaggtagccagcagcgatctggtgaatatgggcatcagcgtggtcagctatacacttaaagatatccacgatgaccaggactacctacactccctgggtaaggcacggacagctcaggtgcaaaaggatgcccgaattggcgaagctgaggcaaaaagggatgccggaatccgcgaggccaaggctaaacaggaaaaggtgtcagctcagtacctgtccgagatcgaaatggccaaggcacagagggattatgagctgaaaaaagccgcatatgatatcgaggtgaacacacggagagcgcaggccgatctcgcttatcagctgcaagtcgccaagaccaagcagcagattgaagagcagcgggtgcaggtacaggtggtagagagggcccagcaagtcgcagtgcaggagcaggaaatagctcgccgagagaaggaactggaggcccgagttcgcaaacccgctgaggccgaacggtacaagcttgaaagactcgctgaagccgagaagtcccaacttattatgcaggccgaggccgaagcggcttctgtacgcatgaggggcgaagccgaagcattcgccataggagccagagccagagccgaggccgagcaaatggccaagaaggcggaagcgttccagctgtaccaggaggccgcacaattagacatgctgcttgagaagttgccccaggtggctgaagaaatctcaggacccctgaccagtgctaacaaaatcactctcgtgtcctcaggatcaggtacgatgggggctgccaaggtgactggcgaggtgctcgacatcctaacgaggctgcctgagtccgtcgagagactgactggagtctctatttctcaggtgaaccataagccattgagaactgcctag

SEQ ID NO: 223412 - DNA, 1284 bp, synthetic construct
  misc_feature 1..1284: note = Description of Artificial Sequence: Synthetic coding sequence
  source 1..1284: mol_type = other DNA
atgttctttacatgtggtcctaatgaggccatggtggtgtctggtttttgtaggtcacccccagtcatggtggcagggggaagagtctttgttttaccttgtatccagcagatccaaagaatcagtctcaacactctcaccctcaacgtgaaatccgagaaagtctacaccaggcatggggttcctatttctgtgacaggtatcgcacaggtgaagatccaaggacaaaacaaggagatgcttgcggcagcctgtcagatgttcctggggaaaactgaagccgaaatagcgcatattgcccttgaaacccttgaggggcaccagcgggcaatcatggcacatatgacagtggaggagatttacaaagaccgccagaaattttcagaacaggtttttaaagtagcaagcagtgacctggtgaacatgggaatttcagtggtttcatacactctgaaggacatccatgatgaccaggactacttgcatagcctaggcaaggctcggactgcgcaggtgcaaaaagatgcccgaatcggagaggccgaggccaagagagatgcaggcatacgcgaagctaaggccaaacaggagaaggtctccgctcaatatttgtccgaaatagagatggccaaagcccagagagattacgaactgaagaaagctgcgtatgacattgaagtcaacacccggcgagctcaggcggatcttgcctatcagctgcaggtagctaagacaaaacagcaaattgaagaacagagagtacaggtccaggtcgtggaacgggctcagcaggtggctgtgcaggagcaggaaatcgcccgaagagagaaagaactcgaagcgagggtcagaaagcctgcagaagccgaacgctacaagctggaaaggctggccgaagcagagaagtcccagctgataatgcaggctgaagcggaggcagctagcgtgcgcatgagaggagaggccgaggcatttgctataggtgctagagcccgagctgaggccgagcaaatggctaagaaggccgaggcatttcagttatatcaggaggccgctcagcttgacatgctgctggaaaagctgccccaggtggccgaggaaatctcaggcccattgaccagcgccaataaaatcacactggtttcgtcggggagcgggacaatgggggcagccaaggtaaccggagaagtgctggacatcctaaccagactgcccgagagtgtcgagcgcctcaccggtgtgagtatttctcaagtcaaccacaagccactgcggacagcttag

SEQ ID NO: 223413 - DNA, 1284 bp, synthetic construct
  misc_feature 1..1284: note = Description of Artificial Sequence: Synthetic coding sequence
  source 1..1284: mol_type = other DNA
atgttctttacttgtggaccaaacgaggccatggtcgtttccggcttctgccggtcaccacctgtaatggtggcagggggtcgagtcttcgtactgccctgtattcagcaaatccagagaatctcactgaacactctcactctcaatgttaaatcggaaaaagtgtacacccgtcacggagtacctatttctgtaaccggaatcgctcaggtcaagattcagggacagaataaagagatgttagctgcggcatgccagatgtttctgggtaagaccgaggccgaaattgcccatatcgcgctggagaccttggagggtcatcagagagctattatggcccacatgacagtggaagagatctacaaggacaggcagaagttctctgaacaggtatttaaagtggcctcttctgacttagtgaatatggggatctcagtggtttcgtacaccttgaaagacattcacgatgaccaggactacctgcactcactgggcaaagctcgaactgcacaagttcagaaagatgctaggatcggagaggcagaagccaaaagggacgctggtatccgcgaggccaaggccaaacaagagaaggtaagcgcccagtacctgtcagaaattgagatggctaaagctcagcgcgactatgaactcaagaaggccgcttatgatattgaggtgaacactcgcagggcccaggccgatctggcataccagcttcaagtcgcgaagacaaagcagcagattgaggagcaaagagtgcaggttcaggtcgtggagagagctcaacaagtcgctgtgcaagaacaggaaatcgccaggcgggagaaggagctggaagctcgcgtgcggaagccggcagaggccgagagatataagctcgagcggctggccgaagctgaaaaatcccagctgatcatgcaggccgaggccgaggcggcttccgttcggatgaggggcgaagctgaagcttttgctattggggcacgcgctcgagcggaggcagagcagatggccaaaaaggcagaagcttttcagctctaccaggaagccgcacagctggacatgctcctggaaaaattgccacaagtggcggaagaaattagcggccctcttacaagcgctaataaaattactctggtgtcctccggtagtggcaccatgggggcagctaaggtgacgggggaagttttggacatactgacgcggctccccgagagcgttgaacgactgacaggcgtgtcaatcagtcaggtaaaccacaagcccctaaggacggcatag

SEQ ID NO: 223414 - DNA, 438 bp, synthetic construct
  misc_feature 1..438: note = Description of Artificial Sequence: Synthetic coding sequence
  source 1..438: mol_type = other DNA
atgggagtggagggaacagggagggggggttgcaggctaggaggccctgatggcaaaggcaagggatgggccccagtggacgctacggcacgccttccgcaccctcagaggctgagcctcccactgctccaactccagcctgaaccttgcttcagcctggtggctcaaatgcggccatggtggagcccagactacttgcattcgctcggtaaggctcgaacggctcaggtccaaaaagacgcccgaattggggaggccgaggctaagagagacgccggaatacgggaggccaaagccaaacaggaaaaggtgagcgcacagtatctcagtgagatagaaatggccaaagctcaaagggactatgagctgaagaaggcggcttacgatattgaggtgaacacccggagggctcaagctgacctcgcataccagctctag

SEQ ID NO: 223415 - DNA, 579 bp, synthetic construct
  misc_feature 1..579: note = Description of Artificial Sequence: Synthetic coding sequence
  source 1..579: mol_type = other DNA
atgttttttacctgtggtccaaatgaagccatggtggtgagtggattctgcaggtccccccctgtgatggttgcaggcggacgggtcttcgtactgccttgtatccaacagatccagagaatctcactgaataccctgactctcaacgttaaatccgaaaaggtgaaaatacaggggcaaaataaggaaatgctggcagcagcgtgtcaaatgttcttaggaaagaccgaggccgagatcgcccatattgcgctcgaaactctggaagggcaccagcgcgcaattatggcccacatgacagtcgaagagatctataaggatcgtcagaaattttctgagcaggtgttcaaggtcgctagttcagatctggtgaatatgggtattagcgttgtcagctataccctgaaagacatccatgacgaccaggactatctgcacagcttgggcaaggccagaaccgcccaggttcaaaaggacgccaggatcggggaggctgaggccaagcgcgatgcaggcatacgagaggctaaggctaagcaagagaaggtgtctgctcaataccttagcgaaattgaatag

SEQ ID NO: 223416 - DNA, 579 bp, synthetic construct
  misc_feature 1..579: note = Description of Artificial Sequence: Synthetic coding sequence
  source 1..579: mol_type = other DNA
atgtttttcacgtgtggccctaatgaagctatggtagttagcgggttttgccggtctccccctgttatggtagccggtggacgcgtgttcgtgttaccctgcatccaacagatccagcgcatcagcctgaacactcttacactcaacgtcaaaagcgagaaggtgaagattcaaggccaaaacaaagagatgctggcagccgcttgtcaaatgttcctcggcaagaccgaggctgagattgcgcatatcgcccttgaaacgttggagggacaccagcgggctataatggctcacatgactgtcgaagaaatctacaaggaccgacagaagttcagcgaacaagtgttcaaggtggcttccagtgatctcgttaacatggggataagcgtagtctcttacacactcaaagacattcatgatgaccaggactacttacactctctcggtaaggcccgaaccgctcaggtgcagaaggatgctcggattggcgaggccgaggccaaaagggatgctgggattcgggaggctaaggctaagcaggagaaggttagtgcccagtacctgagcgagattgagtag

SEQ ID NO: 223417 - DNA, 717 bp, synthetic construct
  misc_feature 1..717: note = Description of Artificial Sequence: Synthetic coding sequence
  source 1..717: mol_type = other DNA
atgaggccttggtggtcccccgtgaagatacagggtcaaaacaaagaaatgctggctgcagcttgtcagatgttcttgggaaagaccgaggccgagatcgcccatatcgcccttgagaccctggaggggcatcagagggccattatggcccacatgacggtggaggagatatataaagaccgccaaaagttttcagaacaggtattcaaggtggcctcttcggatttggtcaatatgggcatttctgtcgtctcctacaccctcaaagacatccacgacgaccaggattacctgcactcgctgggtaaagcgaggacagcccaggtgcagaaagacgctcgaattggggaggccgaagccaaacgggacgctggaatccgcgaggcaaaggccaagcaggaaaaggtgagcgcccaatatctgagcgaaattgaaatggccaaggcacagcgagattatgaattgaaaaaggccgcatacgacatcgaggttaacaccagacgggcacaggccgacctggcctatcagctccaggttgctaaaacaaagcagcagatcgaagagcagagggtgcaggtgcaagtggtggagagggcccagcaggtcgcagtgcaggaacaggaaattgccagaagggagaaggaactcgaggcaagggtcagaaagcctgcagaggctgagagatataagttggagaggcttgccgaagcagagtag

SEQ ID NO: 223418 - DNA, 579 bp, synthetic construct
  misc_feature 1..579: note = Description of Artificial Sequence: Synthetic coding sequence
  source 1..579: mol_type = other DNA
atgttttttacctgcggccctaacgaggctatggtcgtgtcgggtttctgtcggtccccgcctgtgatggtagccggaggaagggtcttcgtgctcccctgcatacaacagattcagcgcatcagcttgaacaccctgactttgaatgtgaaaagcgaaaaagtgaagattcaaggacagaacaaagagatgcttgctgctgcttgtcagatgtttttggggaagacggaggctgagatcgcccatatcgctctggaaactttggagggacatcagcgcgcaatcatggcccacatgacagtggaggaaatttacaaagacaggcaaaaattttcagagcaggtcttcaaggtcgccagcagcgacctggtgaatatggggatttccgttgtctcttataccctgaaggacatccacgacgaccaggattatttacactcactgggaaaggcacgcacagctcaggtacagaaagatgccagaatcggggaggccgaggccaaacgcgacgctggaatcagagaggccaaagcgaagcaggagaaggtgagcgctcaatatctgtcggagatcgagtag

SEQ ID NO: 223419 - DNA, 579 bp, synthetic construct
  misc_feature 1..579: note = Description of Artificial Sequence: Synthetic coding sequence
  source 1..579: mol_type = other DNA
atgttctttacatgtggacctaacgaggccatggtcgtcagtggtttttgcaggtcacctcctgtgatggtagctggtggcagagtcttcgtcctgccatgtattcagcagattcaacgaatctcactgaacacacttaccctaaacgtaaagtctgaaaaggtgaagattcaagggcagaacaaagagatgttagccgctgcatgtcagatgttccttgggaagactgaggctgagatcgcgcatattgccctggaaacgctcgaaggacaccaacgagctataatggcacatatgacagtggaggagatttataaggaccgccaaaaattctctgaacaggtctttaaagttgccagttccgacctagtgaacatgggcattagcgtggtcagttataccttgaaggacatccatgacgaccaggattatctccacagcttgggcaaggcacgcacggcccaggtccagaaggatgcgagaatcggcgaagctgaggccaaaagggacgcaggcataagggaagcaaaggccaaacaagagaaagtgtcggctcaatacctgtcagagattgaatag

SEQ ID NO: 223420 - DNA, 438 bp, synthetic construct
  misc_feature 1..438: note = Description of Artificial Sequence: Synthetic coding sequence
  source 1..438: mol_type = other DNA
atgggtgtcgaaggtacgggtaggggaggatgccggctaggcggacctgacggaaagggcaaaggctgggccccagtggacgcgacagcacggctgccccaccctcaacggctgagtctgcctcttttacagttgcagcccgagccatgttttagcctggtcgcgcagatgcgcccatggtggtcaccagactacctgcactccctgggtaaagctcggacagcacaggtccagaaagatgcccgtattggcgaggcagaggcaaagcgtgatgcagggatccgagaagccaaggcaaagcaggaaaaagtctctgctcagtacctgtctgaaattgaaatggccaaggctcaaagagattacgaattgaaaaaagcagcctacgacattgaggttaataccaggagggcacaggcagacctggcctaccagttatag

SEQ ID NO: 223421 - DNA, 273 bp, synthetic construct
  misc_feature 1..273: note = Description of Artificial Sequence: Synthetic coding sequence
  source 1..273: mol_type = other DNA
tgagcaaaaaaggcagaggcatttcagctttatcaggaggctgcccaattggacatgctcctggagaagctgccccaggtcgctgaagagatttctggaccattgacatccgcaaacaagatcacattggtgtctagtggatcaggcactatgggagccgcaaaagtgactggcgaagtattggatattctgacccgtctccctgaaagcgtggaacggctcacaggcgtcagcatcagccaggtgaatcacaagcctctccggacggcatag

SEQ ID NO: 223422 - DNA, 708 bp, synthetic construct
  misc_feature 1..708: note = Description of Artificial Sequence: Synthetic coding sequence
  source 1..708: mol_type = other DNA
atgttttttacctgcggaccaaatgaagctatggtggtctccggtttctgccggtccccaccagtcatggtcgcagggggaagagtgtttgtgctaccgtgcatccaacagatacagcgcatctctctgaacactctaacgctcaacgtcaaatcagagaaggtgtacacccgtcatggcgtccctatcagcgtgaccgggatcgctcaggtgaagatccaagggcagaacaaagaaatgctggccgcagcctgtcagatgtttctgggaaagacggaggcagagattgcacacatcgctctggagacgctggagggtcatcagcgcgctattatggctcacatgacagttgaagagatttataaagaccgccagaagttctctgagcaggtgtttaaggttgcttctagtgacctggtaaacatgggcatcagcgtcgtgagctacaccttgaaggatatacacgacgaccaagattatttacactctttggggaaggctcggacggcacaggtccagaaggacgcccgtattggagaagcagaggcaaaacgtgatgccggaattagagaagcaaaggccaagcaggagaaagtgtcggcacagtacctgtccgagatcgagatggccaaggcccagagagattacgagttgaaaaaggctgcctatgacatcgaggtgaacacgagaagagctcaggcggactag

SEQ ID NO: 223423 - DNA, 717 bp, synthetic construct
  misc_feature 1..717: note = Description of Artificial Sequence: Synthetic coding sequence
  source 1..717: mol_type = other DNA
atgcgcccatggtggagccccgtgaagatacaagggcagaacaaagagatgctcgctgccgcatgtcagatgtttctgggcaagaccgaggctgaaattgcccatatcgcactggaaacactcgagggacatcagagggccatcatggcccatatgaccgtcgaagaaatctataaggatcggcagaagttcagtgagcaggtcttcaaggtcgcctccagcgatctggtcaacatggggattagtgttgttagttatacactgaaagatattcacgatgatcaagattatctgcactctctagggaaagcgagaacagcccaggtccagaaggacgctagaatcggggaggcagaggccaaaagagacgccggtatccgcgaggccaaggctaagcaggagaaagtgagcgcccagtatcttagcgagatcgaaatggctaaggcccaacgggattacgaactcaaaaaagcagcttatgatatcgaggtcaatactcgcagggcccaggctgacctcgcctatcaattgcaggtggctaaaaccaagcaacaaattgaggagcaacgagtccaggtacaggtcgtggaacgagcgcaacaggtggccgtgcaagagcaagagatcgcaaggagagagaaagagctggaagccagggtgcgcaaacccgctgaagcagagcggtataaactcgaacgtctggcggaggccgaatag

SEQ ID NO: 223424 - DNA, 417 bp, synthetic construct
  misc_feature 1..417: note = Description of Artificial Sequence: Synthetic coding sequence
  source 1..417: mol_type = other DNA
gtgaagattcagggccagaacaaagagatgttagccgctgcttgtcaaatgtttctaggtaagaccgaggctgagatcgcccacattgcccttgagaccttggagggccatcagcgtgcaatcatggcccatatgaccgtggaagagatctacaaggatcggcagaaattctctgaacaggtctttaaggtggcctcctctgacctggtcaatatggggatatccgtggtatcctacacactgaaagatatacacgatgatcaggactatcttcactcgttaggcaaggctcggacggcgcaggtgcaaaaagatgctcgcatcggggaagctgaggctaaaagggatgctggcatcagggaagccaaagcgaagcaggagaaagtgtctgcccagtacctgtctgaaattgaatag

SEQ ID NO: 223425 - DNA, 558 bp, synthetic construct
  misc_feature 1..558: note = Description of Artificial Sequence: Synthetic coding sequence
  source 1..558: mol_type = other DNA
atgttctttacttgtggacccaacgaggccatggtagtctccggcttctgtcgatcaccaccggtgatggttgctggcggacgggtctttgtcctaccatgcattcagcagatacaacgtataagcctgaatacattgacactgaatgtgaagtctgagaaggtgtataccagacatggagtccccataagcgtcacaggcattgcgcaagtgaaaattcaggggcaaaacaaagagatgctggctgctgcatgccagatgttcctaggcaaaaccgaggccgagatcgcccatattgcactggaaaccctcgaaggacatcagagggccatcatggcccatatgaccgtggaagagatctataaggatcgacagaagttttcggaacaggtcttcaaggttgcaagctcagacttagtgaacatgggtatctcagtcgtgtcatatacgctgaaggatatccacgatgatcaggattacctccactcgctgggtaaggccagaacggcccaggtccagaaggatgcaagaatcggcgaggcggaggccaaacgctag

SEQ ID NO: 223426 - DNA, 348 bp, synthetic construct
  misc_feature 1..348: note = Description of Artificial Sequence: Synthetic coding sequence
  source 1..348: mol_type = other DNA
atgggagtagagggcacggggcgaggaggctgcagactcgggggacctgatgggaagggtaagggctgggctcctgtcgacgccacagccaggctgccccacccgcagcggctgtctctcccccttctccagctccagcctgagccttgtttttccttggtagcacagatgcgtccatggtggtctcccgactatctgcattcacttggtaaggcccgaacggcacaggttcagaaggacgccaggatcggagaggccgaggctaaacgagacgcaggaatccgggaggccaaagcaaaacaagaaaaagtgagcgcacagtacctgtcagaaatcgagatggcatag

SEQ ID NO: 223427 - DNA, 561 bp, synthetic construct
  misc_feature 1..561: note = Description of Artificial Sequence: Synthetic coding sequence
  source 1..561: mol_type = other DNA
gtcgccaagacaaaacagcaaatcgaggaacagagagtccaggttcaggtggtggagcgggctcagcaggtggccgttcaagaacaagagatcgcaagaagggaaaaagaactggaggcccgtgtaagaaaaccggctgaagccgaaaggtacaagttggaacgtctcgctgaggcggagaagagtcaattgattatgcaggctgaagccgaggccgcatctgtcagaatgcgaggagaggccgaagcattcgcaataggcgcaagagcaagagctgaggccgagcagatggccaagaaagccgaggccttccagttataccaggaagccgctcagcttgatatgctgcttgagaaactcccccaggtcgccgaggagatatccggtccgctaactagcgcaaacaagattactctagtgagcagtgggagcggaaccatgggggcagccaaagtgacgggggaagtcctggatattctgaccaggctgccggaatctgtggagcgtctgaccggggtttccataagtcaggtaaaccacaaacccttgcgtaccgcatag

SEQ ID NO: 223428 - DNA, 438 bp, synthetic construct
  misc_feature 1..438: note = Description of Artificial Sequence: Synthetic coding sequence
  source 1..438: mol_type = other DNA
atgggcgtggaggggaccggtagaggaggttgtcggctgggcggtcctgatggaaaaggaaaagggtgggcccctgtggacgccacagccagactgcctcatccacagcgactctccctgccactgctgcagcttcagcccgaaccatgcttcagtttagtggcccaaatgagaccttggtggtccccagattatctgcactccctcggcaaggcgagaaccgcccaggtgcagaaagatgctaggattggcgaagcagaagcaaaaagggatgctgggatcagagaggcaaaagcgaagcaggagaaggtcagtgcacagtacctaagcgagattgaaatggccaaagcccagcgagattacgaactgaaaaaggctgcttatgatattgaggtgaacacccgcagggcgcaggccgacctggcgtaccagctctag

SEQ ID NO: 223429 - DNA, 558 bp, synthetic construct
  misc_feature 1..558: note = Description of Artificial Sequence: Synthetic coding sequence
  source 1..558: mol_type = other DNA
atgttctttacgtgcgggccaaatgaagctatggttgtatctgggttttgtagatcccccccagtgatggtcgctggtgggcgagttttcgtcctgccttgcattcagcagattcagagaatttccctcaatacattgacactcaacgtcaagtccgagaaggtgtatacaaggcacggtgtgccaatctcagttacaggcatcgcccaagtcaagattcagggccaaaataaggaaatgttagccgctgcctgtcagatgtttttgggcaaaaccgaagccgagattgcccacattgccttggagaccctcgaggggcaccagcgcgcaattatggcccacatgaccgtcgaagagatatacaaggatcggcagaagtttagcgagcaagtgttcaaggtcgcgagctcagatctggtgaacatggggatcagcgttgtttcatacacgctcaaggacattcatgacgaccaggattacttacactctctgggtaaggctcggaccgcccaagtacaaaaggacgcaagaatcggagaggctgaagccaagcgatag

SEQ ID NO: 223430 - DNA, 633 bp, synthetic construct
  misc_feature 1..633: note = Description of Artificial Sequence: Synthetic coding sequence
  source 1..633: mol_type = other DNA
atgttctttacttgcggccctaatgaggccatggtcgtgagcggattctgccgctcacctccagttatggtcgcaggtggacgcgtgttcgtcctcccgtgcatccagcagatacagcgtattagcctgaatactctgactctaaatgtgaaatcggagaaggtgtacacgcgacatggagtaccaatttccgtgaccgggattgctcaggttaaaattcaaggacaaaataaggaaatgcttgctgccgcttgccagatgttcttgggtaaaaccgaagcagagatagctcacatagccctggaaacccttgagggccaccagcgggctatcatggcgcatatgacagtcgaggagatttataaagatagacagaaattttctgagcaggtgtttaaggtggcctccagtgaccttgttaacatgggcatcagcgttgtgtcatatacattgaaggacatccacgacgaccaagactacttgcacagtttggggaaggcacgcacagcccaagtccagaaagacgcgagaatcggggaggccgaagctaagcgggatgctggcatccgtgaggccaaagccaaacaagaaaaagtgagtgctcagtacctcagtgaaatcgagatggcttag

SEQ ID NO: 223431 - DNA, 633 bp, synthetic construct
  misc_feature 1..633: note = Description of Artificial Sequence: Synthetic coding sequence
  source 1..633: mol_type = other DNA
atgttttttacctgtggccctaatgaagcaatggtggtgagcggtttttgtagaagccctccagtcatggtggctggcggaagagtgtttgtgctgccgtgcatacagcaaattcagaggatcagtctgaacacattaacactgaacgtaaagagtgagaaggtgtacaccaggcacggcgtgcccatcagcgtgaccggaatcgcccaggtcaagattcagggacagaacaaagaaatgctcgctgccgcttgtcagatgttcttgggtaaaaccgaggccgagatcgctcatattgcgttggaaactttagaggggcaccaacgtgccataatggcccacatgacagtggaagagatttacaaggacaggcagaagtttagcgaacaggtgtttaaagtcgcttccagtgacctggtcaatatggggatttccgtggtaagctatactctcaaggatatccacgacgatcaagattacttacacagcctgggtaaagcccgaaccgcacaggtccagaaagacgcccgtatcggagaagctgaagccaagagagacgcaggcatacgggaggccaaagccaagcaggaaaaggtgagcgcccagtacctgtccgaaatcgagatggcgtag

SEQ ID NO: 223432 - DNA, 759 bp, synthetic construct
  misc_feature 1..759: note = Description of Artificial Sequence: Synthetic coding sequence
  source 1..759: mol_type = other DNA
atgttctttacatgtggccctaacgaggccatggtggtatctggattctgtcggtcccctccggttatggtcgcaggcggaagggtctttgtgctcccgtgtatccagcaaattcagcgcatctcactgaacacacttactcttaatgtgaagtctgagaaggtttacacccgacatggagtgcctatctcggttactggcattgcccaagttaagatccaaggccagaacaaggagatgctcgctgccgcttgtcaaatgttcttgggtaaaactgaggccgagatagctcacatcgccctggaaactctggaggggcatcagagagccataatggcccacatgacagtcgaggaaatctacaaggacaggcagaaatttagcgagcaggtgttcaaggtggctagctccgatctggtgaatatggggatttctgtcgtatcttatactctcaaagacatccacgacgaccaggattatttgcatagcctgggcaaagcacggacggcacaggtgcagaaagatgctagaataggtgaagccgaggctaaacgcgacgcaggtattcgtgaggcaaaagccaaacaagagaaggtgtccgcacagtatctctccgagattgaaatggcgaaagcgcagcgagattatgaactgaagaaagccgcatatgatatcgaagtgaacaccaggagagctcaggccgacctcgcctaccagttgcaggtggccaaaacaaagcagcagatcgaggaacagtag

SEQ ID NO: 223433 - DNA, 444 bp, synthetic construct
  misc_feature 1..444: note = Description of Artificial Sequence: Synthetic coding sequence
  source 1..444: mol_type = other DNA
atgaggccatggtggtcgcccgtgaagatccaagggcagaacaaagaaatgcttgctgccgcatgccagatgttcttaggaaaaacagaggctgaaatcgcccatatagctttggagactctggaagggcaccaacgggctattatggctcacatgaccgttgaagagatatataaggaccgccagaagtttagtgagcaggtatttaaagtcgcctccagcgaccttgtaaacatgggcataagtgttgtgtcatacactctcaaggatattcatgacgatcaggattaccttcatagtcttgggaaagcacggaccgcccaggtgcagaaggacgcgagaatcggtgaggccgaagcgaagcgcgatgccggaatcagagaggccaaagcaaagcaagagaaggtgtccgcccaataccttagcgagatagaaatggcttag

SEQ ID NO: 223434 - DNA, 549 bp, synthetic construct
  misc_feature 1..549: note = Description of Artificial Sequence: Synthetic coding sequence
  source 1..549: mol_type = other DNA
gtgaagattcagggacagaataaggagatgttggcagcggcttgtcagatgttcttggggaaaaccgaggccgagatagcgcacatcgcgcttgaaacattagaggggcatcagcgtgctataatggctcacatgacggtcgaggagatatataaggaccggcaaaagttttccgaacaggtgtttaaggtggcgtcctctgacttagtgaatatgggaatctccgtggtctcttacaccctgaaggatatccacgatgaccaagactatctgcactcactagggaaagctagaactgctcaggtacagaaggatgctcgcatcggtgaggccgaagccaagagggacgcgggaatccgagaagctaaagccaaacaagagaaggtgagcgcccagtatctctctgaaatagagatggccaaagcccagagagattatgaactgaagaaggcagcctatgacatcgaagtgaatacgcgcagggcacaagctgacttagcataccagctccaagttgccaagaccaagcagcaaattgaggagcagtag

SEQ ID NO: 223435 - DNA, 348 bp, synthetic construct
  misc_feature 1..348: note = Description of Artificial Sequence: Synthetic coding sequence
  source 1..348: mol_type = other DNA
gttaagatccaaggacagaacaaagaaatgctggcagccgcttgccagatgtttctggggaaaaccgaagcagagatcgcccatatcgccctggagacacttgaaggacatcagcgcgcaataatggcacacatgacggtcgaggagatctacaaggaccgacagaagtttagtgaacaggttttcaaggttgctagttccgatctcgtcaacatggggatcagcgtagtttcatacaccctaaaggacatacatgatgatcaggactacctgcactctttgggaaaggccagaacggcccaggtccagaaggacgcccgaattggtgaagctgaggcaaaacgctag

SEQ ID NO: 223436 - DNA, 708 bp, synthetic construct
  misc_feature 1..708: note = Description of Artificial Sequence: Synthetic coding sequence
  source 1..708: mol_type = other DNA
atgttctttacctgcggaccaaacgaggcaatggtagtgtctggcttttgtcgctccccgcctgtgatggtggcaggcggacgcgtttttgttttaccatgcatccagcagattcagcgcatcagcttaaatactcttaccctgaatgtcaagagcgagaaggtgtatacgcgccatggagtgcctatctcagttaccggcatcgctcaagtgaagatacaggggcagaacaaggagatgctggccgcagcctgccagatgttcctgggtaaaaccgaggccgagatcgcccacatcgccctcgaaacgctcgaaggccatcagcgcgctataatggcccacatgaccgttgaagaaatctataaagacaggcagaaattcagcgaacaggtgttcaaggtcgcctctagtgatcttgtcaacatgggtatttcagtcgtttcatataccctgaaggacatacatgatgatcaggattatcttcacagtctggggaaagcaaggaccgcacaagtccagaaggatgccaggataggtgaagccgaagccaagagagatgcaggcattagggaagcgaaggctaaacaggagaaagtgagtgctcaatacctgtcagagattgaaatggccaaggctcagcgggactatgagctgaaaaaggctgcctatgatatcgaggtcaacacaaggcgtgcgcaagctgattag

SEQ ID NO: 223437 - DNA, 1284 bp, synthetic construct
  misc_feature 1..1284: note = Description of Artificial Sequence: Synthetic coding sequence
  source 1..1284: mol_type = other DNA
atgtttttcacctgtggccctaacgaggcaatggtggtgagcggtttttgcagaagccctccagtcatggttgctgggggtagagtttttgtgctaccttgtatccagcagattcagcggatttctctgaacaccctcacactgaatgtgaaatctgagaaagtatacaccaggcatggagtacccatctccgtgacaggcatcgcccaggtaaagatacaaggacagaacaaggagatgctcgccgcagcctgccaaatgttcctaggcaagaccgaggcagagatagcacacatagcactcgagactctggagggccaccagcgcgcaatcatggcccacatgaccgtcgaagagatctacaaagacaggcagaagttctcagaacaagtttttaaagtagcgtcaagcgacttagttaacatgggcatcagcgtagtgtcttataccctgaaggacatccatgacgaccaagactatctgcattctctgggaaaggcccgaaccgcgcaggtgcaaaaggacgcacggattggggaggccgaagcaaaacgtgacgcgggaatccgcgaagcaaaggccaagcaggaaaaagttagtgctcagtatctgtccgaaatcgaaatggccaaggcgcagcgagactacgagttaaaaaaagctgcgtatgatattgaagtgaatacccgtagggctcaggctgatctagcatatcagctgcaggtggctaaaacaaagcagcagatcgaggagcagagagtgcaggtacaggtcgtggagagggcacagcaggtggccgtgcaggaacaggagatcgcgagacgggaaaaagagttggaagccagagttcggaagccagcagaagccgagcgatacaaacttgaacgtcttgcggaggctgaaaagtcccagctgatcatgcaggccgaagctgaggctgcaagtgtgcgaatgaggggcgaggcggaagcttttgctatcggcgctagggccagagcggaagcagaacaaatggcaaagaaagccgaggccttccagctgtatcaggaggccgcacagctggacatgttgctcgagaagctaccacaagtcgccgaagagatttctggaccactgacatcagctaataagatcaccctagtcagtagcgggtccggcacgatgggcgctgccaaagtcaccggcgaggtcctggacattctcacaaggttacccgagagcgtagagaggctgactggagtcagtatttcacaggtgaatcacaagccactgagaacagcgtag

SEQ ID NO: 223438 - DNA, 498 bp, synthetic construct
  misc_feature 1..498: note = Description of Artificial Sequence: Synthetic coding sequence
  source 1..498: mol_type = other DNA
gttaaaattcagggccagaataaagaaatgctggccgcagcatgccagatgtttcttggaaagactgaagccgagatcgcccatatcgcactggagacattggagggccatcagagggctatcatggcccacatgacagtcgaagagatctataaggaccgccagaaatttagcgagcaggtcttcaaggtggcaagtagcgatcttgttaatatggggattagcgtggtatcctacaccctcaaggacatccacgatgaccaggactaccttcactcactagggaaggccagaaccgcgcaggtacagaaagacgctcgaattggagaggccgaggccaagcgggacgcaggtataagggaggctaaagccaagcaagaaaaagtctctgcgcagtacttatcagagattgagatggccaaagcacagcgcgactacgagctgaagaaggccgcatacgatattgaagtgaacacacgacgcgcacaggccgactag

SEQ ID NO: 223439 - DNA, 438 bp, synthetic construct
  misc_feature 1..438: note = Description of Artificial Sequence: Synthetic coding sequence
  source 1..438: mol_type = other DNA
atgggcgtggaaggtacaggacgtgggggttgcaggctgggcggaccggatggtaaaggtaaagggtgggctcccgtcgacgccaccgctaggctaccacatccccaaagactcagcctgcctttgctccagctccaacctgaaccatgtttcagcctagtggctcaaatgaggccatggtggagcccagactatctgcatagtctcgggaaagcgaggaccgcacaagtacagaaagacgcaagaattggggaagccgaagctaagcgagacgccggaataagagaggccaaggcaaaacaggagaaagtgtctgcccagtatctatcagagatagagatggccaaagcgcaaagagattatgaattaaaaaaagccgcatatgacattgaggtgaatactcgaagagcccaagccgatctagcataccagttgtag

SEQ ID NO: 223440 - DNA, 759 bp, synthetic construct
  misc_feature 1..759: note = Description of Artificial Sequence: Synthetic coding sequence
  source 1..759: mol_type = other DNA
atgttctttacttgtgggcctaatgaagccatggtggtgagcgggttttgcaggtcacctccagtcatggtcgctggcggacgagtgtttgtccttccgtgcatccaacagattcagcggatatctctgaatactctcactctgaacgtgaagtccgagaaggtctatacccgacatggagtgccaatctcggtgactgggatagcacaggtaaagatacagggccaaaacaaggaaatgctagcggcagcatgtcaaatgtttttaggcaaaaccgaagccgaaattgctcatatcgccctggaaaccctcgaagggcatcagcgggcaattatggcccatatgaccgtggaagagatttacaaggatcggcagaagttttcagaacaagtgttcaaagtggcatcctctgacctggtgaatatgggaatttctgttgtcagttacaccctgaaggacatccatgatgatcaagattacctgcatagcctcggtaaagcaagaacagcacaagttcaaaaggacgccaggatcggtgaagcagaggccaaacgggacgccggaattagagaagccaaggcaaaacaggaaaaggttagcgcccagtatctttctgagatcgaaatggcaaaagcccaacgggactacgagttaaagaaggcagcctatgacatcgaggtgaacaccaggcgagcacaggctgacctggcctaccagctgcaggtggctaaaactaagcagcaaatcgaagagcagtag

SEQ ID NO: 223441 - DNA, 759 bp, synthetic construct
  misc_feature 1..759: note = Description of Artificial Sequence: Synthetic coding sequence
  source 1..759: mol_type = other DNA
atgtttttcacatgtgggccaaacgaagcaatggtagttagcgggttttgccggtctccaccagtcatggtggctggaggccgagtcttcgtgctaccctgcattcagcagatccagcgaatatccctaaataccctaaccctgaacgtgaagagcgagaaggtatacactcgccacggagtgcctataagtgttacgggtatcgctcaggttaaaatccagggccagaacaaggagatgttggcagcagcctgtcaaatgttcctcggcaaaacggaggctgaaatagctcacatcgccttggaaacactggagggccaccagcgagctattatggcccatatgaccgttgaggagatctacaaagatcggcaaaaattcagtgaacaggtcttcaaagtggccagtagcgacctggtcaatatgggcatctctgtcgtcagttataccttaaaagatatacatgatgaccaggactatctgcattcgttgggtaaagcccgaacggcgcaggtgcaaaaagacgccaggatcggcgaggctgaggctaaacgcgacgcaggcatccgagaagctaaggccaaacaagaaaaggtgagtgcccagtacctgtcggaaattgagatggccaaggctcaaagagactatgagctgaagaaggccgcttatgacatagaggtcaacacgcggagggcccaggcagatctggcgtatcagctccaagtggccaagaccaaacaacagatagaagagcagtag

SEQ ID NO: 223442 - DNA, 249 bp, synthetic construct
  misc_feature 1..249: note = Description of Artificial Sequence: Synthetic coding sequence
  source 1..249: mol_type = other DNA
gactatctgcactccctcgggaaggcccgaaccgctcaggtccaaaaggatgctcggatcggggaagctgaggctaagagagacgcaggcatccgagaagccaaggccaagcaagagaaggtaagcgcccagtacctgagtgagattgagatggccaaagcacagcgcgactacgaactgaagaaggcagcctacgatatcgaggtgaatactaggagagcgcaggcggacctcgcataccagctgtag

SEQ ID NO: 223443 - DNA, 558 bp, synthetic construct
  misc_feature 1..558: note = Description of Artificial Sequence: Synthetic coding sequence
  source 1..558: mol_type = other DNA
atgtttttcacctgcggacctaacgaagccatggtcgtgtccgggttttgccggagtccccctgtgatggtcgccggagggagggtcttcgtcctgccatgcattcaacaaattcagcgaatcagcctcaataccctcaccttgaatgtgaagagtgagaaagtctataccagacacggcgttcccatcagtgtgacagggattgcccaggtaaagattcagggacagaacaaggagatgctagctgcagcttgccagatgtttctggggaagactgaagccgagatcgctcatattgccctggagacgctcgaggggcatcagcgcgctatcatggcccatatgacggtggaggaaatttacaaagacagacagaagtttagtgaacaggtcttcaaggtggccagttccgatctcgtgaatatgggaatcagcgtcgtatcctatactctcaaggatattcatgacgatcaggattacctgcattctttgggcaaagccaggacggctcaggtccaaaaagacgctcggatcggtgaagctgaggcgaagaggtag

SEQ ID NO: 223444 - DNA, 759 bp, synthetic construct
  misc_feature 1..759: note = Description of Artificial Sequence: Synthetic coding sequence
  source 1..759: mol_type = other DNA
atgtttttcacatgcggacctaacgaggcaatggtagtgagtgggttttgccggagtccaccagttatggtggccggaggaagagtgttcgttttaccttgcatccagcagatccaacggatcagcttgaatactttaaccctgaatgtgaagagtgaaaaagtatatacgagacacggcgtgcccataagtgtgactggaatcgcccaggtcaaaattcagggacaaaacaaggagatgttggctgccgcttgccaaatgtttttgggtaagacagaggccgaaattgcacacatcgcactggagacactggaaggccatcagcgagccattatggcacatatgacagtcgaggagatttataaggatcggcagaaattttcagagcaggtatttaaggtggcctcttctgacctggtaaatatgggaatctccgtagtcagctacactttgaaggacattcacgacgaccaagactacttgcactctttaggcaaggcacgcaccgcccaggtgcaaaaggatgctagaattggggaagccgaagcaaagcgtgatgctggcattagggaggctaaggcaaaacaggaaaaggtctccgcccaatatttatccgagatcgaaatggccaaggcccaacgggactacgaactcaagaaggctgcatatgatatcgaagtgaacacccggagagcacaggccgatctggcgtatcagctgcaggtggcaaagactaagcagcagatcgaagagcagtag

SEQ ID NO: 223445 - DNA, 558 bp, synthetic construct
  misc_feature 1..558: note = Description of Artificial Sequence: Synthetic coding sequence
  source 1..558: mol_type = other DNA
atgttctttacatgcggtcccaatgaggctatggtggtgtccggtttttgtaggtccccaccggtgatggtcgccggaggaagagtgttcgtcctcccgtgcattcagcaaatccagcgcatatcattgaacactctcaccctgaatgtaaagagcgagaaagtctatacccggcatggtgtcccaattagtgtaactgggatcgctcaggtcaaaattcagggccaaaacaaagaaatgctagctgctgcatgccaaatgttcctgggtaaaaccgaggctgagatcgcccatatcgcgctagagaccctggagggtcatcagcgggcaataatggcacacatgacagttgaagaaatctataaagaccggcagaaattcagcgagcaggtattcaaagttgcctcctctgacttggtcaacatgggaatctctgttgtatcatacacactgaaagatatccatgacgaccaggattacttgcactcgctcgggaaggcaaggactgcccaggttcaaaaagatgcccgtattggtgaggccgaggccaaaagatag

SEQ ID NO: 223446 - DNA, 717 bp, synthetic construct
  misc_feature 1..717: note = Description of Artificial Sequence: Synthetic coding sequence
  source 1..717: mol_type = other DNA
atgcgtccgtggtggtcccccgtgaaaatccagggccagaacaaagagatgcttgccgctgcttgtcagatgttcctgggcaagactgaagccgagattgcccacatcgccctggaaacacttgaagggcaccagcgggctatcatggcacacatgaccgttgaggagatttataaggaccgtcagaagttcagtgagcaagtctttaaggtagcttcttccgacttagtgaacatgggaatcagcgtggtctcctacacactaaaggatatacatgacgaccaggattatctgcacagtctggggaaggcaaggacagctcaggtgcagaaggacgcaaggattggcgaagctgaagctaaaagggatgcagggattcgcgaagccaaggctaaacaggagaaagtttcagcccaatacctgtccgagatcgagatggctaaagctcagagagactacgagctcaaaaaggcagcctatgatatcgaggtcaacactagaagggcacaggccgatttggcctaccaacttcaggtggccaagactaaacagcagattgaggagcagcgtgtgcaggtacaggtagtagagcgcgcacagcaggtagctgttcaagagcaagagattgcaaggcgggagaaggagctggaggctagagtaaggaaacccgcagaggcggagcgctataaactagagagactcgccgaggcagagtag

SEQ ID NO: 223447 - DNA, 1284 bp, synthetic construct
  misc_feature 1..1284: note = Description of Artificial Sequence: Synthetic coding sequence
  source 1..1284: mol_type = other DNA
atgttttttacatgcgggcctaacgaagctatggttgtaagtggcttctgcaggtcccctccagtgatggtggcagggggaagggtgtttgtcttgccatgcattcagcaaattcagcgcatctcgctgaatacccttaccctcaacgttaaaagtgagaaagtttatactcggcatggtgtccccatctccgttacagggattgcccaagtgaaaattcaggggcagaacaaggaaatgcttgccgctgcatgccagatgttcctaggcaagacagaagcagagattgcccacattgccttagaaacactcgaggggcatcagcgggctattatggctcacatgacagttgaagaaatttacaaggaccggcaaaagttctctgaacaggtatttaaggtggcttcgagcgacttggtcaacatgggtatttccgtcgttagttataccttgaaagatattcacgacgaccaggactatttacactccctcggaaaagcccgtactgctcaagtgcagaaggatgcccgaattggcgaggctgaagcaaaacgcgatgccggaattagagaggctaaagccaagcaggaaaaagtttctgcccagtatttgtccgaaatcgagatggccaaagcccagcgggactatgagttgaagaaagctgcttacgatatcgaggttaatacacgccgagcccaagcagatttagcatatcagctccaggtagcaaaaaccaaacaacagattgaggagcagcgtgtgcaggtgcaggtcgtcgaacgagcccagcaggtggcagtccaggaacaggaaattgcacgaagagaaaaggagctcgaagccagagtcagaaagccagccgaagccgaacgctataagctggagcggctggccgaggctgagaagtcccaacttattatgcaggctgaagccgaggctgcgtctgtccggatgagaggtgaagccgaagcgttcgccatcggagctagagcaagggctgaggcggaacagatggcaaagaaagccgaagccttccagctgtatcaagaggcagcacagttggatatgctgctggagaagcttccacaggtagctgaggaaattagcggacctctcacgagtgccaataaaattacattggtatcttctgggtcagggactatgggggctgcgaaagtgaccggagaagtactggacatcctgactcgactgccggagagcgtggaaagactgactggcgtttctatatctcaagtcaaccacaaacctctgaggacagcctag

SEQ ID NO: 223448 - DNA, 579 bp, synthetic construct
  misc_feature 1..579: note = Description of Artificial Sequence: Synthetic coding sequence
  source 1..579: mol_type = other DNA
atgtttttcacttgcggccctaatgaagcaatggttgtctctggcttctgtaggtctccacccgtcatggtggcagggggacgggtatttgtattaccatgcattcagcaaatccagcggatttcactaaacacactgacccttaacgttaagagtgagaaagtcaaaattcagggtcaaaataaggagatgctggccgctgcttgtcaaatgttccttggtaaaacagaagcggagatagcgcatatcgccttagaaacactggagggacatcaacgcgctatcatggctcacatgaccgtagaagagatctacaaagaccgccagaagttctcggaacaagtttttaaggtggcatcatctgatcttgtgaatatgggaatatctgtggtgtcttataccttgaaggatattcacgatgatcaagattacctccactcactcgggaaggccaggacagcccaggtacagaaggatgccagaattggggaagctgaggccaaaagagatgcaggcattagagaagccaaggctaaacaggaaaaggtgtccgcacaatatcttagcgaaattgaatag

SEQ ID NO: 223449 - DNA, 708 bp, synthetic construct
  misc_feature 1..708: note = Description of Artificial Sequence: Synthetic coding sequence
  source 1..708: mol_type = other DNA
atgttttttacatgtgggccaaatgaagcgatggtggtgtccggattttgtcgctcgcctcccgtcatggtggccggtgggagagtgttcgtgttgccctgcatccaacaaatacagcgcataagtctaaatacactcaccttgaatgttaaatccgagaaggtatacaccagacacggtgtgccaatttctgttactggcatcgcccaggtgaaaattcaggggcagaataaggaaatgctggctgccgcttgccagatgttcttaggcaagacagaagcagaaatcgcccacattgccttggaaaccttagaagggcaccaacgcgctatcatggcccacatgaccgtcgaagagatctacaaggaccggcaaaagttctccgaacaggtgttcaaagtcgcatcatcggatcttgttaacatgggaatttcagtcgtcagctatacactgaaggatatacacgacgatcaagactacctccactcccttgggaaagcgagaaccgctcaagtccagaaggacgctagaatcggggaagccgaagctaagagagacgccggaattagagaagccaaggccaagcaggagaaggtgagcgcccagtacttgtctgagattgaaatggccaaggcccagcgcgattatgaattaaagaaggctgcctacgatatcgaggttaacacgcgtagggcccaggcggattag

SEQ ID NO: 223450 - DNA, 183 bp, synthetic construct
  misc_feature 1..183: note = Description of Artificial Sequence: Synthetic coding sequence
  source 1..183: mol_type = other DNA
gtcgccaaaactaagcaacagatcgaagagcagagagtgcaggttcaggtagtggagcgcgctcagcaggtggctgtgcaggaacaggagatcgccagacgtgaaaaggagctggaggctagggtgaggaagccagccgaggcggaaagatacaaacttgagagattagctgaggccgagtag

SEQ ID NO: 223451 - DNA, 717 bp, synthetic construct
  misc_feature 1..717: note = Description of Artificial Sequence: Synthetic coding sequence
  source 1..717: mol_type = other DNA
atgcggccatggtggagtccggtgaagatccaggggcagaataaagagatgctcgccgcagcatgtcaaatgttcctcggaaaaacggaagccgagattgcacacattgctctggaaaccctggaggggcaccagcgcgcaataatggctcacatgactgtagaagagatatacaaggatcgacagaaattcagtgagcaggtatttaaggtggcaagcagtgatctggtgaacatggggatttccgtcgtgtcttatactctgaaagatatccatgacgatcaggactaccttcacagcctgggcaaggcgagaaccgctcaagtccagaaggacgcgagaattggcgaagccgaagcaaaacgcgatgccggaatccgggaagcaaaggcaaagcaggagaaggtgagcgcccagtacttgtcagagattgagatggctaaggctcaaagggactatgaattaaaaaaagccgcatatgacattgaagtgaatactagacgcgcacaggccgacctagcttaccaactgcaggttgccaagacgaagcagcagattgaggagcaacgcgtgcaggtacaagtcgtcgagcgtgcacagcaggttgccgtgcaagagcaggagattgcgaggcgcgaaaaagaactcgaagcccgagtccggaagcctgcagaggccgaacgctacaagcttgagcggctggctgaggctgaatag

SEQ ID NO: 223452 - DNA, 708 bp, synthetic construct
  misc_feature 1..708: note = Description of Artificial Sequence: Synthetic coding sequence
  source 1..708: mol_type = other DNA
atgtttttcacatgtggccctaatgaagctatggtcgtctcaggattctgcagatccccaccagtgatggttgccggagggagggtcttcgtgctcccttgcattcagcagattcaaaggatctccctcaacaccctgactcttaacgtgaagtcagagaaagtctatacaaggcacggagttcccatcagcgtcacgggcattgctcaggtaaagatccaaggacagaataaggagatgctggccgctgcatgtcagatgttcttagggaaaacagaggccgaaattgcgcacattgcactggaaactctggagggccaccagcgcgctatcatggcacacatgactgtggaggagatatataaggaccgtcaaaagttctctgagcaagttttcaaagtcgcttcttctgatctggtgaatatgggaatctccgtggtctcatacacactgaaagacatacatgatgaccaggactatctgcatagcctggggaaagccagaaccgcccaggtgcagaaagacgcaaggataggcgaggctgaagcgaagagagacgcaggcatccgggaggctaaggcaaaacaagagaaagtaagtgcacagtatttatcagagatcgagatggcaaaagcacagcgtgattacgaactgaagaaggctgcttacgacatcgaggtgaatacacggagggcccaggccgattag

SEQ ID NO: 223453 - DNA, 1074 bp, synthetic construct
  misc_feature 1..1074: note = Description of Artificial Sequence: Synthetic coding sequence
  source 1..1074: mol_type = other DNA
gtaaagattcaaggacagaacaaggagatgctcgctgccgcatgccaaatgtttctaggcaagaccgaggctgagatagcccatatcgcccttgaaacactggaaggacaccagagggctatcatggctcacatgaccgttgaagagatttataaagatagacagaaattctccgagcaggtgtttaaggtagccagctcagacctggtaaacatggggattagtgtcgtttcatacaccctgaaagatatacacgacgaccaggactacctacattccctcgggaaggcacgaacagctcaggtgcaaaaggatgcccgtattggggaagcagaagccaaacgggatgccggaattagagaagcaaaagccaaacaggaaaaagtttcagcccaatacctgagcgagatcgagatggcaaaagcccagagggattatgaactcaagaaagctgcctacgatatagaagtgaacacgagacgcgcacaggcagatctggcgtatcagctccaagtcgctaagaccaagcagcagatcgaagagcagagggtacaggtccaggttgtggagcgcgctcaacaggtcgcggttcaggagcaagagatcgccaggagggagaaagagctagaggccagggtccgcaaacccgctgaggcagaacgctataagctagaacggttagcggaggctgagaaaagccagctgataatgcaggccgaagctgaggcagcaagtgtgagaatgcggggagaggcggaggcgttcgctattggggctagggccagggctgaagccgagcagatggccaagaaagccgaagcctttcaactgtaccaagaggcagcgcagctggacatgttactggagaagctcccgcaggtcgctgaagaaatctcaggacccctgacaagtgccaacaagattactcttgtgtcaagcggcagcggtaccatgggggctgccaaggtcactggagaagtgctagatatcttgacacggctgcccgagtcagtggaacggctgaccggtgttagtatctcccaggtgaatcataagcctctgcgcaccgcgtag

SEQ ID NO: 223454 - DNA, 36 bp, synthetic construct
  misc_feature 1..36: note = Description of Artificial Sequence: Synthetic coding sequence
  source 1..36: mol_type = other DNA
gttgccaagacaaagcagcagatcgaggagcagtag

SEQ ID NO: 223455 - DNA, 759 bp, synthetic construct
  misc_feature 1..759: note = Description of Artificial Sequence: Synthetic coding sequence
  source 1..759: mol_type = other DNA
atgttttttacctgcggacccaatgaagccatggtcgtaagcgggttctgtagaagtcccccagtgatggtggccggaggccgtgtctttgtgctaccttgcatccaacaaatccaaaggatctctttgaacactctgacccttaacgtcaaatcagaaaaggtatacacaaggcacggcgtgccaattagtgtaactgggattgcacaggttaagattcaaggacagaataaagagatgctcgccgcagcttgtcagatgtttctggggaagacagaggcagagatcgcacacatagcactcgagacactcgagggacaccagcgggcaatcatggcccacatgacagtggaagaaatttataaagaccggcagaagttctctgagcaggtgttcaaagtagcgtcctccgatttagtgaatatgggaatatctgtcgtaagttatacactgaaggatatacatgatgaccaggactacttacactcacttggcaaagccaggaccgctcaggttcagaaggacgcacgtattggggaagctgaagccaagcgcgatgccggtatcagggaagcaaaggcgaaacaggagaaagtgtccgctcagtacctctctgagatagaaatggctaaagcacagagggactatgaacttaaaaaagccgcatatgacatcgaagtgaacacacggagagctcaggccgatttggcatatcaactccaagtggccaaaaccaagcaacagatagaagagcagtag

SEQ ID NO: 223456 - DNA, 708 bp, synthetic construct
  misc_feature 1..708: note = Description of Artificial Sequence: Synthetic coding sequence
  source 1..708: mol_type = other DNA
atgtttttcacgtgcggaccaaatgaggccatggtcgttagtggcttttgtcggagcccgccagtgatggtggctggaggtcgggtgtttgtgctcccctgtatacagcagattcagcgaattagtctgaatactctcacactcaatgtgaaaagcgagaaggtatacacaaggcacggcgtaccaataagcgtcaccggaattgcacaggttaagattcagggacaaaataaagagatgcttgccgcagcgtgtcagatgttcctcggcaagaccgaagccgagattgcccatatcgctcttgaaacgctggaaggacatcaacgcgcaatcatggcccatatgacagtggaggaaatatacaaggatcggcaaaaattctccgaacaggtgttcaaggtcgcatctagtgatcttgttaatatgggtatttccgtcgtaagctacactcttaaagatattcatgatgaccaggactacctccatagtctgggaaaagccagaactgcgcaggtgcagaaggacgcccgtatcggcgaggctgaagccaaaagggacgccggaattagagaagcaaaggccaagcaagaaaaggtgagtgctcagtatctgtctgaaattgagatggccaaggcacagcgggactacgagttgaagaaagcggcatatgatatcgaggtcaacactaggcgggcacaggccgattag

SEQ ID NO: 223457 - DNA, 558 bp, synthetic construct
  misc_feature 1..558: note = Description of Artificial Sequence: Synthetic coding sequence
  source 1..558: mol_type = other DNA
atgtttttcacttgtggcccaaatgaagctatggtcgttagcgggttctgccgctcacctcccgtaatggtggcgggtggacgtgtttttgttctgccttgtattcagcaaattcaaagaataagcttgaacaccttaacactcaacgtcaaatccgagaaagtctacacccggcatggcgtgcccatttccgtaactgggatcgcccaggttaagattcagggacagaataaagagatgctggccgctgcctgtcaaatgtttctcggcaagacagaagccgagatcgcccacatcgcacttgagacattagagggccatcagcgagctatcatggcccacatgaccgtcgaggagatttacaaggacaggcaaaaatttagtgaacaggtctttaaggttgcgtcatcagacctcgtgaatatgggtattagcgtggttagttatacactgaaagacattcacgatgatcaggactatcttcattccctaggcaaagcacgcaccgcacaggtacagaaagacgccaggattggcgaggcagaagcaaaacggtag

SEQ ID NO: 223458 - DNA, 438 bp, synthetic construct
  misc_feature 1..438: note = Description of Artificial Sequence: Synthetic coding sequence
  source 1..438: mol_type = other DNA
atgggggttgaaggtacgggcagaggtggctgtcgcctcggaggaccagatgggaagggcaaaggatgggctcccgtcgacgcgacggccagacttccacatccccagagacttagtcttcctttgctgcagttgcagcctgaaccttgctttagccttgtggcgcaaatgcggccttggtggtccccagactatttgcattccctggggaaggccaggactgcacaggtgcagaaagacgcaaggatcggcgaagctgaagcgaagagagacgccggaattcgcgaagcaaaggccaaacaggaaaaagtgagcgcccagtacctgagcgagattgagatggcaaaggcgcaacgagattacgagctgaaaaaggctgcctacgacattgaagtaaacactcggcgagcccaggccgacctggcctatcagctgtag

SEQ ID NO: 223459 - DNA, 717 bp, synthetic construct
  misc_feature 1..717: note = Description of Artificial Sequence: Synthetic coding sequence
  source 1..717: mol_type = other DNA
atgagaccctggtggtcacccgtgaaaatccagggtcagaacaaggagatgttggcggcagcctgccagatgtttctcggtaaaactgaggcagagatagctcatattgccctggagaccctggaaggacaccagagggccattatggcccatatgacagtggaggaaatctacaaggacaggcaaaagttctctgagcaagtgttcaaggtagcaagtagcgacctcgtcaatatgggtatcagcgtggtgagctatactctaaaggatattcatgacgaccaagattatctgcattccttaggcaaggctcgtaccgctcaagtccaaaaggatgctcgaataggcgaggccgaagccaaacgcgacgcagggatccgggaagctaaggctaagcaagaaaaggtctcagcccaatacctatctgagattgaaatggccaaggctcaacgggattacgaattgaagaaagcagcttatgacatagaagttaatactagacgcgcacaggctgatctcgcctatcaacttcaagtggctaagaccaagcagcagatcgaggaacagcgagtacaggttcaagtggtggagagggcacagcaggttgccgtgcaagaacaggagatagccaggagagaaaaagagctggaagcaagagtgcgcaaaccagcggaggctgaaagatacaaactggagagactagccgaggccgagtag

SEQ ID NO: 223460 - DNA, 1140 bp, synthetic construct
  misc_feature 1..1140: note = Description of Artificial Sequence: Synthetic coding sequence
  source 1..1140: mol_type = other DNA
atgttttttacttgcggccctaacgaagcaatggtcgtgtcaggcttctgccggtccccacctgtcatggttgccggtggtagggtgttcgtgctcccatgtatccagcagatccagcgaatttcattgaacacacttactttgaatgtaaagtcagaaaaagtttacactcggcacggcgtccctattagcgttacagggatagcgcaggaaatttacaaggataggcaaaaattttccgagcaagtctttaaagtcgcctctagcgatctagttaacatgggaatctcagttgtttcttatactctgaaggacatccacgacgaccaggattatctgcattcgctcggtaaagcccgaaccgcacaggtgcagaaagacgcacgaattggcgaggctgaggctaagagggacgctggcatccgcgaggccaaagcaaagcaagagaaggtgagtgcccagtacctttccgagatcgaaatggcgaaagcacaacgggactacgagctaaagaaagccgcttatgacatcgaagtgaacacgcgaagagctcaggctgaccttgcctatcaactgcaagtggccaaaacgaagcagcagatcgaggagcaacgtgttcaggtccaagtcgtcgagagagcccaacaggttgccgtccaggaacaggagatcgctagacgcgaaaaagagctggaagctagggtaagaaagccagccgaggcggagcgatacaagcttgaaagacttgcagaagccgaaaaaagtcagctcatcatgcaggctgaagcagaagctgcaagcgtgaggatgcggggagaggcagaggcattcgcaattggggctagggcaagagctgaggccgaacagatggcaaagaaggcggaagcttttcaactgtatcaggaggcggctcagctggatatgctacttgaaaagttgccccaagtagcagaggagatctctggcccactgacctctgcgaacaagattaccctggtctccagtgggtccggtactatgggcgcagctaaggttaccggtgaggtcttggatatcttgacacgcctgccggaatcagtcgaacgcctgactggggtttcaatcagtcaggtgaatcataagcccttgcgcactgcctag

SEQ ID NO: 223461 - DNA, 558 bp, synthetic construct
  misc_feature 1..558: note = Description of Artificial Sequence: Synthetic coding sequence
  source 1..558: mol_type = other DNA
atgtttttcacttgcggtccaaatgaggctatggtcgtgagcggtttctgtagatccccgcctgtgatggtcgctggaggaagggtttttgtactgccttgtatccagcagattcagcgtatcagcctaaacacattaaccctgaatgttaagtctgagaaagtgtatactcgccatggcgtgccaatctcggtcaccggcatagcccaagtgaagatccagggccagaacaaggagatgctcgccgctgcatgccagatgttcctcggaaaaactgaggccgaaatcgcccatattgcactcgagaccctcgagggccaccagagggctattatggctcatatgacggttgaggaaatctacaaggacaggcaaaagttcagcgagcaagtgttcaaggtggcttcatccgatcttgtaaacatggggatttctgttgtctcatataccctcaaagacattcatgacgaccaggactatctccactcattggggaaggcccgtaccgcgcaagtacagaaggatgccagaatcggggaggcagaagctaaacgctag

SEQ ID NO: 223462 - DNA, 696 bp, synthetic construct
  misc_feature 1..696: note = Description of Artificial Sequence: Synthetic coding sequence
  source 1..696: mol_type = other DNA
gtgaaaattcaggggcagaacaaagaaatgcttgcagccgcatgtcagatgttccttggtaagacggaggccgagatcgctcacatcgcactggagaccctcgaaggacaccagagagcaatcatggcacatatgactgtcgaggagatctacaaagaccggcaaaaattttctgagcaagtttttaaagtcgcgtcctcagatcttgtgaacatgggtatctcagtagtatcgtataccctgaaggacattcacgacgatcaggattatctccacagtttgggaaaggctcgcacagctcaggtgcagaaagacgcccgtatcggcgaagcggaggccaaacgtgatgcaggcattcgggaagccaaagccaagcaggagaaggtgagtgctcagtacctgtccgaaatcgaaatggctaaagcacagagggactacgaactgaagaaggccgcttacgatatcgaggtgaacacacggagggcgcaggcagacttggcctaccaactccaggttgccaagaccaagcaacagattgaggagcagcgggtccaagtacaggtggtggagagagcgcaacaggttgcggtccaagaacaggaaattgccaggagagagaaggagctggaggccagggtgaggaaacccgctgaggccgagcggtataagctcgaacgactggctgaggcggaatag

SEQ ID NO: 223463 - DNA, 633 bp, synthetic construct
  misc_feature 1..633: note = Description of Artificial Sequence: Synthetic coding sequence
  source 1..633: mol_type = other DNA
atgtttttcacatgcggaccaaatgaagccatggtggtgagcgggttctgtagatcacctccagtcatggtggctgggggacgggtcttcgtattaccatgcattcaacagattcagcggatttctcttaataccctgacactgaatgttaagtctgagaaggtatacaccaggcatggggttccaattagcgttactgggatagctcaggtgaaaatacagggccagaataaggaaatgttagcagctgcctgccaaatgttcttggggaagacagaggcagagattgcccatatcgctctggagaccctcgagggacaccagcgcgctatcatggcacatatgacagttgaggaaatttacaaagatcgtcaaaaatttagtgaacaggtgttcaaggtcgctagcagcgatttggtgaacatgggtatatctgtcgtgtcatataccctgaaagatatccacgacgaccaggactatctgcactctctgggcaaagcgaggactgcccaggtgcagaaagacgctaggattggggaagctgaggctaagcgggatgccggaattagagaagcaaaagctaaacaggaaaaggtttcggctcagtacttgagcgagatcgaaatggcgtag

SEQ ID NO: 223464 - DNA, 579 bp, synthetic construct
  misc_feature 1..579: note = Description of Artificial Sequence: Synthetic coding sequence
  source 1..579: mol_type = other DNA
atgtttttcacgtgcggccctaacgaagcgatggtcgtgtccggcttttgccgatctcccccagttatggttgctgggggtagagtgtttgtcctgccatgtatccagcagatacagcgaatcagcctcaatactctcactttgaatgtaaaaagtgagaaagtgaaaatccagggacagaataaagagatgctggcagccgcttgccagatgttcttgggtaagaccgaggctgagatcgctcacatagccttggagacactcgagggccatcagagggccatcatggcccacatgaccgtcgaagaaatctacaaggataggcagaagtttagcgaacaggtatttaaggtcgcctccagcgatctcgtaaacatgggcatttccgtcgtgagttatactctgaaggacattcacgacgaccaggactatctgcattctctaggaaaagctagaactgcacaagtgcaaaaggacgctcgtattggagaagccgaggctaagcgtgatgccggtatccgagaagcaaaggctaagcaggaaaaggtcagcgcccagtatctctccgagattgagtag

SEQ ID NO: 223465 - DNA, 1140 bp, synthetic construct
  misc_feature 1..1140: note = Description of Artificial Sequence: Synthetic coding sequence
  source 1..1140: mol_type = other DNA
atgtttttcacttgcggcccaaacgaggcaatggtggtctctggcttttgtagatctcctccagtgatggtagcagggggacgcgtgttcgtgctgccttgtattcaacagatccagaggatctcccttaatacactgacgctcaatgtaaagagcgagaaagtctatactcgccatggtgtgcccatctccgtgacagggatcgcccaggagatctacaaggaccgccagaagttcagcgagcaggtctttaaggtggcctccagtgacctcgtaaatatgggaatttctgtcgtcagctataccttgaaagatatccacgacgaccaggattatttgcactccctcggaaaagccaggacggcacaagtccagaaggacgcgaggatcggcgaggccgaggccaagcgggatgcaggtatcagagaagcgaaagccaaacaggagaaagtttctgctcagtacctgagcgagatcgagatggcaaaagcccagagagactatgaactgaaaaaagctgcctacgacatcgaagtgaacacgcggcgtgcacaggctgacctggcgtaccagctacaggtcgccaagaccaagcaacagatcgaggaacagcgggttcaggtgcaggtggtggaacgggcacagcaggtggcggttcaggagcaggagatagccagacgggaaaaagaactcgaggcccgagtgcggaaacctgcagaagccgagcgctacaaacttgaacggctggcggaggccgaaaaatctcaattgatcatgcaagcagaggctgaagccgctagcgtgagaatgcgcggagaagcagaagcatttgcgattggcgctagggctcgggctgaggcggagcaaatggccaaaaaggctgaggcctttcagctttaccaggaagccgcacagttggacatgttactggaaaaactgccccaggtggccgaagaaattagcggcccattaacaagtgctaacaagattacccttgtcagcagcggttccggcactatgggcgctgccaaagtgacaggtgaggttctagacattctgacccgtctgcccgaaagtgtcgagaggctgaccggagtatccatctcgcaggtcaaccacaagcctctgcgaactgcctag

SEQ ID NO: 223466 - DNA, 1140 bp, synthetic construct
  misc_feature 1..1140: note = Description of Artificial Sequence: Synthetic coding sequence
  source 1..1140: mol_type = other DNA
atgttttttacctgcggccctaacgaagctatggtggtcagcgggttttgcaggagtcctccagtcatggttgccggtggacgtgtgttcgtactgccatgtattcaacaaattcagcggatctcactcaacaccctgactcttaacgtcaaaagcgagaaagtgtacacacgccacggcgttcccatttccgtaacgggtatcgcacaggaaatttacaaggatcgccagaaattttctgaacaggtctttaaagttgccagctccgacctggtgaacatgggtatatcagtggtgagctacacactgaaggacatccacgacgaccaagactacctgcatagtttgggcaaggctcgaaccgctcaagtccagaaagacgccagaattggagaagcagaggccaagcgggatgctggcatacgcgaagcaaaagccaagcaggagaaagtgtcagctcagtatctaagtgagatagagatggctaaagctcagagagactatgagttgaagaaagcggcttacgatatcgaggttaacacacgacgcgctcaagctgatcttgcataccaactgcaggtcgctaagaccaagcagcaaatcgaggagcaaagggtgcaggtgcaggtggtggagcgggcacagcaggtcgctgttcaggagcaggaaattgctaggcgcgagaaagaacttgaagcaagggttcgcaagccagcagaggccgagcgctacaagctcgaacgactggcagaggcggagaaatctcagttaatcatgcaggccgaggccgaagccgcatccgtgaggatgaggggggaagccgaggcctttgcgattggagcgagggcacgggcagaggctgaacaaatggccaagaaagcagaggcctttcaactttaccaggaagccgctcagctggacatgctcttggaaaaactgcctcaggttgcagaggagatttccggtccccttacaagcgcaaataagatcaccctggtgagctcagggagtggaactatgggagccgctaaggtaactggtgaggttctggacatcctcactagactgccggagtcagttgagcgtttaaccggcgtatccatctctcaggtgaaccataaaccccttaggactgcttag

SEQ ID NO: 223467 - DNA, 1140 bp, synthetic construct
  misc_feature 1..1140: note = Description of Artificial Sequence: Synthetic coding sequence
  source 1..1140: mol_type = other DNA
atgtttttcacatgcgggcctaacgaggctatggttgtgagcggtttttgccggagtcctcctgtgatggtagcaggcggaagggtgttcgtgctgccatgtatacagcaaatccaacggataagccttaacacactcactctcaacgtgaaaagcgagaaagtgtataccaggcatggagtccccatatcggttacaggaatagcccaggagatatacaaagatcggcagaaattcagcgaacaagtatttaaagtcgcgtctagtgacctggttaacatggggataagcgtagtctcctatactctgaaagatatccacgatgaccaggattatcttcacagtcttggcaaagcaagaacagctcaagtccagaaggacgcacggataggagaagctgaggccaaacgtgatgcgggtattcgcgaggccaaagccaaacaagagaaggtgtctgcccaatatctgtctgaaatcgaaatggctaaggcccaacgggactatgaactgaaaaaagctgcgtatgatatcgaagtcaacactaggcgggcacaggccgatctggcataccagctgcaggttgctaaaaccaaacagcaaatagaggagcagcgcgtacaggtccaggtcgtggaacgcgctcaacaagtggccgttcaggaacaggaaatcgctcggagagagaaggaactggaggcacgggtcagaaagcccgctgaggctgaaaggtataaactcgagcggttggccgaggccgagaagtcgcagttaatcatgcaagccgaggctgaagccgcttcagtacggatgaggggcgaagcggaggcctttgctatcggtgcacgggctagagctgaggcggagcagatggctaagaaagcagaggccttccaactctatcaagaggcggcacaactagacatgctgctggagaaattgccacaggtggcagaggagatctcaggcccactgacctcggctaataaaattacactggtgtccagcgggagcggcacaatgggcgctgctaaggtgacgggcgaggttctcgatatcctcaccaggctacctgagagcgtggagagactgaccggggtttcaatatcgcaagtgaatcataagcccctccggacggcttag

SEQ ID NO: 223468 - DNA, 1140 bp, synthetic construct
  misc_feature 1..1140: note = Description of Artificial Sequence: Synthetic coding sequence
  source 1..1140: mol_type = other DNA
atgtttttcacatgtggacccaatgaagccatggtggtgagcggtttctgcagatccccacccgtaatggtggctggcggacgcgtgtttgtactgccttgcattcagcagatccagagaataagcctcaacactctgactctgaatgtgaaatctgagaaggtttacacccggcatggagttcctatctcagtgactgggattgcacaagagatctacaaggatagacagaagttttctgaacaggtattcaaggtggcttccagcgatctcgtgaatatgggaattagcgtggtttcctatacattgaaagatatccacgatgaccaggattaccttcactctctcgggaaagctcgtaccgcccaggtccagaaggacgctcgtattggtgaagccgaagctaaacgtgacgctgggattcgggaagcaaaagcaaagcaagaaaaggtaagcgctcaatacctcagtgagatcgagatggccaaggcacagagagattacgaactaaaaaaagcagcttatgatatcgaagttaacacacgacgagcacaggccgacctggcctatcagctccaggtggcaaagacgaaacagcagatcgaagagcagagggtccaggtgcaggtcgtggagcgcgctcagcaggtcgcggtgcaagagcaggagatcgcccgaagagagaaggagcttgaagcaagagtgcggaagccagcagaagcagagaggtataagctggagagactcgccgaggcggaaaagtctcagctgatcatgcaggctgaagctgaagctgcgtcagtgagaatgaggggggaggccgaggccttcgcgattggcgctcgcgcaagggcagaagccgaacaaatggctaagaaggcagaggcattccagctgtaccaggaggccgctcagctcgacatgctcctggagaagctgcctcaagttgctgaagagataagcgggccacttacttccgccaataaaattaccctggtgagctcgggcagtggcacaatgggtgccgctaaggtcacaggcgaagtgctagatatcctgaccaggctgccagagtccgtagagcgcttaacgggcgtttcgatatcgcaggtcaatcataagcccctgaggacggcctag

SEQ ID NO: 223469 - DNA, 861 bp, synthetic construct
  misc_feature 1..861: note = Description of Artificial Sequence: Synthetic coding sequence
  source 1..861: mol_type = other DNA
atgggaatctccgtcgtgagttacactctcaaagacatccatgatgaccaggattacctccactcgctcgggaaggctagaaccgcacaggttcagaaggatgcaaggattggagaagcagaagccaagcgtgatgcgggaattcgcgaagctaaggctaagcaggagaaggtgagtgctcaatatcttagcgaaattgagatggctaaagcccagcgtgactacgaactaaagaaggcggcttatgatattgaagttaacacaaggagagcccaggctgacctggcctatcaactgcaggtagccaaaacaaaacagcagatcgaggagcagcgcgtgcaggtccaggtggttgagcgggctcaacaggtggcagtacaggaacaagaaatagcccgtcgcgagaaggagctggaggccagggtcaggaaacccgctgaagctgaacggtataagctggaacgcctggctgaggccgagaagtcccagctcattatgcaggcagaggcagaggcggcatctgtgaggatgagaggggaagctgaggccttcgcaatcggggcaagagcaagggccgaggctgagcaaatggccaaaaaagcagaagcatttcaactttatcaagaggccgctcaactggatatgctgctggaaaagttgcctcaggtggcggaggagatctccggtcctctcactagtgcaaacaagatcacactcgtgtcttccggcagcggaacaatgggcgcagcgaaggtaaccggggaggtgctggatatcctgacccgtttaccagagtctgtcgagagactcacaggcgtttcaatctcacaggtcaaccacaagcccctgcggacagcctag

SEQ ID NO: 223470 - DNA, 1452 bp, synthetic construct
  misc_feature 1..1452: note = Description of Artificial Sequence: Synthetic coding sequence
  source 1..1452: mol_type = other DNA
atgggcaactgtcatactgtgggtcctaatgaggccttggtggtctcaggcggatgttgcgggtccgactataagcagtacgtttttggcggatgggcttgggcatggtggtgcatatcagacacccaacgcttgagtctggaagtgatgaccatactgtgcagatgcgaaaatattgagacttcggaaggcgtgcctctatttgtcacaggcgtggctcaggtgccgtgtccctgtctgctcgattgtaagtgggggaactccaaaggtttctggaagctgtgccaggtgtgccaaatctcactggaaatcatgactcttcagcccaggtgcgaggatgtagaaacagctgaaggtgtggcacttactgtgaccggcgtagctcaggtcaagattatgactgagaaagagcttttggccgtggcatgtgaacagtttctgggcaaaaacgtgcaggacattaagaacgttgttcttcagacactggagggccatctgagaagcatcctgggcacgctgacggtcgagcagatatatcaggaccgggatcagtttgcaaaactggtgagggaagtggctgccccagacgtaggaaggatgggtatcgagatcctgagtttcactatcaaggacgtgtatgataaagtggactatctctcaagccttggcaagactcaaaccgctgtcgtacagagggatgccgatatcggagtggctgaagccgagagggatgccggtatccgcgaggcagaatgcaagaaagaaatgcttgacgttaaattcatggccgataccaaaattgctgactcaaagcgcgctttcgagttacagaagagtgcattcagtgaggaggtcaatattaaaaccgccgaagcacagttggcatacgaattgcaaggagcacgagaacaacaaaaaataagacaagaagagattgagatcgaagttgtgcagcgcaaaaagcagattgcagtcgaggcccaggaaattctgcggactgataaagaactgatagcgaccgtgaggcgtccagcagaggccgaagcgcatcggattcaacagattgctgagggagaaaaggttaagcaggtcttgctggcccaggcagaggccgagaagattagaaagattggggaggcagaggccgcagttatcgaggccatgggcaaagcagaggccgaacgcatgaagctgaaagcggaagcctaccagaaatacggggacgcagctaaaatggcccttgttttagaggcacttcctcagatcgcagcaaagatagccgcacccttgacaaaggtggatgaaattgtggtgctgtccggggataattctaaagtaacatctgaagtcaaccgacttctggccgagctccctgcctccgttcacgcactaacaggggttgacctgtcaaagatacccctaataaagaaagctacaggtgtacaggtttag

SEQ ID NO: 223471 - DNA, 1287 bp, synthetic construct
  misc_feature 1..1287: note = Description of Artificial Sequence: Synthetic coding sequence
  source 1..1287: mol_type = other DNA
atgggcaactgccacacggtgggtcccaatgaggccctggttgtgtcagggggatgttgtggctcggactacaagcagtacgttttcggaggctgggcatgggcctggtggtgcatcagcgacacccaaagaatctccctagaaattatgacactacagcccaggtgcgaagatgtggagaccgctgagggcgtggcccttactgtgaccggtgtggctcaggtgaagattatgacagagaaagagctgctggctgtggcttgcgagcagtttctcgggaaaaacgtgcaggacatcaagaacgtcgtgctgcagacactggaaggacacttacggtccattttgggtaccctcactgtagaacagatctatcaggaccgggaccaatttgccaagctagttcgggaggtggctgcccctgacgttggtcgaatgggtatcgaaatcctgagcttcaccattaaagacgtgtacgataaagtcgattacttgagcagtttagggaaaactcagacagcggtggttcagcgggacgcggatattggtgtggctgaggccgagagggacgcgggaatcagagaggccgagtgtaaaaaggaaatgctcgacgttaaatttatggctgacaccaagattgccgactcaaaaagggctttcgaacttcagaagagtgccttcagcgaggaggtaaatattaaaacagctgaggcacagttggcctatgaactgcagggagctagagagcagcaaaagatccggcaggaggaaatcgagattgaggttgttcaacgtaagaaacagatcgccgtcgaagcacaggagattctccgcaccgacaaagagctgatcgccactgtccgccgtcccgcagaggctgaagcccacagaattcagcagatcgctgagggggagaaagtaaagcaggtgcttctggcacaagccgaggccgaaaagatccgcaaaattggggaagccgaagctgctgtgattgaggccatgggcaaggccgaggccgagcgcatgaagcttaaggctgaagcatatcagaagtatggcgacgctgccaaaatggccttagtactggaggccctgccccagatcgcagccaaaatcgctgctcccctgaccaaagtggatgagattgttgttctctctggcgacaatagcaaagtcacttccgaagtgaaccgcctcctggcggagctacctgcctcggtgcatgccctgaccggagtggatttgagtaagatcccactgataaagaaggccacaggtgttcaggtgtag

SEQ ID NO: 223472 - DNA, 2982 bp, synthetic construct
  misc_feature 1..2982: note = Description of Artificial Sequence: Synthetic coding sequence
  source 1..2982: mol_type = other DNA
atgcccgctctggccagggacggcggacagcttcctctgctggtggtatttagcgctatgatttttgggactattacaaaccaggatcttccagtcatcaagtgcgtgctgatcaaccataaaaataacgatagcagtgtggggaaatcgagttcttacccaatggtctccgagagtccagaggacctgggttgcgcactgaggccgcaaagctctggcaccgtttacgaggcagccgcagtggaagtggatgtatcagcctctattaccctccaagtcttggtggacgcacccggaaacatcagctgcctgtgggttttcaagcactcctccctcaactgtcagcctcacttcgacctccaaaacagaggcgtggtgtctatggtgatactcaagatgactgagacgcaggccggtgagtacctgctcttcattcagagcgaggcaacaaactatacaatactgtttacagtgtccatccgtaatacactgctctacacattgaggcgtccctacttcaggaagatggagaatcaggacgccctggtttgcatttctgaaagtgtcccagagcccatagttgaatgggtcctttgtgattcgcagggagagagctgcaaggaagaatccccagctgttgtcaagaaggaagagaaggtactccatgagctgtttggaacggacattcggtgttgcgcaagaaacgaattgggccgagaatgtactagattatttactattgatttgaaccagactcctcagactaccctgcctcaactgttcctaaaagtcggcgagcccttatggatacgttgtaaagcagtgcacgtcaaccatggtttcggtttaacgtgggagctggaaaataaagccttggaggagggaaactactttgaaatgagtacatactctactaaccgcacaatgatccggattctgtttgcctttgtgtcctcggtggctcgcaacgacaccggctattatacttgtagcagctctaagcatcccagccagagcgcccttgtgacaatagtcgagaaggggtttattaacgccacaaattctagcgaggactatgaaattgatcaatacgaggagttctgcttttccgtgcgctttaaagcatatccccagatcagatgtacttggacttttagcagaaagtcctttccctgcgagcagaagggcttggataatggctactcaatttctaagttctgtaatcataagcatcaacctggggaatacatcttccacgccgagaatgatgacgctcagttcactaaaatgttcactctgaatattcggagaaagccccaggtgctcgctgaggctagcgcgagtcaggctagttgcttctccgatggctacccgctgccaagctggacctggaaaaagtgctccgataagagtccaaactgtaccgaggagataaccgaaggagtgtggaatcggaaggctaacagaaaggtcttcggccagtgggtctctagtagtaccctgaacatgtccgaagctatcaagggtttcctagtgaagtgctgtgcttataacagcctgggcacctcttgtgaaacaatcctgttgaatagtccaggtccattcccttttatccaggataatataagcttctacgcaaccataggggtatgcctgttattcatcgtggtgctgacccttctaatctgccacaaatataagaagcagtttagatatgagagccaattgcagatggtccaggttaccgggtcctcggacaatgagtatttttatgtggactttcgcgagtacgagtacgatttaaaatgggagtttccaagagagaacctcgagtttggcaaggtgctgggctctggcgcattcggcaaggtcatgaatgccactgcctatgggatctcaaaaacaggagtgagcatacaagtggctgtgaaaatgctgaaggaaaaggctgatagttcagaaagagaagccttgatgtccgaacttaagatgatgacacagttgggcagccatgaaaacatagttaatctccttggcgcatgcactctgtctggacctatctacctgatattcgagtactgttgctatggggaccttctcaactatctgcgctcaaagcgcgagaaattccaccgaacctggactgagatatttaaagaacataatttcagcttctacccaacttttcagtcacatcctaacagtagtatgccagggtcccgcgaggttcagatccaccctgactctgaccaaattagcggcctgcacggcaatagttttcactcggaagatgagatcgagtacgagaatcagaagcgcctggaggaagaggaagacttgaatgtgttgacatttgaggaccttctctgttttgcatatcaggttgctaaaggcatggagtttctggagtttaaaagctgcgtgcacagagatctagccgctcgaaatgtgctggttacacatgggaaagtcgtcaaaatttgcgacttcgggctagccagggatatcatgagcgacagtaattacgtagtaagaggcaacgctcgcctccctgtgaagtggatggcgccagaatccctgtttgagggcatttacactatcaagtccgacgtctggtcctacggcatattgctgtgggaaatcttctcgcttggagtgaacccttacccaggcattcccgtggacgccaacttttataagttgattcagaatgggtttaagatggatcagcctttctatgctactgaggagatctacatcatcatgcaatcctgttgggctttcgacagcagaaagcggccaagcttcccaaacctcacctcgttcctcgggtgtcaactggcagatgctgaagaagccatgtatcaaaatgtggatggccgagtttcggagtgcccacacacatatcagaacagacgccctttttcacgcgagatggaccttggcctgctcagtccccaggcccaggtggaagactcatag

SEQ ID NO: 223473 - DNA, 2991 bp, synthetic construct
  misc_feature 1..2991: note = Description of Artificial Sequence: Synthetic coding sequence
  source 1..2991: mol_type = other DNA
atgcctgcacttgctcgcgacggcggacagttgccattgcttgtggtcttctctgccatgattttcggcaccataacaaaccaagacctcccagtcatcaagtgtgttttaatcaaccataaaaataatgattcaagcgtcgggaaatcaagttcttatccaatggtgtccgagtccccagaggatctgggctgcgctctccgccctcagtctagcggaactgtgtacgaagctgccgcagtcgaggtggatgtcagtgcctcaatcacactacaggtgcttgtagacgctcccggaaatatcagttgtctgtgggtgtttaaacatagctccctgaactgtcagcctcattttgatttgcagaatagaggggtggtgagcatggtgatccttaaaatgaccgagacacaagccggagaatacctcctcttcattcaaagcgaagcaaccaactacaccattctgttcactgtgagcattcgcaacaccctgctgtataccctgaggaggccttatttccgaaagatggaaaatcaggatgcacttgtttgtatctccgagtccgtgccggagccaattgtagagtgggtattatgtgattctcagggcgagtcctgtaaagaggaaagccccgctgtggtgaagaaggaggagaaagtgctacatgagctctttggaacggacatacgttgttgcgccaggaacgagctgggaagggaatgcactcgactgttcaccatcgatctgaaccagacacctcagaccacgttgccacagctctttctgaaggtcggggagcccttatggatcagatgtaaggcagtgcatgtcaaccacggctttgggctgacgtgggagctcgagaacaaagctctcgaggagggcaattactttgaaatgtccacgtatagtacaaaccggaccatgatccgaatactgttcgcctttgtgtccagtgtagcacgtaacgacacaggttactatacatgcagcagctcaaaacatcctagtcaatctgcactggttacaattgtggaaaaaggcttcattaatgcaactaactcctccgaggactacgaaattgaccagtatgaagagttctgcttctccgttaggtttaaagcttatccccaaattagatgcacatggaccttctcaaggaaaagcttcccatgcgaacagaagggccttgataatggttattccatcagcaagttctgcaaccacaagcatcagccaggggagtatatctttcatgccgagaatgatgatgctcagtttactaagatgttcaccctgaatattcggcgtaagcctcaggttctcgcagaagcctccgcctcacaggcttcctgcttcagcgatgggtaccccctgccttcttggacctggaaaaaatgtagcgataaatctcccaattgtaccgaggaaatcaccgagggggtgtggaataggaaggcaaaccggaaggtgttcggccagtgggtcagttctagtacactgaacatgtctgaggccattaaggggttcttagtaaagtgttgcgcatataactccctaggaaccagttgcgaaaccatcctgttgaattcaccaggcccattcccgttcatacaggataatatttcattctacgccacaattggtgtctgtctgttgtttatcgtggtgctgacactgctgatttgccacaagtacaaaaagcaattcagatacgagtcccagctgcagatggtgcaggtcactggctcctctgacaacgaatacttttatgtcgactttcgcgagtatgaatacgatctcaaatgggagtttcccagggagaatctcgagttcgggaaggtcctggggagcggagcctttggaaaagtgatgaatgcgactgcatacggtatcagcaagacaggcgtatctatccaggtcgctgttaagatgctgaaagagaaagcagatagcagcgagagagaagccttaatgtccgaactgaaaatgatgacgcagttgggatcgcatgagaatatcgtgaatttgctgggggcttgcacactgtctggcccaatttatcttatcttcgagtattgttgttacggcgatttgctcaactacctccggagcaagcgcgaaaaatttcacaggacctggactgaaattttcaaagagcacaacttctctttttacccaactttccaaagtcacccaaattcttcaatgcccggtagcagagaagtccagatccatccggattcggatcagatctctggcctgcacggtaacagtttccactctgaagatgagattgagtatgaaaaccagaagcgattggaagaggaggaagacttgaacgtgctgacctttgaagacttactgtgctttgcttaccaggttgcaaaggggatggagttcctggaattcaaatcttgtgtccacagagacttggctgctaggaatgtcctagtgacccatggcaaggttgttaagatctgcgattttggcctcgctcgggacatcatgagcgactccaattacgtggtgaggggaaatgtaagactcgccaggctcccggttaagtggatggcccctgagtcactgttcgagggaatttatactattaagtcggatgtttggtcctacggtatcctattgtgggaaatcttctcactcggcgtgaacccttacccaggtatcccagtagatgccaatttttataagttaatacagaacggatttaagatggatcagcccttctacgccacagaggaaatctatataattatgcagagttgctgggcctttgattcccggaagcggccaagtttcccaaacctcacatcctttctcgggtgccagctggctgacgctgaggaagcaatgtatcaaaatgtggacggcagggtgagcgagtgcccgcacacctaccagaaccgaaggcccttcagccgggaaatggacctcggactgttgagtccccaagcacaggttgaggactcctag

SEQ ID NO: 223474 - DNA, 2859 bp, synthetic construct
  misc_feature 1..2859: note = Description of Artificial Sequence: Synthetic coding sequence
  source 1..2859: mol_type = other DNA
atgcccgcactcgctcgcgacggcggacagctccctctcctagtcgtgttttcggccatgattttcggaacgataaccaaccaggacctaccggtgatcaaatgcgtgcttatcaaccacaaaaacaacgactcaagcgttgggaaaagcagctcctatcctatggtgtccgagtccccagaggacctcggctgcgctctgaggcctcagagttccggcaccgtgtatgaagctgcagctgtcgaggtggatgtttcggcatcaataacactgcaggttctcgttgacgctcctggcaacatctcctgtctctgggtgttcaaacacagcagtttgaattgccagccacactttgacctacagaaccggggtgtcgtgagcatggttatcctgaaaatgaccgagactcaggcaggcgagtacctgctgtttatccagtctgaagcaaccaactacaccatcctgttcaccgtttcaattaggaacaccttgctctataccctgcgccgaccctatttcagaaagatggagaaccaggatgcactggtttgcatcagcgaatctgtccccgaacccattgtcgaatgggtactgtgcgattctcagggtgaatcctgcaaggaagagtcccccgcagtcgtaaaaaaggaggagaaagtgctccacgagctcttcggaaccgatatacgatgctgtgcccgaaatgaattgggcagggaatgcaccagactgtttaccattgacctcaatcagacaccacagacaacactcccccagctgtttcttaaggtcggcgagccactttggatccgatgcaaagccgtgcacgtgaaccatgggtttggcttgacatgggagcttgagaataaagccctcgaagagggaaactactttgaaatgtcgacttattctacaaatcggaccatgatcagaattttgttcgccttcgtgagctccgtggccaggaatgatactggctactacacttgctcctctagtaagcacccatcccaaagcgcgctggtgactattgttgagaagggctttataaatgctactaactcatctgaagactatgagatcgaccagtacgaggagttctgtttttccgtacgttttaaagcgtaccctcagataagatgcacatggaccttctccagaaaatccttcccctgtgagcagaaaggactggataatggatactccataagcaaattttgcaaccacaaacatcaacctggggagtatatcttccacgcggaaaacgacgacgcccagtttactaaaatgttcacactaaatattcggagaaaacctcaagtgctggcagaggcttcagcttctcaagcaagctgttttagcgatgggtacccgctgccctcatggacctggaagaagtgtagtgataagagtcctaattgtactgaggagattaccgaaggggtgtggaacagaaaagcgaatcgtaaagtgtttggccaatgggtgagctctagcacgctcaatatgtccgaggccattaagggatttctcgtcaagtgctgcgcttataactccctgggtacctcttgtgaaacgatcctgcttaattcacccggaccctttccctttatccaggacaatatcagtttctatgcaactatcggcgtgtgtctgctatttatcgtggtattaactctcctgatttgccacaaatacaagaagcagttccgttacgaaagccagctgcagatggtgcaggtgaccggcagtagcgataatgagtatttttatgtagactttagagagtatgaatatgatctcaagtgggagtttccaagggaaaaccttgaattcggtaaggtgttgggctctggtgccttcggcaaagtgatgaatgcgaccgcttacgggatctcaaagacaggggttagtattcaggtagctgtgaagatgctaaaggagaaggccgatagctctgaacgcgaagcactcatgtcagaactgaagatgatgacccaactgggatcccatgagaacatcgtgaacctgctcggagcctgtaccctgagcggcccaatttatcttatctttgagtattgttgctacggtgatcttcttaattacttgaggagcaagagagaaaaattccataggacttggactgaaatctttaaagaacataatttctccttctacccaaccttccagagtcaccctaattcctccatgccgggtagcagagaggtccagatccaccccgattcagatcagatttccggcttgcacgggaactccttccatagcgaagacgaaattgagtacgaaaaccagaagcggctggaagaggaagaagacctgaatgtgttgacattcgaggatctgctctgttttgcataccaggtcgcaaaaggaatggagtttttagagttcaagtccgccaggctccctgtaaaatggatggcgcctgaatcgctgttcgaaggcatatacaccatcaaatctgacgtctggtcctacggcattcttctatgggaaattttcagccttggggtgaacccgtatcccggtatccccgtggacgcgaatttctataaactaattcagaacgggttcaaaatggaccagccattttacgcgaccgaagaaatttatataattatgcagagctgttgggccttcgattcacggaagcgccctagtttcccaaatctcacatctttcttggggtgtcagctcgcagacgcagaggaggccatgtaccagaatgtggacggaagggtctctgagtgtccgcacacataccagaataggagacccttcagtagggagatggatctggggctgctctccccacaggcccaggtggaagactcttag

SEQ ID NO: 223475 - DNA, 2253 bp, synthetic construct
  misc_feature 1..2253: note = Description of Artificial Sequence: Synthetic coding sequence
  source 1..2253: mol_type = other DNA
atgtggaacctcctacacgaaacagattctgcggtcgctaccgccagacggccaaggtggttgtgcgcaggcgcactggtgctagctggcggtttctttctgttagggttcctctttggatggtttattaaaagctccaacgaggccacaaacatcaccccaaagcacaatatgaaagccttcctggatgaacttaaagccgaaaacattaagaaattcttgtacaattttacacagatccctcaccttgcagggactgagcagaactttcaactcgctaagcagatccagagtcaatggaaagaatttggcctggactccgttgaattagcacactacgatgtcctgctcagctatccgaacaaaactcatcccaactacatctcaattataaatgaggatggaaacgaaatatttaacactagcctttttgagccaccaccccctgggtatgagaatgtttcagacattgtcccacctttctctgcattctcaccacagggaatgcccgagggggacctcgtatacgtcaactatgctagaacggaagacttctttaagttggagagggacatgaaaataaactgtagcgggaaaattgtgatcgcacgctacggtaaggtgtttcgcggaaacaaggtgaagaacgctcagctggctggagctaagggtgtcatactttattcagacccagcagactactttgcaccaggagtcaaatcttatcccgatggctggaacttgccaggcggaggcgtccagcggggaaatatactaaacctcaatggtgcaggtgacccactgacccccggataccctgctaacgaatatgcttacaggcggggaatcgcggaggcagtcggtctgccatccatacctgtccatccgatcggttactacgatgcccagaaactgctagaaaaaatgggaggaagcgctcccccagactctagctggagagggtcactcaaggtgccttacaacgttggccctgggttcacagggaatttttccactcaaaaggtaaagatgcatatccatagcaccaatgaagtcacgcggatttataacgtgatcggaaccctgagaggcgctgtcgaaccagatcgttatgtcattttgggcggacaccgtgactcctgggtttttggtggcatagatccccagtctggagccgctgtcgtacatgaaatcgtcagatcttttggcacacttaagaaagaggggtggcgtcccagacgcaccatactttttgccagttgggatgctgaggaatttggcctcttgggcagtactgagtgggcagaggagaatagccggttactacaggagagaggagttgcctatatcaatgcagacagctcaattgagggaaattacaccctgagggtggattgcacacccctgatgtactcacttgtgcataacttgacaaaagaacttaagtcccctgatgagggatttgagggaaagtccctgtacgaaagttggactaagaagtctccgagtccggagtttagtggaatgcccaggatctctaagctgggatctggcaacgatttcgaagttttttttcagagacttggcatagcttctgggcgtgctcgctatacaaagaactgggagaccaacaagttttccggctacccactttaccacagcgtctacgagacatatgagctcgtcgagaaattttacgatcccatgttcaaataccatttaacggttgcacaagttagagggggtatggtgttcgagctcgcgaatagtattgtgctaccctttgattgtagagactacgctgttgtgctgcgtaaatacgccgataagatctactcaatttccatgaagcacccccaggaaatgaagacgtattccgtcagctttgattctctgttctcagctgtcaagaattttaccgaaatcgcatctaagtttagtgaacggctccaagattttgacaagtctaatcctattgtgttgcggatgatgaatgaccagctcatgttcttggaaagggcctttatcgatcctttaggccttccggaccgaccattctaccgacacgttatatacgcgccatcaagtcacaataagtacgccggagagtcattccccggaatttacgacgctttgtttgacatagagagcaaagtggatccgagtaaggcctggggtgaggtgaagcggcagatttatgtggccgcattcactgtgcaggcagccgctgaaaccttgtctgaagtggcatag

SEQ ID NO: 223476 - DNA, 2208 bp, synthetic construct
  misc_feature 1..2208: note = Description of Artificial Sequence: Synthetic coding sequence
  source 1..2208: mol_type = other DNA
atgaccgctggtagtagctacccactgtttctggctgcgtacgcatgcaccggctgcctcgcagagaggcttggctggtttatcaagtcttccaacgaagcaaccaatatcacccccaagcataacatgaaagccttcctcgatgagctgaaggccgagaacataaagaaattcttatacaattttacgcagatcccacaccttgctggcaccgagcagaattttcagctagccaaacagatccaatctcagtggaaggagtttgggcttgatagtgtggagttagcgcactatgacgttctgctctcttaccctaataagacccaccctaactatatttctataatcaacgaagatggcaatgaaatcttcaatacaagtctttttgaacccccaccccctggttatgaaaacgttagcgatatcgtcccccctttcagcgctttctctccgcagggtatgcccgagggagatctggtgtacgtaaactacgcgaggaccgaggactttttcaaattggaacgggacatgaagatcaattgtagtgggaagattgtcattgcgagatacggtaaggtgtttcgtggcaacaaagtcaagaatgcgcaactcgcaggcgctaagggggtgattctgtattccgacccagctgattacttcgctcccggagtgaagtcataccccgatggatggaacctccccggtggtggtgttcaaagggggaacattctcaatctcaatggggcaggggaccctctgacgccgggttatccagccaatgagtatgcgtacagaagaggtatcgcagaagccgttggcctgcccagcatccccgtgcacccgattgggtactacgacgctcaaaaactgctggaaaaaatgggaggctcagctccaccagactctagttggagaggttcgctgaaggtgccatataatgtcggacctgggttcaccggcaacttcagcactcagaaagtgaagatgcatatacactctaccaacgaagtcacgcgtatatataacgttattggaacccttaggggtgccgtggagcctgatcgctacgtcatactgggcggtcatcgggactcttgggttttcggcggaattgatcctcagagcggcgcagctgtggttcatgagatagttcgaagctttggcacactgaagaaagagggatggcggccaaggagaaccatcctgtttgctagctgggatgctgaagagtttgggctactcggcagcactgagtgggctgaagagaactcacgcttactgcaggaacgaggcgtggcatatatcaatgctgacagctcaattgagggcaactacaccctccgtgtggattgcacccctctaatgtattcactggtgcacaacctgacaaaggaactgaaatcaccagacgagggcttcgaaggaaaaagcctttatgaatcctggaccaagaaatcaccatctcccgaatttagtgggatgcctcggatctcaaaactggggtccgggaacgacttcgaggttttcttccagcgcttgggcattgcttctggacgtgcccgatacactaagaactgggagacaaataagttctctggataccccctctaccactctgtttacgagacatatgaattggtggagaagttttacgatcccatgttcaagtaccatttaaccgttgcccaggttagggggggtatggtgttcgaactggccaacagtatcgtgctgcccttcgattgtagggactacgccgttgtgctcagaaaatacgctgacaaaatttactccatatccatgaagcatcctcaagagatgaaaacttatagcgtgagctttgacagccttttttctgctgtcaagaatttcacagaaattgctagtaagttctccgagcgactccaggacttcgacaagtccaatcctattgtgctgcggatgatgaatgaccagttaatgttcttggaaagagcttttatcgaccctcttggcctacctgatcggccattctatagacacgtgatttatgccccatccagtcataataaatatgccggagagtccttcccagggatttacgacgcactgtttgacatagagagtaaggttgatccctccaaagcatggggcgaagtgaagaggcagatctacgtggctgctttcacagtacaggcagccgcagagacactatccgaagtggcctag

SEQ ID NO: 223477 - DNA, 1329 bp, synthetic construct
  misc_feature 1..1329: note = Description of Artificial Sequence: Synthetic coding sequence
  source 1..1329: mol_type = other DNA
atgggcggttccgctccaccagacagtagctggagaggcagcctgaaggtcccctataacgtgggacctggctttacaggaaatttctccacccaaaaggttaagatgcatattcacagcacgaatgaggtaacacgtatatacaatgtcatcggaactcttcgcggagcggtcgaacccgaccggtatgtaatcctggggggacatcgggactcttgggtcttcggtggcatcgaccctcagagcggagctgccgtcgttcacgagatcgtgcgtagttttggcaccctcaagaaagagggatggaggcccagaagaacgatcttatttgcatcctgggatgcagaggaatttgggttgttgggttctacagagtgggctgaagagaatagcagacttctgcaggagcgaggggtcgcttatattaatgctgactctagtatcgaaggaaattacaccctgcgtgtggattgtacaccgcttatgtattctctggtccacaacctgactaaggagctgaagagccccgatgaagggtttgagggaaagtctctctatgaatcctggacaaagaaatccccaagtccggagtttagcgggatgccgcgaataagcaagctgggctcggggaatgactttgaagtgtttttccagagactgggaattgccagcggcagggctagatacactaaaaattgggaaactaacaagtttagcggataccctctctatcacagtgtgtacgaaacatatgaactggtggaaaagttttatgatccgatgtttaaataccacctgactgtagcccaggtccggggaggaatggtgttcgaactggcaaactccatcgtcctgcctttcgattgccgggactacgccgttgtattacggaagtatgctgataagatctacagtatctcaatgaagcaccctcaggagatgaaaacctattccgtgtccttcgactccctgtttagtgcagtgaaaaatttcacagagattgcttccaagttcagtgaacgtctccaagattttgacaaatctaatcctatcgtcctaagaatgatgaatgaccagttaatgttcctggagcgtgcattcatcgatcccctcggactccccgatagacccttttatagacacgtcatctacgccccatcatcccataacaaatatgccggagagagcttccctgggatttatgacgccctctttgatattgaatctaaagtggacccatcaaaagcatggggtgaagtaaaacgacagatttatgttgccgctttcacagtgcaagcagccgcagaaactttgtccgaggtggcttag

SEQ ID NO: 223478 - DNA, 2160 bp, synthetic construct
  misc_feature 1..2160: note = Description of Artificial Sequence: Synthetic coding sequence
  source 1..2160: mol_type = other DNA
atgtggaacctcctgcatgaaaccgatagcgcggtggcgacagctcggaggcccagatggttgtgcgctggcgcattagtgctggccggaggattctttctcttggggtttctattcggatggtttatcaaatcatcaaatgaggctactaacatcacacccaagcataacatgaaagccttccttgacgaactgaaggcggaaaacattaaaaagtttctttataacttcacccagatcccccacttagcgggaactgagcagaatttccaactcgcaaagcaaatccaaagccagtggaaggaattcggactcgattccgttgagttggcgcactacgacgtactgttgtcctatccgaacaaaactcaccccaactacatatccatcatcaacgaagatggtaacgagatcttcaacacatccctcttcgagccccctcctccaggctatgagaatgtgtctgatatcgttccccctttcagtgcctttagcccccaaggaatgccggaaggggacctggtgtacgttaactacgcgagaaccgaggacttcttcaagcttgaacgcgatatgaaaattaattgctccggtaagatagtcatcgcaagatatggcaaggtgtttaggggcaacaaggtgaagaatgcccaactcgccggtgctaaaggcgtaattctatattcagatccagccgattactttgccccaggtgtgaagagctatccggacggatggaatcttccaggcggaggcgttcagcgagggaatatcctgaacctgaatggagctggagatcctctgaccccgggttatcccgctaacgaatatgcttacaggagaggaatcgccgaggccgtcggcttgcctagcatacccgtgcacccaattggctattatgacgcccagaaactacttgagaaaatgggcggatctgctcctccagatagcagctggcgaggatcactcaaggtgccgtataatgtgggaccaggctttaccggcaatttctcaactcagaaggttaaaatgcacatccatagcacaaacgaagttaccagaatttacaatgtgattggcaccttaagaggggcagtcgaaccagaccgatatgtgatcctgggtgggcaccgagatagctgggttttcggcggaattgatcctcagtccggcgcagcggtggtgcatgagatcgtgaggagtttcggcactctgaagaaggaaggctggagacctcgccgtacaatcctgttcgcaagttgggatgctgaggaattcggactcttggggagcacggaatgggccgaagagaactctcggctactgcaagagcgcggagtagcttacataaacgctgattcttctatcgagggcaattacaccctgcgcgtggattgtacccctctgatgtactccctagtgcataatttgacaaaagagttgaaatcccctgacgagggatttgagggcaaatcactctacgaaagttggacaaagaaatcaccctctcccgagttttctggtatgcccaggattagtaaactggggagtggcaacgattttgaggtgttcttccagaggcttggtatcgcttccgggagggcacggtacactaagaactgggaaacaaacaagttctccggctatccgctgtaccatagcgtgtatgagacctatgaactggtggagaagttctacgaccccatgttcaaatatcacctgaccgtggcacaggtccggggaggcatggtgttcgagctggccaactctattgtgctgccatttgattgccgggactacgccgtggtgcttaggaagtacgccgacaagatatattctatatcaatgaagcacccccaggaaatgaagacatatagtgtatcctttgactcacttttttccgctgtgaaaaattttactgagattgcctccaagttttccgagcgtctccaagactttgataaatcaaagcatgtcatatacgccccatcaagtcataacaagtatgctggtgagtcctttccaggtatctacgacgctctgttcgatatcgagagcaaggtagacccaagcaaggcttggggggaagtaaaaagacagatctatgtagctgcctttacagttcaggccgctgctgagaccctcagtgaggtggcgtag

SEQ ID NO: 223479 - DNA, 1638 bp, synthetic construct
  misc_feature 1..1638: note = Description of Artificial Sequence: Synthetic coding sequence
  source 1..1638: mol_type = other DNA
atgtggaaccttttgcacgaaacagattcagccgtcgcaacagcccgacggccacggtggctgtgcgccggtgcgctggtattagccggaggcttcttcctgctggggtttttgttcgggtggtttattaagtcttcgaacgaggctacgaatatcacgccgaagcacaatatgaaggccttcttagatgagctgaaagccgagaatataaaaaaattcctgtacaacttcacccagattcctcacctagccggaactgagcagaacttccagctggcaaaacagatccagtcacagtggaaagagttcggccttgattcagtcgaattggcccattacgacgtgcttttgtcatatccaaataagactcacccaaattatatcagcatcatcaacgaggacggaaacgaaatcttcaataccagtttattcgagccaccaccaccaggctatgaaaacgtgtccgatatagtgccaccattctctgctttctcaccacaggggatgccagagggagacctcgtgtatgtgaactacgcaagaacagaagactttttcaagctggagcgcgatatgaagatcaattgtagcggaaaaatagtaattgctaggtacgggaaggtgtttcgcggaaataaagtcaaaaacgcacagctggccggagcaaagggcgtcatactgtatagcgatccagcggactatttcgcccctggggttaagagttatccagacggatggaatcttcctggcggaggagtacagaggggaaacattctgaatttgaacggggcaggagatccgttaacccctgggtacccagccaacgagtatgcctaccgccgtggcatagcagaggccgttggtttaccctcgataccagtgcatcccattggctactatgacgcccagaagctgctggagaagatggggggttcagcccctccggactcatcatggagaggctcattgaaagttccctacaacgttgggccaggctttactggaaactttagtacccaaaaggtgaagatgcacattcattccaccaacgaggtcaccaggatttacaacgtcataggcactctccgcggagcagtcgagcctgatcgttatgttatcctggggggacacagggactcctgggtgttcgggggaatagatccacaatccggcgctgccgtagtacatgagatcgtcaggtcatttggaacactcaagaaagaagatatcctgggttggagacctcgacgtaccatcttgtttgcctcctgggacgcggaagagttcgggttgcttgggtcaacagagtgggccgaggagaacagtcgcctcctccaagaaaggggagtagcttatatcaatgctgatagcagcatcgaagggaattatactctccgggtcgattgcacccctctgatgtattccctggtacataatctgaccaaagaactgaaaagcccagatgagggcttcgagggtaaaagtctctacgaatcctggacaaagaagagccccagccctgaattctccggaatgccaaggatcagcaaactggggagcggaaacgatttcgaagtgttctttcagagactggggattgccagtgggcgagccagatatacaaaaaaaaagaaatag

SEQ ID NO: 223480 - DNA, 2115 bp, synthetic construct
  misc_feature 1..2115: note = Description of Artificial Sequence: Synthetic coding sequence
  source 1..2115: mol_type = other DNA
atgaccgctggaagtagctaccccctctttctggcagcctacgcctgcacaggatgtctggctgagcgactcggttggttcataaaatcatctaacgaagccacaaacatcactcctaagcacaatatgaaagccttcctggatgagctcaaagccgagaacatcaagaagttcctttacaacttcacccagatccctcacctcgctggaaccgagcagaactttcagctagctaaacaaattcagagtcagtggaaggagttcggccttgactccgtagaactagcgcactacgatgtgctgctgtcctatcctaataagactcatcctaattacatctctatcattaacgaagacgggaacgaaatctttaatacttcactgttcgagcctcctccacctggttacgagaacgtatctgatatcgtgcctccctttagcgcattctcaccccaggggatgcctgaaggagatctcgtttacgttaactatgccagaaccgaggacttttttaaactggagcgggatatgaagatcaactgtagcgggaaaattgtgatagctaggtatggtaaagtctttaggggcaacaaagtgaaaaatgcccaacttgcaggagccaaaggggtgatcctatacagtgatcctgctgattatttcgcccctggcgtcaagagttacccggacggatggaacttgcccggtggcggtgttcagcgaggcaacatccttaacttgaacggcgctggggacccactgacgccaggctacccagccaacgaatatgcctacagaagaggcatcgcagaggctgtgggcttgccttccattccagtccatcccattggctattatgacgcgcagaagctgttagaaaaaatgggtgggtccgcgcctcccgattcatcctggaggggatcactgaaggttccttataatgtgggtccaggttttaccgggaatttcagcacccaaaaagtcaaaatgcacatccactctacgaacgaagtgacacgcatttacaacgtcattggaacattacgcggtgccgttgaaccggacaggtatgttatcctcggcggtcatagggactcctgggttttcggtggcatcgacccgcaatccggcgctgccgtggtgcacgagatcgtgcgcagcttcggcactctcaaaaaagagggatggaggcctaggagaacgattctcttcgcaagctgggatgccgaggagttcggcctgctcggatctacagagtgggcagaggagaatagtcggctattacaggaacggggagtggcctacataaatgccgactcatctattgaaggcaattacacactgcgtgtcgattgcacaccactgatgtacagcctcgttcacaatctgactaaagagctcaaatctccggacgaaggtttcgagggtaaaagcctatacgagtcctggacaaagaaatcgcctagcccggaatttagcggaatgccgagaatctcaaagctgggcagtgggaatgattttgaggttttttttcagcgcctgggcatagctagcggaagggccaggtacaccaaaaactgggagaccaacaagtttagtgggtatccactctatcactcagtctacgagacgtatgaactggtcgaaaaattttatgacccaatgtttaaatatcatctaactgtagcccaggtgaggggcggtatggtgttcgagctggcgaactccatcgtgctgcctttcgactgcagggattatgcggttgtgttgaggaagtacgcggataagatctatagcataagcatgaagcaccctcaggaaatgaagacctacagtgtcagctttgactctttattctccgcagtgaagaattttactgagattgccagcaaattttctgaaagactgcaagactttgacaagtcaaaacatgtgatttacgcgccttcatctcacaacaagtacgcaggggagagctttccagggatctacgatgcattgttcgacatcgagtcaaaggtcgaccctagcaaagcttggggggaagtcaagaggcagatttacgtggcagccttcactgttcaagccgctgctgaaaccctgtctgaggttgcctag

SEQ ID NO: 223481 - DNA, 774 bp, synthetic construct
  misc_feature 1..774: note = Description of Artificial Sequence: Synthetic coding sequence
  source 1..774: mol_type = other DNA
atggctcagagaatgaccacacagctgctcctgctgctggtttgggttgcagttgtgggagaggcgcagactagaatcgcctgggcacgcacagagttgcttaacgtctgtatgaatgccaaacatcacaaagagaagcctggtcctgaggacaaactgcacgagcagtgcagaccctggcgaaagaatgcctgctgcagtactaacacctctcaggaagcacataaggacgtttcttatctttatcgattcaactggaatcactgcggagaaatggcccctgcgtgtaaaaggcattttattcaggatacctgcctctacgagtgttcaccaaacctgggtccatggattcagcaagtggatcagtcatggcgaaaggaacgcgtcctgaatgttccgctgtgtaaggaggactgtgagcaatggtgggaggattgcagaacgagctatacgtgtaagtcaaattggcacaaagggtggaattggacatctgggtttaataagtgtgccgtgggcgctgcttgtcagccgtttcatttctatttccctactcccaccgtgctgtgcaacgagatatggacccatagctataaggtgagtaattactccagggggagcggacggtgtatccaaatgtggttcgaccccgcacaggggaaccccaatgaggaagtagcccgattctatgctgctgccatgagtggcgctggaccatgggcagcctggccgtttctgcttagtctcgctctcatgctgctgtggttgttaagttag

SEQ ID NO: 223482 - DNA, 774 bp, synthetic construct
  misc_feature 1..774: note = Description of Artificial Sequence: Synthetic coding sequence
  source 1..774: mol_type = other DNA
atggcgcagcggatgaccacccaacttctccttctgctggtttgggtggctgtggtgggggaagcacagacgagaattgcctgggcccgaaccgagttgctcaacgtatgtatgaacgccaagcaccacaaggaaaagccaggtccagaggataagctgcacgaacagtgccgaccatggagaaagaacgcatgttgtagcacaaacacttctcaggaggcgcacaaagatgtttcatatctgtatcgtttcaattggaaccactgtggggagatggcccctgcctgcaagcggcatttcatccaagatacctgcctgtacgagtgcagccccaacctgggcccttggattcagcaggtggaccaaagctggagaaaagagcgcgtattgaatgtgcccttgtgcaaggaggactgcgagcaatggtgggaagactgtaggacttcgtatacatgcaaatcaaactggcataagggttggaattggacttctgggttcaacaagtgcgcagtcggggctgcctgtcaaccgtttcacttctatttccctacacccaccgtcctgtgcaatgaaatctggacccacagttacaaggtgtccaactactcacggggaagcggaaggtgcatacagatgtggtttgatcccgctcagggcaacccaaacgaagaagtggcacggttctatgcagctgccatgtctggggcaggtccctgggccgcttggccatttctgctgtctctggcattaatgctactctggctgctgtcctag

SEQ ID NO: 223483 - DNA, 774 bp, synthetic construct
  misc_feature 1..774: note = Description of Artificial Sequence: Synthetic coding sequence
  source 1..774: mol_type = other DNA
atggcacagagaatgaccactcagttattactgctgctggtctgggtcgccgtcgtgggagaagcccagacccggatcgcgtgggctcgaacagagctgcttaatgtttgtatgaacgcaaaacaccataaagaaaagcccggacccgaagataaactgcacgagcagtgtcgaccatggcgcaaaaatgcttgttgcagtaccaacactagtcaggaggcccataaggatgtcagctacctgtatcgcttcaactggaaccactgcggggagatggcaccagcctgtaagcgccacttcattcaggacacatgcctctatgagtgtagtcctaatctgggcccatggatccagcaagtggaccagtcttggcgcaaagagcgcgtcctaaatgtccccctgtgcaaggaggactgtgagcaatggtgggaggattgccgcactagctatacttgtaagtcaaattggcacaagggttggaactggacgtccgggttcaataagtgtgccgtcggggctgcctgccagccgtttcacttctattttcccacaccaactgtactctgcaatgagatttggactcactcctataaggtctctaactacagcaggggctctggcaggtgtatccaaatgtggttcgaccccgctcagggcaaccctaatgaagaagtggccagattttacgctgccgctatgtcaggagccggtccctgggccgcatggcccttcctcctcagcttggccctgatgctgctgtggctacttagctag

SEQ ID NO: 223484 - DNA, 774 bp, synthetic construct
  misc_feature 1..774: note = Description of Artificial Sequence: Synthetic coding sequence
  source 1..774: mol_type = other DNA
atggctcagaggatgacaactcagctgctgctgctgctggtatgggtggccgtcgtcggggaggctcaaacaaggattgcatgggccaggacagaactcctcaatgtgtgcatgaatgcgaagcaccacaaggaaaaaccgggacctgaagacaaactgcacgaacaatgccggccatggcgaaaaaacgcctgctgtagcactaacacatctcaggaagcacataaagatgtgagttatctctatcgttttaactggaatcactgtggcgagatggctccggcatgcaagaggcatttcattcaggacacgtgtctgtacgagtgcagtcctaatctgggaccctggatccagcaggtcgatcagtcttggagaaaagagcgagtgctcaatgtaccgctgtgtaaggaagattgtgagcagtggtgggaggactgtcgcacaagctacacctgcaagagcaattggcacaagggctggaactggacgtccggcttcaacaagtgcgccgtgggcgcagcttgccaaccctttcacttttactttccgaccccaacggtgttgtgtaatgagatttggacacacagctacaaagtctcaaactactccagaggcagtggcaggtgcatccaaatgtggtttgatcctgcacagggcaaccctaacgaggaagtggcccgtttctacgccgctgccatgtctggcgcagggccttgggcagcatggccctttctcctgtccctggccctgatgcttttgtggctcctgagctag

SEQ ID NO: 223485 - DNA, 768 bp, synthetic construct
  misc_feature 1..768: note = Description of Artificial Sequence: Synthetic coding sequence
  source 1..768: mol_type = other DNA
atggtgtggaagtggatgcccctcctgctccttctggtgtgcgtggccaccatgtgttccgcacaggacaggacagacctacttaacgtttgcatggatgctaagcaccataagactaagcctggacctgaggacaagctgcatgatcaatgttctccgtggaaaaagaatgcatgttgcacagcctccacttctcaggagctccacaaagacacaagtcggctatataacttcaactgggaccattgcgggaagatggagcccgcatgcaagcgccactttatccaggacacttgtctgtacgagtgttcaccgaacttgggcccatggatccagcaagtgaatcagtcttggcgcaaggagcgcttcctggatgtccctctgtgtaaggaagactgtcagcgctggtgggaggattgccacacatcgcacacatgtaagagcaattggcatcggggttgggactggacgtccggtgttaataagtgtcctgcaggcgcactgtgtaggaccttcgaatcttatttcccaactccagccgcactgtgcgaaggtctctggtctcatagctacaaagtttccaactactcacggggttcaggaagatgtatccagatgtggttcgactcagctcagggcaatcctaacgaggaggtcgccaggttctatgccgcagctatgcatgtcaatgccggagaaatgctccacggcacaggagggttgctactctctctggcactcatgctccagttatggctgttgggatag

SEQ ID NO: 223486 - DNA, 729 bp, synthetic construct
  misc_feature 1..729: note = Description of Artificial Sequence: Synthetic coding sequence
  source 1..729: mol_type = other DNA
atgttacccgctgcaacagaagtgcaattgcgcctgcaggggcagaaagacatggtctggaaatggatgcccttgctcctacttctcgtgtgcgttgccactatgtgctccgcacaggatcggacggacctgctcaacgtttgcatggacgcaaagcaccacaaaaccaagccagggcctgaagacaaattgcacgatcagtgctcaccctggaagaagaatgcttgctgtaccgcaagtactagccaagagctacacaaggacacaagcaggctgtacaatttcaactgggatcattgcggaaagatggagccagcctgcgctaccagctcaaggacacccgtgtcaatgtcggcgcaccctggagcactcgatccggcaggcgagagcgaattggctaaaaatgcatcctggatgtgtccctatgcaaagagaacagtgtcagcaggaggtaggatcgtaacgccgccaactagagccagggccaccgggacagaagatggtaccggaccccaggagctgactagtgcccagctgggcctgtctgcagccccactgagtcctacatcacctctccaacttccattcgtcaaagcaagtggggtcacccacactagatctgccacgaccgcagagggggctgctgctgcaagccgctgcgggcttatccagcctagggctaccccgaccaggaaatggagaggatcaatgcttcagccctgcatgtag

SEQ ID NO: 223487 - DNA, 516 bp, synthetic construct
  misc_feature 1..516: note = Description of Artificial Sequence: Synthetic coding sequence
  source 1..516: mol_type = other DNA
atggtctggaagtggatgccgctgctgcttcttctcgtatgtgttgccactatgtgctcagcacaggatcgcacagatttgcttaacgtttgtatggatgctaaacatcataagaccaaacctggtcccgaagataagctacacgaccaatgttccccttggaaaaagaacgcctgttgtaccgccagcaccagccaggagttacacaaggatactagccggctgtacaatttcaactgggaccattgcggaaaaatggagcctgcctgcaaacggcactttattcaggacacatgtctgtatgagtgttcccccaatttagggccatggatacaacaagtaaaccagtcttggagaaaagagagattcctggacgtcccgctgtgcaaggaagattgccagaggtggtgggaagactgtcacactagtcacacgtgtaaatccaattggcatcgtgggtgggattggacatccggcgtgaacaaatgccctgcgggagctctgtgccgtacatag

SEQ ID NO: 223488 - DNA, 2010 bp, synthetic construct
  misc_feature 1..2010: note = Description of Artificial Sequence: Synthetic coding sequence
  source 1..2010: mol_type = other DNA
atggcacttctcctcgtttccttgttagccttcctctcccttggcagtggctgccaccataggatttgtcactgttctaaccgcgtgtttttatgtcaagaatctaaggtcactgaaattccttctgatctgccaagaaatgcgattgagctgcgctttgtgcttactaaactccgtgtcattcagaagggagctttctcaggctttggagacctggagaagatcgaaatcagtcaaaatgatgtgctcgaggtcatcgaggccgatgtgttctctaatctgccaaagctgcatgagattagaattgagaaggccaataacctcctgtacatcaaccccgaggcctttcagaatcttcctaacttgcagtacctattgatttcgaacacaggaatcaagcatctgcccgacgtccacaaaatccactccttacagaaggttttgctgtggctgaataagaacggtatacaggagatccataactgtgcgtttaatggcacacaactggatgagttaaatctctccgataataacaacctggaggaactgcccaacgatgtgttccatggtgcctcagggcctgtgatactggacatctctcgtacccggattcatagtctcccttcttacggcttggaaaaccttaaaaagctgcgggcacgcagcacatataacttgaaaaaactgcctaccctggaaaaattggtggccctgatggaagcctctctgacgtacccaagccattgctgtgcctttgcaaattggcggagacagatatcggaacttcatcccatttgcaataagagtatcttacgacaggaggtggactacatgacccaggccagaggccaacgatcctccttggcagaagacaatgaatcaagctactccaggggattcgacatgacttacaccgaatttgattatgatctgtgtaacgaagtagttgatgtgacctgttcccctaaacctgacgcattcaacccctgcgaagacatcatgggttacaacatactgagagtgcttatctggtttattagtatcttagctattaccggaaacataattgttctggttatcttaaccacgtctcagtataagctcaccgtgcccaggtttctgatgtgcaacttggctttcgcggacttatgtatcgggatctatctgctcttgattgcctcagtcgacattcatactaagagccagtatcacaactacgctattgattggcagacaggggctggttgtgatgccgcaggattctttacagtctttgcctctgagctctccgtatacactctgactgccatcaccctggagaggtggcatacaatcacacatgccatgcaactggattgcaaggttcagttgagacatgctgcatcagtgatggtgatggggtggattttcgcgtttgctgctgccctgtttccaatattcggtatttctagctacatgaaagtgagcatctgcttaccaatggacattgatagccctctgagtcaactgtatgtgatgtctttgttggtcctgaatgtcttggcattcgtcgtcatttgcggctgctacattcacatctacctgactgtaaggaatcccaacattgtgagcagctcgagcgacactcggattgccaagcggatggccatgctaatttttacggatttcttgtgtatggcacccatttcgttcttcgctatttctgcctctctcaaagtgcctttaattaccgtgagtaaggctaagatcctgctggtgctgttccacccaatcaactcatgcgcaaaccccttcctatatgcaattttcacgaagaatttcagacgtgactttttcattctgctttctaagtgcggatgttatgaaatgcaggcccagatctacagaactgaaaccagctccacagtgcacaacactcatcctagaaacggacactgttcttcagcccctcgggtcacctcagggtcgacctacattctcgtacctctcagtcatctggcacagaattag

SEQ ID NO: 223489 - DNA, 1902 bp, synthetic construct
  misc_feature 1..1902: note = Description of Artificial Sequence: Synthetic coding sequence
  source 1..1902: mol_type = other DNA
atggcgttgttactcgtatcattgttagctttcctctccctcggaagtgggtgccatcacaggatttgtcactgctctaatcgtgtattcctgtgtcaggagtcaaaggtgaccgagatcccaagcgacctcccgaggaatgctatcgagctgcggtttgtgctcaccaagctccgagttattcaaaaaggtgctttcagcggattcggcgaccttgaaaaaattgagatcagccagaatgacgtccttgaggttatagaagctgacgtgttttcaaatctgccaaagctgcatgagattcggattgaaaaagccaataaccttctgtacattaatcccgaggcgttccaaaatctgccgaatttgcagtatctccttatctccaacacaggtatcaagcacctccccgacgttcacaagatacatagcctccaaaaagtgctgttagatattcaggacaacattaacatccatacgatcgaaagaaacagctttgtgggcttatccttcgagagcgtgattctatggctgaataagaacgggatccaggaaattcataattgtgccttcaatggcactcagttagatgaattaaacctgtctgacaataataatcttgaagagttgcccaatgatgtcttccatggggcatccggcccagtcattctctctgagctgcatccaatttgtaacaagtctatcctgcgccaggaagttgattatatgactcaggcaagagggcaacgatccagtttagcagaagataacgagagctcatatagcagagggtttgacatgacctatacagagttcgattatgatctctgcaatgaggttgtcgatgtgacatgtagccccaagcctgatgccttcaacccctgtgaggatatcatggggtataatatcctgagagtactcatatggttcatttctattctagccattaccggaaatattatcgttcttgtgatacttactacttcccaatacaaactcacagtccctaggttcctcatgtgtaatctcgcctttgcggacctgtgtatcggcatatacctgctgctgatcgcctcagtcgatatccataccaagagccaatatcataactatgccatcgattggcaaacaggtgccggatgtgacgctgcagggttcttcaccgtgttcgcatctgagttgtcagtgtatacactgaccgccataactctggaacgctggcatactattactcacgccatgcagcttgactgtaaggttcaactccgccatgctgcctccgtaatggttatgggctggatattcgcattcgctgctgcactcttccccatctttggtatctcctcctacatgaaggtgtcaatctgcctgcctatggacatcgactccccattaagccagctatatgtgatgtctttgctcgtgttgaacgtgctggccttcgtcgttatctgtgggtgttacatacacatctaccttaccgtgcgaaatcccaatatcgtttcaagtagctcagatactcggattgccaaaaggatggccatgttgatttttaccgactttttgtgtatggctccaatcagtttctttgcaatctctgcttcgctgaaagtacccctaataaccgtcagtaaagccaaaatcctgttggtactgtttcatcccatcaacagttgtgctaacccgtttctctacgcgatttttactaaaaacttccggagggatttcttcatcttgctctctaaatgcggttgctatgagatgcaggcccaaatttaccggactgagacctcttcgactgtgcataacactcaccccagaaacggacattgctcatccgctccgagggtcacatctggctccacctatatcctggtgccgctctcacacttggctcaaaactag

SEQ ID NO: 223490 - DNA, 2088 bp, synthetic construct
  misc_feature 1..2088: note = Description of Artificial Sequence: Synthetic coding sequence
  source 1..2088: mol_type = other DNA
atggctcttctgctggtcagtcttctggcattcctttctctcggatcaggttgtcaccaccgcatctgccactgttccaaccgcgttttcctttgtcaggaaagtaaagtcactgaaattccctccgatctacccagaaatgcaatagagctgcgcttcgtgctgacgaaattgcgggtcattcagaagggggctttctccggctttggggatctggaaaaaattgaaatctcccagaacgatgtcctcgaagtgattgaagccgacgttttcagcaatttgccaaagctccacgaaataaggattgaaaaagctaacaatttgctgtacatcaacccagaggcattccaaaacctcccaaatctgcagtaccttttaataagtaacaccggcattaaacacctacctgacgtgcataagatccactctctacagaaggtgctgcttgatattcaagacaatataaatatccacacaattgagcgcaattctttcgtaggtctctctttcgaaagcgttattctgtggctgaataaaaatggaattcaagagatccataactgcgcatttaatggtacacagttggatgaactgaacttgtcagacaataataatctggaggaacttccgaacgatgtcttccatggagcttctgggccagttatcctcgacatctcccggacccgcattcattcccttccttcttacggcttagagaacctgaagaagctcagagcacgatcaacctataaccttaagaaactaccaaccctggagaagctagtggctcttatggaagcttctctcacatatccatcacattgttgcgcttttgccaactggaggcgccagatctccgagttacaccctatttgtaacaaaagcattctgaggcaagaggtggattacatgactcaagcgcgtgggcagaggtcttccttagccgaagacaatgaatcatcctactcccgcggttttgatatgacatacacagagtttgactacgatttatgtaatgaggtggtggatgtgacttgcagtcccaagcctgacgcgttcaatccctgtgaagacatcatgggatacaacatcttacgcgttctgatttggtttattagcatccttgcaataaccggcaacattatagtcctcgtgatcttgaccactagccaatacaagctgaccgtacctcgcttcctgatgtgcaaccttgcatttgccgacctgtgtattggaatttacctgctgttgatcgcgagtgtagatatccatacaaaatcacagtaccacaactacgcgattgattggcagacaggcgctggctgcgatgccgctggattcttcaccgtgtttgcttccgagctcagtgtctacaccctgactgctattacgctggaacggtggcacaccatcactcacgcaatgcagttagactgtaaagtgcaactgcggcacgcggcttccgtgatggtgatgggctggatctttgctttcgctgcggctctcttcccaatctttgggatctctagctatatgaaagtctccatttgtctgcctatggacatagacagcccgctgtcgcagttatatgtgatgagcctgctagtgctgaacgtactcgcattcgtggtgatatgtgggtgttatatccacatctacctgaccgtccgaaatcccaacattgtctcctcaagttccgatacacggattgcaaaaagaatggccatgctgattttcactgactttctatgtatggcgcctatatccttcttcgccattagtgctagcctgaaggtcccgctcatcaccgtgagcaaagctaaaatcttgttagtgttatttcatcctatcaactcttgcgcaaaccctttcttgtatgctatattcaccaaaaactttcgtcgagatttcttcatcctgctttctaagtgtggctgttatgagatgcaagctcaaatctaccgcaccgaaacaagctcgaccgtccataatacacatccgaggaatggccactgttcctctgcccctcgggtgacaagcgggagtacttacatacttgtgcctctctcccatctcgctcaaaactag

SEQ ID NO: 223491 - DNA, 1296 bp, synthetic construct
  misc_feature 1..1296: note = Description of Artificial Sequence: Synthetic coding sequence
  source 1..1296: mol_type = other DNA
atggaagcttcactcacatacccgagtcactgctgtgcatttgccaactggcggcgtcagatttccgagctgcaccctatttgtaataagagcatcctccgacaggaggttgactacatgacgcaagctaggggccagaggtcttccttggcagaagataatgagtcatcatacagtcgcggattcgatatgacttacactgaattcgactacgatctctgtaatgaagtggttgacgttacgtgcagtcctaagccagatgccttcaacccttgcgaggacatcatgggctataacatccttagggtgcttatctggtttatctccattctggccatcacaggcaacatcattgtgctggtgatcttgaccactagtcaatataagctgactgttcccagattccttatgtgtaatcttgcgttcgcggacctgtgcatcggtatttacctattgttgattgcctctgtggatatccacacaaaatcccagtatcacaattacgcgattgattggcagacaggggcaggctgtgacgcagcgggattcttcactgtgtttgcttctgaattgtctgtgtacacccttactgcgattaccctcgagcgctggcacactatcactcacgctatgcagctggactgcaaagtgcagctccgtcatgcggcttcggtcatggtcatggggtggattttcgctttcgctgcagccctgtttcccatcttcgggatctcatcctacatgaaagtctcaatttgtctgcccatggacattgacagtcccctgtcccagttgtacgtcatgtccctgctcgtgttgaacgtgctggcgttcgtggtcatctgcggctgttacatccatatttacctaaccgttagaaatcccaacattgtgtcctcctcatccgacacgcggatcgccaagcgcatggctatgctgattttcaccgatttcttatgcatggcacctatttctttttttgcaatctcagcaagtcttaaagtccccctgattaccgtaagcaaggctaagatcttgcttgtgcttttccatccaataaactcctgtgcaaacccctttctgtacgcaatattcacgaagaatttccggagagatttctttatcctcctgtcaaagtgcggatgttacgagatgcaggcacagatttatcgtacagagacgagtagtaccgtgcacaatactcaccccaggaatggccattgctcttccgcgcctcgagtgacatcaggctctacttatatcctggtgcctctgtcacatctcgcacaaaactag

SEQ ID NO: 223492 - DNA, 3417 bp, synthetic construct
  misc_feature 1..3417: note = Description of Artificial Sequence: Synthetic coding sequence
  source 1..3417: mol_type = other DNA
atggccccaaccctgttccaaaagctgttctccaagaggaccgggctcggcgctccaggcagggatgccagagatcctgactgcggattctcttggccccttcccgagttcgacccgtctcagatccgcctgatcgtttaccaagactgcgaaagacgtgggagaaacgtgctgtttgactcatctgttaaacgccgtaacgaggacatcagcgtgtccaaactaggatcggacgctcaggtgaaggtcttcgggaagtgttgccagctaaaacccggaggcgatagctccagctctctggactcttcggtcacaagctctagcgacatcaaggaccagtgtctgaaataccaggggagcagatgttccagcgacgccaacatgctgggtgaaatgatgttcggatccgtcgcaatgtcctataaggggagcactctcaagatccaccagatcagatctcccccacagttgatgctctccaaagtctttactgcacggaccggctccagcatatgcggtagtttgaatacattgcaggattcactggagttcattaaccaggacaacaatacactgaaagcggataataatacagtcatcaacgggctccttgggaacattgttcactctaacccgatggatatgccgggtcgggagctaaacgaagatagagatagtggtatagctaggagtgccagcttatcaagtctgttgattacacctttccccagtccgaatagctctctgacgagatcctgtgcctcctcttaccagaggcgctggcggaggagccaaactacttccttggagaatggcgttttccccagatggtctatagaggagagctttaatctatctgacgagtcttgcggtccaaaccctggcattgtcagaaagaaaaagattgccattggcgtcattttttctctttccaaggatgaggatgaaaataacaaattcaacgaatttttttttagtcacttccccctattcgaatcgcatatgaataaattaaaatccgctattgagcaggccatgaaaatgtcccgccgttctgccgatgcaagccagagatccctagcctataatcgaatcgtcgacgccctcaatgaatttcgaaccacaatttgcaatctgtatactatgccccgtattggagaacccgtgtggctgacaatgatgtccggcaccccagagaaaaatcatctctgctatcgatttatgaaggaattcacctttctgatggagaatgcctcaaagaaccagtttctaccggctctcatcactgccgtcctaacaaaccatctagcttgggtgccaacggttatgcccaacgggcagccaccaataaaaatattcttggagaaacacagttcccagtctgtagatatgctggccaaaacacacccttacaatcccttgtgggcacagctgggagacctatacggagcgatagggagtccagtgcgcctggccaggaccgtcgtcgttggaaagcggcaggacatggtccagcgattgttgtatttcttaacatatttcatcagatgctccgaactacaggagactcacctgcttgagaatggcgaagatgaggccatagtcatgccgggaactgtgatcaccactacactggagaagggtgaaatagaggagtctgagtacgtactggtgaccatgcacagaaacaaatcttctctgctgttcaaggagagtgaggagattaggacgcccaactgcaattgcaaatactgcagtcacccacttctgggccagaatgtcgagaacatatcgcagcaggagcgcgaggacatccaaaacagcagtaaggagctgctcggaatctccgatgagtgccagatgatctctccctccgactgccaagaggagaatgccgtggatgtaaaacagtatcgggacaaactgcggacgtgcttcgacgccaagctggagaccgtcgtttgcactggctctgtgcccgtagataaatgcgctctctccgagtccggtctggagtcgacagaggaaacatggcagtcggagaagctgctggattccgattcccacacaggtaaggctatgaggagtactggaatggtggttgagaagaagccgccagataagatcgtgcctgcctccttcagttgcgaagccgctcaaacgaaagtcacctttctcatcggcgattctatgagtcctgacagtgataccgagctgcggtcacaagccgtggtggaccagatcacgcgacatcatactaaacccctcaaggaagaaagaggggctattgaccagcatcaggaaactaaacagaccaccaaggatcagagcggtgagtccgatactcagaacatggtcagtgaagaaccttgtgagctgccatgttggaatcactctgacccagaatccatgtctctgttcgatgagtatttcaacgacgattccatcgagacaagaaccatcgacgatgttccctttaaaacttctactgactctaaagatcattgttgtatgcttgaattttctaaaattctgtgcactaagaataataaacagaacaatgagttctgcaaatgtatcgagaccgtccctcaagactcatgcaaaacttgtttccctcagcaggaccagcgcgatactttaagcatactggtccctcatggcgacaaagagagcagcgataagaagatagctgtgggcactgagtgggatattcctaggaacgagtcatcagactcagccctaggagatagcgagagcgaggacaccggccatgacatgacacgacaggtgtcctcttattacggaggtgagcaagaagactgggccgaagaagatgaaattcctttccctgggagtaaattaatagaggtctccgcagtgcaacctaacatcgccaatttcgggcgttccttgctcggcggatactgcagcagctacgtcccagatttcgttctgcaaggtattggttccgatgagcgcttcagacagtgtttaatgagcgatctcagccacgcagtccagcatccagttcttgacgagcctattgctgaagctgtatgtatcatcgcagacatggacaagtggaccgttcaggttgcctcctctcagcgtcgagtaactgataacaagcttggtaaagaagtcctcgtgagttcattggtctcaaacctgctccactcaactcttcagctctacaagcataacctcagcccaaatttttgtgtgatgcaccttgaagatagactccaagagctttacttcaagtctaaaatgctatcagaatacttacgaggccagatgcgggtacacgttaaagaattaggcgtcgtactgggcatcgagtcttccgatctgcccctcctggccgctgtcgcaagcacacattccccatatgtggcccagattctgctttag

SEQ ID NO: 223493 - DNA, 3501 bp, synthetic construct
  misc_feature 1..3501: note = Description of Artificial Sequence: Synthetic coding sequence
  source 1..3501: mol_type = other DNA
atggcacctaccctgtttcaaaagctgttttccaagcgcaccgggttgggggcacctggtcgggacgcgagggacccggactgtggatttagctggccgctgccagagttcgacccctcccaaatcaggttgattgtttatcaggattgtgagaggcggggtcgaaacgtcctttttgattcatcagtgaagcggagaaatgaagatattagcgtttctaagcttggctctgacgcacaggtgaaggtattcggaaagtgttgtcagttaaaaccgggaggcgattcaagctctagtcttgactctagcgtaacttccagtagcgatataaaggatcaatgcctaaagtaccagggcagccgatgctcaagcgatgctaacatgctgggcgaaatgatgttcggaagcgtggccatgagctataaaggctctactctaaagattcatcagatccgcagtccaccccaactcatgttgagtaaggttttcaccgcccgaaccgggtctagtatctgtgggagtctcaacaccttgcaggatagcctggagttcattaatcaagataacaacactctgaaggcagataataacaccgtgattaatggactgctgggaaacattggtctttctcaattttgctctccaagacgcgcattttccgagcaaggaccattgagactgataagatctgcttctttttttgcagtacattccaacccaatggatatgcccggacgggaactcaacgaggaccgtgatagcggtattgctaggtccgcctctttaagcagtctgctgatcacgcccttcccctcccctaattcttctttgacccgcagctgtgcctcaagttaccaacgcaggtggaggcgcagccaaactacttctctggagaacggtgtgtttccacgctggtccattgaggagagcttcaacctgagcgatgagtcatgtggcccaaacccaggaattgtgcgaaagaaaaaaatcgcaattggggtgatcttctctctgagcaaagacgaagacgagaacaacaaattcaacgagttctttttctctcactttcctttatttgagtcccacatgaacaaacttaagtcagccattgaacaggcaatgaaaatgtcaaggaggtcagcagatgcttcccagagaagccttgcatacaaccggatcgttgatgcactaaatgaattccgcaccactatctgcaacctgtataccatgccgaggattggggaacccgtatggctgactatgatgtcaggaacccccgagaaaaatcacctgtgttaccgattcatgaaggaatttacatttctcatggagaacgcatccaagaaccagtttcttcccgcattgatcactgccgttctcactaaccacctcgcctgggtcccgaccgtgatgcctaacggacagcctccaatcaagatcttcctggaaaaacactcaagtcaatcagttgatatgttggcaaagacgcatccttacaatcccctgtgggcccaactcggagatttatatggcgctatcggcagccctgtccgccttgccagaacggtggttgtggggaagcgccaggacatggttcagaggctgctgtactttctgacctatttcatacgctgcagcgagcttcaagagacccaccttctagagaacggagaggacgaagcaattgtcatgcccggtaccgtgattaccacgacactcgagaagggtgagatagaagagagtgaatacgtgctggtgactatgcaccgaaataagagttccctgctcttcaaagagagtgaggaaatacgcacacctaactgcaattgcaaatactgttcccatcctctactcgggcagaatgtggaaaacattagtcagcaagagagagaggatatccagaacagctctaaagagctcttggggatcagcgacgagtgccaaatgatctcgccaagtgattgtcaggaggaaaacgctgtggacgttaagcagtacagagacaaactgcgcacttgtttcgatgccaaactggagactgtagtgtgtacagggtctgtgcctgtggataaatgcgccctgagcgagtctggattggaatcaaccgaggagacgtggcagtcggaaaaactgctagactctgattcacacacaggaaaagccatgagatctactggaatggtcgtcgaaaagaagccacctgataagattgtgccagcgtcattctcatgtgaggctgcacaaaccaaggttaccttcctcattggcgatagcatgagcccagacagtgacacggagttacgaagtcaagcagtggtggaccaaatcactaggcaccacacgaaaccattgaaggaagagaggggtgcgatcgaccagcaccaggagaccaagcagaccaccaaagaccagtcaggtgagtccgacactcaaaacatggttagcgaggagccttgcgaactcccatgttggaaccactcggatccggagtccatgtcactatttgatgaatacttcaatgacgattccatcgagaccagaaccatcgacgacgtgcccttcaaaacctccaccgatagtaaggatcactgctgtatgctggagttcagcaaaatcctgtgtacaaaaaacaacaaacaaaataatgagttttgcaagtgtatcgaaacagtaccacaagatagctgtaaaacttgctttccccagcaagaccagcgcgataccctgtctatcctggtccctcatggcgacaaagaatcaagcgataaaaaaattgccgttggtaccgaatgggacatccctcggaacgaatcatccgactctgcactaggcgattccgagagtgaggacacaggccatgacatgacccgccaggtgagctcttactacggcggagaacaggaagactgggccgaggaggatgagattccgtttcccggatccaagttgatcgaggtaagtgctgttcagccaaatattgcgaatttcggcaggtctctgctgggcggatattgctcgagctacgtgcccgactttgttcttcaagggatcggtagtgacgaaagattccgtcaatgtctgatgtccgatttatctcacgctgtgcagcaccccgtcttggacgagccgattgcagaggctgtgtgtatcatagcggacatggacaagtggactgtgcaggtggccagctctcagagacgcgtgacggataacaagctcggcaaggaggtattggtgtcaagcctggtcagcaacttgcttcatagcacactccagctttataagcacaacctgtcacccaacttctgcgtcatgcatctcgaagacaggcttcaagagttgtacttcaaatctaagatgctctccgagtacttgaggggtcagatgagagtacacgtgaaagagctaggcgtggtgcttggcatagaaagctccgacctgccattactagcggctgtcgcctccacccattctccttatgtggctcaaatattactgtag

SEQ ID NO: 223494 - DNA, 1527 bp, synthetic construct
  misc_feature 1..1527: note = Description of Artificial Sequence: Synthetic coding sequence
  source 1..1527: mol_type = other DNA
atggcgcctaccctgtttcagaaactgtttagtaagcggaccggcctaggtgctccaggcagggatgcacgtgacccggattgtgggtttagttggcccctgcctgagttcgacccatctcaaattcggctgatcgtgtatcaagattgcgaaagacggggtaggaatgtcttgtttgatagctctgtgaaacgtcggaacgaggatatcagcgtgtccaaactgggaagcgatgcccaggtgaaggtcttcggaaaatgttgccagctcaaaccagggggtgattcaagcagcagccttgattcatcggtgacctcttcgagtgacataaaggatcagtgcctcaagtaccaggggtcgcgctgttcttctgatgccaacatgctgggggagatgatgttcggttcagtggccatgtcctataagggcagcactcttaagattcaccagatccgctctcctccacagctcatgctcagtaaagttttcaccgcaagaaccggctcaagcatttgcggaagcctgaataccttgcaggacagccttgaattcatcaaccaggataacaataccctaaaagctgacaataacacggtaattaatggcctgcttggtaacatcggtctgtctcagttctgtagcccccgacgggctttttcagaacagggtcccctccggctgatcagatcagcatcattcttcgctgtgcatagcaatcccatggacatgcccggtcgcgaactaaacgaggaccgagattccggtatcgctagaagcgctagtctgtcaagcctgctgataaccccttttccatccccaaacagcagccttactagatcttgtgcctcgagctaccaacgacggtggcgtcgatcacaaactacaagtctggagaatggggtattccctcggtggagtattgaggagtcttttaacttatccgatgagagctgcggaccaaatccgggaatcgtgcgtaagaaaaagatagccattggggtgattttcagcctgtccaaggacgaggatgaaaataataaatttaacgaatttttttttagccactttcccttgttcgagagtcatatgaacaaactaaaaagtgctatcgagcaggctatgaaaatgagcaggagatctgccgacgcttcccagcgatcactggcctataatcggatcgttgacgctctaaacgagttcagaacaaccatatgtaacctatatacgatgccgcgaatcggcgagcctgtctggctgactatgatgagcggcaccccagagaagaaccatttgtgttacagattcatgaaagagtttacatttctcatggagaatgcaagtaaaaaccagtttttgcctgccctcatcaccgccgtgctcacaaaccatctcgcctgggtgcccacagtgatgccaaatggacaaccacctataaaaatttttctcgaaaagcattcatcccaatccgtggacatgctggccaaaacccacccgtacaatccactttgggctcaactcggaatgtag

SEQ ID NO: 223495 - DNA, 2757 bp, synthetic construct
  misc_feature 1..2757: note = Description of Artificial Sequence: Synthetic coding sequence
  source 1..2757: mol_type = other DNA
atggacatgcccggtcgagagctgaatgaagaccgcgattcgggaatcgctcgctcagcatcactcagctccctgctaatcacacccttcccgagcccaaactcatctctcacccgcagttgcgcttcgtcatatcaacgcaggtggcggcgtagccagacaacaagtctggaaaacggagtatttcctagatggtcgattgaggagtcttttaacctcagcgacgaaagctgcggaccaaacccgggaattgtaaggaaaaagaagatcgcaatcggcgtgatatttagcttatcaaaagatgaagacgaaaacaataagttcaacgagttttttttttctcacttccccttgtttgaatcccacatgaataagctcaagtcagccatagaacaggcgatgaaaatgtccagacggtcagctgatgcttcacagagatcccttgcctataaccggatagtggacgccttgaacgagttccgcactacgatctgtaacctgtacaccatgccccgaatcggcgaaccagtctggttgaccatgatgtctggcactcctgagaagaaccatttatgttataggtttatgaaagaatttacctttctcatggagaacgcttctaaaaatcaatttctgccagcactgattaccgccgtgctgactaaccacctcgcatgggtgcccactgttatgcctaatggccagcctccaattaaaatctttctggagaaacacagttctcagtccgtggatatgcttgccaaaactcacccttataaccccttgtgggcccagcttggggatctttatggggcaattggctcccccgtgcgcctggcgaggaccgtggtcgtgggcaagaggcaggacatggtgcaaagactgttatacttccttacatactttatccggtgttcagagctccaggaaacccacctgctcgagaacggggaggacgaggccattgtgatgccgggtaccgtgatcacgactacactcgagaaaggggagatcgaggaatctgagtatgtgctcgtactcttattcaaggagtctgaagaaatccgcaccccgaactgcaattgtaagtactgcagtcaccctctgttaggacaaaacgtcgaaaatatttcccagcaggagagagaggacatccaaaattcaagcaaggagttactcgggatttcggacgagtgtcagatgatctccccctcggactgtcaggaagagaacgcagtcgatgtcaaacaatacagagacaagcttcggacctgctttgacgctaagcttgaaacagttgtttgcacagggtctgttcctgtggataaatgtgctttgagcgagtctggcctagagtctacagaggagacctggcagtcagaaaagctcctcgacagtgacagccacacagggaaagccatgagatccaccgggatggtggtggagaagaaaccccctgataaaattgtgccagcttccttctcctgcgaagccgctcaaacaaaagtgacattcctcatcggagattcgatgtctccagatagcgataccgaacttagatctcaggcagttgtggatcaaatcactaggcatcataccaaaccactcaaagaggaaagaggagccattgaccaacatcaggagacaaaacagaccacaaaggaccagtcgggggaatctgatacacagaacatggtgtcagaggaaccctgcgaactgccttgttggaatcatagtgaccccgagagcatgtccctgtttgacgaatactttaatgacgactcaatcgagacacgtacaatcgatgacgtgcccttcaagacttccactgactctaaggatcattgctgcatgctagagttctctaagatcctatgcactaagaataataaacaaaataatgaattttgtaaatgcatcgaaaccgtgcctcaagactcatgcaagacctgcttcccgcaacaggaccagagggataccttgtccatattggttccacacggagataaagagtcctcagacaaaaagatcgctgtgggcactgagtgggacatcccaaggaacgagagcagcgacagcgcactgggcgatagcgaatccgaggacactggacacgacatgacgcgtcaggtttcttcttactacggaggcgagcaggaagactgggctgaggaggatgagataccgtttcctggaagcaaattaatcgaggtttctgccgttcagcctaacattgctaacttcggacggtctttgctgggaggatactgctcttcctacgtgccagatttcgtgctccagggcattgggtccgatgaacgctttagacaatgcctgatgtcggacctgtcgcacgctgtgcaacaccctgttcttgatgagcctattgctgaagccgtctgtattatagcggacatggacaaatggactgttcaggtggcgagctcccagcgccgagtgaccgataataagttgggcaaagaggttctagtatcttcactagtcagcaatttacttcacagcactctacagttgtataagcataacctgtcgcctaacttttgtgtgatgcaccttgaagataggctgcaagagctttacttcaaaagcaagatgttatccgaatacctgcgcggtcagatgcgtgtccacgtcaaggagcttggcgtcgtgctggggattgaatctagcgatttgccactcctggcagctgtcgcttctacgcattctccttacgtcgcacaaatcttgctgtag

SEQ ID NO: 223496 - DNA, 3345 bp, synthetic construct
  misc_feature 1..3345: note = Description of Artificial Sequence: Synthetic coding sequence
  source 1..3345: mol_type = other DNA
atggcgccaaccttgctgcaaaagctgttcaacaagagaggaagctcagggagttccgccgctgctagcgcccagggcagagcgccaaaggagggtcccgcttttagctggtcttgtagcgaatttgatttgaacgagattaggctgatcgtctaccaggattgtgaccgcagaggtaggcaggtgctgttcgactctaaggctgtacagaagatcgaggaggtcactgctcaaaaaacagaggacgtgcctataaagatctctgcaaaatgttgtcagggctcttcttctgtatctagttccagcagctcctccatctcctcccattcatccagcggaggctcaagtcatcacgccaaagagcagctccctaaatatcagtatacccgacccgcttcagatgtgaatatgctgggcgagatgatgttcggtagtgtcgctatgtcgtacaagggtagtactctgaaaattcattacatcaggtccccccctcagctgatgatctccaaagtgttcagcgccaggatggggtcattctgtggttctaccaacaacctgcaggattcgtttgaatatatcaaccaggaccccaatctggggaagctaaacactaatcaaaattccctcggcccatgtcgcacaggatctaaccttgctcacagcacacctgttgatatgccctctaggggacagaacgaggatcgcgactcgggaatcgcacgcagcgcctctctgtccagtctcttgataacacccttcccctcccccagcagttcgaccagcagctcgagctcatatcagaggagatggctgcgatcccaaacaacaagccttgagaatggcatcattccccgacgtagcactgatgagacattctccttggcggaggagacgtgctcttcaaacccagctatggtgagacgcaaaaagattgccattagtatcattttctctctgtgcgaaaaagaggaggcacaaaggaattttcaggatttttttttctctcacttccccctgtttgagagccatatgaatcggctgaagtcagccatcgaaaaggctatgatatcatgcagaaaaattgccgaatccagtctgcgggtccagttctatgtgagcagactgatggaggcattgggggagttcagagggaccatttggaatctctacagtgtccctcgaatcgccgagccggtctggttaaccatgatgtccgggacattagagaaaaaccaactttgtcagcgttttctgaaagaatttactctcctgattgaacagataaacaaaaaccagtttttcgcggctctactgacggcagtgctgacataccatctggcatgggtgcccaccgtcatgccagtggaccatccccctattaaagctttctcagagaagcgaacctcacagagcgtgaacatgctcgctaaaacgcacccctataacccgctatgggcgcaactcggagacctctatggtgccatcgggtcccccgtgagactcacacgcactgtagttgttggaaagcaaaaggacctcgtccaacgaattctctatgtcctcacatattttctacgctgtagcgagctgcaagaaaaccagctcacatggagcggtaatcacggggagggggatcaggtgctcaatgggtcgaagattataactgcccttgaaaagggagaggtcgaagaatccgagtacgtggtgatcacggttcggaatgaacccgcacttgtgcctccgattctgccaccaaccgctgctgaacggcacaacccttggcctacaggattcccagagtgcccggaaggaacggattcccgcgatctgggcctgaagcccgataaggaggccaataggagacctgagcagggatcagaggcctgcagtgcaggctgtctcggccctgcgtccgatgcttcttggaaaccgcaaaacgccttttgcggggatgagaaaaataaagaggcccctcaggatggtagctctagactgccatcctgcgaagtcctgggcgcaggcatgaaaatggaccagcaggccgtgtgtgagctgctaaaggttgagatgcccactcgactgcccgatagatccgtggcatggccgtgcccagataggcacctacgcgagaaacctagtctcgaaaaagtcaccttccagatcggaagctttgcgagcccggaatctgactttgagagccggatgaaaaaaatggaagagcgggtgaaggcatgcggcccatctcttgaagcctccgaagcggcagacgtcgctcaggatccacaagtttctcggagccccttcaagcctggtttccaggaaaacgtctgctgtccccaaaataggttaagtgaaggtgacgagggcgaatctgacaagggttttgctgaagatcgtgggagccgcaacgacatggccgcagacatcgccggtcagctttctcacgcagccgacctgggtacagcctcccacggggctggaggcaccggtggacgtcgtctcgaggctacccggggtctctatgtcaaggccgctgagggcccagtgctcgaaccagtcgcaccacggtgcgtgcagcgaggacccggacttgtggctggtgctaacatcccttgtggcgacgataacaaaaaggcaaatttccgaacagaaggcgatatccctcgcaatgagtcaagcgactccgccctgggagattccgacgacgaggcttgcgcaagcgcaatgcttgacctggggcacggcggtgatcgcacaggagggtctctagaagtcgagttgccgctgccccgaagccagagtatttcaacacaaaacgtgcgaaatttcgggcgtagtctgttggcgggttattgtcccacctatatgccggacctcgtacttcacggcacagggagcgatgaaaaactgaaacagtgtctcgtcgccgatctggtgcacaccgtgcaccaccccgttctggacgagcccatcgcagaggctgtctgcattatcgcggacaccgacaagtggtctgttcaggttgcgacttcacagcgaaaggtaaccgacaatatgaaactgggccaggacgtgctcgtctcttcccaggtcagcagccttctccagtccattctgcagctctataagctccaccttccagcagacttctgtattatgcatcttgaagaccgtttacaggagatgtatctgaaatctaagatgctctccgagtatctgcggggacatacacgagtccatgtgaaggagttaggagtcgtgctgggtatcgagagtaacgatctgccgctgttgaccgccatcgccagtacccattcgccctacgtcgcccaaatcctcttatag

SEQ ID NO: 223497 - DNA, 3414 bp, synthetic construct
  misc_feature 1..3414: note = Description of Artificial Sequence: Synthetic coding sequence
  source 1..3414: mol_type = other DNA
atgtgtggcggaaccgccaatacgaccaaccagcccgagagctggcaagattccgctcggtgcgtttcagatgcagtcccaggagctgggcgaatctatcgagccctgctgtgtaccaagatcaaaaagcataccggggttgaccggtctaccgatcacactgagttagataattcatggtcctgtagtgaatttgatctaaacgaaatcaggctaatcgtctaccaggattgcgataggcgtggtcgccaggttctgttcgattctaaggcagtacaaaagattgaagaagtaacagcccagaagacggaggacgtgccaatcaagatttcagctaaatgctgccaaggcagcagttccgtgagctcctcgagcagttcaagcatttcctcccactcttccagcgggggaagtagccaccacgcaaaggagcagctgccaaaataccagtacacccgcccagcatctgacgtgaacatgcttggcgaaatgatgtttggctctgtcgctatgtcttacaaggggtctacgctgaaaattcattatatccgaagtcccccacagctgatgatctcaaaggttttttcagctaggatgggaagcttctgtggctccaccaacaatctccaggactcctttgaatacataaatcaggaccccaacttgggcaagctaaacacgaaccagaattccctgggaccttgtcggactggtagtaacctcgcccactccaccccggtggatatgccatctagaggccagaacgaggaccgcgattctggtattgccagatctgcgagcctctcgtcgttactcatcacaccttttccctcgccctcttcttcaacttcaagctctagctcttatcaacggaggtggttgaggtcacagacaacttcactcgaaaatggcatcattcccaggcgatccacagatgagacgttctccctggccgaggagacctgttcatctaaccctgccatggtgaggaggaagaagatagccatttccattatcttcagcctgtgcgagaaggaggaggcccagaggaattttcaggatttctttttttcccattttcccctgttcgaatcacacatgaatcgcttgaaatccgccattgagaaagctatgatatcctgtagaaaaatagccgaaagttctctgcgagtgcagttttatgtgagccgccttatggaagcactcggggagttcaggggaacaatttggaatctctattctgtgcccagaatagccgaacctgtgtggttaactatgatgtcagggactttggagaagaaccagttatgtcaacgcttcctcaaagagttcacattactcatagagcagataaacaaaaaccagttctttgcagcacttttgacggcggtgctaacctaccacctcgcttgggtgccaaccgtgatgccagtggaccacccccctatcaaggcatttagcgagaagaggacctctcagtcggtaaatatgctagcaaagacccatccctacaaccctctgtgggctcagctgggtgatctgtacggcgctatagggagccctgtgaggctgacaaggaccgtggtggttggcaagcagaaagacctggtgcaaaggatcttgtatgtcctgacatacttcctcaggtgttccgaactacaggaaaatcaactgacctggagcgggaatcacggggagggggaccaggtgcttaatgggtcaaagatcattactgcgctagagaagggagaggttgaagaatcggagtacgtcgtaataaccgtccgaaatgagcctgccctcgtccctcctatactgccccctaccgcagccgagcgccacaatccatggcctaccgggtttccggaatgccctgagggcaccgatagtagagacctgggcctgaagcccgataaagaggctaatcgcaggcccgagcagggatctgaggcctgcagcgccggttgtttaggtccagcttctgacgcaagttggaagccccagaatgccttttgcggcgacgaaaaaaacaaggaggcccctcaggatggatcttcaaggctcccttcttgcgaggtactgggggcaggaatgaagatggatcagcaggccgtttgtgaacttctcaaggtggagatgcctacacgcttaccagatagatctgtggcttggccctgtccggataggcatctccgggagaagcccagtcttgagaaggtgacttttcaaatagggtcctttgcaagccctgagtctgattttgagagcagaatgaagaagatggaagagagagtgaaggcctgtggcccatcgctcgaagcttcagaggccgctgatgtggcgcaggatccgcaggtcagcagaagtccttttaaaccaggattccaggagaatgtgtgctgcccacagaacaggttgtccgagggggacgagggcgagagcgataaaggttttgcagaagacagaggttctcgtaacgatatggctgccgatatcgccggtcagttaagtcacgctgcagatctggggactgcgtctcatggagccggtggcacgggagggcgacgccttgaagcaacccggggtctgtacgttaaagccgcagaagggccagtactcgaacccgtcgccccacgctgcgtccagcggggacctggtctggtggctggggctaatataccgtgcggtgatgataataagaaagccaattttaggactgaaggggatatacctaggaacgagtctagcgattcagctcttggggattccgatgacgaagcgtgtgcatccgctatgctggacctgggccacggcggagacaggactgggggttctctggaagtcgaattacccctccccaggtcacagtcaatctcaacccagaacgtgagaaacttcggcagaagcctgctagccggatattgcccaacgtacatgcccgacctggttctgcatggcacaggctctgacgagaaactgaaacagtgtctggtggccgacctcgtgcacaccgtgcaccatccagtgctggacgagcccatcgccgaagctgtctgcatcattgccgatacggataaatggagtgtgcaagtggcgaccagccagaggaaagtgactgacaatatgaagctgggacaggacgtgctggtgtcatctcaggttagcagcctcttacagagcattcttcagttgtacaagctccacctccctgccgatttttgtattatgcacctggaagaccggctgcaagaaatgtatctgaaaagcaagatgttatccgagtacctgagggggcacacaagggtccatgtgaaagagctcggtgttgtgctggggattgaatccaacgatctgccgctcctcacggctatcgcgtcgacccattctccttatgtggcacagatcctcctctag

SEQ ID NO: 223498 - DNA, 2022 bp, synthetic construct
  misc_feature 1..2022: note = Description of Artificial Sequence: Synthetic coding sequence
  source 1..2022: mol_type = other DNA
atgtgcggaggcactgccaatacaacaaatcagcccgaatcttggcaagattctgccaggtgtgtgtctgacgcggtgcccggagcgggaagaatataccgggcactgttgtgtaccaaaataaaaaaacacaccggggtggatcgctcaaccgaccataccgaactcgacaacagttggagctgttccgaatttgaccttaatgagataaggttaattgtgtaccaggactgtgaccgaagaggccgacaagtgttgtttgactcaaaggctgtccagaaaatcgaagaagtgactgcccagaaaacggaggatgtgcccattaagatttccgcaaaatgctgccagggctcctcttccgtttcatcaagcagttcaagttctataagttcccattcttccagcgggggatcaagccaccatgctaaggagcagctgcccaagtaccagtacacccgcccagcaagcgacgtgaatatgctaggcgaaatgatgttcggctccgtcgccatgagctacaaggggagcaccttgaagattcattacatccgcagccctccacaactgatgatttccaaagtgttctcggccaggatgggatccttctgcggcagcaccaataatctgcaggatagctttgagtatatcaaccaggacccgaatcttggcaaactcaacaccaaccagaattctctagggccatgcagaactgggtcgaacttagcgcatagcacgccggtggacatgccttctcgaggacagaacgaggatcgcgactctggaattgcccgatccgcatccttgtcctctctcctgattacaccctttccatctccttcttcctccactagtagcagcagctcatatcaacgacgatggctaagatctcagacgactagcctggagaatggtatcattccgcgacgatccaccgacgaaacgttttctctggccgaggagacatgcagttcgaaccctgctatggtgcggaggaaaaaaatcgccatttctatcattttttccctttgtgagaaagaagaggcccagcgaaattttcaggacttcttcttttcgcacttccccctattcgagtcacacatgaatcggttgaaaagcgcaattgagaaggctatgatatcatgtcggaagattgcggaaagctcactccgggtccagttctacgtatctcggttgatggaggcattgggggagttccgtggtaccatctggaacctctacagcgtgcccagaatagcggaaccggtgtggttgacaatgatgtcaggcacacttgaaaaaaaccagttgtgtcagcggttcttgaaagagttcactcttcttatcgaacagatcaacaaaaaccagttctttgccgctctgctgacagcggtacttacataccatcttgcttgggttcccactgtaatgccagtggatcaccctcccataaaggcgtttagcgagaagcggactagccagagcgttaacatgctggctaagactcacccctacaatccactgtgggctcagctgggcgacctgtatggggcaatcgggtcccccgtgcgcctgactcggaccgtggtggtgggcaaacaaaaagacttggtccagagaatcttgtacgtgttaacttactttctgcggtgcagcgaactccaggagaaccaactgacttggtccggaaaccatggtgagggcgatcaggtactcaacggttcaaagattatcacagccctagagaaaggggaagtggaggaatccgaatatgtcgtgatcacggtcagaaacgagcctgccctcgtccctcctattttaccacctactgctgcggaacggcataatccttggccgactggattcccggaatgccccgaaggtaccgattcaagagatctcggcttaaagccggataaagaagctaacaggcggcctgaacagggatctgaggcttgcagcgcaggatgtctgggtcccgctagtgacgcatcatggaaacctcaaaacgcattttgcggttag

SEQ ID NO: 223499 - DNA, 660 bp, synthetic construct
  misc_feature 1..660: note = Description of Artificial Sequence: Synthetic coding sequence
  source 1..660: mol_type = other DNA
atggatccagccccaggcgtgttggatccacgggctgctccgcctgcgctgctgggtactccccaggctgaggtcctggaagacgtcctaagggagcaattcgggcctctcccgcagttggccgctgtttgccgcctgaaacggctgcccagtggcggatacagcagtactgagaaccttcagctagttctcgaacgccgtagagttgccaacgccaaagagcgggagcggataaaaaatctgaaccggggattcgctagactcaaggccctggtccctttcttaccccagagccgcaagccaagtaaggtggatatccttaagggagctacagaatacatccaagtgttgtctgacctcctggaaggcgctaaggattccaagaaacaagaccccgatgaacagtcatattcaaacaactcttcagagtctcatacctcatctgcacggcagttgagcagaaacatcacacagcacatcagctgcgcattcggtctaaagaacgaggaagagggcccttgggctgatggaggtagcggggagccagctcacgcctgtagacattctgtgatgagcactacagaaatcataagcccgaccaggtctcttgaccggttccctgaagtagagctgttgagccacaggctcccccaagtatag

SEQ ID NO: 223500 - DNA, 1035 bp, synthetic construct
  misc_feature 1..1035: note = Description of Artificial Sequence: Synthetic coding sequence
  source 1..1035: mol_type = other DNA
atggtgcgggctagacatcagcctggaggcctttgcctgcttttgctgttgctgtgccagttcatggaagaccgcagtgcacaggcaggtaactgctggctgagacaggccaagaatggcagatgccaggttctgtataagaccgagttgtctaaagaagaatgttgtagcacgggaaggttatcaacgagttggactgaggaggatgtaaacgataacactttgttcaaatggatgatcttcaacgggggtgctccaaactgcataccttgcaaggagacatgcgaaaatgtagattgcgggccaggaaagaaatgccgtatgaacaaaaaaaacaaaccaagatgtgtgtgcgcacccgactgttcaaatattacttggaaggggcctgtgtgtggacttgatgggaagacatacaggaacgagtgcgcactcctcaaggccaggtgtaaagaacaacccgaattagaggtgcagtaccaaggacgctgtaagaaaacgtgtagagatgttttctgcccaggaagctctacatgcgtggtggatcaaacaaataatgcctattgtgttacgtgtaatcgaatctgtccggaacccgcaagcagcgaacagtatttgtgtgggaacgatggcgttacctatagctccgcgtgtcacctgcgaaaggccacctgtctgcttggcagaagcatcggcctggcctacgaagggaagtgtatcaaagctaaaagctgtgaagacatccagtgcaccgggggaaaaaagtgtctctgggacttcaaagtgggacgtggccgatgtagcctgtgcgatgaactctgccctgactctaagtctgacgagcctgtgtgcgccagtgataatgccacctatgcctccgagtgtgctatgaaggaggccgcttgctctagcggtgtactacttgaggtaaagcacagtggttcttgcaactcaatctcagaggacacagaagaggaggaagaggacgaagaccaagattatagcttccccatttcgtcaatccttgagtggtag

SEQ ID NO: 223501 - DNA, 954 bp, synthetic construct
  misc_feature 1..954: note = Description of Artificial Sequence: Synthetic coding sequence
  source 1..954: mol_type = other DNA
atggtcagagccaggcatcagcccggaggtctgtgcctcctgctccttctcttatgtcagttcatggaggacagatccgctcaagcaggcaactgttggttgaggcaggcaaaaaatggcagatgccaggttctttataagaccgaattgtctaaggaagagtgctgctcaactgggagattgagcacgagctggaccgaggaagacgtaaatgataacactttgttcaagtggatgattttcaacggaggcgcacccaactgcattccttgcaaggagacttgcgagaacgtcgactgcggccctggcaagaagtgtagaatgaacaaaaagaacaaacccagatgtgtgtgtgccccagattgttcgaatatcacttggaagggaccagtgtgcggcctcgacggcaaaacataccggaatgaatgcgcacttctgaaggcacgatgcaaagagcagcctgaattagaagttcaatatcagggcaggtgcaagaaaacgtgccgcgatgtgttctgtcctggaagcagtacatgtgtggtcgatcagacaaataatgcatattgcgttacttgtaacaggatctgtcccgaacctgctagtagtgagcaatacctctgtggcaacgatggagtgacgtactccagtgcctgtcacctgagaaaagcaacatgtttgctggggcgatccattgggctggcttatgaagggaagtgcattaaagccaagtcttgcgaagatattcagtgtaccgggggaaaaaaatgtctctgggatttcaaggtaggccgtgggcgttgcagcctgtgcgacgaactttgccctgacagcaagtctgacgagccggtctgcgccagcgacaatgcaacatacgctagcgaatgcgccatgaaggaagcagcatgcagtagtggtgtgctgctcgaggtgaaacacagtgggagctgcaattag

SEQ ID NO: 223502 - DNA, 1023 bp, synthetic construct
  misc_feature 1..1023: note = Description of Artificial Sequence: Synthetic coding sequence
  source 1..1023: mol_type = other DNA
atggtccgagctcggcaccagcctggagggctctgtctgttgttattgttgctgtgtcagttcatggaggatcgctccgcccaggctggtaattgctggctacggcaagctaagaatggcaggtgccaagtcctatacaagactgagcttagcaaagaagagtgttgctccacaggtcgcctgagtacaagctggacagaggaggacgttaatgacaacacactgttcaagtggatgatcttcaatggcggagcaccgaactgcatcccttgcaaagaaacctgtgagaacgtggattgcggacccggtaaaaagtgccgaatgaataagaaaaataagcctcggtgcgtgtgcgcgcctgattgttccaatatcacttggaaggggccagtatgcggactggacggaaagacttatcgcaacgagtgcgctctcctgaaggcccgttgcaaggaacagcccgagctcgaggttcagtaccagggccgatgtaaaaagacatgtcgggatgttttttgccccggatcttccacatgtgtggtggaccagactaacaacgcctactgcgtgacctgtaacagaatctgccccgagcccgcaagcagcgagcagtacttatgtgggaacgacggtgttacgtacagtagcgcctgtcatttaaggaaggctacctgcttgctgggcagaagcattggcctggcttacgaagggaagtgcatcaaggcgaagagctgcgaagatatacagtgcactggcggaaaaaagtgtctttgggacttcaaggtgggtagaggaaggtgttccctgtgcgatgagctgtgtcctgattctaaaagcgatgaacccgtgtgtgcttcggacaacgcgacatacgcctccgagtgcgctatgaaggaggcagcttgtagttccggagtgttactggaggtcaagcacagtggcagctgcaactacactgaggaagaggaggaagatgaagatcaggattatagcttccctatctcatcaatcctcgagtggtag

SEQ ID NO: 223503 - DNA, 927 bp, synthetic construct
  misc_feature 1..927: note = Description of Artificial Sequence: Synthetic coding sequence
  source 1..927: mol_type = other DNA
atgtggaagcgttggttggccctggcactggcccttgtggctgtggcctgggtgagagccgaggaggaactccgctccaaatccaagatctgcgctaacgtcttctgcggagcaggaagagagtgtgccgtgaccgagaagggagagcctacttgtctttgtattgaacagtgcaagccccacaagcggccagtgtgcggctctaatggcaaaacttatttgaatcactgcgagctgcatagagacgcatgcctgactggctcgaaaatacaggtggactatgatggacactgtaaggaaaaaaaaagtgtcagcccgagtgcctctccagtcgtctgctaccaaagcaacagagatgagctcagacgacggattattcaatggctcgaggccgaaatcatccctgatggatggttctccaaaggcagcaactatagtgagattctggacaagtacttcaagaattttgacaatggcgatagccgactcgactcctccgaattcttgaaatttgtggagcagaacgagaccgccattaatataaccacttatcccgaccaagagaataacaaacttctccggggactgtgcgtggacgcgctcattgagctgtctgacgaaaatgccgattggaaattgagcttccaggagtttctgaaatgcctgaatcccagttttaaccctcctgagaagaagtgcgctctagaggatgaaacctacgccgatggtgccgagaccgaggtggactgtaaccgttgcgtctgtgcctgtggcaactgggtttgtaccgcgatgacttgtgacggcaaaaatcagaagggggctcagactcagacagaagaggagatgactagatacgtgcaggaactccaaaagcaccaggaaaccgccgaaaagacaaagcgggtcagtactaaggagatttag

SEQ ID NO: 223504 - DNA, 423 bp, synthetic construct
  misc_feature 1..423: note = Description of Artificial Sequence: Synthetic coding sequence
  source 1..423: mol_type = other DNA
atgtggaagaggtggctggcccttgccctcgcgctggtagcagtcgcctgggtacgggcagaggaagagctaagaagtaaaagtaaaatttgtgccaacgttttctgcggtgcaggtagagaatgcgctgtgacagaaaaaggagagcctacttgcctctgtatcgagcagtgtaaaccccacaaacgaccagtgtgcggcagcaacggaaaaacatacttgaaccattgtgagctacacagagacgcctgtctcactggatcgaagatccaggttgactatgatgggcattgtaaagagaagaagtccgtgagcccctctgcaagccctgtggtgtgttatcagtctaaccgagacgaactgagaaggcgtattattcagtggttagaagcagaaattatcccggacggttggttctcatag

SEQ ID NO: 223505 - DNA, 756 bp, synthetic construct
  misc_feature 1..756: note = Description of Artificial Sequence: Synthetic coding sequence
  source 1..756: mol_type = other DNA
atgtgttttgtggagcccgcagggaatgtgcaaagccagaggaagggaaacccaccagtgagtgctctttccaatgcaaacctcacaggaagtaaaatccaggtagactatgacggccattgtaaggagaaaaaaagcgtgtccccgagcgccagtccagtggtgtgttatcagtccaatcgtgacgagttacgaagacgaatcatccagtggctggaggccgagattatccctgacggctggttttccaaggggtctaattattccgaaatactggacaagtactttaaaaacttcgacaacggagacagccgcctcgacagttctgagttcttgaagttcgtagaacagaacgagacagccatcaacatcactacatatcctgatcaagagaacaacaagcttctgcggggactctgtgtcgatgcacttatagaactgtccgacgaaaacgccgattggaaactaagtttccaggagtttctgaaatgcctgaatcctagcttcaacccccctgaaaaaaaatgcgctcttgaagacgaaacctacgctgacggcgcagagactgaggtggattgtaacaggtgcgtctgtgcctgcggaaattgggtgtgtaccgcaatgacttgtgacggcaagaatcagaagggcgctcaaacccaaacagaagaggagatgacccggtacgtgcaggagctgcagaagcaccaagaaacggctgagaagacgaaacgtgtctctacgaaggagatctag

SEQ ID NO: 223506 - DNA, 792 bp, synthetic construct
  misc_feature 1..792: note = Description of Artificial Sequence: Synthetic coding sequence
  source 1..792: mol_type = other DNA
atgagacctggcgctcctgggccactgtggcctcttccatggggggcactggcctgggccgtcggctttgtgtcttcaatgggctccggcaacccggctcccggaggtgtgtgttggttgcagcaggggcaagaggcgacctgctcacttgtactgcagaccgacgtcactagagctgaatgctgtgcaagcgggaatatcgatacggcctggtcgaatctgacacatcctggaaataaaattaacttactcgggttcctggggctagtccattgcctcccatgtaaggattcttgtgatggagttgaatgcggcccagggaaagcctgcagaatgcttggtggccgaccacgctgtgaatgcgcccctgattgttccggcctgcctgccaggttgcaggtgtgtggatctgatggagccacataccgggacgaatgcgagctgcgggcagcaaggtgtcgcggtcatccagacttgtctgtcatgtacaggggcaggtgtcgaaagtcctgtgagcacgttgtctgccctcgaccccaaagttgtgtggttgaccagactggatctgcccactgtgtggtatgcagagctgcaccatgcccagtccccagctctcccggtcaggaactgtgtggaaacaacaatgtgacttacatttcatcatgccacatgagacaggccacttgcttcctcggtagatcaattggcgtccgccacgccggtagttgtgctgggacacctgaggaaccgcctggcggtgaatccgcggaggaggaagagaactttgtctag

SEQ ID NO: 223507 - DNA, 1614 bp, synthetic construct
  misc_feature 1..1614: note = Description of Artificial Sequence: Synthetic coding sequence
  source 1..1614: mol_type = other DNA
atgctgaacacattgcagacgaacgcgggttacctggagcaggtcaaacggcagcgcggagacccacagacccagttggaagcgatggaactctacctggccaggagtggcctccaggttgaagacctggataggctgaacatcatccacgtgaccggcactaaaggcaagggtagcacctgtgcatttacagagtgcattctgagaagttacgggctgaaaaccggattcttcagtagcccccacctggtccaagtacgcgaacgaattcgaataaacggacagcccattagtcccgagctgttcacgaagtacttctggcgtctgtatcacagacttgaggaaactaaggacggtagctgcgtgagcatgcctccttacttccgctttctcacacttatggccttccacgtgtttcttcaggaaaaggtggatctggcggtggttgaggtcgggattggaggagcctatgattgcactaatatcatcaggaagccagtcgtgtgcggcgtctcttctttaggcatcgaccatacctctctcctaggtgatacagttgaaaagatcgcatggcaaaagggtggaatatttaaacagggcgttcccgctttcaccgttctgcaaccggaggggccactcgctgtgttacgggaccgcgctcaacagatttcttgtccgctgtacctttgccccatgcttgaggcactggaagaaggcggacctccgctgacactgggattagaaggggagcaccagaggtccaacgctgcactcgcactgcaattagcccactgttggctccaaaggcaggacaggcatggagctggcgagcctaaggccagcagaccaggtctgctgtggcagcttccgttggcgccagtttttcagcctacctcccatatgcgcctcggactccggaacacggagtggccgggaagaacacaagttctcagacggggacccctgacatggtacctggatggcgcacacactgctagcagcgctcaggcttgtgttcggtggtttaggcaggcacttcagggaagggaacgtccatccgggggaccagaagtcagagtgctgttgtttaacgcaactggggaccgggatcctgcagcattgctgaagctgttacagccctgccagttcgattatgcagtcttttgcccaaacctcaccgaggtgtcgtcgaccggcaatgctgatcagcagaacttcaccgttaccctggatcaggtcctgctcagatgtctcgagcaccagcagcattggaaccatctggatgaagagcaggcctcacccgacctctggagtgctccatccccagagccaggtggtagcgcttctctcctgcttgccccacacccccctcacacatgttctgcaagctctttggttttctcttgcatttctcatgcactgcagtggatctcccagggcagggaccctatttttcagcctcccagtcctccaaaggggctgctgacgcatcccgtcgctcacagtggcgcaagtattctcagggaggccgctgcaattcacgtgcttgtgactggctcactgcatttggtgggtggggttctcaaactgctggagcccgcactgtcccagtag

SEQ ID NO: 223508 - DNA, 1128 bp, synthetic construct
  misc_feature 1..1128: note = Description of Artificial Sequence: Synthetic coding sequence
  source 1..1128: mol_type = other DNA
atgagccgggcacgcagccatcttcgggctgcgcttttcctggccgctgcttctgcccgtggaatcacaactcaggtggcagcaaggcgaggtctgagtgcctggcccgtgcctcaggaaccctctatggagtaccaggacgccgtcagaatgctgaatacactccaaactaacgcgggatatcttgaacaggtgaagcgccagcgaggagacccccaaacacaattagaggcaatggaactttatttagctaggtccggccttcaggtcgaggatctggaccggctgaatattatccacgttaccggcaccaaaggcaaaggctccacatgtgcttttacagagtgcatactgcggtcttacggacttaaaacaggtttcttttcatctccacaccttgtgcaagtgagagagcgcatccgtattaatggacagcccatctctcccgagctgtttacaaaatatttttggcgtctgtatcatcgtctggaggagacaaaagatggttcgtgcgtctccatgcccccatacttccgatttctgacattgatggctttccacgttttcctacaggaaaaggtggacttggcagtagtcgaggtgggtattggaggcgcatacgattgcaccaacatcatccgcaagccagttgtgtgcggcgtgagttcgctcggcattgatcacactagcttgcttggtgatactgtggagaagatagcctggcagaaaggagggatctttaagcagggcgttccagccttcactgtgctacagccagagggccctctggccgtcttgcgcgaccgtgcacagcagatttccgtactcggcagccagcggcatccagggcagggttcatgcggaagctgcccctggcacctttgctcctcacctcacccgacatgcggatcaggtttcgggaccaggtctgggagggctggaaggcgatgctgtggggcaggcccatcacccggaacttggacagtgcgaacccctcccgctgcacggagaccagcttgtgcgggtagcgccagaaggtgcagagccgcacgaggcagggccgtggctcctcgatttgaatcctgctcctccatgctgcccggtacaggaacaaggcggccatgctag

SEQ ID NO: 223509 - DNA, 1128 bp, synthetic construct
  misc_feature 1..1128: note = Description of Artificial Sequence: Synthetic coding sequence
  source 1..1128: mol_type = other DNA
atgtcacgcgctagaagccacctgcgcgctgcgttatttctggctgctgcaagcgccaggggaataaccactcaggtggccgctcgacggggactatccgcctggcctgtcccacaggaacccagtatggaataccaagatgcagtgcgcatgctaaatactttacagaccaacgctggatacctggaacaggtaaaaagacagcgaggagacccccagacccagcttgaggcaatggagctttatctggctagatctggattgcaggtggaggatctcgataggctgaatattatccatgtgaccggcacaaaaggcaagggctctacgtgtgcatttactgagtgtatcttacgcagctatggcctcaagaccggattctttagctccccacatctcgtgcaggtgcgagagcgcattcggatcaacggacagcctatatcccctgagctgttcaccaaatatttctggcgcctttaccacaggctcgaggagactaaagacggcagttgtgtcagcatgcctccctattttcgatttttgacactgatggcctttcacgtgttcctacaggagaaggtggacctggcagtggttgaggttggtattgggggagcttacgattgtacgaacatcattcgcaagcccgttgtgtgcggtgtctcttcactgggcatagatcacacctcactactgggggacactgtggaaaagatcgcctggcaaaagggtgggatcttcaaacagggcgtgcccgcattcaccgtcctgcagccggagggacccctggcagtccttagagatcgagctcagcagatctctgttttgggtagtcagcgacacccaggtcagggaagctgtgggagctgtccatggcatttgtgctccagtcctcatcccacctgtgggtcagggttcggaactagatcaggccgtgccggacgcaggtgctgtggggcaggaccgtccccaggcacttggaccgtgcgaaccccccctgctgcccgaaggcccgcatgcgccggatccgccagacggtgccgagccgcaagaggaagagccgtggcccctcgattcgaaagctgtagcagcatgttacccggtaccggtactcgcagaccatgctag

SEQ ID NO: 223510 - DNA, 1764 bp, synthetic construct
  misc_feature 1..1764: note = Description of Artificial Sequence: Synthetic coding sequence
  source 1..1764: mol_type = other DNA
atgagtcgcgcacggagccacctccgggcagccttgtttctcgctgccgcttctgctcgtggcatcaccacccaggtggctgctcgcagaggcctctccgcttggcccgtacctcaggagccctcaatggagtatcaggacgctgtcagaatgctgaatacactgcagacaaatgcagggtatctcgagcaggttaaacgccagcggggagacccgcagactcagctggaagccatggagttgtatctggccagatccgggcttcaggtggaggacctggatcgtctgaacattatccatgtgacggggaccaaaggaaaaggtagcacctgtgccttcactgagtgcatcttaagatcctatggattgaaaaccggcttcttctcttcccctcacctggtccaagtccgcgagcggatccggatcaacggccagcctatttccccagaactgttcacaaagtacttctggcggttgtatcaccgtctggaggaaacaaaggatggctcctgtgtgagcatgcccccatattttcggttcctgacactaatggcattccatgtttttttacaggagaaggtcgaccttgcggtcgtcgaagtgggcattggaggcgcatatgattgcacaaatattatccgaaagcctgtggtctgcggagtctccagtttgggcatcgaccatacctcgctacttggcgacacagtggaaaaaatcgcatggcaaaagggcggtatcttcaagcagggggtcccagcttttaccgtcttgcagccagaagggcctctcgccgtgcttagagatagggcccaacagatatcttgccccctgtacttgtgccccatgctcgaggccctggaggaaggtggcccaccgctcacattggggctggagggggagcatcagcgatccaatgccgcactggctcttcagctggcacattgttggttgcaacgccaggatcgccatggcgcaggtgaacccaaggccagtaggcctgggctgctgtggcagctcccgctggctcccgtgtttcagcctaccagccatatgaggctcgggctgcgcaacacagaatggcccggacggactcaagttctgagacggggaccactgacctggtatctagacggtgcgcatactgcgtcatctgcccaagcttgcgtgaggtggtttagacaggctttacaggggagggaaaggccgtccggtggaccagaggtgcgcgtactgttattcaatgcgaccggggaccgggatccagctgctctcctgaagctactccagccatgtcaattcgattatgcggtgttctgtcccaacctaacagaggtgtccagcaccgggaatgccgaccagcagaacttcactgtcaccctggatcaagtgctcctgaggtgcttagagcaccagcagcattggaatcacctggacgaagagcaggcctcccccgacctgtggagcgccccttcccccgaaccgggagggtccgccagcctcttgcttgcgccacatcctcctcacacctgcagcgcttcaagcctagtcttctcgtgcatttcgcatgctttacagtggatatctcaggggagagaccccatctttcagcccccaagtccacctaaaggtcttctgacccaccctgttgcccatagcggggcatcaatcctgagggaggccgcagccatccacgttctggttacggggagcctccacttggttggcggagtgctgaagctactcgagcctgcactcagtcaatag

SEQ ID NO: 223511 - DNA, 1686 bp, synthetic construct
  misc_feature 1..1686: note = Description of Artificial Sequence: Synthetic coding sequence
  source 1..1686: mol_type = other DNA
atgtcccgggctaggagtcatttgagagcagccctgttcttggccgctgcgagcgcacgtgggatcacaacccaggtagctgccagacgaggcctctccgcttggcccgttccgcaggaaccatcaatggagtatcaggatgcggtgaggatgcttaataccctgcagacaaatgccggatatctcgaacaggtgaagcggcagcgaggggatccgcagacacagctagaggccatggagctgtacctggccaggagcggcctgcaagtggaggatttggaccggctgaacatcatccatgtaaccgggacgaaggggaaggggtccacctgcgcctttactgaatgcatcctgaggagctacggactgaaaaccgggtttttctcatcccctcacctcgtacaggtccgtgaacgcataagaattaacggacagcccatctctccggaactcttcaccaagtacttttggcgtctatatcataggctggaagagactaaagtggatctggcagtagtggaggtgggtattggaggggcttatgattgcacaaatattataagaaagccagtggtgtgcggggtgtctagccttgggatagaccatacaagcctgctgggggacacagtcgaaaagatcgcatggcagaaggggggtatatttaagcaaggggtgccagcttttacagtgcttcagcctgagggcccactggccgttctgagagatcgtgcacaacaaatctcatgtcccctttacttatgccccatgctcgaggccctcgaggagggtgggcctccactgaccctgggcctggagggagagcaccagcgttccaacgcagctctggccctacagctcgctcactgctggctgcagcgacaggacaggcatggggcaggtgaacccaaggccagcaggccaggattactgtggcagttaccactggctccagttttccagcctacaagccatatgagacttggcttgaggaacactgagtggcccggtcgcacacaggtgctgcgccgaggaccacttacttggtacctggatggggctcacaccgcgagcagcgctcaggcatgcgtgcgctggttccgacaggccttacagggcagggagcgaccttccggaggcccagaagttcgagtattattgttcaacgccacaggcgaccgagatccggcagctcttcttaagcttctgcaaccttgccagttcgattatgccgtcttctgtccaaatctgactgaggtgagtagtaccgggaatgcggaccaacagaacttcacagtaaccctggaccaagtgcttcttcggtgcctggaacaccaacaacactggaaccacctcgatgaagagcaggcctccccggatttgtggtctgcaccatcacctgaacctggtggtagcgcaagtctcttactggccccacaccctccacatacatgctcagcatctagccttgtcttctcttgtatcagccacgcactgcagtggatctcacaggggagggatccaattttccagccaccctcccctcccaaagggctattaacccaccccgtcgcacatagcggcgctagcattctcagagaggcagccgctattcacgtgctagtcacaggcagtctgcacctggtcggcggagtattaaagctgctggagccagcactcagccaatag

SEQ ID NO: 223512 - DNA, 585 bp, synthetic construct
  misc_feature 1..585: note = Description of Artificial Sequence: Synthetic coding sequence
  source 1..585: mol_type = other DNA
atgttgaacacactgcaaacaaacgctgggtacctggagcaggtcaagaggcaacgtggagaccctcagacccagctggaagccatggagctatacctcgccaggtccgggttgcaggtggaggatttggatcgtcttaatattatacacgtgactggcaccaaaggtaaaggctcaacatgcgcttttaccgagtgtatcctcaggtcctacggactgaagacaggctttttttcatctccacacctggtgcaagtgcgtgaacgcatcaggataaacggtcagccaatttctccagagctatttacaaagtacttttggaggttgtaccaccgcttagaggagaccaaggttgatctggccgtcgtggaggttggaattggtggggcatatgactgtactaacatcatccgtaagccagttgtgtgcggggtgagctctttggggatcgatcacactagtttgctgggagatacagtggaaaagatcgcttggcaaaaaggaggcatctttaagcagggggtcccggcattcaccgtgctgcaacctgaaggccctctggccgtcctccgagacagagcatag

SEQ ID NO: 223513 - DNA, 798 bp, synthetic construct
  misc_feature 1..798: note = Description of Artificial Sequence: Synthetic coding sequence
  source 1..798: mol_type = other DNA
atgctgaatacattacagacaaacgcgggttatttagagcaggtcaaacgccagaggggagatccacaaactcagctggaggccatggaactgtacctagcgcgatctggcctgcaggtcgaggatctagacagattgaacatcatacatgtcacaggcacaaaaggcaagggcagcacttgcgccttcacagagtgcattcttcgttcttatgggctcaagactgggttcttctcttcgcctcacttggtgcaggtccgggagagaatccgcattaatgggcagcctatttctcccgaactgtttacgaagtacttttggagactgtatcaccgactggaagagacaaaggacggatcttgcgtgagtatgcctccatacttccgtttcctgaccctaatggctttccacgtgtttctgcaggaaaaggtagatttggccgttgtggaggtaggcatcgggggagcttatgactgcactaatataatccggaagcccgtagtgtgcggagtctcgtccttagggatcgaccacaccagcttgctgggagacaccgttgaaaagatcgcatggcagaaggggggtattttcaaacagggggtcccggctttcacggtcctccaaccagaggggccattggccgtgttgcgcgatcgcgctcagcagatctccgttctgggcagccagcgccatccaggccaaggtagttgcggatcctgcccctggcatctctgctcatctccacatcccacctgcggttctggatttgggacccggtctggtagggcaggacgctag

SEQ ID NO: 223514 - DNA, 1392 bp, synthetic construct
  misc_feature 1..1392: note = Description of Artificial Sequence: Synthetic coding sequence
  source 1..1392: mol_type = other DNA
atgcattcagccagcagtatgctaggagccgtgaaaatggagggacacgagccttcagattggtctagctactacgccgagcctgaggggtattcttctgtctccaatatgaacgcaggattgggtatgaacggtatgaatacatatatgtcaatgtccgcagccgcaatgggcagtggttctgggaacatgtccgcagggtccatgaacatgtccagttatgtaggcgctgggatgagtccatccttggccggaatgtctccgggagccggagcaatggccggaatggggggaagtgcaggagccgcaggggtggccggaatgggtcctcacctgtctccttcactctctcctttaggcggacaggccgcaggcgctatgggaggcctggctccatatgccaatatgaattccatgtcaccaatgtacggacaggctggcctctcccgggctcgagaccccaagacctaccggaggtcttacactcacgccaagccgccatactcttatatcagcctcattactatggccatccagcagtctcccaacaaaatgttgactttaagcgagatctatcagtggattatggatctgtttccgttctatcggcaaaatcagcagcgatggcagaattccattcgacattccctcagcttcaacgactgcttcctaaaagtgcccagatctcccgataagcctggtaaggggtcattttggaccctccatccagattccggcaacatgtttgagaatggttgctatcttagaagacaaaagcgtttcaagtgcgagaaacaattggccctgaaagaagccgcaggcgctgccggaagcggtaagaaggccgctgctggggcacaggcctcccaggcccagttgggtgaggctgctggaccagccagcgagactccagcagggactgagtcccctcacagttccgcaagtccatgtcaagagcacaagagaggcggattaggagagctaaaaggcaccccggcagccgctttgtctccgccagaaccagccccatcccccggacagcagcagcaggccgcagcccacctgctgggccctccgcaccatcctggacttcctccagaggcccatcttaagcctgaacaccattacgcttttaaccacccctttagcatcaataacctcatgtccagcgagcagcaacaccaccatagtcaccaccaccatcagcctcacaagatggacctgaaggcctacgagcaggtgatgcattatcccggatatggatctcccatgcccggttcgttggccatggggccagtcacaaataaaaccggcctcgatgcttccccactggctgccgacacaagttactatcagggcgtttactcgcgcccaataatgaatagtagttag

SEQ ID NO: 223515 - DNA, 1374 bp, synthetic construct
  misc_feature 1..1374: note = Description of Artificial Sequence: Synthetic coding sequence
  source 1..1374: mol_type = other DNA
atgcttggcgctgttaagatggaaggacatgaaccctctgactggagttcctactatgcagagcccgagggctacagcagcgtgtccaatatgaacgccggactgggaatgaacgggatgaatacttacatgagcatgtccgctgccgcaatggggagcgggtctggaaatatgtccgccggttctatgaacatgtctagctacgtcggggctggcatgtctccttctctggccggtatgtcacccggagcaggcgctatggccggaatgggtggttcagccggagcagcgggagtcgcaggcatgggtcctcatctttccccctcactttcccctttggggggtcaagcggcaggtgcaatgggcggtctcgcaccatacgctaacatgaacagtatgtcccccatgtacgggcaggctggtctgtcacgggctcgggatccaaagacgtataggcggtcttacacgcacgccaaacctccctactcttacatatctctcattacgatggccatacaacaaagccctaataaaatgcttaccctgagcgaaatataccagtggatcatggatctctttcccttctatcgacagaatcagcagcggtggcagaatagcatccgtcactcactctcgtttaatgattgttttctgaaggttccccgatcaccagataagcccggaaaggggtccttttggaccctccaccctgactccgggaacatgtttgagaacggatgttacctcagacgtcagaaacgtttcaagtgtgagaaacagttagccctgaaggaggccgcaggtgcagccggttccggaaaaaaggccgcagctggggcacaggcgagccaggcacagctgggggaggcagcaggacccgcttcagaaacccctgccggtaccgagagtccacactcttccgcctcaccttgccaggaacataagcgaggtgggttgggcgagctaaagggcacacctgccgctgctctgagtcctcccgagcctgccccatctcctggccagcaacaacaggcagcggctcacttgcttggcccaccacatcatccgggactgcctcccgaggcgcatttaaaacccgagcaccattatgcctttaaccatcccttctccatcaataaccttatgtcctctgaacagcaacatcaccattcacaccatcatcaccagccccacaaaatggacctgaaggcctacgaacaggtgatgcattacccaggctacggatcccctatgcccggatccctcgcgatgggtcccgttacgaacaaaaccggtttagacgcctcacccctggcggctgacacaagttattatcagggcgtttacagtcgcccaatcatgaattccagttag

SEQ ID NO: 223516 - DNA, 1374 bp, synthetic construct
  misc_feature 1..1374: note = Description of Artificial Sequence: Synthetic coding sequence
  source 1..1374: mol_type = other DNA
atgctgggagccgtgaagatggaagggcacgagcccagtgactggtcaagttactatgccgaaccagaaggatatagctcggtgagcaatatgaatgctgggttaggaatgaacggcatgaacacatatatgtcgatgtccgccgctgctatggggagcggaagcggcaatatgagcgcaggcagtatgaacatgtctagttatgtcggcgctggcatgagtccttctcttgcagggatgagcccgggtgccggtgccatggccggaatgggaggatctgccggtgcggcaggggtggctggaatgggccctcatctgtctccgagtctgagtccgcttggagggcaggccgctggagcaatgggagggcttgctccctacgcgaacatgaatagtatgtcgccaatgtacggccaggcagggctgtcaagagcacgggatcctaagacttaccggaggagctatactcacgctaaaccaccttacagctacatctctctgatcacgatggccatccagcagtctccaaacaaaatgttaacactaagcgagatctaccagtggatcatggatttattccctttctacagacaaaaccagcagaggtggcagaattcaatcagacactccctgtcttttaacgattgcttcctcaaagtgcccaggtcacccgacaagccgggaaagggaagcttctggacgctgcatcccgattctggtaatatgttcgagaacggatgctatctgcgacgtcagaaacgcttcaaatgtgagaagcagctggcgcttaaagaagcggcaggcgctgccggtagtgggaagaaggccgctgctggagcccaagcgagtcaggcacagttgggagaggccgcaggcccagcaagcgagacacctgcagggaccgaaagtccccattctagtgctagcccgtgtcaggagcataaacggggagggcttggcgagctaaagggaactcccgctgcagccttatcccccccagagcccgctcccagcccagggcagcagcagcaagctgccgcacacctgctcggccctccacaccatcccggtctgccgcctgaggcccacttgaaaccggagcatcactacgccttcaaccacccattctccattaataacctaatgtctagtgagcaacagcaccatcacagccatcatcaccaccaaccacacaagatggatcttaaggcttacgaacaagtaatgcactatccgggttacggctcacctatgccaggatcactggctatgggaccggtgaccaataagacagggctcgacgcaagccccctggctgcagatacgtcttactatcagggtgtgtattctcgtccaattatgaacagctcttag

SEQ ID NO: 223517 - DNA, 1032 bp, synthetic construct
  misc_feature 1..1032: note = Description of Artificial Sequence: Synthetic coding sequence
  source 1..1032: mol_type = other DNA
atgctcggggctgtgaaaatggagggacacgaacctagcgattggagtagctactacgctgaacccgagggatactcttctgtatcaagagctagagacccaaagacataccggaggtcctatactcacgcgaaaccaccgtattcctatatttcactgatcacgatggctatccaacagtccccaaacaaaatgctcactttgtccgaaatataccagtggatcatggatctctttcccttctacaggcaaaaccaacagaggtggcaaaatagtatccggcactctctgagtttcaatgactgttttctgaaagtgccgaggtctccagacaagcctggtaagggcagtttctggacgcttcacccagacagcggaaatatgttcgaaaacggctgctacctgagaaggcaaaaacgatttaagtgcgagaagcagctggcactcaaggaagcagcgggagcggcaggcagcggcaagaaagcggctgccggagctcaagcctcccaggctcagcttggagaagctgcaggcccagcctccgagacaccggcaggcacagaaagtccccactcctctgcttctccctgccaagagcataagaggggtggtctgggcgaactgaaaggtactcccgcagctgccctcagtcctccagaacccgcaccgagcccaggacaacagcagcaagctgccgctcacttactgggccctccccaccacccaggcctccccccagaggctcacctgaagcctgagcatcattacgcgttcaaccatccattctccataaacaacctcatgagctctgaacagcaacaccaccattctcaccatcaccatcagcctcataagatggatcttaaggcttacgagcaggtgatgcattatccagggtatggaagccccatgcctgggagcctggccatgggaccagtgaccaacaagaccgggctggatgccagccctcttgccgctgacacaagctattatcagggggtctactctcggcctatcatgaattcttcatag

SEQ ID NO: 223518 - DNA, 1053 bp, synthetic construct
  misc_feature 1..1053: note = Description of Artificial Sequence: Synthetic coding sequence
  source 1..1053: mol_type = other DNA
atgctaggttcagtgaagatggaagcacacgatctcgctgagtggtcttactaccccgaggccggagaggtgtactcccctgtcactccagtgcctacaatggccccattgaatagctatatgacattgaacccacttagcagcccatatccacccggaggcctcccagccagcccactgccctcgggacccctggcccctcccgctcccgctgcgcctctcggcccaacatttcccggtctgggcgtgtctggcggaagtagttcgtccggttatggcgctcccggacctggtctcgtgcatggtaaggagatgccaaagggatataggcgacccctcgcacacgcaaagcccccttattcgtatatctctctcattaccatggccatccagcaggccccagggaagatgttgacgttgtcagagatttatcagtggatcatggatctgttcccttattaccgggagaaccagcagaggtggcaaaatagtattaggcacagcctcagttttaacgattgttttgtcaaggttgccaggtctcctgataaaccaggcaaaggctcttattgggccctgcacccttcctcaggtaatatgttcgaaaacgggtgttacctcagacgccagaaacggttcaagctggaagaaaaagtgaagaagggagggtccggagccgctacaacgacaaggaatgggaccggttcggccgcaagcactaccacacccgctgccaccgtgacttcacctccacaacctcctccccctgccccagagcccgaggcacagggcggtgaggacgtcggagcactagactgtggatcgcccgcaagttctactccatatttcacaggtctggaactgccaggtgaactgaagctcgatgccccatacaactttaaccaccctttcagcatcaataacctgatgtctgaacagactcccgctccacctaaactggacgtggggtttggaggatacggcgctgagggaggtgagccaggggtgtattaccaggggctttactctaggtctctcctaaacgcctcctag

SEQ ID NO: 223519 - DNA, 1662 bp, synthetic construct
  misc_feature 1..1662: note = Description of Artificial Sequence: Synthetic coding sequence
  source 1..1662: mol_type = other DNA
atgcaggccagatacagtgtgagctcgcctaactctctgggcgtagtgccgtacctgggcggagaacagagctactaccgggctgcagctgcagccgcaggcggtggatacacagccatgcctgcaccaatgagcgtctacagtcatccagcccacgctgagcaatacccaggtgggatggctcgggcatatggcccatataccccacagccgcagcctaaagacatggttaaacccccatatagctatatagcccttatcacgatggcgatccaaaacgcccctgataaaaagattactttgaatgggatttatcagtttatcatggataggtttcccttctaccgtgacaataaacagggatggcagaatagtattcgccataatctcagcctaaacgagtgctttgtcaaagtcccgcgagatgacaaaaagcctggaaaaggcagctactggacacttgacccggattcatataatatgtttgagaacggatccttcctccgtaggagaaggcgctttaaaaaaaaggatgctgtaaaagacaaagaggagaaagataggctacacctaaaagagcccccaccaccgggtagacagcctcctcccgctccaccggagcaagcagatggcaatgcccctggccctcagcctccacctgtgaggatacaggacattaagacagaaaacggtacctgcccctctccccctcagcctctcagtcccgctgctgcgctaggcagcggatccgccgctgcggtacccaaaattgagtctcccgattctagctcaagctcccttagcagtggaagcagcccgccagggtccctcccatcagctcggcctctctctctagatggcgctgactcggctccccctcctccagcgccttctgctcctccacctcaccactcccaggggttctccgtcgataatattatgacttcacttagggggagcccccagtctgcggcagctgagttaagttccgggctgctggcttccgcagccgcatcctcccgcgcaggcatcgcacctcccctcgctctgggggcttactcacccggtcagtcaagcctgtatagctccccatgtagccagacttcaagcgcaggatcaagtggcggaggagggggaggcgctggcgcagcgggaggcgcaggcggtgcaggcacttatcattgcaatctccaggctatgagcctgtatgcagccggagagaggggaggccacctgcagggagccccaggaggggctggcggaagcgccgtggatgaccctctcccagactattcacttcctcccgtcacgtcaagctctagttctagcctgtcgcatggagggggaggcggaggcggtgggggagggcaggaagccggtcaccacccggcagcccatcaaggaagactgacttcttggtatttgaatcaagcgggaggcgatctggggcatctggcaagcgctgccgctgcggcagcggctgccggttaccccggtcagcagcagaacttccacagtgtgagggaaatgtttgagtctcagcggataggtctgaataattccccagtgaatggaaattcctcctgtcagatggctttccccagctcccaaagcctgtacagaacctccggggctttcgtctacgactgtagcaagttctag

SEQ ID NO: 223520 - DNA, 639 bp, synthetic construct
  misc_feature 1..639: note = Description of Artificial Sequence: Synthetic coding sequence
  source 1..639: mol_type = other DNA
atgcaggccagatactcagtgtcatcgccgaactctttgggcgtggtaccatacctggggggagaacagtcttactaccgagcagcagccgcagcggcaggcggtgggtacaccgcaatgcccgctccgatgtccgtgtatagccatcccgcacacgccgagcaataccctggcggaatggccagagcctatgggccatatactccccagcctcagccgaaggatatggttaaacctccgtactcatatattgcactcatcacaatggcaatacagaacgcaccagacaaaaaaataaccctcaatggtatctatcagttcatcatggatagatttcccttctaccgcgataataaacagggctggcagaacagcatcaggcacaatttgagcctaaacgagtgtttcgtaaaggttcctagagatgataagaagccgggaaaaggatcctactggactcttgaccccgattcttataacatgttcgagaatggcagtttcctaaggcgtaggagaagatttaagaagaaggatgcagtgaaggacaaagaagaaaaagaccgaccacaagcaacaagagctagtagccgtacctcaactcggtgcggtcgatgctcgagccaccgcggttcagcttag

SEQ ID NO: 223521 - DNA, 1488 bp, synthetic construct
  misc_feature 1..1488: note = Description of Artificial Sequence: Synthetic coding sequence
  source 1..1488: mol_type = other DNA
atgaccctaggctcttgttgttgcgagatcatgtcttctgagtcctctcctgccgcactgtccgaggctgacgcagatattgatgtggtgggcggtggctctggcggaggggagcttcccgctagatccggtccacgggctccacgcgacgtcctgccccacgggcatgaaccccctgccgaagaagccgaggcagatctcgctgaagatgaagaggagtcaggaggttgcagcgacggggagccccgagctctagctagccgtggagctgcagccgcagctggctccccaggtcctggcgctgccgctgcacgcggagccgctggtcctggcccaggtcccccatccggcggagcagctacccgctccccccttgttaagcccccatactcatacattgctcttatcaccatggctatactccagagccccaaaaagagactgaccttgtctgaaatctgcgagttcatctcaggacgcttcccctactacagagaaaagttcccggcatggcagaattccatccgccataatctgtccctcaacgactgtttcgtgaaaatcccgcgagagccaggcaatcccggtaaggggaattactggacgctcgacccagagtcagccgacatgttcgataatggttcgtttctgcgcagacgcaagcgattcaagcgccagcctctgcctccaccgcacccgcatcctcatccccatccagagctgctgctgaggggtggcgcagctgcagcgggtgatcccggtgcttttctgcccggattcgctgcttacggagcctacggttacggatacggactcgccttgccagcctatggagctcctcccccaggcccagcccctcacccccatcctcatccgcacgcgttcgcttttgctgccgctgcagcggctgccccatgccagctgagcgtcccaccgggacgagctgcggctcccccacctggccctcctacagccagtgtatttgcaggcgctggctcggctcccgctcctgcgccagccagtggaagcgggcctggtccgggtccagcagggcttccagccttccttggcgctgaattgggatgtgcgaaggcattttacgccgcttcgttatcaccacctgctgccggaaccgcagccggtctgcccaccgccctcttaagacaagggttgaagacagatgcagggggaggcgctggcggtggaggagcaggcgctggacagaggcccagcttctcaatcgatcatatcatgggacatggcggtgggggagccgcacctccaggggcaggcgaaggcagtcctgggccaccctttgctgcagcagcaggcccaggcggacaggcccaggtgctcgcaatgttgaccgctcctgcgttggcacctgtggcgggacacattagactgagccatcccggtgacgccctactgagcagcggttcaaggtttgctagcaaggtcgctgggctgagtggatgtcacttctag

SEQ ID NO: 223522 - DNA, 1437 bp, synthetic construct
  misc_feature 1..1437: note = Description of Artificial Sequence: Synthetic coding sequence
  source 1..1437: mol_type = other DNA
atgacactatccggcggtggtagcgcatcggatatgtctgggcagacagtgcttactgctgaggacgtggatatcgatgtcgttggggagggtgacgatggtctggaagaaaaagatagcgacgccggatgtgactctcctgcaggcccacccgagctccggctggatgaggctgatgaggtcccacctgccgctccacaccacgggcagccccagccaccacaccagcaaccactgacgcttcctaaagaggcagccggtgcaggggctgggccaggcggagatgtgggtgccccagaggcggatggatgcaagggtggtgtgggcggagaggaagggggagcgagcggtggtggcccaggagcgggaagcggatctgcgggagggctcgcaccgtcaaaacctaaaaacagcttggtgaagcctccctatagttatatcgccctcatcacaatggcaatcttacaatcacctcagaaaaagcttaccttatccggtatctgcgagttcatcagcaatcggttcccatactacagggagaagttcccagcgtggcagaactccatcaggcataacctgagtctcaatgactgttttgttaaaatccccagggaacctggaaatcccggaaaggggaactactggacccttgatcctcagagtgaagacatgttcgacaatggaagcttccttcggagaaggaaacggttcaagcgtcatcagcaggagcacctgcgtgagcaaactgctcttatgatgcagagctttggggcatactccctggcagcggcagccggagccgctgggccttatggacgcccatatggcctgcacccagctgcggcagccggtgcctattcccatcctgctgccgctgccgctgccgctgctgccgctgctctccaatacccctatgcccttcctcccgttgcacctgtcctcccccctgctgtcccactcctaccttctggcgagctggggcgtaaggcagcggcttttggcagtcaattgggacctggtttgcaactgcaattgaatagtttaggagccgctgcagccgctgcaggaacagctggagcagcaggaactacagcgtccctcataaaatcagaaccttcagctaggcctagcttcagtatcgagaacatcattggtggaggtccagcagctcctggaggttcagcagtcggagccggagttgccggtggcacaggaggcagcggtggagggagcacagcacagagttttctcaggccaccgggaactgtccagtccgccgcactcatggcaacccatcagcctctgtccttatctagaaccacagcaacaatagcacccatcctatctgtgcccctgagtgggcagttccttcagcccgcagcttcagccgcagccgcagctgccgcagctgcgcaggcaaaatggcccgctcaatag

SEQ ID NO: 223523 - DNA, 1320 bp, synthetic construct
  misc_feature 1..1320: note = Description of Artificial Sequence: Synthetic coding sequence
  source 1..1320: mol_type = other DNA
atgaatctgccgagagcggaaagactgaggtcaaccccgcaaagatctcttcgcgattccgacggagaggacgggaaaatcgacgtgctcggtgaggaggaggacgaagatgaggaggaagctgcctcacagcagtttctggagcagagcttgcagcctgggctgcaggttgcacggtggggcggtgtggcccttccacgggaacacattgaggggggaggcggacccagtgacccgtctgaatttggcactgagtttagggctccacctagatctgccgcagctagcgaggacgccagacagcccgcaaagccccctagttcctacatcgccctgatcacaatggctatcctgcagtccccccacaaaagactgactctgagcggcatctgtgcattcatatcggacagatttccctactaccggagaaaattccctgcatggcaaaatagtatccgccataacctgagcctcaacgactgcttcgttaaaattcctcgagagcctgggaggccaggcaagggcaattactggagcctggatccggcttctcaagacatgtttgacaacggatccttcctacgaaggcgaaagagatttcagagacatcagcctacacccggtgcccaccttccccacccattccccttgccagccgcacacgccgctctgcataaccccagacccggtcctctgctgggtgcacccgctccaccccagcctgtgcctggggcttaccctaacacaggcccaggcagaagaccatacgctctactgcatccacaccctcctagatatctcttgctttcagcacctgcttacgcaggggcacctaaaaaggccgagggggcagacctggcaacccccgctccctttccgtgctgtagtcctcatctggttttatctctgggcagacgcgcacgtgtctggagacgccaccgtgaggcagatgccagtctcagtgccctacgtgtgtcctgtaaaggctccggtgagcgagtacaaggactgaggcgggtctgccccaggccgagaggagccactgcaccttgcagctcggatcgacaggcttgtcggacaatcctccagcagcagcagcggcatcaggaagaggactgcgcaaacggatgcgctccaacgaaaggagccgtgttaggcggacatctgtctgcggctagcgccctcctaaggtatcaggccgtcgccgagggatcagggttgacatctctcgctgcccctttagggggagaaggaaccagtcctgtcttcctcgtatcccctacacccagttctctcgccgaatctgccggtccatcctag

SEQ ID NO: 223524 - DNA, 1227 bp, synthetic construct
  misc_feature 1..1227: note = Description of Artificial Sequence: Synthetic coding sequence
  source 1..1227: mol_type = other DNA
atgaaccttccacgggcagagagacctcgaagtacacctcagcgatcactccgagactccgacggagaggacgggaagatcgacgtgttaggagaagaagaggatgaagatgaggtagaggatgaagaggaagaagcctctcagaaattcttagagcaatccttacagcccggtcttcaggtggctcggtggggcggtgtcgcactgccacgtgagcacattgaaggagggggaccgtcggatcctagcgaattcggcactgagttccgtgccccaccgagatccgccgctgcctctgaggacgctcgtcagccggctaaaccaccttacagctatatcgccctgatcacaatggccatcctccagagtccacataaacgtctcactctgagcggaatatgcgcttttatttccggcaggttcccttactataggcggaaatttccagcatggcagaactctattcggcacaacctgtctttgaacgactgttttgtgaaaatccctagagagccaggacacccgggtaagggaacctattggagtcttgaccctgcctcgcaggacatgttcgacaatggcagcttcctcaggcgccgtaagagatttaagcggcatcagttgacccctggcgcacacctaccacatccctttccactcccagctgcacacgcagcactgcacaacccaagaccagggccactcctgggcgctcccgcactgccccaaccagtgccaggggcttaccctaacactgctccaggccgtcggccatacgctctactacaccctcacccgcctaggtacctgctgctctccgctcctgcatacgccggagccccaaaaaaagccgaaggtgcggaccttgcaacccctgggactctccccgtgctccagccatcacttggccctcagccctgggaagaaggcaagggcctagcttccccgcctggaggcggttgcatctccttcagcatagagtctatcatgcagggggtgaggggagccggaacgggcgcagctcagtctttgtctcctaccgcatggtcctattgcccgttactgcagcggcctagcagcctcagtgacaacttcgcagccaccgcagctgccagtggcggaggcttgaggcagaggttacgtagtcaccaggggagaggcgcagggagagcgccagtggggagggtgggggctgctgcagtcagcggcggtggcagaggattgtag

SEQ ID NO: 223525 - DNA, 1251 bp, synthetic construct
  misc_feature 1..1251: note = Description of Artificial Sequence: Synthetic coding sequence
  source 1..1251: mol_type = other DNA
atgaaccttcccagggctgaacgccctcgttctacgccgcagcgcagcctcagggactccgacggtgaggacgggaaaatagacgtattgggtgaggaagaggatgaagacgaggtcgaagatgaagaggaggaagctcgtcaacaatttctggagcaaagtctacagccaggattgcaagtggcaaggtgggggggtgtggcgctgccacgggaacacattgaggggggtgggggaccttcggatcccagcgaatttggtaccaaattccgggctccacctcggtcggccgctgcctccgaggatgctcggcaacctgccaaacctccctactcctacattgctctgattaccatggcaattctgcagaacccccacaaaaggcttacactatccgggatttgcgcctttatttctggacgttttccctactatcggaggaagttccctgcatggcagaactctattcgccataatctgagtctgaatgactgttttgttaagattcctcgggagccaggccatcctggtaaagggaattactggtcattggacccggcttctcaggatatgttcgataacggctctttcctccgacgcaggaagcggttcaagagacaccagctcacccccggtgcacatttaccccatccttttcccttgcctgctgctcacgccgcattgcataatccacaccccggaccccttctgggcgcaccagctccaccacagccagtgccaggcgcttatccaaatacggcgcctggcagacgcccatacgccctcctgcaccctcaccccctgagatatctgttactctctgccagagtatatgcaggcgcaccgaagaaagcagagggtgctgatctcgccacacctgccccattcccgtgttgcagtcctcacctggtgctgtcattaggtagacgggctcgtgtctggcggagacacagagaggctgacgcgtcactgagcgccttgcgagtcctgtgtaaaggctccggagaacgcgtgcaggggctgcgcagagtttgccccagaccaaggggggctacggctacctgcagcagcgatcaccaggcctgttgcatcccaaaacccctgcccctgtgttgcaaatgtcctccgccacttctcctgggccagttctgttctaatagctctagtatcaggagaaccgctccaaccgcggcattgccgccacgggctaggtgttgggccggaacttgtagacccaggcgtcggtgctag

SEQ ID NO: 223526 - DNA, 1254 bp, synthetic construct
  misc_feature 1..1254: note = Description of Artificial Sequence: Synthetic coding sequence
  source 1..1254: mol_type = other DNA
atgaatttgcctcgcgcagagcgcctccgtagcacaccacagcggtccctcagggacagcgatggggaggacggcaaaattgacgttttaggggaggaagaagatgaagacgaggttgaagatgaggaggaagcggcatctcagcagttccttgaacagtccctgcagccaggactgcaggttgcacggtgggggggagtggcccttcctcgggagcacattgagggaggtggaggcccaagcgacccatctgagtttgggaccaagttccgcgctccccctcgaagtgcagcagccagtgaagatgccaggcagccggctaaacccccttacagttacatcgccctgattactatggcgatcctgcagaacccccacaagaggcttacacttagcggtatttgtgctttcataagtggacgttttccctattataggaggaaattccccgcttggcagaatagcatcagacacaacctctcgcttaacgattgctttgttaagatcccacgcgaacccggacatcccggtaaggggaactattggtccctcgaccctgcctcccaggacatgttcgacaatggttccttcctgagaaggaggaagaggtttaaacggcatcaattgaccccaggcgctcacttgcctcaccctttccctttgcccgctgctcatgcggctctgcacaatcccagacccggaccgctgcttggggctcccgctccccctcagcccgtgcctggagcttaccccaataccgcacctggtagaaggccctatgccctgctgcacccccacccattaaggtatctccttttatcggcacctgtatatgcaggggcaccaaaaaaagctgagggcgcagccctagccacgccagctcctttcccctgttgttcgccacatctggtgctgtctctaggccgtcgcgctagagtgtggaggcgccacagagaagccgatgcctcgctttctgccttgagagtcctctgcaaaggaagcggcgaacgcgttcaaggacttcggagaatctgccccagaccacgaggagcaactgccacctgctcaagcgaccaccaagcatgctgtataccaaggccactccccttgtgttgcaaatgcccacccccacccctcctaggccaattctgtagcaattcctcatccatccgacggaggactgcccctaccgcagctctgccaccgagggctaggtgctgggcaggaacatgccgaccgcgacgcccttgttag

SEQ ID NO: 223527 - DNA, 1122 bp, synthetic construct
  misc_feature 1..1122: note = Description of Artificial Sequence: Synthetic coding sequence
  source 1..1122: mol_type = other DNA
atgaccgcagaaagcggcccaccaccaccccaaccggaagttttggctaccgttaaggaggaacgcggagagactgcagccggagccggtgtcccgggtgaggctacaggaagaggcgcaggcggtagacggagaaagaggccgctccagcgcggaaagcccccttacagttacatcgcattgatagccatggcaattgcccacgccccagagcgtagattgaccctgggcggtatctacaaattcataacagagaggtttccattctatcgggacaacccgaaaaagtggcagaacagcataagacacaatttgaccctgaatgactgcttcttaaaaatcccaagagaagccggtaggcctggtaaggggaattattgggcattagatccgaacgctgaagatatgtttgagagtggcagctttctcaggcggaggaaaaggtttaagagatcagacttgagcacttatcctgcttacatgcacgacgccgcagccgctgctgccgctgccgcagccgctgctgccgctgctgcaatattccccggtgctgttcctgctgcgagacctccgtaccctggggcagtgtacgctgggtatgcccctcccagccttgctgcgcctccgccagtgtattacccagccgcttcacctgggccatgtcgcgtgttcggcctggtgcccgaaaggcccctgagcccagagcttggaccagccccatctgggcctgggggaagctgtgcatttgcgtccgcaggcgcaccagcaactacgaccggttatcaaccagccggatgtacgggtgcgcgacccgctaatccttctgcgtatgctgcagcttacgcgggtccggatggagcttacccccaaggggctggctcagccatttttgctgctgcaggcagattggcaggaccggcttcacctcctgccggtggctccagcggaggcgttgagaccacagtcgacttttacggacggaccagccccggtcagtttggagcccttggagcctgctacaaccccggaggccaactcgggggtgcatctgccggtgcgtatcacgctcggcacgcagcagcctatcccggtggcattgacagattcgttagcgccatgtag

SEQ ID NO: 223528 - DNA, 960 bp, synthetic construct
  misc_feature 1..960: note = Description of Artificial Sequence: Synthetic coding sequence
  source 1..960: mol_type = other DNA
atggcaggtagatccgatatggaccctcccgctgccttctcgggatttcccgcactccctgccgtggccccttccggacctccaccctcccccctggctggagccgaaccagggagagaaccagaggaggccgctgcagggaggggggaggcagcccctacccctgcccctggacctgggcgacgcagacgaagacccctgcagcgtggaaaaccgccttattcatacatcgcactgattgccatggctctggctcacgccccaggtcgaaggctcacactcgctgctatatatcggtttattacagaacggttcgcgttttaccgagatagcccacggaaatggcagaactccatcaggcacaatctgacactgaatgactgcttcgtgaaagtacctagggagcccggaaatcccggaaaggggaactattggacactggatccagccgctgctgacatgttcgataacggttcatttttgaggcgaaggaaaaggttcaagagagctgagctccccgctcacgcagcggcagcacccggtcctcccttgccattcccctatgccccatacgctccggcacctgggccagcccttctggtgcccccaccaagcgccggtccgggaccaagtcccccagccaggctgtttagcgtcgattcgctcgtgaacttgcaacccgaactggcgggactcggcgctcccgaacccccatgttgcgccgctccagatgccgctgccgcagcctttcccccttgtgcagctgccgcatcaccgcctttgtattctcaggtccctgacaggctggtattgcccgctacgcgcccaggcccagggcctctgcccgctgagcccctccttgcactcgccggacctgcagctgccctgggtcctttaagccctggggaggcgtatcttagacagcctgggttcgcttctggacttgaacgctacctgtag

SEQ ID NO: 223529 - DNA, 1335 bp, synthetic construct
  misc_feature 1..1335: note = Description of Artificial Sequence: Synthetic coding sequence
  source 1..1335: mol_type = other DNA
atgactacagagggcggaccgcctcccgctcccctgagacgcgcatgttcacccgtaccgggtgcacttcaagcagcgctaatgtcacctccacccgctgccgctgccgctgccgcagctgcgccagaaacaaccagtagctcttcttcttcaagttccgcttcctgtgcttcctcatccagttccagtaatagcgcgagtgctccatcagccgcttgcaagagcgccggaggcggaggcgcaggagctggaagtggtggtgccaagaaagcctcttctggactgcgtcggcctgaaaagcctccctatagttatatcgccttgatcgttatggcaattcagtccagccccagcaagcggcttacactcagtgaaatatatcagttcctgcaggcccgatttccattttttcggggtgcttaccaggggtggaagaacagtgtgcgccacaacctgtctctcaacgagtgctttattaaactgccaaaaggcttaggccgacctggtaaagggcactattggaccatcgacccggcatctgagttcatgtttgaggagggatctttccggaggagaccgagagggttccggaggaaatgtcaggctctgaagcccatgtaccaccgcgtcgtgagtggcctgggttttggagcttcactgctgccccaggggttcgactttcaggcccctccatccgccccactgggctgtcactcccagggcggatatggcggtctcgatatgatgcccgctgggtacgatgccggagcaggggcaccatcccacgcccacccacaccaccaccatcaccaccatgtccctcacatgtcaccgaaccccggaagcacttatatggcgagctgcccggtgccggctggcccaggcggagtcggagctgccggtgggggaggcggaggggattacggtccagactcctcttcatcgccggtgccaagcagtccggcaatggcatccgccatcgaatgccactctccatatacaagccctgccgcacactggagttctccaggggcttcgccctatctgaagcagccacctgcgttgaccccaagttctaatccagcagctagcgccggactccattcttcaatgtcctcatactcactggagcaatcttatctgcatcagaatgctcgtgaagacctctcagttggactgccaaggtatcagcaccactcaacaccagtttgcgacagaaaagacttcgtgctgaactttaacggtatctcaagcttccacccctccgcttccggctcctattaccaccaccaccaccaatctgtatgccaggacattaagccctgtgttatgtag

SEQ ID NO: 223530 - DNA, 1470 bp, synthetic construct
  misc_feature 1..1470: note = Description of Artificial Sequence: Synthetic coding sequence
  source 1..1470: mol_type = other DNA
atgttggatatgggggataggaaggaagtgaagatgatccccaagtcctccttctccatcaacagtcttgttccggaagccgtgcagaatgacaaccaccacgcttctcacggacatcacaacagtcaccacccccagcaccaccaccaccaccaccaccaccaccatcatcctccacctcctgcaccacagccccctccgccaccccagcagcagcagccacccccacccccacctcccgcaccccagccaccccaaacgcggggagcaccagcagccgacgatgataaaggaccccaacagctgttgctgcccccacccccacctcctccacccgctgcagccctggatggtgccaaggcagacggcctcgggggtaagggcgaacctggcggaggaccaggcgaactcgcgcctgttggacctgacgaaaaagaaaagggggcaggcgcaggaggggaggaaaagaagggggctggggagggcggaaaggatggcgaaggcggaaaagagggtgagaagaagaatggtaagtatgagaagcctccctttagctataacgcacttatcatgatggccatccgtcagtcgccagagaagcggctgaccctaaatggcatctatgagtttattatgaaaaattttccttattatagagagaacaagcagggctggcagaactcaatcagacataatttaagccttaacaagtgctttgtgaaggtgcctagacactacgacgaccccggaaagggcaattattggatgctggacccatcaagtgatgatgttttcataggtggaaccacgggcaagctgagacggagatccaccacgagccgggctaaactagcatttaaacggggagccagacttacatccactggccttacgtttatggaccgcgcaggctccctgtactggccaatgagccccttcctgtccctccatcaccccagggcgagttctacactaagttataatggaaccacctccgcttaccctagtcacccaatgccctacagctctgttctcacccaaaactccctcggcaacaatcattctttttccacagctaacggcctctctgtggacaggctggtgaatggggagattccttatgccacacaccatctcaccgctgctgcattggcggcaagcgtcccctgtgggctcagcgtgccttgttctggcacctactctctaaacccctgcagcgttaacctgttagctggtcaaacgtcctactttttcccgcacgtgccccacccgagtatgaccagtcagagttcgacatccatgagtgccagagctgcgagcagctctacctccccacaggcgcctagcaccctgccctgtgagagcttacgcccatcattaccctccttcaccactggcctgtccggcggacttagtgactactttacccaccagaaccaggggagttccagcaatcctctaattcactag

SEQ ID NO: 223531 - DNA, 1470 bp, synthetic construct
  misc_feature 1..1470: note = Description of Artificial Sequence: Synthetic coding sequence
  source 1..1470: mol_type = other DNA
atgctagacatgggggatcggaaagaggttaagatgatcccaaagtcgtccttctccatcaacagcctggtgccggaagccgtgcagaacgacaatcaccacgcctcacacggccaccataacagtcaccacccccagcaccaccaccaccatcaccatcatcaccatcaccccccacctccggcaccacagccccctccccctccccagcaacagcagcctccacccccaccacctcctgccccacagccaccccagacacggggtgctcccgctgctgatgatgataaaggcccacagcagttattgctgcccccaccgccaccaccacctccagcagctgctctcgacggggcaaaggccgatggattgggaggaaaaggagagcccggtgggggtccaggggagttggccccagttggcccagatgagaaagagaagggcgctggggctgggggagaggagaagaagggggcaggagaaggagggaaagacggtgagggtgggaaggagggagaaaagaagaatgggaaatacgaaaaaccgcctttcagctataacgctctcatcatgatggcaatcaggcagtcccctgaaaagcgactcacactaaatggtatctatgagttcatcatgaagaacttcccgtattatagagaaaataagcagggctggcagaattccattagacacaacctgagccttaataagtgcttcgtcaaggtcccccgacactacgacgatccgggaaaagggaattactggatgctagacccatcttcggatgacgtatttatcggcggaacaactggtaagcttcgacgtagatcaaccacctccagggcaaagcttgcctttaagcggggagctcgtctgacaagtacagggctgacgtttatggatcgggctggatctctttactggcctatgagccccttcctgtccctgcaccatccacgggcaagttctacactgtcctacaacggtactacctccgcatacccatctcatcctatgccttacagctcggtgcttacccagaactcactgggtaataaccatagcttctccactgccaatggattgagtgttgatagactggtgaatggtgagatcccatatgccacccaccaccttacagccgcagctctggcggcaagcgtgccatgtggcctaagtgtgccttgtagtggcacctactcgctgaatccttgctcggtgaatctactggcaggccagacctcctatttttttccacatgtgcctcacccatccatgacatctcagagcagcaccagcatgagcgctagagcagcatcttcaagtactagcccccaagccccaagcacgctgccctgtgaatccctcagaccatctctccctagcttcacaacaggactgtccggaggccttagcgattacttcacacaccagaaccagggaagttcttccaacccgctgatacactag

SEQ ID NO: 223532 - DNA, 1137 bp, synthetic construct
  misc_feature 1..1137: note = Description of Artificial Sequence: Synthetic coding sequence
  source 1..1137: mol_type = other DNA
atgagctcttttgaccttcctgcaccatccccacctaggtgttcaccccagttccccagcatcggtcaggagccccctgagatgaacctgtactatgaaaattttttccatccccagggagtcccgtcccctcaaaggcctagcttcgaaggtggaggcgaatatggcgcaaccccaaatccctatctgtggttcaatggacctaccatgaccccacctccttacctgcccggacctaacgcctcgccattcttgccccaggcttacggtgttcaacgcccactgctcccatccgtaagcggactggggggatcagatcttggctggctgcctatcccctctcaggaagagctcatgaagctggttaggccaccttactcgtattccgccctgatagccatggcgattcacggcgcacccgacaagagactgacgttgtcacaaatataccagtacgtcgcggacaatttcccattttataacaagtccaaggctggatggcagaatagcatacgacataacctgtccttgaatgattgctttaaaaaggtgcctcgggacgaggacgatccgggaaaaggcaattattggacattggaccctaattgcgagaagatgttcgataatgggaacttcagaaggaagaggaagcgcaaatccgatgtgtcctcctctaccgcctcacttgctctggagaagaccgaaagttctttgcctgttgattcacctaagaccaccgaaccccaggatattttggacggtgcctctcccggtgggactacctcatctcccgaaaagcgaccgtctccgccacccagcggagctccttgcctcaatagctttctaagctctatgacagcctacgtctcagggggttcacctacaagtcatcctctggttacccctgggctctctcccgaaccatctgataagaccggtcaaaacagcttaactttcaatagctttagccccctgaccaatctttctaaccactccggtggcggagattgggccaaccctatgcccaccaacatgttaagttacggtggttccgtgttaagccagttctctccgcatttttacaatagcgtcaatacctctggcgtgctgtaccctcgcgaagggaccgaggtgtag

SEQ ID NO: 223533 - DNA, 852 bp, synthetic construct
  misc_feature 1..852: note = Description of Artificial Sequence: Synthetic coding sequence
  source 1..852: mol_type = other DNA
atgagcagttttgacctaccagctccaagcccccctcggtgtagcccccaattccctagcattgggcaggagccaccagaaatgaacctctactacgagaacttttttcatccgcagggcgtgccttcaccccagcgtccaagctttgagggtggtggggagtatggagctaccccaaacccatacctatggttcaacggccctacaatgaccccaccaccttatctgccgggtccaaatgcctcgcccttcctgcctcaggcctacggggtccaacgtccactgttgccatccgtctctggcctcgggggatctgacctgggttggctgcccatcccatcacaggaagaactgatgaaactggtgaggcccccttattcatattctgctcttattgccatggccattcatggagccccagacaagcggttaactctgagccagatctaccagtatgttgccgataactttcccttctataacaagtccaaagctggttggcagaatagcatccggcacaatctgagtctgaacgactgctttaagaaagtccctcgagacgaggatgaccctgcctacgtgtccggcggatcacctacatctcatcccttggttactccagggctaagcccagagcccagcgataagactggccagaattctctgacctttaactctttctctccactgactaacctgtccaaccacagcggcggaggcgactgggccaatcctatgcctactaatatgctgtcatatggagggtcagttcttagtcaattttccccccatttttataactccgttaatacatccggagtcttatatcctcgcgaaggaactgaagtctag

SEQ ID NO: 223534 - DNA, 1266 bp, synthetic construct
  misc_feature 1..1266: note = Description of Artificial Sequence: Synthetic coding sequence
  source 1..1266: mol_type = other DNA
atggctgagtcctggctccgcctctccggagccggtcctgctgaggaagccggacctgaaggaggtctcgaagaaccagatgccctcgatgactccctgacgtctttacaatggctgcaggaattctcaatcctgaacgccaaggctcccgctttgccccctggcggaactgatccccacggttatcaccaagtgccgggatctgccgcacccggtagcccccttgccgctgacccggcatgcctaggtcagccccatacacctggtaaacctacatcgtcctgcacatcacgttctgccccaccaggcttgcaagcccctcctcccgacgatgttgattacgccacgaatcctcatgtgaagcccccttactcttacgccacactgatctgcatggccatgcaagctagtaaggcaacaaagatcacactctccgccatctacaaatggattacagacaacttttgctacttccgtcacgcggacccaacctggcagaacagcatccgacacaacctctctctgaacaagtgcttcataaaggtgccacgggaaaaagacgaaccaggtaagggtgggttctggaggatcgatcctcagtatgccgagcggctgctctccggagcattcaagaaaaggcgcctcccaccagtgcacattcaccctgcatttgctcggcaggccgcacaggaaccatctgcggtccccagagctggcccactgactgtgaacacggaggcccagcagctcctgcgtgaatttgaggaggccaccggggaggcgggatggggcgcaggcgaaggccgacttggccacaagaggaaacagccactgcccaaacgcgttgctaaagtccctagaccgccttctacgttattgcccacccctgaggagcagggggagttggagcctctgaaagggaacttcgactgggaggctatcttcgatgccggtacactaggtggggagctgggagctttggaagcattggaactctcaccgcctctttcccccgcttctcacgttgacgtagaccttacgatacacgggaggcacattgattgtcccgcaacttgggggccatcagtcgagcaggctgccgattccctcgatttcgatgaaacattcctggctacaagctttctgcagcacccatgggacgagtctggaagcggctgcctgccaccagagccgctctttgaggccggagacgccaccttggcatctgacctccaggattgggcttctgtaggagccttcttgtag

SEQ ID NO: 223535 - DNA, 987 bp, synthetic construct
  misc_feature 1..987: note = Description of Artificial Sequence: Synthetic coding sequence
  source 1..987: mol_type = other DNA
atggctgcggctgcagccgcactcagcggagccggtacacccccagctgggggaggcgctggaggcggaggagctggagggggtggatcgcccccaggtgggtgggccgtggctcgtctggagggtcgggaattcgaatacctgatgaagaagcggagcgtgaccatcggtcgcaactcctcccagggcagtgtggacgtgagcatgggccacagtagctttataagtcggcgtcacctggagattttcactcctccagggggaggaggacatggaggagctgcccctgagttgcctccagcccaacctagaccagacgccggtggagacttctatctgcgctgcctcggcaaaaacggagtttttgtggatggcgtttttcagcggcgtggggcaccccctctgcaactgccacgtgtctgcacctttcgatttccaagcacaaatatcaagatcacctttacagctctaagctccgagaaaagggaaaagcaggaggcttcagagtctcctgtgaaagctgtgcagcctcacattagccctctgacaataaatataccagacactatggcccatctcatatccccactgcctagcccaactggaaccatcagcgccgcaaattcatgcccatcttcccctagaggtgccggatcgtcagggtacaaagtgggcagggtcatgcccagcgacttaaaccttatggcagacaactctcagccagaaaacgagaaagaggcaagtggtggtgacagtcccaaagacgattccaagcctccttactcctacgcccagctaattgtacaagcgattacgatggcccctgataagcagctcacattgaacggaatctacacccacatcacgaagaactacccatattacaggactgccgataaaggctggcagaggggcgagagctttgctcatgtgggaaatactcggatacggatcggcctgcctgctcacaaagcaccacagcgatag

SEQ ID NO: 223536 - DNA, 1983 bp, synthetic construct
  misc_feature 1..1983: note = Description of Artificial Sequence: Synthetic coding sequence
  source 1..1983: mol_type = other DNA
atggccgcagccgcagccgctcttagtggggcaggcacccctcccgcaggtgggggagccggaggaggtggggcaggcggtggcggtagtccccctggcggatgggccgtcgcccgtcttgaaggtcgagaattcgaatacctcatgaagaagcggtctgtcacaattggtaggaatagctcacagggatctgtcgatgttagtatgggacacagctccttcatctcaaggcgacacttagaaatattcacgccaccaggtggaggaggacacgggggtgcagctccagagctccccccagcacaaccccgtcccgacgcaggaggagatttctatctgcggtgcttggggaaaaacggcgtgtttgtcgacggcgtcttccaacggaggggcgcacccccactgcagctccccagagtttgcactttcagatttccaagcactaatataaagattactttcaccgccctgtcctcagaaaaaagagaaaaacaagaggcatctgagtctccagttaaggctgtgcaaccacatatctcccccttaacaatcaatataccagacacaatggcacacctgatctctccattgccatctcccaccggcaccatttccgcagctaacagttgtccctcctccccgagaggggcaggttctagcgggtataaggtgggccgtgtgatgccatcggatctaaatttgatggcagacaattcgcagccagaaaacgaaaaggaggcatccggaggggattcgcctaaagacgactcaaaacctccctatagctacgcccagctgattgtgcaggccataacaatggcgccagataaacagctgacgcttaacggcatctacacacacatcacaaagaactacccctattacagaaccgcggataagggttggcagaactccattcgtcataatctgtccctcaacagatattttatcaaagtccctcgctcacaggaggaaccaggaaaaggttctttctggcggatagatcccgctagtgaaagtaagctgatcgagcaggctttccgtaagcgacggccaagaggcgttccctgtttcaggacacctctgggccctctatcatcaagaagcgctcctgccagccccaaccacgccggagtgctgtccgcccattcatccggagcccagacaccggagtccctgagccgggagggatcccccgctccactggagccagaacccggtgccgcacagccaaaacttgccgtaatccaggaggctcggtttgcccagtcagcccctgggtcgccactgagctctcagccagtgctcattacagtgcaaagacaactgccacaggccataaaacccgtcacatatacagtcgcaacgcccgtgacaacttccacaagtcagcctcccgtggtccaaactgtgcatgtggtccaccagatcccagcagtatccgttacttccgtggccggtcttgctcccgcaaacacttacaccgtgagcgggcaggcagttgtcactcccgcagcagtgctcgctccaccgaaagcggaggcacaggagaatggtgaccatagggaagtgaaggtgaaggtcgagcccatacccgctatcgggcacgccacgctcggtacagccagccgaattatccagaccgcgcaaaccacccctgtgcagactgttaccatcgttcagcaggcacccttagggcagcatcagctccccatcaagaccgtgacacagaatggcactcatgtcgcatcagtgcctaccgccgtgcacggacaggtcaataacgcagccgcatccccactgcatatgttggccacccacgcctcggcttcagcctcgcttcccacaaaaaggcataacggcgatcaaccagagcagccagagttaaaacggatcaagaccgaggacggcgaagggatagtcattgcactgtccgtggatacacctcctgccgcagtaagagagaagggcgtgcagaactag

SEQ ID NO: 223537 - DNA, 1833 bp, synthetic construct
  misc_feature 1..1833: note = Description of Artificial Sequence: Synthetic coding sequence
  source 1..1833: mol_type = other DNA
atggccgctgccaggcgtgcattaggcgcaggcacaccccgagctagaggtaggggtcggggagcgggtggtggaggaagtcgtcgagcccttggaaggggagccccaggaggtccccgagtcagggtgagcgacgaggaagctctgggtgaccaccggccacagctggtcgcgggtctaggcggtcgcgaacacgggccactcgagctccatttgcctgcaccacccagggaccttcacgcaccgggaaggagggggcacggaggagcggcacctgagcttcccccagcccagcccagaccggatgctgggggagacttttatctcagatgtttgggtaaaaatggcgtgttcgtggatggcgtattccaaaggaggggcgcacctcccctgcaactgcccagagtatgcaccttccgttttcccagcaccaacataaaaatcacatttactgccctctcttccgagaagagggaaaaacaggaagccagtgagtccccagtcaaggctgtgcagccccacatttcccccctgaccataaacatccctgacacaatggctcaccttatttctcccttacccagcccaacggggactatctccgcggctaattcctgtccaagttcccctcgaggcgcaggcagcagtggttataaggtcggcagggtgatgcccagtgacctaaatctgatggctgacaattctcagccagagaatgagaaagaggcctctggaggcgactctcctaaggacgattctaagcctccctactcttacgcacaactcatcgttcaggccattacaatggctccggataagcaattgactctgaacggcatctacacacatatcactaaaaactatccttactatcggactgctgataagggttggcaaaattctatccggcacaacctgagtctgaaccggtactttattaaggtgccgaggtctcaggaagagcccggaaaggggagcttttggcgcatcgatccggcatccgagtcaaaactcattgagcaggcctttaggaaaaggcggcctaggggcgtcccttgttttagaacacccctcgggccactttcctcccgcagtgcccctgcctcacctaatcatgctggcgttctgagcgcgcattcaagtggcgctcagactccagaatctctttccagagagggaagtccggctccactcgagcccgagcctggggctgcacaacctaaactcgccgttattcaggaggcgagattcgcccagtctgctcccggatctccattgtcatctcagcccgtcctgataacagtgcaaagacaactgcctcaagctataaagcccgtgacatacacggtggcaacccctgtgacaacaagcacctcccagccccctgttgtacaaactgtgcatgtggtccatcagatccccgcagtgtcagtgactagtgtggcaggattggcacccgctaatacatacaccgtcagcgggcaggccgttgtaacacccgcagctgtgctcgcgccaccaaaggcagaggcccaagagaacggcgaccatagggaagtgaaggtgaaggtcgaaccaattcccgctattggtcacgctacactcggcacggccagccgtatcatccagacagcgcagaccactcctgtgcagactgttactatcgtccagcaggcaccacttggacagcaccaactacctatcaagacggttacacagaatggaacacacgtggcctctgtgcccacagctgtacatggccaggtgaacaatggacccctgggactgcgccgaccaccttgcgcatcatcagactggagttgtcttagctag

SEQ ID NO: 223538 - DNA, 1038 bp, synthetic construct
  misc_feature 1..1038: note = Description of Artificial Sequence: Synthetic coding sequence
  source 1..1038: mol_type = other DNA
atgtctcacctgtttgacccaaggttgcctgccttggcggctagtcctatgctttacctgtatggcccagagcgccctggccttcctttggcctttgccccagccgcagctttagccgcttccggcagggcagagacaccgcaaaagcctccatatagctacattgcactgatcgctatggcgatccaagacgccccagaacagagggtcactcttaacgggatctatcaattcatcatggataggttccctttttaccacgataaccgccagggttggcaaaattctatcaggcacaacctgtctctaaatgattgcttcgtgaaggtccctagggaaaagggtagacctggcaaaggtagctactggactctggacccaaggtgcctagacatgttcgagaatggcaattacaggaggagaaagcgcaagccgaaacctggcccaggagcgccagaagccaaacggccacgcgcagaaactcatcagcggtcagcggaggctcagcccgaggctggctctggtgcaggaggaagcggtcccgcaatcagcagactgcaagcggctccggcaggtccttcccctctcttggatggaccatctccccctgccccactgcattggcccggtacagccagcccgaatgaagacgctggagatgcagcccagggggctgccgctgtggcagtaggccaggcagccagaaccggcgacggacccggaagccctctccggccagcatctaggtcctcccccaaatccagcgataagtccaagagcttttccattgattctatcttagccggtaagcagggacaaaaacctccctccggggacgagcttctgggcggagctaagccaggtccaggcggtcggctcggcgcaagtctgcttgcagcttcttcttcgttgcggccaccatttaacgcatctcttatgctcgatccccacgtgcaaggaggcttttatcaattaggaatcccttttttaagctactttcctttgcaggtacccgataccgtgcttcatttccagtag

SEQ ID NO: 223539 - DNA, 1131 bp, synthetic construct
  misc_feature 1..1131: note = Description of Artificial Sequence: Synthetic coding sequence
  source 1..1131: mol_type = other DNA
atgatggcctcctaccccgagccagaagacgcggcaggagcgctactcgcacccgaaactggaagaacagttaaggaacccgagggccctccacccagcccgggaaagggaggaggtgggggaggcggtacagccccagaaaaaccagatccagcacagaaacctccgtattcgtatgtggcactgattgctatggcaataagggaaagtgcagagaagcgcctgactttatcagggatatatcagtacataatcgcgaaatttcccttctacgagaagaataagaagggatggcagaatagcattagacacaatctcagcctgaacgaatgcttcattaaagtccccagagaaggaggcggagaaaggaaaggaaattactggacactggatccagcatgtgaagacatgttcgaaaagggtaattataggcgtagaaggagaatgaagcgccctttcagaccccctcctgcacacttccagcccggaaaggggctttttggcgcaggcggagccgcaggaggctgtggggtggccggagccggtgccgatggatacgggtacttagcacctcctaagtacctgcagagcggctttctgaataactcctggcctctgcctcagcctccgtccccaatgccttacgcctcatgccagatggccgctgccgctgcagcggctgcagctgcagctgcagcagctgggcctgggtcccccggtgcagccgctgtggtgaaaggcctcgctgggccagccgcttcatacgggccatacactcgcgttcagtcaatggcactgcctcctggcgtagtgaattcatacaacggcttgggcggaccacccgcagccccaccccctcccccacacccccatcctcatccacatgcgcaccatctacacgctgcggctgccccaccccctgcccctccgcaccatggcgctgccgctccacccccaggccagctaagtcccgctagtcccgctaccgcagctcccccagccccagccccaacgagtgcccctgggctgcagtttgcatgcgccaggcagccggagctggcaatgatgcattgctcatactgggaccacgactcaaagactggagcccttcatagtcgactggatctctag

SEQ ID NO: 223540 - DNA, 810 bp, synthetic construct
  misc_feature 1..810: note = Description of Artificial Sequence: Synthetic coding sequence
  source 1..810: mol_type = other DNA
atgatggcctcttaccccgagcccgaggatgcagctggtgcactgttagcccctgagactggaaggacagtcaaagaacccgaaggcccacccccttctccagggaaggggggaggcggtggcggtggcacagctccagagaaaccagaccccgctcagaagcccccatactcttatgtagcactgattgcaatggcaattcgggagtccgcggaaaaacgtctaactctcagcgggatctatcagtatatcatagcaaaattccctttctatgagaaaaataaaaagggctggcaaaatagtatcaggcataatctatccctgaatgaatgttttataaaagtcccgagggaggggggaggggagaggaaggggaactattggaccctggacccggcatgtgaagacatgtttgaaaagggtaattataggcgtagaagaagaatgaagcggcctttcagacctcctcctgcacacttccagcccggtaaagggctgtttggcgctggcggtgcggcaggcggttgcggggtcgcaggggcaggcgcagacgggtacgggtatctcgccccacccaaatacctgcagtccgggtttctgaataactcatggccacttccccagccaccatctcccatgccctatgcgtcatgccagatggcagcagctgccgcagcagctgctgccgctgctgctgctgctggtcccggatcccttgctcgccctctgtggtccagaggttggagggcccgtccccctcgcacgggaagaacccacgcatgtcgagcctggcggtgtcccccagcctag

SEQ ID NO: 223541 - DNA, 2406 bp, synthetic construct
  misc_feature 1..2406: note = Description of Artificial Sequence: Synthetic coding sequence
  source 1..2406: mol_type = other DNA
atgaaaacctcccccaggcggcctctgattctcaaaaggcgccgactgccactgcctgtgcagaacgcgccttcagagacatcagaggaggaacccaagcgttcaccggctcagcaggagtccaatcaagccgaagcttcgaaggaggtcgccgagtccaactcctgcaagttcccggctgggatcaaaataatcaaccatccaactatgccaaatactcaggtcgttgcgattcccaacaatgctaatatacacagtatcataaccgcccttaccgccaagggcaaagaatccggatccagtggaccaaataagtttattctcatctcttgcggcggagccccaacgcagcccccagggttgagaccacaaacccagacaagttatgacgctaagagaactgaagtgacgctggagacgttaggcccaaagcctgcagcacgggacgtcaatctccccaggcctcccggtgcactctgcgagcagaaacgggagacgtgcgccgatggggaagcagctggctgtaccatcaataacagtttgtctaatattcagtggctccggaagatgagtagcgatgggctgggatctcggtcaataaagcaggaaatggaggagaaggagaattgtcaccttgagcaacgacaggtgaaggtggaagaacctagtcggccatctgcatcatggcagaattcagtcagtgagcggcctccgtattcatatatggccatgatacaattcgctatcaactccacggagcggaagcgcatgactcttaaggacatctatacatggattgaggaccactttccgtacttcaagcacatcgcaaagcccggatggaaaaactcgattaggcacaacctctctctgcatgacatgtttgtgagagagacaagcgccaacggaaaggtctctttttggacgatccacccttctgctaaccgatatttgaccctggatcaggttttcaagccgctcgacccaggttctccacagcttcccgagcatctagagtcgcaacagaagcgaccaaaccctgagttgcgcaggaatatgacaatcaaaacagagctccccctgggcgctcgaaggaagatgaagccacttttgccccgagtgtctagttatctagtgcccatccaattcccagtaaaccagtcacttgtgttgcagccttccgtcaaggtccctcttcctcttgccgcatctcttatgagctccgaactagcgcgacatagcaagagagtgcgcatcgcccctaaggtatttggtgaacaggttgtattcggatatatgtctaagttctttagtggcgatctccgggacttcgggacacccataacatctctgtttaatttcatttttctgtgtctcagcgtgctgctagcagaagaagggatcgctcctttgtcttctgccggtcccggaaaggaggagaagctcctctttggtgaaggattctctcccttgttacctgtgcaaacgatcaaggaggaggagatccagccaggcgaggaaatgccacatctagctcgacccattaaagtggaatccccccctctggaagaatggccatcacctgccccatcttttaaagaagaaagttcccatagctgggaagatagctctcagtctccaacgccacgacctaagaaaagttacagcggcctccgaagcccaaccagatgcgtgagcgaaatgttggtgatccaacacagggagcgacgggaacggtcccggtccagaagaaagcagcatctgctgcccccatgcgttgacgagcctgagctcttattctcagagggcccatccacttcccggtgggccgctgaactaccattccctgccgattctagtgaccctgccagtcagctgtcttattcccaggaagtgggagggccatttaagaccccgatcaaagaaacgctcccgatcagcagcaccccctctaagagtgtcctgcctaggacaccagagtcctggcggctaaccccacctgctaaagtgggaggcttagattttagtcccgtccagacgtctcaaggcgcttctgaccctctccccgatccattgggcctgatggatctgtccacaacccccctgcagagcgctccacctttggagagcccgcagcggttactgtcttccgagcccctcgatctcataagtgtgccctttggtaactcttcccccagcgatatcgatgtgcctaaacccggttctcctgagccccaagtctcgggtctggctgcgaatcgctccctgaccgagggactggtgctcgacaccatgaacgacagcctttccaagattttgctcgacatttcattcccagggctcgacgaggacccgttagggccagacaatatcaattggagccagttcataccagagcttcaatag

SEQ ID NO: 223542 - DNA, 2292 bp, synthetic construct
  misc_feature 1..2292: note = Description of Artificial Sequence: Synthetic coding sequence
  source 1..2292: mol_type = other DNA
atgaaaacatcccccagaaggccccttatcctaaaacggagacggcttcccctgcccgtgcaaaatgcgccttctgaaacgtctgaggaggagcctaaaagatcccctgcacagcaggaaagcaatcaggctgaggcatccaaggaggtagctgaatctaactcttgcaaatttcccgcaggaattaaaatcatcaaccacccgacaatgccaaatacacaggtagtcgccattcccaataatgcaaatattcactctatcattaccgccttgacagctaaaggaaaggaaagcggctcttccggcccaaacaaattcatacttatctcctgtggaggtgccccaactcagcctcccggattgaggccccaaacccagacttcctatgatgcgaaacgcaccgaagtgacattagaaacactgggtcctaagccagctgcgagggatgtcaatctgccaagaccgcctggggcactgtgcgagcagaagagagaaacctgcgcggacggtgaggcagcaggctgcacaattaacaattccctcagtaacattcagtggttgcggaagatgagtagtgatggtctcggctctcggtcaattaagcaggaaatggaagaaaaagaaaactgccacttggagcagcgacaagttaaggtcgaggaaccctcaagacctagcgcctcatggcagaattccgtttcagaaaggcccccatatagctatatggcaatgatccagttcgctataaactctacggagcgcaaaagaatgaccctaaaggacatttacacttggatcgaggatcatttcccctactttaagcatatcgcaaaacccggatggaaaaattcaatcaggcacaacttgtccctgcatgacatgtttgttcgggagacgtcagctaatggtaaggtgtccttttggaccattcatccaagcgcaaataggtacttgacacttgaccaagtgttcaaacccctggaccctggttcacctcagctcccagagcacttagaatctcagcagaagcgtcccaatcccgagctgcgtaggaacatgacaatcaagacggaactgccgctgggtgccaggcgcaagatgaagcctctgctcccgagagttagctcctacctggtgcccattcaattccccgttaatcagagtctggtgctgcaaccaagcgtcaaggtacccttgcccttggccgcttcgctcatgagcagcgagctggccaggcactccaaacgcgtcaggatcgccccaaaggttctattagctgaggagggtattgcacccctgagtagcgccggacccggtaaagaagagaagttgctgtttggcgagggcttttcgcctcttctgcctgttcagacgattaaagaggaggaaatacagcccggtgaagaaatgccacacctagcgaggcctatcaaggttgagagcccgccacttgaagaatggccctctcctgccccttcctttaaggaggagagcagccactcctgggaggacagcagtcagtcaccgactccacggccaaaaaagtcatacagcggtctcagatctcccaccaggtgcgtttctgagatgctcgtcatccagcatcgtgaacgaagggaaagatcgcggagcaggagaaaacaacatctgctgcctccatgcgtcgacgaacctgaactgcttttttctgaaggcccaagcacttcaagatgggctgcagaactgccatttcccgcagattccagcgacccggcatctcagctgtcctacagtcaggaggttggcggtccatttaaaactcccataaaagagacccttcccatcagtagcaccccatctaaatctgttctgcctcgcaccccggaatcctggagacttacccccccagccaaagtgggaggtctggatttcagccccgtccaaacaagccagggtgcaagcgatcccctgcctgacccattagggctcatggacctgagcaccactccgcttcagtccgcccctcctctggaatccccacagaggctgctctcatccgaacctttggatcttatttctgttccgtttggtaatagcagtccatcggacatagatgttcccaagccaggatccccagaaccacaggtaagtggactggccgctaaccgttctcttactgagggcctggtgctggatacaatgaacgatagtctctcaaagatcctgttagatataagttttcctggcctcgatgaagacccactgggccctgacaatatcaactggtcacagtttatccctgagttgcaatag

SEQ ID NO: 223543 - DNA, 2247 bp, synthetic construct
  misc_feature 1..2247: note = Description of Artificial Sequence: Synthetic coding sequence
  source 1..2247: mol_type = other DNA
atgaaaacttcacctcggaggccactcatcttgaaacgacgaagactgcccctaccggttcagaatgccccaagcgagacctccgaagaagaaccgaaacgctctcccgctcaacaggagagcaatcaggccgaggcttcaaaggaggtggctgagtccaattcttgcaagttccccgctggtatcaagatcattaaccacccgaccatgccaaatacccaggtggtagctattcctaataacgcaaacattcactctattatcacagccctgaccgccaagggcaaggaaagtggaagttccggcccaaacaaatttattctgatctcttgcggcggtgcccctactcagcccccaggcctgaggccccagacacagaccagctatgacgcaaaacggaccgaggtgacattagaaaccctgggccctaaaccggcagccagagacgttaacttgccacgcccaccaggggcactgtgcgagcagaaacgggaaacctgcgctgacggcgaggcggctggctgtacaataaacaactctctctcgaacatccaatggctgcggaagatgtcaagcgatgggttgggttccagatcaatcaagcaggaaatggaagaaaaagaaaactgccatttagagcagcgacaggtcaaggtcgaagagcctagccggccatccgcttcttggcagaactctgtgtccgaaagacccccttattcctatatggccatgattcaattcgcgatcaactctaccgagcgcaaacggatgactttgaaggatatttatacctggattgaagaccacttcccatactttaagcatatagctaaaccagggtggaaaaatagtatacgccacaatctatccctgcacgatatgtttgtccgggagacgtctgctaacgggaaagtgagcttttggacaatccacccaagcgctaatcgttatcttaccttagatcaggtgtttaagcagcaaaaaagacctaatcccgagttacggagaaacatgactattaaaactgagctcccactaggagccagacgcaagatgaagcccctcctcccccgagtctctagctatttggtacccatccagttccctgtgaatcaatcactggtgctgcaaccctcggtcaaagttcctctaccactggctgcttccctgatgagctcagaactcgcccgacactcaaagcgcgtcaggatcgccccaaaagtcctcctcgctgaggagggtattgcacctctgtcctccgctggtcccggtaaggaagagaaactgctctttggggaaggtttcagtcctctgctgccggtgcaaactattaaagaggaggaaatacagccgggagaggaaatgcctcacctggcccgacctattaaggtggagtctccacctctggaagagtggccgtccccagctccgtcttttaaagaagagtcaagccattcatgggaagatagctcccagagtccgactcccagaccaaaaaagtcatactcaggcctgaggtcgcccaccagatgtgtctccgaaatgcttgtgattcagcatagggagcgcagggagcggagcagaagtcggagaaagcagcacctacttccaccctgtgtagacgaacctgaactgcttttcagtgaaggccctagcaccagtaggtgggcagccgaactgcccttccccgcagactcctcagacccagcaagtcagctctcatacagtcaagaggtggggggtccattcaagacccccatcaaggaaaccctgcctatatcatcgactcctagcaaatctgttttaccgcgaactcctgaatcctggaggctcacaccgccagctaaagtaggcggactggactttagtccagtgcaaaccagccagggcgcttcagatccactgcctgaccccctgggcctaatggatctgagtacaaccccactccaaagcgcacccccacttgagtcaccccagaggttgttatcatcagagccacttgaccttatctcagtgcccttcgggaatagctccccctccgatatcgacgttccaaagcctgggagccccgagccccaggtttctggattggccgctaaccgaagtctcacagaaggacttgtcctggacactatgaatgatagcctctctaagattctcctggatatcagctttcccggactggacgaagatccactgggaccagacaacataaactggagccaatttatccccgaattacagtag

SEQ ID NO: 223544 - DNA, 531 bp, synthetic construct
  misc_feature 1..531: note = Description of Artificial Sequence: Synthetic coding sequence
  source 1..531: mol_type = other DNA
atgggggctcccgcaacaagacggtgtgttgagtggcttttaggactgtacttcctaagccacatcccaattacacttttcatggacctgcaggctgtcctgccaagggaactctaccccgttgagttccggaatctgctcaaatggtacgcaaaagagtttaaagatccattgctgcaggagccaccagcatggtttaagtccttcttattttgtgaattagtgttccagctgccatttttccctatcgccacttatgctttcctcaaaggtagttgtaaatggatcagaaccccagctattatatacagtgttcatacaatgacaacgctcatccccattctgtctacattcttgttcgaagatttcagcaaggcctcagggtttaaaggccagagacccgaaacactgcacgagcgtctcaccttagtgagcgtgtatgctccttaccttctcatccccttcatcttactaatctttatgctccgtagcccttactataagtatgaggagaagcgcaagaaaaagtag

SEQ ID NO: 223545 - DNA, 1473 bp, synthetic construct
  misc_feature 1..1473: note = Description of Artificial Sequence: Synthetic coding sequence
  source 1..1473: mol_type = other DNA
atggggccagtgatgcccccttctaagaaaccagaatcctccggaatttcagtatccagcggcttaagtcagtgttatggaggaagtggctttagtaaagcgctgcaagaggacgacgacctcgatttttcccttccggacattaggctggaggaaggggctatggaggacgaggagctgacaaatctgaattggctgcatgaatcaaagaatctgttaaaaagctttggagagagcgtactcagatcagtaagtcccgttcaagatctagacgacgatactccgccaagccctgcgcacagcgacatgccttatgacgcccgtcaaaatcccaactgcaaaccaccctattccttttcttgtctcattttcatggcaatagaggacagccccactaaaaggttacctgtcaaggatatctataattggattctggaacacttcccttactttgccaatgcgccaaccggctggaagaacagcgtgcgccataatctcagcctcaacaaatgttttaaaaaggtggataaggagaggtcccagagcatcggcaaaggctccctgtggtgtatagatcctgagtacagacagaatctaatccaggccctaaaaaagacgccataccacccccacccccacgttttcaacaccccacctacgtgtccccaagcttaccagtccacgtccggccctccaatttggcctgggtccaccttttttaagagaaatggggcattgctccaagaccctgatattgatgcggcaagcgctatgatgctgctgaacacaccgccagagattcaggctggtttcccccctggcgtcattcagaatggagccagggtcctctccagaggactgttccctggcgtgagaccattgccaataacgccaattggggttactgcagccatgaggaatggcataacatcatgtcgcatgcggacagaatcggaaccctcatgtggtagccctgtggtaagtggtgaccccaaggaggatcacaactattcctcagctaagtcgtcaaatgcaaggtccacctccccgaccagtgattctatctcgtcctcttcatccagcgcggacgatcactatgaattcgccaccaagggcagccaggaaggctctgaaggcagcgaggggtctttccggagtcacgaatcaccgtctgatacagaagaagatgatcgcaaacactcacagaaggagccgaaggatagcctgggggattctggctacgctagccagcacaagaagcgtcagcactttgccaaggccagaaaggttccttctgacaccctcccactcaaaaagcggagaaccgagaaacctcctgagagcgatgacgaagaaatgaaagaagccgcagggtcgttgctacacctggcaggcatccgtagttgtcttaataacatcaccaaccgcactgctaaggggcagaaagagcagaaggaaacaacaaagaattag

SEQ ID NO: 223546 - DNA, 1473 bp, synthetic construct
  misc_feature 1..1473: note = Description of Artificial Sequence: Synthetic coding sequence
  source 1..1473: mol_type = other DNA
atgggccctgtaatgccaccctctaaaaaaccggaaagctccggcatctcagtctcttccggactctcacagtgttacggaggcagcggatttagtaaggccttacaagaagacgacgaccttgatttttcactgccagacatccgcttagaggagggcgctatggaggacgaagaattaactaacttaaattggctgcacgaatccaagaacctcctcaaatccttcggagaatcagtcctaagaagtgtcagcccggtgcaggacttagacgatgacacccccccaagcccggcacactccgacatgccgtatgatgccagacagaatccaaactgtaagccaccctactccttttcatgtcttatctttatggccattgaggattcgcctacaaaacgcttacccgtgaaggatatatataactggattctggagcacttcccctacttcgctaacgctccaactggctggaagaattcagtgcgccacaatctgtcactgaacaaatgtttcaagaaagtcgacaaggaaagaagtcagtccataggaaaagggtctctgtggtgcatcgatcctgaatatcgacaaaacctgatccaggcccttaagaaaaccccctatcatccgcacccacatgtctttaatacgccaccaacatgtcctcaggcttatcagagcacatccgggcctccaatatggccagggtcaacctttttcaagcggaacggggctctcttgcaggatccagacatcgacgcagcatcagcaatgatgctacttaacactcctcctgagatacaagctggcttccctcccggagtgatccagaacggggcacgggtcctaagccgtggactgttccccggtgtgcgtcccctcccaattactccaatcggggtgactgctgccatgcgaaatggtataacaagctgccggatgcggacggagtccgaaccctcatgcggatcccccgtggtgagtggggatcctaaggaagatcataattactcctctgctaaatcctcaaacgcccgttccacaagtcccacatctgacagcatttcttcatcaagctcatcagccgacgaccactatgagttcgccactaagggatcacaggaggggtcagagggttcagaaggatcatttagatcacatgaatctccgtcagatactgaggaagatgatcgaaagcatagtcagaaggaaccaaaagatagcttgggtgattcagggtatgcctctcagcataagaaaaggcagcacttcgccaaagctagaaaggtgccatccgatacactgccattgaaaaagaggaggactgagaaaccaccagagagcgacgacgaggaaatgaaggaagcagccggatctctgcttcacctcgctggtatcagaagttgcttgaacaacattacaaataggacggcaaaggggcaaaaagaacagaaggagacaacaaaaaactag

SEQ ID NO: 223547 - DNA, 165 bp, synthetic construct
  misc_feature 1..165: note = Description of Artificial Sequence: Synthetic coding sequence
  source 1..165: mol_type = other DNA
atggggcctgtaatgcctcccagcaagaagcctgaaagtagcgggattagcgtgagctcaggcctgagccaatgctatggcggtagcggctttagcaaggccctgcaggaggacgatgatttggatttcagcttgcctgatattcgcctcgaagaaggggcatag

SEQ ID NO: 223548 - DNA, 282 bp, synthetic construct
  misc_feature 1..282: note = Description of Artificial Sequence: Synthetic coding sequence
  source 1..282: mol_type = other DNA
atgggcccagtcatgccgcctagcaaaaagcccgaaagttccggaatatccgtgtctagtggcctgagccagtgttacgggggaagcggcttcagtaaggcactccaggaggacgatgatctcgacttcagcttacctgatatccggcttgaggagggcgcaatggaggacgaggagctcaccaatcttaattggctccatgagtcaaagaacttgcttaagagttttggcgagagtgtgttacggtcagtgtcccctgtgcaggatctcgatgacgattag

SEQ ID NO: 223549 - DNA, 1407 bp, synthetic construct
  misc_feature 1..1407: note = Description of Artificial Sequence: Synthetic coding sequence
  source 1..1407: mol_type = other DNA
atgggaccagtcatgcctcctagtaaaaagcctgagtctagtggcatctcagtctcgagtggactgtctcagtgttatggcggttctggattctcaaaagcactacaggaggacgacgatctggattttagcctccccgatattagattagaagagggagccatggaggacgaagagttgacgaacctgaattggcttcatgagagcaagaacctactgaagtcctttggggagagcgtcttgcggtccgtgagtcccgtgcaggacctcgacgacgacacacccccatctcccgcacactctgatatgccctatgacgccagacaaaatccgaactgcaagccgccatattcctttagttgcctgatttttatggcaatcgaagacagtcccacaaagcgtctgccagtcaaagacatatacaactggattctggaacactttccttacttcgccaacgcacccacaggttggaagaattcggtgaggcacaatctgtcactcaataaatgtttcaagaaggtcgacaaagaacgctcacagtctattggaaaaggatccctgtggtgtattgatccagaataccggcaaaatcttattcaggccctcaagaaaaccccataccacccacatcctcatgtgttcaatacgccacctacttgccctcaagcctaccagtctacatccggaccaccgatctggcctgggtctaccttcttcaaacggaatggggcactactgcaggttccgccaggtgtgatccaaaacggcgctagagtgttgtctcgtggccttttccccggagttaggccacttccaataactcctataggcgttaccgccgcaatgagaaatggtatcacctcgtgccggatgcgaaccgagtcagaaccctcctgcggatccccggtcgtgagcggggaccctaaggaagatcacaattactcatcagccaaatcatccaatgccaggtctactagtcctacatcagactcgatctcttcctcgtcatcctctgccgatgaccactacgagtttgcaaccaagggtagccaagaggggtctgagggcagcgaaggaagcttccgcagccatgagtctcccagcgacaccgaggaggacgataggaagcatagtcaaaaagagccgaaggattccctgggcgatagtgggtatgcctcacaacataaaaaacgtcagcacttcgctaaggcacgcaaagtgccttccgacactttgcccctcaagaagagaagaaccgagaaacccccagagtccgacgatgaggagatgaaggaggctgctggcagcctgttgcacctcgccggtatccgctcctgtctcaataatatcacgaacagaacagccaagggacagaaagaacaaaaggaaacaaccaagaattag

SEQ ID NO: 223550 - DNA, 627 bp, synthetic construct
  misc_feature 1..627: note = Description of Artificial Sequence: Synthetic coding sequence
  source 1..627: mol_type = other DNA
atgggtcctgtcatgcccccatccaagaagcctgaatcatccggaatcagtgtgagctccggactgagtcagtgttacggtggctccggattttcaaaggccctccaggaagacgatgatctggatttctcactgcccgacatcagattggaggagggcgcaatggaagatgaagaactgacaaacttgaattggctgcatgagtctaagaatctcctaaagagctttggagaaagcgtgcttcggagcgtgtccccagtccaggatctcgatgacgacaccccaccctcaccagcccacagcgacatgccatacgacgcccgacaaaatcctaactgcaaacccccatactccttctcctgcctgatatttatggccatagaggactcaccaaccaagagattacctgtgaaggacatttacaattggatcttagagcacttcccctatttcgctaatgccccaaccggttggaaaaattcagttaggcataatctctccctgaataagtgtttcaaaaaggtcgataaggagagatcacagtcgataggcaagggctcattgtggtgtatcgatcccgagtaccgacagaacttgatacaagctcttaaaaagactccctattag

SEQ ID NO: 223551 - DNA, 1407 bp, synthetic construct
  misc_feature 1..1407: note = Description of Artificial Sequence: Synthetic coding sequence
  source 1..1407: mol_type = other DNA
atgggtcccgtgatgcccccaagcaaaaagccagagtcttcaggcattagtgtgagcagtgggctgtctcagtgttatggcggatccgggttttccaaggccctccaggaagacgacgatctggatttttccctgcctgatatcaggcttgaggagggtgcaatggaggacgaggaactgactaatctgaattggctgcacgaatcaaaaaacctgctgaaatccttcggcgaaagcgtccttcgctctgtttcccccgtgcaggaccttgatgatgacaccccccctagccctgctcactcggacatgccctatgatgcgagacagaatcctaattgcaaacccccatactccttttcatgtctcatcttcatggcaattgaggattcccccaccaaacgtctgcccgtgaaagacatttataactggatcttggagcactttccttatttcgcaaatgccccaacaggttggaaaaacagtgtcagacacaacctgagtctaaataagtgcttcaagaaggtggataaggagaggagtcaatcaatcggaaaaggctcactgtggtgtatcgatccagagtacagacaaaatcttatccaagcactcaagaagacaccgtaccatcctcacccccacgttttcaatacgcctcctacctgcccgcaagcctatcagtctacaagcgggccaccaatctggcctggcagcaccttttttaaaagaaatggagcactcctccaggtgcccccaggggtgattcagaacggtgcaagggttctttcaaggggcttgttcccaggtgtgcgacctttacctattacgccgattggggttaccgccgcaatgaggaacggaatcacatcttgtagaatgcgaaccgaaagtgagccatcctgcggatctccagtagtaagtggggatccgaaagaagaccacaactattcctccgccaagtcttccaacgcacgcagcacttcaccaacatcagactcaatatcctcatcctcctcaagcgccgatgatcactatgagtttgctactaaggggtctcaggaaggctctgaaggcagcgagggcagtttcaggagccacgagtcacccagcgataccgaagaggacgatcgcaaacattcccagaaagaaccaaaggacagcctgggtgattccgggtacgcttcccagcacaagaagcggcagcacttcgctaaggcacgcaaggtgccatcggacactttgcctctgaagaaaagaaggacagagaaacccccagaatccgatgacgaggagatgaaagaggctgcagggagccttctgcacctcgccggaatccgcagctgcctgaacaatatcacaaaccggacggccaaaggacaaaaagagcaaaaggagaccaccaaaaattag

SEQ ID NO: 223552 - DNA, 777 bp, synthetic construct
  misc_feature 1..777: note = Description of Artificial Sequence: Synthetic coding sequence
  source 1..777: mol_type = other DNA
atgattgaatctgacaccagctctatcatgtcggggatcattcggaattctgggcaaaatcatcacccaagcccacaggagtaccggcttctggcgaccacatctgacgacgatctccccggagacctgcagtctctgtcatggttgaccgctgtggacgttcctcgcttgcagcagatggctagcggcagagtcgatctcggaggtccctgcgttcctcacccgcatccaggggcactggctggcgttgcagatctgcacgtgggggctacgccatctccgctgctgcatggcccagccggaatggcaccccgtggtatgccaggcctgggacccatcacaggacaccgcgatagccaaatgagccagttccccgtgggcggacagccctcttcaggcctccaagatcccccacatctttattcccctgccacacagccgcaatttcccctgccgccaggcgctcaacaattgtcagatagacatgggcctgaggagcagcaggatcgccaaccagcgtgcgagcgggacctgcagctccacgagggggctctgcctctgttgcaggacggccctaggcgtgtagaggagctgggggctgcacagcccgtctccgagcaggttctgcgggaggggggtgagcaggacgagaggctactaccacagggactccctgttggtagcgagccaggaccacatcgacaggacggcggaggggatgcccaggtggaggaagagggccctggttgtcatccaccggaatatggacagccatag

SEQ ID NO: 223553 - DNA, 1554 bp, synthetic construct
  misc_feature 1..1554: note = Description of Artificial Sequence: Synthetic coding sequence
  source 1..1554: mol_type = other DNA
atgattgagtccgacacttcctctatcatgagcggaattatccgcaatagcggacagaaccatcatccaagtcctcaggaatatcgcctgctggctacgacatccgacgatgacctcccaggcgacctccagagcctgtcatggctcactgcagttgacgtgccccgactgcagcagatggctagcggaagagtcgatctcgggggaccctgcgtgccgcatccccatcccggagcgctggccggagtggccgacctgcatgtgggagccacgccctcccctctactgcacggcccagcaggaatggctcctcgtggaatgcccggactgggtccaatcactggtcaccgggactcaatgtctcaatttcctgttggcggtcagcccagcagcggtctgcaggacccaccacatttgtacagccctgcaacgcaaccgcagtttccccttcccccaggtgcgcagcaatgtcctcctgttggactgtacgggccacccttcggggttaggcctccctacccacagccacacgttgctgtgcattcatcccaggaactgcacccaaagcactacccgaagcctatctattcctattcctgcctcatagccatggctctgaagaactctaagactggcagtctcccggtctccgaaatctattcattcatgaaggaacacttcccttactttaagaccgccccagatggctggaaaaacagcgtgagacacaacctgagtcttaataagtgcttcgagaaagtagaaaataagatgtccgggagtagccgcaaggggtgcctctgggccctgaatctagcacgtattgataagatggaggaggagatgcataagtggaagagaaaggacctggccgcaattcacaggagtatggcaaacccagaagagctagacaagctgatctctgaccgaccagaatcatgtcgcaggcctggcaagccaggcgagcccgaggcaccagtacttactcacgccacgacggtcgccgtggcacacggttgtttggccgtctctcagcttcccccacagccccttatgacgttgtccctccaatccgttcctttgcaccatcaagttcagcctcaggcccacctagctcctgatagccctgcacctgctcagacacctcccctgcacgccctcccagacctgtccccaagtcccctgccgcaccccgctatgggcagggcgccagtcgattttattaatattagcaccgacatgaatacggaggttgacgccctggatccttcaattatggactttgctctgcaggggaatttgtgggaggagatgaaggacgagggtttctccttagacaccctgggtgcattcgcagactctcccctaggctgtgatctgggagcctccggccttacaccagcctcaggaggttcagatcaatcctttccggatctccaggttactggtctctatacggcgtacagtacgcccgactccgtagctgccagtggaacttctagcagcagccagtacctgggggcacaaggaaataagcccatcgcattgctatag

SEQ ID NO: 223554 - DNA, 1014 bp, synthetic construct
  misc_feature 1..1014: note = Description of Artificial Sequence: Synthetic coding sequence
  source 1..1014: mol_type = other DNA
atgcctggactaccgtgtcccgctcttccttgtcccgctccaccgccagcccctagctgcctaatcgccatggcccttaaaaacagtaagacaggcagcttacctgtttcagagatctacagcttcatgaaggagcatttcccgtatttcaagaccgcccctgacggctggaagaactctgtacgtcataatctgagcctcaacaagtgtttcgagaaggtggagaataagatgagtgggtcctctcgaaagggatgcctctgggcccttaacctggcccgtatcgataagatggaagaggaaatgcacaagtggaaaagaaaagatctggccgcaatacaccgaagtatggctaatccggaagagctggacaagctgattagtgataggccggaatcctgtcgaaggcccggaaagcccggtgaaccagaggctcctgtgctcacccacgccactactgtagccgttgcccacgggtgcctggcggttagccaactgcccccacaacccttgatgaccctttccctacagagtgtgcctctgcaccatcaggtgcagccgcaggctcatctggcccctgattctcctgcgccagcccagaccccgcctctgcatgcccttccggaccttagtccaagcccactgcctcaccctgctatgggccgagcacctgtggatttcatcaacattagcaccgatatgaatacggaagttgatgcactcgatccttcaattatggacttcgcgttgcaggggaatctctgggaagagatgaaggatgaggggttctccctggatacattgggcgcatttgcagattcgcccctgggatgcgatctcggcgcatcaggcctgaccccagcctcaggtggatctgatcaatcgtttccagacctgcaggtcacaggactctacaccgcttacagcacgcctgactctgttgccgcatccggaacctcctcgtcctcacaatatctgggggctcaggggaataaacctattgcgctgttgtag

SEQ ID NO: 223555 - DNA, 1680 bp, synthetic construct
  misc_feature 1..1680: note = Description of Artificial Sequence: Synthetic coding sequence
  source 1..1680: mol_type = other DNA
atggccgcaaaacttagagcccaccaggtcgatgtggaccccgactttgcaccccaaagtaggccccgatcctgtacatggcccctgcctcaaccagacttggcgggtgatgaggacggtgccctgggcgctggggtggcagagggagctgaagattgtggtcccgagagaagagcaacagcgccagctatggccccagctccacccctgggagcagaggtgggtcccctgaggaaagcaaaaagctcgaggcggaacgcctggggtaatctgtcatacgctgatctgataactaaggctatagagagcgccccagataagcgacttacactgtcccaaatctacgactggatggtccgctacgttccatattttaaagacaagggtgactcgaactcctcggcagggtggaagaattcaatccgacacaacctttctcttcacaccagatttatccgggttcaaaatgaggggacgggcaaatcatcatggtggatgctgaatccggaaggagggaagaccgggaagacgccacggcgacgcgcagtgagtatggataatggcgctaaatttttgagaatcaaaggaaaggccagcaagaagaagcagttgcaagcaccagagcgcagcccagacgactccagcccgagtgcaccagcgcctggtcccgtgcctgccgctgccaaatgggctgccagtccagcaagccacgcatctgacgactacgaagcctgggctgacttcaggggcggaggtcgtcccctgctcggcgaggcagcagaactcgaggatgacgaagccttagaagccctggcaccatcttctcccctcatgtacccttctccggcaagcgcgctatccccagctctaggctcgcgttgcccaggcgagctgccgaggctggcagaactaggcggacctctggggctgcacggcggaggtggtgccggtcttcctgagggtcttctcgacggtgcacaggacgcttacgggccacgggctagagcgcaagcgcgaccaggggcaggatgcgctggcggtgcgggagccggaggcaggtcccggaggcttcctcgacaacgaggcggacctgtaagagccgcaagagccctcgcccagtgtcttagccctccccaccagccttatgatgctgcaaggaggggcggacgcagaggcccaggaaccgctggtcctagaagacgcctccgcggaccagccaggagacctcctgccggacggtctgcaggtgccctgagatgtagacgccgtcgcgctgccggacggagggccagaccgctcccgggtcgtccagggccacgccatgtgcagcgtgaacccagagtgaggcgaggggtgcatcacccacagcgccttcacggccagagaaggaacggcctgcaactccggttcggaccagcatccgctgcagccggacccggacgaggtcccgcacctcaacctgagctgggcgcaggactccgagccgcaagtcgactacgcgcaccgagacctgtaccgagaggcccactttcatctcaccccgattcacgggtgccggcacctgactctagctcccccggagggggaccaagtcctgctagggatcccagtaggcgacctgccgcaggcgagggagagggtggcgcaggcgctccccattgttcatgcccccactcttag

SEQ ID NO: 223556 - DNA, 2034 bp, synthetic construct
  misc_feature 1..2034: note = Description of Artificial Sequence: Synthetic coding sequence
  source 1..2034: mol_type = other DNA
atgatgcaagaatccggcacagaaaccaaatccaatggttccgccatccaaaatggctccgggggatctaatcatcttctggagtgcggcggattgcgcgagggcagaagcaatggagagacacccgctgtggacatcggtgccgcagatctcgcacacgcccaacagcagcaacagcaggcgttacaggtggctcgccagctgctcctgcagcagcaacagcagcagcaagtgtcgggtctcaaaagtcccaagaggaatgataaacaacctgccctacaagtgcccgtctccgtggctatgatgaccccgcaggtcattactccccaacagatgcagcaaatactgcaacaacaggtactgtctccgcagcaactgcaagttctgcttcagcagcagcaggccctgatgctccagcagcagcaactccaagagttttacaagaaacaacaagagcaactccagcttcagctcttgcagcagcagcatgcaggcaagcagcctaaagagcagcagcaggtcgcaacccagcagctggcttttcagcagcagttgctccagatgcaacagcttcaacagcagcacctgcttagtctgcagcgtcagggactgctgacgatccagccaggtcagcctgctcttcccctgcagcccctcgctcaaggcatgatcccaaccgagctgcagcagctttggaaggaagtgacctcagctcatactgctgaggaaacaacagggaataaccactcctctctggatctgacaaccacctgcgtgagtagttcagcgccatctaaaacctcccttatcatgaacccccatgccagcacaaatgggcagctgagtgtacacacccctaaacgggaaagtctgtcccatgaagaacatcctcattctcaccccttgtatgggcacggggtgtgcaagtggcctgggtgtgaagccgtctgtgaagacttccagagttttctgaaacacctgaattcggagcatgctttggatgatcgctcgacagcccagtgcagagtgcaaatgcaagttgtgcagcagctcgagttgcagctcgccaaggataaagagcgccttcaagcaatgatgacacacctgcatgtcaagtcaactgaaccaaaagcagctccgcagcccctgaatttggtgtcatccgtcacactgtccaaatccgcaagtgaggcatctccccaatcgctgccccatactcccaccacccctacagccccactgacgcccgtcacccaaggcccttccgtcatcaccaccacctctatgcacactgttgggccaatcagaaggcgctactctgacaaatacaatgtccctatttcttcggccgacatcgcacaaaatcaggagttttataagaacgcggaagtccgtccaccatttacctacgcttcactgatccgtcaggcaatcctggagagccccgagaaacaactgactttgaacgaaatctacaattggttcaccagaatgttcgcctactttaggagaaatgccgctacctggaaaaacgcagtccgtcataatctgagcctgcataaatgttttgtaagggtggaaaatgtcaaaggggctgtctggacagttgatgaggtcgagtttcagaagagaaggccccagaaaattagcggcaaccctagtctgatcaagaacatgcagagctcacacgcttactgcactcctcttaacgccgctctgcaggcctctatggctgaaaacagtatacccttgtacactaccgccagcatgggaaacccaactttgggaaatctagcttcggccatccgggaggagttgaacggcgctatggagcatactaacagcaatgaaagtgatagctcacctgggaggtctcctatgcaggccgtacatccagtccacgtgaaagaggagccgctggatcctgaagaggctgagggacctctatcactggtgaccactgctaatcacagtccagattttgatcacgaccgggactacgaagacgaaccagtcaacgaggacatggagtag

SEQ ID NO: 223557 - DNA, 1077 bp, synthetic construct
  misc_feature 1..1077: note = Description of Artificial Sequence: Synthetic coding sequence
  source 1..1077: mol_type = other DNA
atgatgactccccaggtgattactcctcagcagatgcagcaaattctacagcaacaggtcctgtcccctcaacagctgcaagtgctgcttcagcaacagcaagctctcatgcttcagcagcagcagttgcaggaattctacaagaaacaacaggagcagctccagctccagctactgcaacagcagcatgccggaaagcagccaaaagagcagcagcaggtcgccacccagcagctggcgttccagcagcagctgctgcagatgcagcagctgcagcagcaacatctgttgtcacttcagcggcagggcctgttaacaattcagccaggccagccggctctgcccctgcagccacttgctcagggcatgatacctaccgaactgcagcagctgtggaaggaggtgacctccgcccatacagcggaagagactactggtaataatcatagcagcctagacctgactaccacatgcgtgagtagctccgctccttccaaaaccagtctaattatgaatccacatgcttctacaaacggccagctgtcggttcacacccctaagagagagtctctgagtcacgaagaacaccctcatagtcacccactgtacgggcacggagtctgtaagtggccgggttgcgaggcagtttgtgaggactttcaatcatttctgaaacacctcaacagtgagcacgccctggacgacaggagcactgcccagtgccgggttcagatgcaggtagtccagcagctggaattgcagctggccaaggacaaggagcgcctgcaggccatgatgactcatcttcatgtgaagagtactgaaccaaaagcggcaccacagcctcttaatcttgttagctccgtaaccctaagtaagtcagcgagtgaggcaagtccgcagagtctccctcacacccctaccacccccacccccccagatagccgccaccctcgccctctttgccatcacaatcaccagcatgcgcatggcggaactcatccgcaggccgtgttgcgccagattcagagagcccattttgtgtcacgttattgcgctgaaccacggattctgtag

SEQ ID NO: 223558 - DNA, 1509 bp, synthetic construct
  misc_feature 1..1509: note = Description of Artificial Sequence: Synthetic coding sequence
  source 1..1509: mol_type = other DNA
atgatgcaggagtcggggactgaaacgaagtcgaatggatctgcaattcagaatggttctggcggaagcaatcatctgctggagtgtggaggattacgcgaagggaggtccaatggggaaacacccgctgtggacatcggcgcagcagatctggcacacgcacagcaacagcagcagcaagcactgcaagtagccaggcagcttttattacagcagcagcagcagcagcaggtctcgggcttgaaatcaccaaagagaaacgataagcagccagccctgcaggttcctgtctccgtcgctatgatgacaccgcaggtgatcacaccccaacagatgcagcagatcttacaacagcaagtcctgtctcctcagcagctgcaggtactcctgcagcagcagcaggcgctaatgctgcagcaacagcaattacaggagttttacaaaaaacagcaagagcagctgcagctccagcttctgcagcaacagcacgccggaaagcagcccaaagaacaacagcaggttgcaactcagcagcttgcctttcagcaacaactgcttcagatgcagcaactgcagcagcagcatctgttgagtctgcagcgccagggcctgctcactatccagcctggacaaccagccttgccattgcagcccctggcccagggcatgatccccacggagctgcagcagttgtggaaggaggtcacatctgcccacacagctgaagagaccactggaaacaaccattcctcacttgatctcacaactacatgcgtaagttcttccgctccgtcaaaaaccagcctgattatgaaccctcacgcttcaactaatggccagttgtccgtccacacccccaagcgcgagtctctgtcccacgaagagcatccgcattcgcaccccctctacggacacggagtctgtaaatggcctgggtgcgaagcagtatgcgaagacttccagtctttcctgaaacacttgaattccgagcacgcacttgacgaccgatcaactgcacagtgcagggttcagatgcaagtggttcagcagttggaactacaattagcgaaggataaggaacggttacaggccatgatgactcacctgcacgtgaagtctaccgaacccaaagctgcaccccaaccgttaaacttagttagctctgtcacactgtcaaagagcgcgtcggaagcatccccccaatccctacctcacacccctacaacaccaacggcaccccttacacctgtaacccagggcccatctgtgatcactacaacgtccatgcacaccgttggacctattcggcgtaggtactccgataagtacaacgtgccaatttcaagcgccgacattgcccagaaccaggagttttataagaacgctgaagtgcggccaccttttacctacgcatctttgatccgtcaggcgattctcgagtcgcccgagaaaaaaaagaaagaacgccagaccttaggcacgatgccaatccactcaacgcagcaatag

SEQ ID NO: 223559 - DNA, 1470 bp, synthetic construct
  misc_feature 1..1470: note = Description of Artificial Sequence: Synthetic coding sequence
  source 1..1470: mol_type = other DNA
atgatgactcctcaagtgatcaccccgcagcagatgcagcagatactccagcagcaggtgttgagcccacagcaattacaggtcttattacagcagcagcaggcccttatgctacaattgcagcagctgtggaaggaagtgaccagtgctcacaccgctgaagagactactggaaataatcactcgagcctggacctgacgactacgtgcgtgagcagttctgccccttccaagacctccctgatcatgaacccacacgctagcacaaacggccagctcagtgtgcatacccccaagagagagtccttaagccatgaggagcatccccattctcatccgctctatgggcatggggtgtgcaagtggccgggttgtgaggcggtatgcgaggattttcagtcatttcttaaacatctgaatagcgaacacgctttggacgaccggtctaccgcacagtgccgggtgcagatgcaggtggtgcaacagctggagctgcagctggcaaaggacaaggagcggctgcaggccatgatgacccacctccatgtgaaatccactgagccaaaggcagcccctcaacccctgaacttagtctcttccgtcacattaagcaagagcgcctccgaggcatctccacagtccctccctcataccccaacaacccccacagccccactcacccccgtgacacagggacctagcgtgattacaactaccagcatgcataccgttggcccaatccggcgacggtactccgacaaatataatgtcccaatttcaagcgccgatatcgcccaaaaccaggaattctacaagaacgctgaggtgaggcccccttttacatacgcatcccttatccgccaggccatcttagagtccccagaaaagcaactgacattgaatgaaatttacaactggttcaccagaatgtttgcttactttcggcgaaatgctgccacatggaagaacgcagtcagacacaatttgagcctgcacaagtgcttcgtgcgcgtcgaaaatgtgaaaggggcagtatggacagttgatgaggtggagttccaaaagcgccgtcctcagaaaatctccgggaacccctctttgatcaagaacatgcagtcaagtcacgcatattgtacccccctgaacgcagctctgcaagcttcaatggctgagaattctatcccactctacaccaccgcctcaatggggaacccgacactggggaatctggcctctgcgatccgcgaagaactgaatggggcaatggaacacaccaatagcaacgaatccgatagctcaccgggtcgctcccctatgcaagcggtgcaccccgtccacgtcaaagaagaacccctggaccccgaggaagccgaaggccctttatctctcgtcaccaccgctaaccacagcccagacttcgaccacgacagggactatgaggacgagcctgttaacgaagacatggaatag

SEQ ID NO: 223560 - DNA, 2034 bp, synthetic construct
  misc_feature 1..2034: note = Description of Artificial Sequence: Synthetic coding sequence
  source 1..2034: mol_type = other DNA
atgatgcaggaatccggaaccgaaacgaagtctaatggctcagccatacagaatggctccggaggcagtaatcatctgttggagtgcggtggccttcgagagggtcgctccaacggagagacacccgcagttgacattggggctgctgacctggctcacgcccagcagcagcagcaacaggctttgcaggtggccagacagctgctgctccagcagcagcaacagcagcaggtttcaggcctgaagtctcctaaacgtaacgacaaacagccagccctccaggtgcccgtgagcgttgccatgatgacacctcaagtgattactccacagcagatgcaacagattcttcagcagcaggtgctctcaccacaacagctgcaagtccttctccagcaacagcaggcgttgatgctacagcagcagcagctccaggaattttataagaagcaacaggagcagttgcaactgcagctgttacagcagcagcatgcaggcaagcagccaaaagagcagcagcaagttgccacacagcagttggcctttcagcaacagctgctccagatgcagcagcttcagcagcagcatctgttgtctctccagcgtcaaggcttgcttaccatccagcccggtcagccggcactgcccctccaacccttagcccaggggatgataccaacggagctgcagcagctgtggaaggaggtgacaagcgcacacacggccgaagagactacagggaataaccattccagcctggatctaacaacgacctgcgtcagctcctcagcacccagcaagactagcctgatcatgaacccccatgcgtcgacaaatgggcagctctccgtccacactccaaagagggaatcactgtcccacgaagagcaccctcatagtcaccctctctatggacacggagtttgcaaatggccgggttgcgaggccgtatgcgaggactttcagtctttcttgaagcacttaaacagcgagcatgcactggatgaccgttccactgcccagtgccgggtccaaatgcaggtcgttcagcagctggagttgcaactggcgaaagacaaggagagactgcaggccatgatgacgcacttgcacgtcaagtccaccgaacccaaagctgccccacagccactgaacttggtttctagcgtcaccctttcgaaatctgccagtgaggcatcaccacagtccctcccacacacccctactacgcctacagcccctctgacacctgtcacgcagggcccttccgtcataaccactaccagcatgcatacagtgggaccgattcggagaaggtactcagacaagtataacgtgccgatttcctctgctgacatagcccagaaccaagaattctacaagaatgcagaggtacgcccaccatttacgtacgcctccctcattcgtcaggctatactcgagtcccctgagaaacaattaacactgaacgaaatctataattggtttacgcggatgttcgcatatttccgcagaaatgcagccacatggaaaaatgccgttcggcacaatttaagtttacacaaatgttttgtgagggtggagaacgtgaaaggtgccgtgtggacggtagatgaggtggagtttcagaagcgaagacctcagaaaatcagcgggaatccctctctgatcaagaatatgcagtcatctcacgcgtactgtacacctctcaacgccgctctgcaagccagcatggccgaaaactcaattccattatacaccaccgcctctatgggaaatcccactctaggcaacctggcctctgccattcgggaggagctgaacggggcaatggagcacactaatagcaacgaaagtgatagctctcctggaagaagcccaatgcaggctgtccatccagtacacgtcaaggaggaacccctggatcccgaggaggccgaagggcctttaagtctcgtaaccaccgcgaatcatagtccagattttgaccatgacagggattatgaagatgagccggtaaacgaagatatggagtag

SEQ ID NO: 223561 - DNA, 1806 bp, synthetic construct
  misc_feature 1..1806: note = Description of Artificial Sequence: Synthetic coding sequence
  source 1..1806: mol_type = other DNA
atgatgcaagagagtgggacggagaccaaaagcaatgggtcagccattcagaacggcagtggtggatcaaatcacctgctggagtgtggcggactaagagaaggtcggtcaaatggggagacaccagccgttgatatcggcgctgctgatttagctcacgcacagcaacagcagcagcaagctttgcaagtcgccagacagcttctgctgcagcagcaacaacaacagcaagtgagtgggctgaagtcaccaaagcggaacgataagcagcctgctctccaacagcaacaagtggccacccagcaattggcttttcagcagcagcttctgcaaatgcagcagttgcagcagcagcacctgctgtctttgcaacgccagggtctcttgaccattcaacctgggcagcccgctctgcccctccagcccctggcccagggaatgattcccaccgagcttcagcagctgtggaaggaggtaacgagcgctcataccgcagaggaaacaacgggaaataatcacagctctctcgatttaaccaccacctgcgtgtctagcagcgctccaagcaagacctccttaataatgaacccccacgccagtaccaatgggcagctgtccgtgcatactcccaagagagagtccctgtcccatgaggagcatccacacagccatcccttgtacggccacggcgtatgtaaatggccaggctgcgaagccgtctgtgaggacttccaatccttcctcaagcacctgaatagtgaacatgctctcgatgaccgatcaaccgcccagtgccgggtccagatgcaagttgtgcagcagctggaactccagttagccaaggacaaagaacggttacaggcgatgatgactcacctgcatgttaagtccactgaacccaaagcggctccacagccacttaacctggtgtcatctgtgacactgagcaagagtgcatccgaagcatccccccagtctcttcctcacacaccaacaaccccaactgcacccctgacgcctgtcacccagggcccatcggtgattacaacaacaagcatgcataccgtcggacctatcaggaggagatacagtgataaatataacgtgcctatatcctctgcagatatcgcccagaaccaagagttttacaaaaacgcggaagtgcgaccccctttcacttacgcctctctgatcagacaggcaattctcgagtctcccgagaaacagctgaccctgaacgagatttacaactggtttacacggatgtttgcgtactttcgacgaaatgccgctacgtggaaaaatgcggttcggcacaatctgagcctccataaatgctttgtgcgggttgaaaacgtgaagggtgctgtgtggacggtggatgaggtcgagtttcagaagcgcaggccacaaaagatcagtggcaacccttcgctcatcaaaaacatgcagagcagccacgcatattgtacacctctgaatgccgctctgcaggcttcaatggccgagaatagcattcctctgtatacaacagcgagcatggggaatccaactctggggaacctggcctcagctattcgcgaggagttaaatggcgcaatggagcataccaatagcaacgagtccgattccagtcctggcagatcccccatgcaggctgtccatcccgtgcacgtgaaggaggagccgctggaccctgaggaggccgaggggccactgagcctagtcaccaccgcaaatcacagtccggatttcgatcatgaccgcgactacgaggatgagcctgtgaacgaggacatggaatag

SEQ ID NO: 223562 - DNA, 675 bp, synthetic construct
  misc_feature 1..675: note = Description of Artificial Sequence: Synthetic coding sequence
  source 1..675: mol_type = other DNA
atgatgacaccccaggtgattactccccagcagatgcagcagatattacaacagcaggtattaagcccccagcagctccaagtgctcctccagcagcaacaagctctgatgctgcagcagcagcagcttcaggagttttacaaaaagcagcaggaacagctgcaactgcaattactgcaacagcaacatgccggaaaacagccaaaagagcaacagcaagtcgctactcaacagctcgcttttcagcagcaactgctccaaatgcagcagctccaacagcagcacctactgagcctacagcgccagggccttctcactattcagccaggccagccagctctacccctacagcccttggcacagggcatgatacctaccgaattacagcagctttggaaggaagtgacctcggctcacaccgctgaggagacgacaggcaacaatcacagttctttagacctaaccacaacttgcgtgtcttcatcagccccttcaaagacaagcctcatcatgaacccacatgctagcacaaacgggcagctctcagtgcatacgcccaaaagagagagcttgtcacacgaagagcatccacacagtcacccactgtacggccatggagtctgcaagtggccaggatgtgaggcagtctgcgaggacttccagagctttttgtag

SEQ ID NO: 223563 - DNA, 2040 bp, synthetic construct
  misc_feature 1..2040: note = Description of Artificial Sequence: Synthetic coding sequence
  source 1..2040: mol_type = other DNA
atgttccagtgcgtgttcagcagcagtgtgctgcagcctcactccaccagctgtctgttcaagcacttgttttaccactccgccacccccgcatctcaaaagcagccggagccgatctattccaagaagacagaaatacaacgccagacagtgcgggcacccttcgctaagctgttcatctttagcgcactgcaggtggcacgccaactcttgctgcagcagcagcagcagcaacaggtcagcggcctgaaatcccctaagaggaatgacaagcagccagcactccaggtcccagtgtctgtggccatgatgacaccccaggtgattactccacagcaaatgcagcagatcttacagcaacaggtcttgtcacctcagcagctccaagtgttgctacaacagcagcaggccctaatgctgcagcaacaacaattacaggaattctataagaagcagcaagaacaactgcaacttcagttgctccagcagcagcacgctggaaaacagccgaaggagcaacagcaggtggctacccaacagctggcattccagcagcagctcctacagatgcagcagctgcaacagcagcatcttttgagcctccagcggcaagggcttctgaccatccaaccaggacagccagctttgccattgcagcccttagcccagggcatgatccctacagaactgcagcagttgtggaaggaggtcacttccgcacacacagcagaggagactacaggtaacaaccactcttctctggacctgaccacaacatgcgtgtccagcagcgctccctctaaaaccagcctaataatgaacccccatgcctcaaccaacgggcagcttagtgtgcacactcccaaaagggagtccctgagtcatgaggagcatccccactctcacccgctctacgggcacggagtttgcaaatggcctggctgtgaagctgtctgtgaggatttccagagtttcctgaagcaccttaatagtgaacacgctttagacgacaggagcacagctcagtgtcgagttcagatgcaggtcgtgcagcaacttgaactgcagctcgccaaagacaaagagaggctgcaggccatgatgacccatttgcatgtcaagtctaccgagccgaaagccgcacctcagcctttgaacctcgtgtctagtgtcactctgtctaagagtgcctcggaagcttccccacagtcactccctcatactccgactaccccaaccgctccactgactccggtgacacaggggccatcagtcattactacaacaagcatgcacactgtcggcccaatccggcgacggtatagtgataaatataatgtgcctatttcctccgccgatatagcccagaatcaagaattctataaaaacgctgaagtaagacccccttttacttacgcttccttgattcgccaggctattttggaatcaccagaaaagcagttgacactgaacgagatctacaactggttcacgcgcatgtttgcatacttccgaagaaacgccgctacatggaagaacgctgtccggcataatttgtctctccacaagtgctttgtcagggtggaaaacgtgaaaggcgcagtatggaccgtagatgaggttgaatttcagaaacgaaggccccaaaagatctccggcaatccttccctgatcaaaaatatgcaaagcagtcacgcatattgcactcctttgaatgcggctttgcaggcatccatggcagagaactccatacccctctacactacggcctccatgggaaatccaacactaggcaatcttgcctcagcaatccgggaggagctcaatggagcaatggaacacactaattcaaacgaaagcgactcttcccctggccgatcccctatgcaggctgtgcacccagtacatgtaaaggaggaacccctggacccggaagaagccgaggggcctcttagtttggtgacaacagcgaatcactcccctgactttgatcacgaccgtgactacgaggatgaaccagttaacgaggatatggagtag

SEQ ID NO: 223564 - DNA, 372 bp, synthetic construct
  misc_feature 1..372: note = Description of Artificial Sequence: Synthetic coding sequence
  source 1..372: mol_type = other DNA
atgatgactcctcaggtcatcaccccccagcagatgcagcagattctgcagcagcaggtgctatccccccagcagctgcaggtgttgctgcagcaacagcaggcattaatgctacagcagcaacagctgcaagagttttataagaagcaacaagagcagctgcaactccagttgttacagcagcagcacgccggaaagcaacccaaagagcaacaacaggtggcgacacagcagctggcattccagcagcagctcttgcaaatgcaacagctccagcagcaacatctgcttagtctgcagcgccaagggttgttgaccattcagccgggacagcccgctctcccattacaaccactagcccagggtatgtag

SEQ ID NO: 223565 - DNA, 2034 bp, synthetic construct
  misc_feature 1..2034: note = Description of Artificial Sequence: Synthetic coding sequence
  source 1..2034: mol_type = other DNA
atgatgcaggagtcagggaccgaaaccaaaagcaatggaagtgcgatacagaatgggtcaggtgggtcaaatcaccttctcgaatgtggcggactgagggagggaaggagcaatggggaaacacccgctgtggatataggcgctgctgacctagctcatgcgcaacaacaacaacagcaagcattacaagtggcacggcagcttctcctgcagcaacagcagcagcagcaggtgtcaggactaaaatcccccaagcgcaatgacaaacagcctgcactgcaggtccctgtgagcgtagcgatgatgacgcctcaggtgattaccccacagcagatgcagcagatcctgcaacagcaggtccttagcccccagcaactgcaggtcttgttacagcagcagcaggctttaatgctgcagcaacaacaactgcaggagttttacaagaagcagcaggaacagctgcagctacaactcctccagcaacaacatgctgggaaacagcctaaagaacagcagcaggtggccacccagcagctggcctttcaacagcagttacttcagatgcagcagcttcagcagcagcatctgctgtctttgcagcgccaaggacttctcacaattcagccgggacaacccgctctacctcttcagccgttggcacaggggatgatcccaactgaactccagcagctctggaaggaagtaacaagcgcccatacagccgaggagacaacagggaacaaccactctagcctcgatctgaccacgacctgcgtctccagtagcgctccctcaaagacgtcactgatcatgaatccccacgcctccaccaatggccaattatccgtgcacactccgaagcgagagagcttgtcgcatgaagagcatccgcacagccatcccctgtacggccacggcgtctgcaagtggcccggatgcgaagccgtctgcgaggacttccaaagcttcctaaagcatctaaattccgagcacgcgctggacgaccggtcaaccgcccaatgccgtgtgcagatgcaagtggtgcagcaattagagctgcagctcgctaaggacaaagagaggctgcaggctatgatgacacacttacatgttaagagtaccgaacccaaggcggctccacaacctctcaacctggtgagctccgtgactctgagtaaatccgcatctgaggcctcaccccagtcccttcctcacacgccaactacaccgaccgcccctcttacgcctgtgacccagggcccaagcgtcatcactacaacgtccatgcacaccgtggggcctattcggcgacggtatagcgacaaatacaacgtgcccatcagctcagcggacattgcccagaatcaagagttttataagaatgcagaagtcaggcccccttttacctatgcctcgcttataaggcaggctatcctggagtcccccgaaaagcaactgacacttaacgagatctacaattggttcactcgaatgtttgcttactttaggcggaacgccgcaacctggaagaacgctgttcgccataatctgtctctgcacaaatgttttgtgcgtgtcgagaacgttaagggggctgtttggaccgtcgatgaggtggagttccagaaacggcgtccacagaagatctccggaaatccatccttgatcaaaaacatgcagtcctcgcacgcctactgtacaccacttaacgccgctcttcaggcttcgatggcagagaattcaattcctctttacaccaccgcatctatgggcaatccgacactcgggaaccttgcctctgccatacgagaagagctgaacggcgctatggaacacaccaattctaatgagagcgattcatctccaggccgttcccctatgcaggccgtacaccctgttcacgtgaaggaggagcctctcgacccagaggaagcagagggccctctgtccttggttactactgcaaaccactcaccagacttcgatcacgaccgcgactatgaagacgaaccagtgaacgaggacatggagtag

SEQ ID NO: 223566 - DNA, 345 bp, synthetic construct
  misc_feature 1..345: note = Description of Artificial Sequence: Synthetic coding sequence
  source 1..345: mol_type = other DNA
atgatgcaggagtcaggtaccgaaacaaagagcaacggtagcgccatccaaaatggatcaggtggaagtaaccatctccttgaatgcggcggtctgcgcgagggccgtagcaatggagagacaccggcagtcgacataggcgcagccgacctggcacatgctcagcaacaacaacagcagtggcatttgattaatcaccaaccctccagatccccatctagctggctcaaacggctcatatccagtccctgggaactggaggtgctacaggttcctttgtggggggcagtggcggaaaccaagatgtcaggcccagtgtgccaacccaatccttcccctttttag

SEQ ID NO: 223567 - DNA, 669 bp, synthetic construct
  misc_feature 1..669: note = Description of Artificial Sequence: Synthetic coding sequence
  source 1..669: mol_type = other DNA
atgatgcaggaatctgcaaccgagacgatcagtaacagttctatgaaccagaatggcatgtcaacactatcgagtcagctggatgccggatcacgcgatggcaggagctctggtgacactagtagcgaggtttccaccgttgaactcctgcatctccagcagcagcaagccctgcaggccgctaggcagttattattgcagcagcagacttctggactcaagtcaccgaagtcctccgataaacagagacccctgcaggtcccagtgtcagtggccatgatgaccccccaagtcatcactccccaacagatgcaacagatcctgcagcagcaggtgctctctccccagcagctgcaagccctacttcagcagcagcaagctgtgatgctccagcaacaacaacttcaggaattctataagaagcaacaggaacagctgcacctgcagctgttgcagcaacagcagcagcagcagcaacagcagcagcagcaacaacaacagcagcaacagcagcagcaacagcaacagcagcagcagcaacaacagcagcagcagcagcagcagcagcagcagcatcctggcaaacaggccaaggagcagcagcaacagcagcagcaacagcagcagctggcagcccaacagttggtgttccagcaacagctgctgtag

SEQ ID NO: 223568 - DNA, 2148 bp, synthetic construct
  misc_feature 1..2148: note = Description of Artificial Sequence: Synthetic coding sequence
  source 1..2148: mol_type = other DNA
atgatgcaggaatcagctaccgagactatcagtaactcctctatgaatcagaatggaatgagtacgctgtcgagtcaactagacgcaggctccagggacggacggtcttcaggagatacaagctctgaagttagcaccgtggagctgctgcatctgcaacagcagcaggcactgcaagctgctaggcagctgctattacagcagcagacgtcaggcttgaagagtcccaaatcctctgataagcagcggcctctgcaggtgcccgtatcagttgcaatgatgacaccccaggttattactccacagcagatgcagcagatactccagcagcaagttctgtctcctcagcagcttcaggccctgctccaacagcagcaggctgtaatgttgcagcagcagcagttgcaagaattctataagaaacagcaagagcagctgcacctgcagcttcttcaacagcagcaacagcagcagcaacagcagcaacagcagcagcagcagcagcagcagcagcaacaacaacagcagcagcagcaacagcaacagcagcagcagcagcagcaacaacagcaacatcctgggaagcaggctaaggagcagcagcagcaacagcagcagcagcaacagctggccgctcagcagcttgtgtttcaacagcagctgctgcagatgcaacagctgcagcagcagcagcaccttctgtccctgcagaggcagggcctgatcagcatccccccagggcaagcggctctgccagtgcaatccctaccacaggccggactcagccctgccgagatccagcaattgtggaaggaggtcactggagtgcacagtatggaggacaacgggataaagcacggcggactcgatctcaccactaacaacagcagttccactacttcttcaaatacctcaaaggctagcccaccaattacccatcactctatagtcaatggccagagctcagttctcagcgccaggcgcgactcaagcagccatgaagaaaccggagccagccatactctgtacggccatggggtttgtaaatggcccggttgcgagagcatctgcgaagactttgggcagttccttaaacacctgaacaacgagcacgctttggatgacaggagcaccgcacagtgcagagtccagatgcaggtggtccagcagctggaaatacagttgtccaaagagagagaacgcctgcaggccatgatgacgcatcttcatatgcggcctagcgagccaaaacccagccccaaaccactcaacctggttagttccgttaccatgagcaagaacatgttagaaacctcaccccagagtctcccgcaaacgcccaccactccgacggccccagtaactccgattactcaagggccttccgtaatcacgcctgccagtgtgcctaatgtgggcgcaattcggcgtcgtcactccgacaagtacaatatcccaatgagctccgaaatagcacctaactacgagttttataagaacgcagacgtgaggccgccattcacctatgctactttgattaggcaagcaattatggagtcttcagaccgccagcttaccctgaacgaaatctattcctggtttaccagaacatttgcatacttccggagaaacgctgccacctggaaaaacgccgtgaggcacaacctctctctacataaatgtttcgtccgggtggagaacgtcaagggcgctgtatggactgtagatgaagtggaataccagaaaagacggtcacagaaaatcactggatctcccacactcgtgaagaatattccaaccagcctcggatacggcgcagctctcaatgcctccctccaggctgcgctggcagagtccagccttccgctgctttctaacccagggctgataaataacgcgagctctggccttctgcaggcagtgcatgaagacctaaacggctctttggatcacatcgattcaaacggcaattcttctcccggttgctctccccagcctcatatccactcaatacacgttaaagaggaacccgtgatcgcggaagacgaagactgccccatgagcttggtgaccacggccaatcatagtcccgaattggaggacgaccgggaaatcgaggaagaaccattgtctgaggatctggaatag

SEQ ID NO: 223569 - DNA, 1299 bp, synthetic construct
  misc_feature 1..1299: note = Description of Artificial Sequence: Synthetic coding sequence
  source 1..1299: mol_type = other DNA
atgatgcaagaaagcgcaacggagacaatatccaactcgagcatgaaccagaacggcatgtctacactatcttctcagttggatgccggttcccgcgatggccgttcttctggtgacacctccagcgaggtctccacggttgagctcctacacctgcagcagcagcaggctcttcaggccgctcgccaacttctgctccagcagcaaacatctggactcaagtcccccaaaagtagcgataagcaacgacctctgcaggtgccagtgagtgtggcgatgatgacaccccaggtgataactccacagcagatgcagcagatcctacagcaacaggtcctctctccgcaacagctgcaggccctgttacaacaacaacaggccgtcatgttgcagcagcagcagcttcaagaattctacaagaaacaacaagaacagctgcacctgcagcttctgcagcagcagcaacagcagcagcagcagcagcaacaacagcagcagcagcagcagcagcagcagcagcagcagcagcagcagcagcagcaacagcagcaacagcagcagcagcagcaacagcatccaggtaagcaggctaaggaacagcagcagcagcaacagcagcagcaacagttggccgcacagcaactcgtgtttcagcagcaactgctgcaaatgcagcagctccaacagcagcagcacttgctgtctcttcagcgtcaaggactgatatccatcccgcctgggcaggcagctctgccagtgcagagccttccgcaagcgggactgtcccccgctgagatccagcaattatggaaggaggtgacgggtgtccatagcatggaggacaacggcattaagcatggcggacttgacctcaccactaacaattctagctctaccaccagctcgaacacctccaaggccagtccaccaataacccatcacagcatagtgaatggccagtcttcagtcctatcagccaggagagatagctcttcacatgaggagacgggcgctagccacacactgtacggccacggagtgtgcaaatggcccggatgcgaatctatttgcgaggactttggccaattcctcaagcacttgaacaacgagcacgccttagacgaccgttccactgcccagtgccgggtccagatgcaggttgtgcagcagctcgagatccagcttagcaaagagcgcgagcgcctgcaggccatgatgacccatctgcatatgaggcccagcgagccaaaaccctccccaaaaccagtgagcgcctattgtttcataaactccaagtag

SEQ ID NO: 223570 - DNA, 1371 bp, synthetic construct
  misc_feature 1..1371: note = Description of Artificial Sequence: Synthetic coding sequence
  source 1..1371: mol_type = other DNA
atgcaggagtcagccactgagacgatctcaaactctagtatgaaccagaatggcatgtcgacactgagtagtcagttggatgctggcagccgggatggcagaagttctggcgacacctcttcggaggtgagcaccgtggaactgttgcacctgcagcagcagcaggccctccaggccgcacgacagctcctgctgcagcagcaaacgagcggcctcaaatctcccaaatcttctgataagcagaggcctctgcaagaactgctgcccgaaactaaactgtgcatatgtgggcactcgagcggggatggacacccccacaatacctttgctgtacccgtttccgtggctatgatgacgccacaggtaataacccctcaacagatgcagcaaatactccagcagcaggtgctttccccgcaacagctccaagcgctcctccagcagcagcaagcagtgatgcttcagcagcagcaactacaggagttttacaagaagcaacaggagcagttgcacttacagctcttgcagcaacagcaacagcagcagcagcagcaacagcaacagcagcagcagcaacagcaacaacagcagcagcagcagcagcaacagcagcagcaacaacagcaacagcaacagcagcaacagcaccctggaaaacaggctaaggaacagcaacagcagcagcagcagcagcagcaactcgccgctcagcaactcgtattccagcagcagctcctgcaaatgcaacagctgcagcagcagcaacacctcctctccctgcagaggcaaggacttatttcgattccacccggacaggctgcactgccagttcagtcccttcctcaggcgggtctgagtcccgcagaaattcagcaactctggaaggaggtgacaggtgttcacagtatggaagacaacgggattaaacacggaggacttgatcttaccacaaataactcttcaagcacaacatcctcaaatacatccaaagctagccctcccatcacccaccacagtattgtgaacggtcagagcagcgtcctgtcagccaggcgggacagctcttcgcatgaggagacgggcgcatcccacaccttgtacggacatggcgtatgtaaatggcccggttgcgagagtatttgtgaggacttcggccagttcctgaagcatcttaacaatgaacacgcactggatgatagatctacagcccaatgtcgggtccagatgcaggtggtgcagcagctggagatccagctgtccaaggagagagagcggttacaggcaatgatgacacacttacacatgagaccctccgagcccaagccctctcccaagccggtgagtgcttactgtttcattaattccaagtag

SEQ ID NO: 223571 - DNA, 1872 bp, synthetic construct
  misc_feature 1..1872: note = Description of Artificial Sequence: Synthetic coding sequence
  source 1..1872: mol_type = other DNA
atgatgacccctcaggtgattacacctcagcagatgcaacagatactgcagcagcaggtcctgtccccccagcagctccaggcactattacagcagcagcaggccgttatgctgcaacaacagcagctgcaggaattctacaagaagcagcaggagcaactgcatctccagctgctccagcagcagcagcagcagcagcaacagcagcagcaacaacaacagcaacagcagcaacaacagcaacaacagcagcagcaacagcagcaacagcagcagcagcagcagcagcaacagcagcatcctggaaagcaagctaaagagcagcaacagcagcagcaacagcagcagcaactcgcagcccagcaactcgttttccaacagcagctcttacaaatgcagcaattgcagcagcaacagcaccttctaagcttacagcgacaagggttgatctccatcccgccaggtcaggcggctctgccggtgcaaagcctgccacaggcgggtctttccccagccgaaatccaacaactgtggaaagaggttaccggagtccattcaatggaagataatgggatcaaacatggcggtctggatctgaccactaataacagcagttcgactacatcttcaaacacatctaaggcatctcctcctattacacatcatagtattgtgaacggacagtcttcggtcctttctgctcgacgagacagcagctctcacgaggagacgggggcaagccatacgctgtatggacacggggtttgtaagtggcccggatgtgagtcaatttgcgaagacttcggtcagtttttgaagcacctgaataacgaacacgccttggatgacagaagcactgcacagtgtcgcgtgcagatgcaggtggtacagcagctcgaaatccagctgtcaaaagagagggaacgcctccaggccatgatgactcacctgcatatgagaccaagtgaacctaagccttctcccaaaccactgaatctagtgtcctctgtgacaatgagtaaaaacatgctggagacctctccacaatctctcccacagacccctaccactccaaccgcacccgtgacccccatcacccagggcccaagtgtcatcacacccgcttctgtaccaaatgtcggcgcaattaggcgaaggcatagtgacaaatataatattcccatgagtagcgagattgcccctaactacgagttttacaaaaacgcggacgtccgcccaccttttacatatgcaacattgatacggcaagccattatggaatcctctgaccgccagttaactctgaatgagatatattcctggtttacaaggacattcgcttatttccgccgaaacgctgcaacctggaaaaacgcggttcgccacaatctatctttgcacaaatgttttgtgagggtggagaatgtaaagggggctgtgtggaccgtggacgaggtagaataccagaagaggcggagtcagaagatcaccggtagcccaactcttgtgaagaacatccctacaagcttaggctacggcgctgcacttaacgcgtccttacaagccgcactagcggagagcagcctgccactgctttccaatcctggtctgattaataacgcctctagcggcctgctccaagcagtacacgaggacctgaatggttctctggatcatatagactcgaatgggaattcctcaccgggatgctctccacagccacacatacattccattcatgtaaaagaagagccggtgatcgccgaagacgaggattgccccatgagtctggtgactactgcaaatcactcccccgagttagaagatgatagggaaattgaggaagaacccctcagcgaagacctcgagtag

SEQ ID NO: 223572 - DNA, 1593 bp, synthetic construct
  misc_feature 1..1593: note = Description of Artificial Sequence: Synthetic coding sequence
  source 1..1593: mol_type = other DNA
atgatgacaccgcaggtgatcactccccagcagatgcagcagatcctccagcaacaagtgctgtctccccagcagctgcaggcgttgctgcaacagcaacaggccgtcatgcttcagcagcagcagctgcaggaattttataaaaagcagcaggagcaactgcacttgcagctgctgcagcaacaacagcagcagcagcagcaacagcagcagcagcagcagcagcaacagcaacagcaacagcaacagcagcaacaacagcagcagcagcagcagcagcagcagcagcagcagcagcaccccggaaagcaagcgaaggagcagcagcagcaacaacagcagcagcaacaactggctgcccagcagctggtgtttcagcaacagctactgcaaatgcagcaactgcagcagcagcagcatctcttgtctctgcagaggcagggcctgattagtatacctcccggacaggccgctctgcctgtgcagtcactgccacaggccggactgtcaccagcagagatccagcaactgtggaaggaggtgacgggcgtccactctatggaagataacggcattaaacatggaggcctggacttgaccactaacaatagtagctcgaccactagctcaaacacgagcaaagcgtctccacccattactcatcattctattgtgaacggacagagctccgtcctctctgctaggagggattcttccagtcacgaggaaaccggcgcatcacatactttgtatggacatggggtgtgcaagtggcccggatgcgaatccatttgcgaggactttggacaattcctaaaacatctgaacaacgagcatgcacttgatgacaggtcaaccgctcagtgtagggtacagatgcaagtggtccagcagttggagatccaactcagcaaggagagagagaggttgcaggcaatgatgacccatttacacatgcgtccatcagaacccaaaccaagccccaagccagctatcatggagtcaagtgaccgccaactgacactgaatgaaatttattcatggttcactagaactttcgcctacttccggaggaacgccgctacatggaaaaatgccgttcgccataatctttcactgcataagtgtttcgtgcgagttgaaaacgtgaagggcgcagtctggacggtagatgaggtggagtaccagaagaggagaagccagaaaatcaccggctcgcctactctggtcaaaaacataccgacctccctggggtatggagcagcgctaaatgcatccctacaggccgctctggccgaatcttcccttcccctcctgtccaaccctggattaataaacaatgcttcatccggactgttacaggcggtccacgaagacctgaacggcagtcttgatcacatcgattcgaatgggaactcgtcaccaggctgctcacctcagcctcacattcactctatccatgtcaaggaagaacccgtaattgctgaggatgaagattgtcctatgtcattggttaccaccgctaaccactctcctgagctagaagatgatcgcgaaatagaagaagagcccctgagtgaagatcttgagtag

SEQ ID NO: 223573 - DNA, 2148 bp, synthetic construct
  misc_feature 1..2148: note = Description of Artificial Sequence: Synthetic coding sequence
  source 1..2148: mol_type = other DNA
atgatgcaggagagcgccaccgagacaatcagtaatagtagtatgaaccagaatgggatgtcaacgctgtcatcacagcttgacgccggaagccgcgacggacggagtagcggtgatacttccagcgaagtgagtaccgtagaactgctgcatttacaacagcagcaggccctgcaggccgctcgacagctgctcttgcaacagcagacaagcggtctgaagtcacccaagagttcggacaaacagaggccgcttcaggttcccgtgagcgtagccatgatgactccacaagtgatcactccgcagcagatgcagcagatcctgcagcagcaagtcctgtcccctcagcagctgcaggctttgctgcaacagcagcaggcagtgatgctacagcaacagcagttgcaggaattttacaaaaaacagcaggaacagctccatttgcagctgctgcagcaacagcagcaacagcaacagcaacagcagcagcagcagcagcagcagcaacagcagcagcagcaacagcagcagcaacagcaacagcagcagcagcaacagcagcagcaacaacagcaccctggaaaacaagcgaaggagcagcagcagcagcagcagcagcaacagcagctggcagctcagcagcttgtattccagcagcagttactgcagatgcagcaattgcagcagcagcagcacctactctcactccagaggcaggggctgatctcaattcctccaggccaggcagcgctgcctgtacaatcacttcctcaggccggactttcacccgctgagatccagcagttatggaaggaggtgacaggagtacacagtatggaagataacggaatcaaacacgggggactggacctgacaacaaataactcaagtagtacaaccagttccaatacatcaaaggcatcccctcccattacccaccactccattgtcaacggccaaagttccgtcctgtcagcccgtcgggacagctcctctcacgaggagaccggcgcttcacacacgttgtatggtcacggtgtttgtaagtggccagggtgtgagtctatttgtgaggacttcgggcaattcctgaagcaccttaataacgagcatgctctagatgatcgctccacggcgcagtgccgggtccaaatgcaggtggtgcagcagcttgagattcagctgtccaaggagagagagaggctgcaggcaatgatgacacacttacacatgaggcccagtgagccgaaaccatccccaaagccattgaatttggtatcaagtgtaacaatgagcaagaacatgctggaaacctctccccagtccctgccccaaacacctacaactcctacagccccagtcacccctataactcaggggccatccgtgattacaccagcctccgtccccaacgtcggggctatcagacgcaggcacagtgataagtacaacatcccaatgagcagcgagattgcccctaactatgaattttataagaatgccgatgtgcgccctcctttcacttacgctactctgatacgccaggcgatcatggagtcatctgacagacaactgacccttaacgaaatttacagctggtttacacggacttttgcgtacttcagaaggaatgctgccacttggaaaaacgcagtacgtcacaacttgagcttacacaaatgctttgtgagggtcgaaaatgtcaagggtgccgtttggactgtggacgaggtggagtatcagaagcgacgcagtcagaagatcacaggcagtccaaccctggtcaaaaatatccccacatcgctaggttacggggctgcactgaacgcttccctgcaagccgcattagctgaatccagtctgccgctgctgtcaaatcctgggctgatcaataacgcgtctagtgggctgttacaggctgtccacgaagatctgaacggaagcctggatcatatcgacagtaatggcaattcctcccccggttgttctccacagcctcacatccacagtatccacgtaaaagaggaacccgtgattgcagaagacgaggattgccccatgtcgctggtgacaactgctaaccattccccagagctggaagacgatcgggagattgaggaggagcctctgtccgaggatctagagtag

SEQ ID NO: 223574 - DNA, 1149 bp, synthetic construct
  misc_feature 1..1149: note = Description of Artificial Sequence: Synthetic coding sequence
  source 1..1149: mol_type = other DNA
atgatgactccccaggtcatcaccccacaacaaatgcaacagattctccagcaacaggtgttgagcccacagcaattacaggccttgctgcagcagcagcaggccgtgatgctgcaacaggatttcctggattcaggtctggaaaactttagggccgctctggaaaagaaccaacaattgcaggaattttacaaaaaacaacaggagcaattgcaccttcaactgctccagcagcagcaacagcaacagcaacaacagcaacagcagcagcagcagcagcaacagcagcaacagcagcagcagcagcagcaacaacagcagcagcagcagcaacagcagcagcaacaacaccccggaaagcaggccaaggaacagcagcagcagcagcagcagcagcagcaactggccgctcaacagctggtgtttcaacagcaacttttacagatgcagcagctgcagcagcagcagcatctcctgtccctacagcgacagggcctcatctccattccacctgggcaggctgccctccccgtgcagtcactacctcaggcaggtttgtccccagctgagattcagcagttatggaaagaggtcactggggttcacagcatggaagacaacgggattaagcacggaggcctggatttgacgaccaataacagcagttcaactacctcaagcaacaccagcaaggcctccccccctatcacccaccactctatagtgaatggtcagtcttcagtcttatccgccagacgagacagtagctcacacgaagagaccggcgcttcccacactctgtatgggcatggcgtgtgtaaatggcctggatgcgagagtatctgtgaggattttggacaattcctgaagcacttaaataatgagcacgcccttgacgacaggtccaccgcccaatgtcgggtgcaaatgcaagtggtgcagcaattagagatccaattgtcaaaggaacgcgagcggcttcaggccatgatgacccatttgcatatgcgcccaagcgagccaaagcctagtcccaaaccgaacatttgcaaagttacctatcgatgcatttggatgttcctacgattcagcaactacgcagaggtcttgctctatattcctgaaaaactgacaccagtggcgctctag

SEQ ID NO: 223575 - DNA, 2199 bp, synthetic construct
  misc_feature 1..2199: note = Description of Artificial Sequence: Synthetic coding sequence
  source 1..2199: mol_type = other DNA
atgatgcaagaatctgccaccgagacaatttcaaatagctctatgaaccagaatggcatgtcaacactgagttctcaactggacgctggcagtagagacggcaggtcatccggcgacacatcttcagaggtgagtactgtcgagctgcttcacttacaacagcagcaagccctccaggctgcccgacaacttttgctgcagcagcaaacgtccggactgaagtctccaaagtcctctgacaaacagcggccactgcaggtgcctgtatccgtggccatgatgactccccaggtgattacaccacagcagatgcaacaaattcttcaacagcaggtgctctctccccaacagctacaagctttactgcagcagcagcaagccgtgatgctgcagcaggactttctcgatagcggcttagagaattttcgggcagccctagaaaagaaccaacagcttcaggaattctacaagaagcaacaagagcagctccacctccagctgctgcaacagcaacaacagcagcagcagcaacagcagcagcaacagcagcagcagcagcagcagcagcagcagcagcagcagcaacagcaacagcagcagcagcagcaacagcagcagcagcaacaccccggaaaacaggcaaaggagcagcagcaacagcagcaacaacagcaacagttagctgcccaacagttggtatttcaacaacaacttctccagatgcagcagctccagcaacagcagcatctactgtcactgcagagacaggggctgatatcaatcccgccaggccaggctgccttgccggtgcaaagcttgcctcaggccggactgtccccggctgaaatacagcagttgtggaaagaggtgactggcgtgcacagtatggaagacaatggaattaagcacggcggtctagacctcactacaaacaatagcagttcaactacctccagtaatacaagcaaagcgtcccccccaatcactcatcatagcattgtcaacggacagtcctccgtgcttagcgccaggcgggactcctcatctcatgaggagaccggcgcatctcatactctgtacggccatggcgtttgcaaatggccgggttgcgaaagcatttgtgaggactttggccagtttctaaagcacctcaacaacgaacatgctttggacgatcggagcacagcccagtgccgagtgcagatgcaggtggtccaacagttagaaatacagttatctaaagaacgcgagaggctgcaggcaatgatgacccatctgcatatgaggccaagtgaaccgaaaccatcgccaaagccattgaatctggtttcaagtgtgacaatgagcaagaacatgctcgagacttccccacagtctctcccacagactcctaccaccccaaccgccccagtgactccaatcactcaaggcccaagtgtgatcacaccagcgtccgtgcccaacgtgggggcaattaggaggcggcattcagataaatacaatatacccatgagcagcgagattgcccctaattacgaattttataagaacgccgacgtaagacctcccttcacttatgctaccctcatccgacaggccattatggagagtagcgatcgacagctgacactgaacgagatctattcatggttcaccagaacctttgcatactttagaaggaacgcagccacctggaagaatgccgtacgccacaacctgagcctccacaaatgtttcgtcagggttgagaacgttaaaggagctgtttggacagtggacgaagtggagtaccagaaacgtcggtcccagaaaataaccgggtctcccactctggtcaagaacatcccaaccagtcttggatatggagctgcgctgaatgcgtctcttcaggccgcattagccgagagcagtcttcccctgctcagcaaccccggtctgattaataacgcttcctccggcctgctgcaagcagtccatgaggacctgaacgggagcctcgatcatatagattccaatggcaattcctctcctggctgtagccctcagccacacatccattccattcatgtaaaagaagagccagtcatcgccgaggacgaggattgtcctatgtccctggtgactacagcgaatcactctcccgaattggaggatgacagagagatcgaggaggaaccactgtctgaagacctcgagtag

SEQ ID NO: 223576 - DNA, 2223 bp, synthetic construct
  misc_feature 1..2223: note = Description of Artificial Sequence: Synthetic coding sequence
  source 1..2223: mol_type = other DNA
atgatgcaagagagcgctactgaaacaatctcaaactctagtatgaatcaaaatgggatgtctacactgtcatctcagctggacgcaggctctcgagatggtagatcatctggcgatacaagtagtgaggtgtcgacagtggagctgctgcatctgcagcagcagcaggcactgcaagccgcaaggcagctgctcctccagcaacaaacaagcggactcaagtccccaaaaagttcagacaagcagaggccgctccaagagctcttgccggaaaccaagctttgcatatgtggtcactcttctggagacggacacccacacaacactttcgccgtgcccgttagtgtggccatgatgaccccacaggttatcaccccccaacagatgcagcagatccttcagcagcaagtactgtccccacagcaactgcaagcattattacaacagcaacaggcagtgatgttgcagcagcaacagcttcaggagttctataaaaagcagcaggaacagcttcacctccagctactgcagcagcagcagcagcagcagcagcaacaacaacagcagcaacaacagcaacagcagcagcagcagcagcaacagcaacagcaacagcagcaacagcagcagcaacagcagcagcaacagcaccccggaaaacaggctaaggaacagcagcaacagcagcagcagcagcagcagctcgctgcgcagcaactggtatttcagcagcaattactccagatgcagcagctgcagcaacagcaacacctgctctctctgcagaggcagggcttgattagcattcctccgggtcaggctgcccttcccgttcaaagtctcccacaggcaggcctgtcacctgccgagatccagcagctctggaaagaggtcacaggcgtacacagtatggaagacaatgggataaaacatggtggtttagatttgacgacgaacaacagctcaagcacaacatcaagcaataccagcaaggcatctccccctataacgcaccactctatagttaacggccagtcaagtgttctgtccgcaaggagagactcgtcaagccacgaggagactggtgccagtcatacattgtacggacatggtgtctgtaagtggcctggatgcgagagtatctgtgaggatttcgggcagttcctgaaacatctgaacaatgagcatgccctggacgacaggtcaaccgcccagtgcagggtgcaaatgcaggttgtgcaacagctcgagatacaactgagtaaggagcgcgaacggctccaggccatgatgacacatctgcatatgaggcccagcgagcctaagccttcacctaagcccctaaaccttgtgtctagcgtgactatgtcgaaaaatatgctggagacctcccctcagtcactccctcagacacctacaactcccactgcacccgtgaccccaatcactcagggcccttccgtgataacgccggcaagcgtcccaaatgtgggggctattagaagaaggcactctgacaagtacaatatccccatgagttcggaaatagctcctaactacgaattttacaagaacgctgatgttaggcctccttttacatatgccactctaattcgtcaggctattatggaaagctccgacaggcaactgaccctgaatgaaatctacagctggttcacacgcacattcgcctactttcgcagaaacgccgcaacctggaagaatgctgtgcgccacaatctgtctttgcacaaatgtttcgtacgcgttgaaaatgtgaaaggagctgtgtggacggtggatgaagtggaataccagaagcggagatcgcagaagatcacggggtcaccaaccctcgtaaaaaacatccctacttccttaggttatggagcagcactaaacgcgtcgttgcaggctgcgctggcagagagctctctgcctttattgtctaatcctggactgataaataacgccagttccggcctcctgcaggctgtccacgaggatctgaacggttcgctagatcacatagatagcaacggcaactcaagtccgggttgttccccccagccccacatccactccattcatgtgaaggaggaacctgtgatagccgaagacgaagactgcccaatgagcctcgtcacgacagccaatcattccccagagctcgaagacgatcgagagatagaagaggaaccactaagtgaagatctggaatag

SEQ ID NO: 223577 - DNA, 1191 bp, synthetic construct
  misc_feature 1..1191: note = Description of Artificial Sequence: Synthetic coding sequence
  source 1..1191: mol_type = other DNA
atgcctaaccccagaccaggcaaaccaagtgcgccttcattggctctggggccatctccaggagcttctccctcctggcgcgctgcccctaaagcgtccgaccttctaggtgccagggggcctggaggtacattccaagggagagacctccggggtggtgctcatgcctctagctcttcactaaaccccatgcccccttcccagctccaactaagtaccgtcgatgcgcacgctcggacccctgtgctccaggtgcaccccctagaatctcctgcgatgattagcctgaccccacccacaaccgctacaggcgtgttctcactgaaagctcgccctggcctccccccaggcattaacgttgccagcttggaatgggtgtcaagggagccagcattattgtgcacattccccaacccatcagcccctaggaaagatagcactttgtccgcggtgccgcagagctcttatcctctgctcgctaatggcgtgtgcaagtggcctggatgcgagaaagtcttcgaagagcccgaggacttcctcaaacattgccaagccgatcaccttctcgacgaaaaaggcagggctcaatgtcttctgcagagggagatggtccagtcacttgaacagcaacttgtgctcgaaaaagagaaactgtcagcaatgcaggctcacctggctggtaagatggcacttaccaaggcatccagcgtggccagctcagataagggtagctgctgtatagtggcggcaggcagccaggggccagtggtgcctgcttggagcgggcctagggaagcgcctgattctttgttcgccgtgaggcgacatctctggggtagtcacggcaattccacgttccctgaattcttacataacatggattacttcaaattccacaatatgaggcctcctttcacttacgctacgttgattagatgggccatactggaagcacctgaaaaacagcgcacactgaatgagatttatcattggttcacacgaatgttcgccttcttccggaatcatccagctacatggaaaaacgctatacgacataatctctcccttcacaaatgcttcgttcgagtggagtcggaaaaaggcgcagtgtggactgttgacgagcttgagtttaggaaaaaacggagccagcggccatcgaggtgcagtaatccaacccctggaccttag

SEQ ID NO: 223578 - DNA, 1296 bp, synthetic construct
  misc_feature 1..1296: note = Description of Artificial Sequence: Synthetic coding sequence
  source 1..1296: mol_type = other DNA
atgccaaaccccagacctggtaagcctagcgccccatccctggccctcgggccttctccaggcgctagtccttcatggagagccgctccaaaagcctcagacctcctgggcgcacggggacctggaggcacgttccagggccgagacctccgcggaggcgcacatgccagcagctcctctttgaatccgatgccaccgtctcagctgcaactcccaaccctgcctctcgtcatggtcgctccaagtggggcaaggctcggtcccctgccacatctgcaggcgctacttcaggacaggccgcatttcatgcatcaactcagcaccgtggacgcccatgcaagaacaccagtgttacaggtgcaccctctggaaagcccagccatgatttctctgactccacccactactgcgaccggcgttttctccctgaaggccagacctggactccccccagggattaatgtagcctctctagagtgggtgagccgagaaccagctctgttgtgtaccttccccaacccttctgccccaagaaaggacagcacattgtccgctgtcccacagtcaagctatcctttgctagccaacggagtgtgtaagtggccgggatgcgagaaggtcttcgaggagccagaggacttcctaaaacactgtcaggccgatcatttactcgacgagaagggcagagcacagtgcctgctacaaagggaaatggtccagtcactcgagcagcaactcgttctggaaaaagaaaaactttctgctatgcaggctcaccttgctgggaagatggctcttacgaaggcctcttccgttgcatcctctgacaaaggttcctgttgtatcgtggctgctggttctcaaggaccagtagtgcccgcttggagcgggcctcgggaggcaccagattctctgttcgccgtgcgaagacatttgtggggctcgcacggtaacagcacatttcctgagttcttgcataatatggactattttaagttccataacatgcgacctccgttcacatacgccactctcatccggtgggccatcctggaggccccagagaaacagaggacactgaacgaaatatatcactggttcacacgcatgttcgctttttttaggaaccacccggctacatggaagaacgcgattcggcacaatctttccctacacaagtgcttcgtgagggtggaatccgaaaagggggcagtatggactgtggacgagttagaattcaggaagaaacgatcacagaggccgagcaggtgttccaatcccacgcccggtccttag

SEQ ID NO: 223579 - DNA, 1215 bp, synthetic construct
  misc_feature 1..1215: note = Description of Artificial Sequence: Synthetic coding sequence
  source 1..1215: mol_type = other DNA
atgcctaatccccgtccaggcaagccttcagcaccttccctagccttagggccatctcccggagcaagtccttcatggcgagccgctccaaaagcgtccgatctgctcggcgcacgtgggcctggaggaactttccagggaagagatttacgaggcggtgcccacgcaagtagcagctccctgaacccaatgccacctagtcagctgcaactgcctaccttgcccctggtgatggttgccccttccggtgccaggctcggccctctcccacacttacaggctctgctgcaggacagacctcatttcatgcaccaactgagtaccgtggacgcacatgcaagaacccctgtcctgcaggtgcaccctttggaatctccagccatgatcagcttgactcctcccaccactgccacaggtgtcttctctttgaaagctcggcctggtcttccccctggcatcaacgtggctagtttagagtgggtgagccgcgagcctgccctcctgtgcacattccctaacccatccgctccacgaaaggattcaaccctgagcgcagtgccccagtctagctacccgcttctggccaatggagtctgcaagtggccaggctgtgagaaggtgtttgaggagccggaggacttcctgaaacattgccaggccgaccacctgctcgatgagaaggggagggcccagtgccttctgcagcgagagatggtccagtctctggaacagcaagcttctagcgataaggggagctgctgcatcgtcgcagctggatcgcaggggcctgtcgtgccagcctggtcaggcccaagagaagcccctgattccctctttgccgttagacgccatctctggggtagccacgggaactctactttccccgaatttttacacaatatggattatttcaagtttcacaatatgcggccacctttcacgtacgctactctgataagatgggccatacttgaagcaccagaaaagcaacggactttgaacgagatttaccattggtttactcgtatgttcgcgttctttagaaatcaccctgcaacctggaagaacgcaattcggcacaatctgtccttgcataagtgttttgtccgggtcgaatccgagaaaggggcagtctggaccgttgacgagctggagttcaggaaaaagcgatcccaacgcccaagccggtgctcgaaccccactcctggcccttag

SEQ ID NO: 223580 - DNA, 1191 bp, synthetic construct
  misc_feature 1..1191: note = Description of Artificial Sequence: Synthetic coding sequence
  source 1..1191: mol_type = other DNA
atgcccaatcctaggccaggaaagccctccgccccaagcctagccctgggcccaagtcccggagctagcccttcatggcgcgctgcgcctaaggcctccgacctccttggggctagggggccaggcggtaccttccagggcagagaccttaggggtggggctcatgcctcgtcttcatcgttgaatcctatgcccccaagccagctgcaactgtccacagtggacgcccatgctcgaacccccgttctgcaggtgcaccctctcgagtctcccgcaatgatatcactgactccaccaactaccgctaccggcgttttttctttgaaggccagaccaggcctgccacccggaattaatgtggcctcacttgagtgggtatcacgggagcccgctctcttatgcacctttcccaatccctccgcccctcgaaaggacagtacgctgtcagcagtgcctcaaagctcttatcccctgctcgctaacggcgtgtgcaagtggcctggctgcgaaaaggtttttgaggagcctgaggatttcctgaagcactgccaggcagatcacttgctggacgaaaaaggtcgggcacaatgcctactccagcgggagatggtacagagccttgaacagcagctggtccttgagaaagaaaagctgtccgctatgcaggcccatctggccggaaagatggcactgacaaaggcatcaagcgtggcctcaagtgataaaggtagctgttgcatcgtggccgctggcagtcaggggcctgtcgtgcctgcgtggagtgggccaagggaagcgccagattctctctttgcggttagacgacacctgtgggggagccacggcaatagcacattccctgagttcctccataacatggattattttaaattccacaatatgcgacctcccttcacatacgctacattgatccgctgggccatattagaagccccagagaaacagaggacacttaatgagatctaccattggtttacccggatgttcgcattctttcggaatcaccccgcaacttggaagaatgctattcgccacaacctatctctgcacaagtgcttcgttcgagtagaatcagagaagggtgctgtctggacagtggacgagctggaattcagaaagaagcgctcacagcgcccatcccggtgcagcaaccctactcccggaccttag

SEQ ID NO: 223581 - DNA, 2043 bp, synthetic construct
  misc_feature 1..2043: note = Description of Artificial Sequence: Synthetic coding sequence
  source 1..2043: mol_type = other DNA
atgatggtggaatccgcatccgagactatccgaagcgcccctagcggtcagaacggagtgggctctctctctggacaggctgacggctcttcaggcggtgccaccggtacaaccgcctctggtacgggccgagaggttaccacaggtgcagacagtaatggagagatgagccctgccgaactgttgcacttccagcagcagcaggcgctgcaagtggcccgacaatttctgcttcaacaggctagcggactgagctcacccggtaacaatgattcaaagcaatcagcatcagccgttcaggtacccgtgagcgtggccatgatgtcaccccaaatgttaacgccacagcagatgcagcagatactgagcccacctcagttacaggcactgttgcaacagcagcaggcactgatgctgcagcagcttcaggagtactacaaaaagcagcaagagcagctgcacctacagcttctgacacagcaacaagccggtaaaccccagcccaaagaagcattgggtaataagcagctggcatttcaacagcagctgcttcagatgcagcagctgcagcaacagcacctgcttaatctgcagcgccaggggttagtttccctgcagcccaaccaggcgagtgggcctttgcagaccctaccacaggccgctgtgtgccccaccgacctaccacagctctggaagggagagggcgcacctggtcagcctgccgaggacagcgtgaagcaagaagggcttgatctaactgggacagctgccacagccacgagcttcgcagcacctccaaaggtttctcccccacttagtcatcataccttgcccaatggccagcctactgtgctgacttcacggagagactctagcagccatgaggaaacccccggttcgcaccctctctacggtcatggtgaatgcaagtggccaggctgtgagacactgtgtgaagacttgggacagttcatcaagcacctgaacaccgagcacgctttagacgacaggtctacagctcaatgtagggtgcagatgcaagtagtccagcagctagaaatccagctggcaaaagagagcgagcggctgcaagctatgatggcacatcttcatatgcggccttccgaacctaagccattctctcaaccgctcaatcccgtacccggatcctcttcatttagcaaggttactgttagcgcagctgacagcttccccgacggcctcgtccatccacctacttcagccgcagcgcctgtgacaccactgagaccccctggactgggctcagcttcccttcacggcggaggaccggcacgccgaagatcaagcgataagttctgcagcccaattagttctgagctggcccagaatcacgagttctacaaaaatgccgacgtgaggcctcctttcacctacgcttcgctcattcgccaggccattttggagacccctgatcggcaactgacactgaatgagatttataattggtttactcggatgttcgcatatttccgacgcaacacggccacttggaaaaacgccgttcgccacaacctgtctcttcacaaatgctttgttcgggtcgaaaacgtcaagggagccgtgtggacagtggatgaaagagagtaccagaaacgtagacccccaaaaatgaccggatctcccacactggtcaagaacatgatctcaggattaagttatggcgcattgaacgcctcctaccaggccgctcttgctgagtcatctttcccgctcctgaacagcccgggaatgctgaaccccggttcggcatcatcactgttgccgctgtctcacgatgacgtgggcgctcctgtcgaaccactgccatcgaacggctcaagtagcccccctcgcctcagtccaccccagtacagccaccaggtgcaggtgaaggaggagccagctgaggcggaagaggatcgacaaccagggccaccactgggcgcaccaaacccgtcggcttccggacccccagaggaccgcgacctcgaggaagaactgcccggagaagaactgtcttag

SEQ ID NO: 223582 - DNA, 2037 bp, synthetic construct
  misc_feature 1..2037: note = Description of Artificial Sequence: Synthetic coding sequence
  source 1..2037: mol_type = other DNA
atgatggttgagtccgcgtcagagactattaggtctgctcccagtgggcagaacggtgttggatccctcagtggccaagctgatgggtcctctggtggcgctaccggtactaccgcgagcggaacgggtcgcgaggtcaccactggcgcagactcaaacggggaaatgtctccagcagagctccttcactttcagcagcaacaggctctacaggtggcccgtcagttcttgttacaacaggcctctggtctcagcagcccaggtaacaatgatagcaagcagagtgctagtgcagtacaagtccccgttagtgtagccatgatgtccccccagatgctgacgcctcagcaaatgcagcagatcctgagtcccccacaactgcaggcacttctgcagcagcagcaagctctaatgctgcagcaagaatactacaagaagcagcaagagcagctgcatctgcagttgctgactcagcaacaggctgggaagcctcagcctaaagaggccctgggtaataaacagctggccttccagcagcagctcctgcaaatgcagcagcttcaacagcagcacctacttaatctgcagcgccagggcctagtgtcgctgcagccaaatcaggccagcggtcctcttcaaacgctgccccaggcagccgtctgcccgactgacctgccccagctctggaagggcgaaggcgcaccaggtcagcccgctgaggacagcgtgaagcaggaggggctagacctgaccggcacagcagctacagcaacatccttcgccgcaccgcctaaagtgagcccacccctcagccaccacaccttgccgaacggtcaacccactgtcctgacctcaaggcgcgacagctcctcacacgaagaaacccccggatctcacccattatacgggcatggcgagtgcaagtggcccggttgcgagaccctgtgtgaagatctcgggcaatttatcaaacacctcaataccgaacacgccctggacgacaggagcaccgcccagtgccgggttcagatgcaggtagtacagcagcttgagatccagctagccaaggaaagtgaacggctccaggctatgatggctcatctccacatgcggccttccgaaccgaagccattctctcagccactgaacccagtgcccggatccagcagcttttccaaggtgaccgtgtcggcagccgacagctttcctgacggactagtgcaccctccgacaagcgcggcagcccctgtcacccccctgagaccaccgggacttggaagtgcttccctgcacggaggtggacctgctagacgtcgtagtagcgacaagttttgctcccccatcagctctgaattagcccagaatcacgagttttacaaaaatgcagacgtcaggccccctttcacatacgcctccctcattcgacaagcaatcctggaaaccccagatcggcagctgacgctcaacgagatttataattggttcacaagaatgtttgcttacttcagaaggaatacggcaacatggaaaaacgccgttaggcataatttatctctccataagtgcttcgttagggttgagaacgttaagggcgcagtgtggactgtggatgagcgggagtatcaaaaacgcagacctcctaaaatgaccggctcccctaccctagttaaaaacatgatatcagggctgtcatatggggctctcaatgcatcctaccaagccgctctcgctgagtctagttttcccctcctgaattcacccggaatgttgaaccctggttctgcctcttctctgttgcccctgtctcacgacgatgttggcgctccagttgagcccctcccgtcaaatggcagcagctcacccccacgcctgagccccccacagtattcacaccaggtgcaggtgaaggaggagccagctgaggcagaagaagatagacaaccaggcccacctttaggcgctccaaaccctagcgcctctggccctcccgaggaccgtgatttggaggaggagctccctggggaggaactatcctag

SEQ ID NO: 223583 - DNA, 2043 bp, synthetic construct
  misc_feature 1..2043: note = Description of Artificial Sequence: Synthetic coding sequence
  source 1..2043: mol_type = other DNA
atgatggtggagagcgctagtgagaccatccgttcggccccatctgggcaaaatggtgtcggctccctctctgggcaggccgacggatcgtccggaggagcgactgggactaccgcatccggcaccggccgtgaagttacaacaggggcagattcaaatggcgaaatgagccctgcagaactgctccattttcaacagcagcaagctcttcaggtggctaggcagtttcttctgcagcaggcttctggacttagtagtcccggtaataatgactccaaacagagtgctagcgccgtccaggttcccgtatcagtggccatgatgtcaccacagatgctgaccccccagcagatgcagcagatcctctctcctccccaactccaggcccttcttcagcagcaacaagctttgatgcttcagcagctccaggaatactacaaaaaacagcaagagcagcttcacctgcagctgctgacacagcaacaggccggaaagccccagccgaaggaggctctgggaaataaacaactggctttccagcagcaactgctgcagatgcagcagctccagcagcagcatctcttaaatctgcagaggcagggactggtgtcactccaacccaatcaggcttccggccctctgcaaacattaccccaggcagcagtttgccccacggatctcccgcagctgtggaagggcgaaggtgctcctggccagcctgccgaagactctgttaaacaggagggactcgacctgaccgggacagctgcaaccgccacgtcgtttgcagctccaccaaaggtcagcccacctcttagccatcacacgctgccaaatggccagcctaccgtgttaactagccgtcgcgacagctcctctcacgaagagacgcccggtagtcaccctctttacggtcacggcgaatgcaaatggcctggctgcgaaacactctgcgaagatttaggacaatttattaagcaccttaataccgaacacgccctggatgacaggtctaccgctcaatgcagggtccaaatgcaggtggtgcagcagttggagattcaactggctaaggagagcgaacgcttgcaagcaatgatggctcaccttcacatgcggccatctgagccaaagcccttttcacagcccctcaatcccgtccccggaagctctagcttcagcaaggtgaccgtatcagccgctgatagttttccagacgggcttgtccaccccccaacaagcgcagctgctccagtgactccactccgaccacccggactcggctcagcctctctgcatggcggtgggcctgcaaggcgccgtagtagcgacaagttttgtagtccaattagtagtgagctcgctcagaaccacgaattttacaaaaacgccgacgtcaggcctccttttacctatgcgtctttaattaggcaggcgattttggaaacacctgacagacagctgactcttaatgaaatctataactggttcacccggatgtttgcctatttccggagaaacaccgctacctggaaaaacgccgtgcggcataacctttccctgcataagtgctttgtccgagtggagaatgtcaaaggcgctgtgtggaccgtggacgagcgcgagtaccagaagcgccgtccacctaagatgaccggtagcccaactcttgtgaagaatatgatcagcggcctctcttacggggctttgaatgccagctaccaggcggctctagccgagagcagcttccctctgctgaattctccgggtatgctgaaccccggtagcgcttctagcctgctcccattatcacatgacgacgttggcgcacccgtggagccattgcctagtaacggctcatcatcacctcccaggctgtctccaccacagtacagccatcaggtacaggttaaggaagaaccagcagaggccgaggaggaccggcaaccaggtccacccctgggggcaccaaacccatctgcctctggccctccagaagatagggatctggaagaggaattaccgggagaggaactgagctag

SEQ ID NO: 223584 - DNA, 2004 bp, synthetic construct
  misc_feature 1..2004: note = Description of Artificial Sequence: Synthetic coding sequence
  source 1..2004: mol_type = other DNA
atgatggtcgagagcgcgagtgagactataaggagtgctccttcgggccagaatggggtggggtctcttagcgggcaggcggacgggagtagcgggggagctaccggtactaccgcctcgggcaccggacgtgaggtgacaaccggagcagattcgaatggcgaaatgtctccagcagagctgctgcatttccagcagcaacaggcgctgcaggtggcccgacagtttctactccaacaggccagtgggctcagcagccccggaaataacgattccaagcagagtgcctcagccgtgcaagtgcctgtgagcgtcgctatgatgtcaccccagatgctcacccctcaacagatgcagcaaattctgtcaccacctcagctccaggccctcctgcagcagcaacaggcgctaatgctgcagcagttacaagagtactacaaaaagcagcaagagcagctccatcttcagctcctcacccagcaacaggcagggaaaccccagcctaaggaagcccttggcaataagcaattagcatttcaacagcagctgctacaaatgcagcagcttcagcaacagcatcttcttaatttacaacgtcaaggcctagtctcactgcagccaaaccaggctagtgggcctctccagacgttgccccaagcggtctgcccaacagacctaccacaactgtggaagggcgagggcgcacctgggcagccagctgaggatagtgtgaagcaagagggtctggacttaaccggcacggcagctaccgctacttccttcgcagcaccccctaaagtctccccacctctgagccaccatacgctgcccaacgggcagcccactgttttgacatcccgccgagactctagttctcatgaggaaacaccaggctcccacccactgtacggccacggagagtgtaagtggcctggctgtgagacactttgtgaagacctcggtcagtttattaaacacctcaacactgagcatgctctggacgacaggtcaaccgcacagtgtagagttcagatgcaggtcgttcagcaactggagatacagttggctaaagagtctgaacgcttacaagcgatgatggcccacctgcatatgagaccttctgagcctaagcccttcagccaacccgtgactgtttcagctgccgactcattccctgacggcctggttcatcctcccacctctgccgctgccccagtgacgccactgcgaccccctgggttaggtagtgccagtctgcacggcggaggtcccgcaaggagacgatcttctgataagttctgttcaccgatatcctctgaactggcacaaaaccacgaattttacaagaatgccgatgtacggcctccttttacctatgcgtctctgatcagacaggccattctcgaaacacccgatcgccaactgaccctgaatgaaatatataactggttcactagaatgtttgcgtacttcaggcggaatacagccacctggaaaaacgcagttagacacaacctgtcactccacaagtgtttcgttcgggttgagaacgtgaagggcgctgtgtggactgtggatgagagagaatatcaaaaaaggagacctcccaaaatgaccggctcccctaccctggttaaaaatatgatatccgggctctcctacggtgctttgaacgcctcttaccaggctgcactggcagagtcatcttttccccttcttaatagcccgggtatgctgaaccctggttcagcgtcttccttgttgcctctctctcatgatgacgtgggagcgcctgtcgagcctctgccaagcaatgggtctagctcgcctccccgattgtctccgccacagtactcacaccaagtacaagtaaaagaggaacctgccgaagccgaggaggaccggcagccgggacctcccctgggagccccaaatccgagcgcttccggtcctcccgaggatcgtgaccttgaggaggaactcccaggagaagaattaagctag

SEQ ID NO: 223585 - DNA, 2007 bp, synthetic construct
  misc_feature 1..2007: note = Description of Artificial Sequence: Synthetic coding sequence
  source 1..2007: mol_type = other DNA
atgatggttgagtcagcttccgagaccatccgaagcgcaccttctgggcagaacggtgttggatctcttagcgggcaggccgacggctcctccggcggagctacaggaaccacagcctcggggacggggcgagaggttacgacgggggctgacagcaacggtgagatgagccccgcagagctccttcattttcaacagcagcaggccctacaggtggcccgacagttcctgttacagcaggcatccgggttatcgtcccctggcaacaacgactccaaacagtcagcttccgctgtacaggttccagtctctgtcgctatgatgagtcctcagatgcttacaccccagcagatgcagcaaatattgagtccaccgcagttgcaggccttactccagcaacagcaggctcttatgctgcagcagcttcaagagtactacaaaaagcaacaggagcagctgcacctgcagctgcttacccaacaacaggctggcaaacctcaacccaaggaggcactgggtaacaagcaactggcattccagcagcaactcctccagatgcaacaactccaacagcagcatcttctgaatcttcagaggcagggtctggtctccctgcaacctaaccaggcctcagggccattacaaacactcccccaggccgcagtttgcccaaccgacttaccccagttatggaaaggcgagggcgcacccggacagcctgcagaggattccgtcaaacaggaggggcttgacctgactgggaccgcggcaaccgcaacgagctttgctgccccacctaaggtgtcgccgccattaagtcatcatacgctgcctaacggacagcctaccgttctaacctcacgtagagactcaagctcccacgaagagacaccaggatcgcatcctctttatgggcatggcgagtgcaaatggcctggatgtgaaacattatgtgaagatttgggtcagttcataaagcacctgaataccgagcacgccctggacgaccgatccacggcccagtgtcgagtgcagatgcaggtggttcagcagctggaaatacagctggctaaggagtctgaaagactacaggctatgatggcccatctgcatatgcggccttccgagcctaagccctttagccagcccgtgacagtgtccgcggctgacagctttccagatggcttagttcatcctcctacaagtgcggcagccccagtcacccccctgagaccaccagggctcgggtctgcctccctgcatggcggaggcccagccagacgcaggagcagcgacaaattttgctcaccaatctccagcgaactcgctcagaatcacgaattttacaaaaatgcagatgtgagaccaccgttcacatatgcatccctgatcaggcaggccatactcgagactcctgatagacagcttactctgaatgagatttacaattggttcacccgaatgttcgcctacttcaggcgaaacaccgccacttggaagaatgcagttagacataacctgagcttgcataaatgttttgtacgggtcgagaatgtcaagggagccgtctggaccgtggacgagagggaatatcagaagaggcgccctcccaagatgacagggtcacccacactggtcaaaaatatgatcagtggactctcttatggtgctctgaatgccagttaccaggctgccctcgcggagagctccttcccacttcttaattctccgggaatgctgaatcccggtagcgcgagttcacttctcccactcagtcacgacgacgtaggcgcacctgtagaaccactgcctagcaatggctctagctctccaccccgtctctcaccaccccaatattcacaccaggtacaggtgaaggaggaaccagccgaagccgaggaggatcggcaacccggtccaccattaggggcacccaaccctagcgcctctggcccacctgaagatcgcgacctggaagaggaattacccggagaggaactgtcatag

SEQ ID NO: 223586 - DNA, 1212 bp, synthetic construct
  misc_feature 1..1212: note = Description of Artificial Sequence: Synthetic coding sequence
  source 1..1212: mol_type = other DNA
atgaagttggaagtattcgtgccccgtgccgctcacggggacaaacagggttctgacctggaaggggctgggggttctgacgcacctagcccgctgtctgcggctggggatgacagtctggggtcagacggagactgtgctgctaatagtcccgcagctggtggcggtgccagagacactcagggagatggagagcagtcggcagggggtggaccaggagccgaagaggctatccctgccgctgccgctgctgctgtcgttgctgaaggagccgaggccggtgccgctgggccaggagctgggggagccggaagtggcgaaggagctcggagcaagccttatacacggaggccaaaaccaccttacagctatatcgctctgattgctatggcaatcagagatagcgcaggcggacggttgaccctcgccgaaattaacgagtatctaatgggaaaattccctttcttccgaggcagctataccgggtggaggaatagtgtccgccataacctttcgctaaatgactgtttcgtgaaagtgctgagagatcctagccggccatgggggaaggataattattggatgctgaatcccaactccgagtatacctttgcagatggcgtgttcagacggcgtaggaaacgcttgagccatcgcgcacctgttcctgctcccggactccgcccagaagaggcccctggcttacccgcagcacctcccccagcgcctgccgctccggctagccctagaatgaggtcccctgcgcgtcaggaagaaagggcgagtcctgccggtaagtttagtagctcgttcgctatcgacagcattctgcgaaagcctttcaggagcaggcgtctgcgggataccgcccctggcaccacattgcagtggggcgctgctccatgtcctccattgcccgcttttccagcactgctgcccgctgctccctgtcgtgccctgttgcccctatgcgcctatggagccggtgagcctgccaggctgggggctcgagaagccgaagtgcctcctaccgctcctcctttactccttgctccacttccagcagccgcaccagccaagccgctgcggggacctgctgcaggcggagcccatctgtactgccccctaaggttacctgccgcacttcaggccgcatcagttagaaggccgggacctcatttaccctacccagtcgaaaccctgctagcctag

SEQ ID NO: 223587 - DNA, 1626 bp, synthetic construct
  misc_feature 1..1626: note = Description of Artificial Sequence: Synthetic coding sequence
  source 1..1626: mol_type = other DNA
atgagccaacttgtagagtgcgtaccaaactttagcgaaggcaaaaatcaagaggtcatcgatgcgatctccggcgcaataactcagactcctggatgcgttctgcttgatgtagacgcgggaccaagtacaaaccgcacagtatacacctttgttggacctcctgagtgtgtggtcgaaggagccctgaacgcagctcgtgttgcctcccgactcatagatatgagcaggcaccagggggaacatccacggatgggagcacttgacgtgtgcccattcatcccagtgcggggagtttcggtggatgagtgcgtcctttgcgcacaagcctttggccagcgtctagcagaggagctggatgttcccgtgtacctctacggcgaagccgcaaggatggactctaggaggactctacccgctatccgcgcaggcgaatacgaagccctcccaaaaaaattacagcaggcagattgggcgccagacttcggtccttcatccttcgtgccttcgtggggggctaccgccactggggctcggaagttccttattgcctttaacattaatcttctggggactaaggagcaggctcaccggatcgcacttaaccttagggagcaaggacggggtaaagatcagcccggacgactgaagaaagtgcaaggaataggctggtatctcgatgagaaaaacttggctcaggtttccacgaatctcctggatttcgaagtgaccgcactgcataccgtttatgaagagacgtgtagggaagctcaggaactgagtctacctgttgttggaagccagctggtgggcctcgtgcccctcaaggcacttctcgacgcagctgccttttactgcgaaaaggaaaatttattcatcttggaagaagagcaaaggatcaggcttgttgtatcccgtttagggttggactccctgtgcccgtttagtccaaaggagaggatcattgagtatctggtcccagagagaggcccagagagggggttaggctctaaaagtttacgcgctttcgtaggagaggtaggagctaggagtgcagctcctggaggcggaagtgtggcagccgctgcggctgccatgggggcagcactcgggtcaatggtggggttgatgacgtacggtcggagacagttccagtccttagacaccaccatgcgtcggctcatccctcctttcagggaagcatccgcgaaactcacgacactcgtggacgcagatgctgaagccttcacagcctatctggaggctatgcgtctgccaaaaaacacccccgaagagaaggacagaaggacggccgctctgcaggaaggcctcaggagagctgtgagcgtgccactgacactcgccgaaacggtagcatccctctggcctgcactgcaggagctggctcggtgtggaaacctggcctgtcgatctgatctccaggtagctgccaaagccctggaaatgggggtgttcggcgcatattttaatgtcctgatcaatcttagggacattaccgacgaggcctttaaggaccagattcaccaccgagtcagtagccttctgcaagaagctaaaactcaggcagcactcgtgttggactgcctcgaaaccagacaggagtag

SEQ ID NO: 223588 - DNA, 1488 bp, synthetic construct
  misc_feature 1..1488: note = Description of Artificial Sequence: Synthetic coding sequence
  source 1..1488: mol_type = other DNA
atgagccagcttgttgagtgcgtgcctaacttcagcgagggcaagaaccaggaagttatcgacgcaatttctggcgcaatcacccagacacctggttgcgtgctgctcgacgttgacgctggtcccagtacgaatcgtacggtttatacatttgttggacctccagagtgcgtcgtggaaggggctttaaacgcagccagagttgcatcccgtctgattgacatgagccgtcatcagggcgagcatcctcggatgggcgctctggacgtctgcccatttatccctgtgcggggtgtttctgtggacgagtgtgtgctgtgtgctcaggcatttgggcagcgccttgcagaggaactggatgtaccggtgtacctgtatggcgaggccgctcgcatggatagtcgtcgaaccctgcctgcaatcagagccggagaatacgaggccctgccgaaaaaactgcaacaggctgactgggctccagatttcggcccaagctccttcgttccttcctggggagccacagcaaccggggcaagaaagttcttaatcgcctttaacatcaatcttctcggtaccaaggagcaggcacacaggattgcactgaatttacgggagcagggcagaggtaaggaccagccaggccgtcttaagaaagttcagggaattgggtggtatctcgatgaaaagaatctggcccaggtaagcacgaacctcctggatttcgaagtgactgccttacatacggtgtacgaagagacctgcagagaagcacaagaattaagtctgcccgttgtggggtcacagctcgtcggcctggtgccgttgaaggcgctacttgacgcagccgcattttactgtgaaaaggagaacctctttattctcgaggaggagcagcgcattcggcttgttgtttccagactgggcctggattccctttgtccatttagcccaaaggagcggatcattgaatacctggtcccggagaggggcccagagcgcggactggggtctaagtccctgagggcttttgtcggggaggtgggcgcaagaagcgccgctcctggtggcggtagtgtggccgctgccgcagcagcaatgggggcagcactcggttcaatggttgggctcatgacttacggaaggcgtcagtttcagtccctcgacaccacaatgaggcgcctaattcccccttttcgggaagcatcggccaagcttacaactctggtcgacgctgacgcagaagcttttacagcttacttggcgcacgggggtcccacagggggatccgaagcaggatcactgtgcgccgcagatgctgggggtgacgggggtcttgcagtggccggtcccgctggtacagggcctgtatgggagccagggttgccggtccgccctcctggcggaggtcagtctcctggcgatgggcgagtttggaggatatttcaacgggctcaccagcccgagggtcaccacagacgcggaatctag

SEQ ID NO: 223589 - DNA, 1719 bp, synthetic construct
  misc_feature 1..1719: note = Description of Artificial Sequence: Synthetic coding sequence
  source 1..1719: mol_type = other DNA
atgagccaattggtggagtgcgtgcccaacttctctgaagggaagaatcaggaagttattgacgcaattagtggcgctatcacccagacccctgggtgtgtactgcttgacgtcgacgccggtccatcaacaaaccgaactgtctacacgttcgtcgggcctcccgaatgtgttgtggaaggcgctctgaacgcagcacgagtagcatcacgattgattgacatgtcgagacatcagggcgaacaccctagaatgggagccctggacgtgtgcccattcattccagtgcgtggagttagtgtggacgaatgtgtactgtgcgcacaggctttcggacagaggctcgctgaggagctggacgtccccgtctacctctacggagaagccgctaggatggatagccgacggacccttccggctatacgggctggggagtacgaggcactccccaagaaactgcagcaggctgactgggcgcctgattttgggccatcctcattcgtgcccagctggggagctacagctacaggtgctaggaagttcttgattgccttcaacatcaacttacttgggaccaaagagcaggcacaccgaattgcactcaatctgcgggaacagggacgcggtaaagaccagcctggcaggctgaaaaaagtgcagggaatcggttggtatctggacgagaagaatctcgcccaggtgtccacaaacctcttagatttcgaagtaactgcgctccatacggtgtacgaggagacttgcagggaagcccaagaactgtcattgcccgttgtgggctctcagctggtaggacttgttccgctcaaagccctcctcgacgcagcagccttctactgtgagaaagaaaacctgtttattttggaggaggaacagcgaatccggctcgtagttagtcgccttggtctggattctctgtgccccttttcccccaaagaaaggatcatcgagtatctcgtgcccgagcgcggaccggaacggggactagggtcaaaaagcttgagggccttcgtcggagaggtaggggctcgcagcgctgcccctggtggcggaagtgtagcagccgcagcagccgctatgggggcagctttggggagcatggtcggccttatgacctatggacgaagacagtttcagtcacttgacacgacgatgcggcgattaatcccccctttccgagaggcgtcagccaaactcaccacactggtagatgcggatgctgaggcttttacagcatatctcgaagctatgaggctgcctaaaaacactcctgaggaaaaggacagaaggacagctgccttgcaagagggcctcagacgagctgtgagcgtcccccttactctcgccgaaacagtggcttcgctgtggcccgcactgcaagaattggctcggtgcgggaatcttgcctgtcgcagtgatctgcaagtcgcggcaaaggccctggaaatgggcgtgtttggcgcttactttaatgtcctgatcaatctgcgcgacattaccgacgaagcatttaaagaccagcctcctgccggatctcaggatcctgggtgcacgggagccggtctcttaggtgaccccgctggagtgacagtgagagaggcctccccaggcagtgttgcgccaccctcgcccataccaagaggccagagttgcgatctagagacaccgggaactgctggaccgtctactctagaggggtag

SEQ ID NO: 223590 - DNA, 1488 bp, synthetic construct
  misc_feature 1..1488: note = Description of Artificial Sequence: Synthetic coding sequence
  source 1..1488: mol_type = other DNA
atgtctcagctcgtggagtgtgttccaaattttagcgaggggaagaaccaggaggtaattgatgctatctcgggggctattacccagactcccggttgcgttctgttggacgtcgacgccggacccagtaccaaccgcactgtgtatacctttgtgggccctcctgagtgtgtggtcgagggggctctcaacgcagcgagagtggcttctaggctaattgatatgtctcgacaccagggggagcatcccaggatgggagctcttgacgtttgtcctttcattcctgtcagaggagtttccgtggatgagtgtgtgctctgcgcgcaagcattcgggcagagactggctgaggaactggatgtgcctgtctacctgtacggcgaagctgcacggatggattcccggaggacactgcctgccatacgcgctggcgagtacgaggcacttccgaaaaagctgcaacaagcagattgggccccagatttcggtccttcttcatttgtcccctcctggggcgcaacggcaactggggcacggaaattcctgattgcatttaacatcaacctcctgggcaccaaggagcaggctcatcggatagcacttaaccttcgggagcagggtaggggcaaagatcagcctgggcgtctcaagaaggtccaggggatcgggtggtacctggacgagaaaaaccttgcacaggtcagcactaatcttctcgacttcgaggtcactgccttacataccgtatatgaggagacgtgtagggaggcccaagaactgtcgttgcctgtcgttggctcacagctcgtgggtttggtacctcttaaagctctgctcgacgccgcagcgttctactgtgaaaaggaaaacctatttatactagaggaggaacagaggatcaggttggtggtgagtaggctcggacttgactcactgtgtccgttctctccaaaagaacgcataatcgagtaccttgttcctgaacgaggaccagagcggggtctgggctctaaatcattaagagcgttcgtgggggaggtcggcgctcgatcggctgccccaggcggaggttctgtggccgctgcagcagcagcaatgggggcagctctgggctccatggttggcttgatgacatacggaagacgccaatttcagtctcttgatacgaccatgcgaaggcttatccctccatttagggaagcttcagcaaagttgacaactctagtcgatgcagacgccgaggcctttaccgcttatttagctcatggaggcccaacaggaggctcagaagctgggtcactgtgcgcagctgacgcgggaggcgatggcggactggcagtggcgggtcccgcaggaaccggaccagtttgggaacctggcctgcctgtccgtccgcctgggggtggccagagcccaggggatggaagggtgtggcgtatttttcagcgcgcacaccagcccgaggggcaccataggcgtggaatatag

SEQ ID NO: 223591 - DNA, 1626 bp, synthetic construct
  misc_feature 1..1626: note = Description of Artificial Sequence: Synthetic coding sequence
  source 1..1626: mol_type = other DNA
atgtcacagctcgtggaatgtgtgcccaacttctccgaggggaagaatcaagaagttatcgacgccatatccggagctatcacccagactccagggtgtgtcttgctggatgttgatgcgggtccatctacaaatagaacagtgtataccttcgtcggacctccagagtgtgtggtagagggagcattgaacgcagctcgagtcgcctctcgactgatagacatgagccggcaccaaggcgagcatccaaggatgggcgctcttgatgtttgtccgttcatccccgtgcgtggggtctctgtcgatgagtgcgtcctgtgtgcacaggccttcggtcagaggctagccgaggaactggacgtgcccgtttatctatacggagaagctgccaggatggactcccgtcggaccctcccggctattcgagctggagaatatgaagccctgcctaaaaagctccagcaagccgattgggcccctgactttggtccttcttcctttgtcccaagttggggggctactgctaccggggctcggaaattcttgattgcttttaatatcaatctattggggactaaagaacaggcccaccgcatagccttgaacctccgagaacagggcaggggcaaggatcagccgggaagattgaagaaagttcaaggaatcgggtggtacctcgatgaaaagaacctggcccaggtgtctactaatctcctcgattttgaagtgactgccttgcacacggtgtacgaggaaacttgtagagaggcacaggagttaagcctcccagtggtgggctcccagcttgtcggcctcgtccctctaaaggcacttctcgatgccgcagccttctactgcgagaaggagaatctcttcatcctcgaggaagaacagaggattcgcctggtggtgtctagactggggctcgatagcttatgtccttttagtcccaaagaacgaattatcgagtatctggtcccagaacgtggtccggagcgagggctcggttccaagagcctcagagctttcgtaggagaggttggggcaagaagcgccgcacccggaggaggatcagtggccgctgctgcggctgccatgggcgctgccttgggcagcatggtcggcttaatgacatatggcagaagacagttccaatcccttgatacgaccatgcggcgacttatcccaccgttccgtgaagcttccgcaaaactgacgactctagtcgacgccgatgctgaagcatttactgcatatctggaagccatgcgcctgcctaaaaacactccagaagagaaggatagaagaaccgccgcactgcaagagggactgcgccgtgcagtttcagtgcccctgacgctggccgaaaccgtcgcctctctgtggcctgcgctgcaggagctcgcaaggtgcggaaatctcgcatgccgcagtgaccttcaggtagcggcaaaggcgctcgagatgggggtgttcggggcttactttaacgtcctgatcaaccttcgagacatcaccgacgaggccttcaaagaccagattcatcaccgtgtttctagtctcctgcaggaggctaagacacaggcagcgctcgtgctggactgtttggaaacccggcaggaatag

SEQ ID NO: 223592 - DNA, 1719 bp, synthetic construct
  misc_feature 1..1719: note = Description of Artificial Sequence: Synthetic coding sequence
  source 1..1719: mol_type = other DNA
atgtcccaactggtcgagtgcgtccccaacttttctgagggcaagaaccaagaagtgattgacgccatttccggagcgataacccagaccccaggctgcgtgttgctggatgtggatgctggcccatccactaatcggacagtgtacactttcgtcggacctccggagtgcgtcgttgagggcgctctgaacgctgccagggtggctagcagactgattgatatgtcacggcaccagggcgaacacccacgcatgggcgctctggacgtctgcccatttattcctgtcagaggcgttagtgtcgatgagtgcgtgttgtgtgcccaggcattcgggcagagacttgccgaggagcttgacgtgccagtttatctgtatggggaagccgcacgcatggattcgagacgaactctgccagctatccgggcaggtgagtatgaggctttaccaaaaaagttgcagcaagcagactgggcccctgattttgggccttcttcattcgtcccaagttggggggctaccgctaccggtgcaaggaaattcttgatcgcatttaacataaatttgctgggcacaaaagagcaggcacatcggatcgccctgaacctgagggagcagggcagaggtaaggatcaacccggaaggttgaaaaaagtgcagggcatcgggtggtacctggacgagaaaaacttggcccaagtcagtactaatttgttggattttgaagtcacggcactgcacaccgtgtacgaggagacatgtcgggaggctcaggaattgagtctgcctgttgtcggatctcagctggtcggactggtgcctctgaaggccctacttgatgctgccgctttttattgtgagaaggaaaacctgtttatacttgaagaagagcaacggataagattggtcgtttctcggctgggccttgatagcctgtgcccattttctcccaaagagaggatcatcgaatatcttgtgcctgagaggggcccagagcgtgggcttggctcaaagtcactcagggccttcgtgggtgaagtcggggcacgcagtgctgccccagggggtggcagtgtggccgctgccgcagccgcaatgggcgcagccctgggctccatggttgggttgatgacatacggaaggcggcaattccaaagtttggacaccacaatgcggagattgataccacccttccgtgaggcttcagctaagctgaccacactggtggatgcagacgccgaggcatttaccgcgtatctggaggccatgagactgccaaaaaatacacccgaagagaaggatagacggaccgccgctctgcaagagggactccgcagggccgtctcagtcccactgacactggcagaaaccgtggcctccctgtggcctgcactgcaggagctggccaggtgtgggaatctcgcctgtaggtcggacctgcaggtggccgctaaagccctggagatgggagtgttcggggcttactttaacgtgctgattaacctaagagacataacagacgaggcttttaaagatcagcccccagccggatcccaggatcccggatgcacaggtgctggccttctcggcgatcccgctggcgtgaccgtacgagaggcatctcccggttcagtggcgcctccttccccaatcccaagaggccaatcatgcgaccttgagaccccaggaactgctggtccatcaaccctagagggatag

SEQ ID NO: 223593 - DNA, 1779 bp, synthetic construct
  misc_feature 1..1779: note = Description of Artificial Sequence: Synthetic coding sequence
  source 1..1779: mol_type = other DNA
atgagctggggcacggagctgtgggaccagttcgataacttagaaaagcatacgcaatgggggatagatattctggaaaagtatatcaagtttgtcaaggagcggactgaaatcgagttgtcttatgccaaacagctcagaaacctgagcaaaaagtatcagccgaagaagaattccaaggaggaagaggagtataagtacacgtcatgcaaagctttcattagcaacctgaacgaaatgaacgactatgcagggcagcatgaggtcatctcagagaatatggccagtcagattattgtcgatctggctaggtatgtgcaggagctcaaacaggaaagaaaaagcaactttcacgatggaaggaaggcacagcagcatatcgagacatgttggaagcagctggagagctccaaacgaaggttcgaaagagattgtaaggaggcagaccgcgcacagcagtattttgagaagatggacgcggatattaatgtgaccaaagccgacgtggaaaaggcccgtcagcaggcccaaatcaggcaccagatggccgaggatagtaaagctgactatagctcgattctccaaaagtttaatcacgagcagcacgagtactaccacactcacatccccaatattttccagaagatccaagagatggaggagcgacgtatcgttcgcatgggcgaatcaatgaagacgtacgccgaggtcgaccgacaggttatccccatcatcggaaaatgtttggatgggatcgtgaaagctgcagaatctatcgaccaaaagaacgatagtcaactcgtgatagaagcttataaatccggcttcgagccccctggcgacattgagtttgaagattacacacagcctatgaaacgtacagtctctgataactcgttgagtaactcccgcggagaaggcaagcctgacctgaagtttggcggaaaatctaaaggaaaactctggccttttattaagaagaataaatctccaaagcagcagaaggagcctctttcccatcggtttaatgaatttatgacctccaagccaaaaattcattgcttcagaagtctgaaacgcggacactctcttttaaagggggctacccctgaagattttagtaacctgcccccagagcaaagaaggaagaagctccagcaaaaggttgatgagcttaacaaggagatccaaaaggagatggatcagcgcgatgctattaccaaaatgaaggacgtctatctgaagaatccccaaatgggcgaccctgctagtctcgaccataagctagcagaagttagccagaatatcgagaagttgcgagtagagacgcagaaatttgaagcctggctggcggaggtggaaggaagactccccgctcggtcggagcaggccaggcgccaaagcggcctgtatgactcccaaaatcctccaactgtgaacaactgtgctcaggaccgggaatccccagacgggagctacacagaggagcagtcccaagagtcagagatgaaagtgctcgcaaccgacttcgacgatgaatttgacgatgaggaacccctcccagccattgggacctgtaaagcattatatactttcgaggggcagaatgaaggaacaattagtgtcgtggaaggggagactctgtatgtgatcgaagaagataaaggcgacggatggacaagaataagacgaaacgaggacgaggagggctatgtgcccacctcttatgtggaggtttgtctggataaaaatgcaaagggggctaagacttacatatag

SEQ ID NO: 223594 - DNA, 1854 bp, synthetic construct
  misc_feature 1..1854: note = Description of Artificial Sequence: Synthetic coding sequence
  source 1..1854: mol_type = other DNA
atccgatggactgacgaactctgggaccagttcgataacctggaaaagcacactcagtggggcatcgatatcctggagaaatacatcaaatttgtcaaagagcggactgagattgaactctcctacgccaaacagctgaggaatctcagtaagaagtaccagccaaagaaaaacagtaaggaggaagaagagtacaaatacacatcctgtaaagcctttatttccaatcttaacgagatgaatgactatgctggacagcacgaggtgatttccgaaaacatggcatctcagattattgtagatcttgcccgttatgttcaggagctgaagcaagagcggaaatccaattttcacgatggccgaaaggcccagcagcacattgaaacctgttggaaacaattggaaagttcgaaaagaaggttcgagcgcgactgcaaggaggccgaccgggcacagcagtatttcgaaaaaatggatgccgacatcaacgtaacgaaggcggatgtggaaaaggcccgacaacaagcccagatcagacaccagatggctgaagattctaaggcggactacagcagcatcctgcaaaaattcaatcatgaacagcatgagtactatcatacacacattcctaacatatttcagaagattcaagagatggaagaaaggaggattgtgcgcatgggcgaatccatgaagacttatgctgaagtggatcgtcaggttattcccatcatcgggaaatgtctcgacggcatcgtcaaggcagctgaatccatcgatcagaaaaacgacagccaattggtgatcgaggcctataaaagtggatttgagccccctggtgatatcgagtttgaggattacacccagcccatgaaaagaaccgtgagcgacaattcactttcaaattcacggggagaagggaagcccgatctgaaattcggaggaaagagtaaggggaagctctggccttttattaaaaagaacaagctgatgtctctgcttacaagcccacatcaacctccacctcctcccccagcgagcgcctcgcccagtgccgtgccgaacgggcctcaatccccaaagcagcagaaagagcccttaagccacagattcaatgaatttatgacgtccaagcctaagatccattgctttaggtctttgaaaagaggacccagttttaaacaaggggcaactcctgaggattttagcaacctacctcctgagcaaaggaggaagaaactgcagcagaaagtggacgagttgaacaaagagatccagaaagagatggatcagagggacgctatcactaaaatgaaggacgtatatctaaagaacccacaaatgggggatcccgcatctctggatcacaagctggcggaagtcagtcagaatattgaaaagctgagggtggaaacacagaagttcgaggcttggctcgctgaggtggaagggagacttcccgcacgatccgagcaagctcgacgccagagcggtctatacgactctcaaaacccaccaacagtcaacaattgtgctcaagatagagaaagccctgacgggtcgtacaccgaagagcagagccaagagtccgagatgaaggttctggctacagacttcgatgatgaatttgatgatgaggaacctctaccggctatcgggacttgtaaagcgctctatacctttgagggccaaaatgagggtaccatctctgtcgttgaaggtgagacactatacgttatagaagaggacaagggggacggctggacaagaatcagaagaaacgaagacgaggagggttacgtccccacatcttatgtggaggtttgcttagacaaaaatgcgaaggacagttag

SEQ ID NO: 223595 - DNA, 1854 bp, synthetic construct
  misc_feature 1..1854: note = Description of Artificial Sequence: Synthetic coding sequence
  source 1..1854: mol_type = other DNA
atgtcttggggcacagaactgtgggaccagttcgataacctggagaaacacacacagtggggaatagacattctagaaaaatatattaagttcgtaaaggagaggacagagattgaactctcctatgcgaaacaactaaggaatctaagcaagaaataccagcctaagaagaacagtaaggaggaggaagaatataagtacactagctgtaaggcttttatcagcaacctgaacgaaatgaacgattacgcaggccagcacgaagtcataagtgagaacatggctagtcagatcatagtcgatctggcgaggtacgtacaagaactcaagcaggaacgtaaatctaattttcatgacggcagaaaggctcagcaacatatcgaaacctgttggaaacagctggagtcgagcaaaaggcgcttcgagcgtgactgtaaagaggcggaccgagcccagcagtattttgagaagatggacgctgatatcaacgtgaccaaagccgacgtggagaaggccaggcagcaagcacaaattcgtcatcagatggccgaagattcaaaagccgactattcatctatcctccagaagttcaaccacgagcaacacgagtattatcacacacatatccccaatatctttcagaagattcaggagatggaagagagaaggatagtgcgcatgggggagtcaatgaagacctacgctgaagtggataggcaagtcatcccgattatcggcaagtgtttggatggcatcgtgaaggccgcagaatccattgaccagaaaaacgattcacagctcgtcattgaggcttacaagtccggattcgagccaccaggagacattgaatttgaagattatacacagccgatgaagcggacggtgtctgacaattctctgtccaattcgagaggagagggaaagccggacttgaaattcggaggaaaaagcaaggggaaactgtggcctttcattaagaagaataaactgatgtctctgctgacctctcctcatcagcccccaccccctcccccagcatccgcctcacccagcgctgtccctaacggccctcaatccccaaagcagcagaaagagcctctcagtcacagattcaacgagttcatgacctccaaacctaagattcattgctttaggtccctaaaaagagggcattccttactgaagggggcaacacctgaggatttcagtaacctaccacctgagcagcggagaaagaaactgcaacagaaagtggacgagctcaacaaagagattcagaaagaaatggaccagcgagatgctatcaccaagatgaaggatgtctatcttaagaacccacagatgggggacccggctagcctggatcataagctcgcagaggtgagtcaaaacattgagaaactcagggtcgagacccagaagttcgaggcctggctggctgaagtggagggcaggctccctgctagatctgagcaggcccgaaggcaatctggcctgtatgacagccagaatcccccaactgtaaataattgcgcccaggatcgagagtccccagatggtagctacaccgaggagcaatctcaggagtccgagatgaaggtcctggccaccgactttgatgacgagttcgacgacgaagaacctctacccgcaatcgggacctgcaaggccctgtacactttcgaaggccagaacgagggaacgatcagcgtggtggaaggcgagacgctgtatgtcattgaggaagacaagggcgatggctggactagaatccgcaggaatgaggatgaggaaggatatgtgccaaccagttacgtcgaggtatgcctggataagaatgctaaagactcctag

SEQ ID NO: 223596 - DNA, 1827 bp, synthetic construct
  misc_feature 1..1827: note = Description of Artificial Sequence: Synthetic coding sequence
  source 1..1827: mol_type = other DNA
atgtcctgggggacagagttatgggaccaattcgataacctggagaagcacactcagtggggcattgacattctggagaaatacatcaaattcgtgaaggaaaggacagaaattgaattgagctatgcaaagcaactccgtaacctgagtaagaaataccaacctaaaaagaacagcaaagaagaggaagaatacaagtatacgagttgcaaagctttcattagcaacctgaatgaaatgaacgattatgcgggtcagcacgaggtgatatccgaaaacatggcctcccagatcattgtggatctagcgcgatacgtccaggaactcaaacaggaacgtaaaagcaacttccacgacgggagaaaagcacaacagcacattgagacatgctggaagcaattggagtccagtaaaagaagattcgagcgcgactgtaaagaagccgaccgcgctcagcagtattttgagaagatggatgcagacattaacgtcactaaagccgacgtagagaaggctcgccagcaggcacaaattagacatcagatggccgaagacagcaaggctgactacagtagtatcttacagaaattcaatcacgaacagcatgaatattaccacactcatataccaaacatctttcaaaaaatccaggaaatggaggaacggaggatagtgcggatgggggaatctatgaagacatatgcggaggtcgacagacaagtaattccgattattggcaaatgcctggatggtattgtgaaggctgcagagagcatcgaccagaagaatgacagtcagctggtgatcgaggcctacaagtccggctttgagcctcccggtgatatagagtttgaagattacacacagcccatgaagagaacggtgagcgataacagtctctcaaactctaggggggaggggaaacccgacctgaaattcgggggtaaatccaagggaaagctttggccgttcatcaaaaagaacaagccaccaccgcctccgcctgccagtgctagcccatccgctgttccaaatgggccacagtctccaaagcagcagaaagaacccctgagccaccgctttaatgaattcatgacctccaaaccaaagattcattgcttccgatcactgaagcggggacatagcctcaccctgcaaggagctacccctgaggattttagtaatctgcccccagagcagcgacgcaagaaactgcagcagaaggtcgacgaattgaataaggagatccaaaaagaaatggaccagagggatgctatcactaagatgaaggatgtgtatctgaagaaccctcaaatgggcgatcccgctagtcttgatcataagttggccgaggtctctcaaaacatcgagaagttacgcgtagaaacccaaaagtttgaggcatggctcgcagaggtagaaggcaggttgccagcaaggagcgaacaggcgcgaaggcagtctggtttatatgattcgcaaaaccctcctaccgtgaataattgtgcacaggatagagaatcacccgacggcagctataccgaggaacagtcccaggaaagtgagatgaaggtattggccacagattttgacgacgagttcgatgatgaagaacccttgcctgcaattggtacatgcaaagcgctgtatacgtttgagggtcagaacgaagggacgataagcgttgtggaaggggagactctatacgttatagaggaagataaaggcgatggctggacccggattcgcaggaatgaagatgaagagggttacgtacctacttcctatgtggaagtgtgtctggataagaacgcgaaggacagttag

SEQ ID NO: 223597 - DNA, 738 bp, synthetic construct
  misc_feature 1..738: note = Description of Artificial Sequence: Synthetic coding sequence
  source 1..738: mol_type = other DNA
atgaagcgcaccatagggaaacccacctatgcattcgaggctagggattacgtgctgtccctcaagctgggagcgaccccggaggattttagcaacctgcccccagaacagcgcagaaagaagttgcagcagaaagtggatgagcttaacaaagagattcagaaggaaatggatcagcgtgatgccatcactaagatgaaggatgtgtacctgaaaaacccccagatgggggatccggcatcccttgatcacaaactggcggaagtgagccagaatatagaaaaacttcgtgtcgagactcagaaattcgaagcatggttagccgaggtggaggggcgactgccagctaggtccgagcaagcgcgtagacagtctgggctgtatgacagccaaaaccctccaaccgtcaataactgtgcccaagacagggagagccctgatggcagctacaccgaggaacagtcccaggagtctgagatgaaggtgctggctaccgactttgacgacgagttcgatgacgaggaaccactacctgccatcgggacctgcaaggcactgtacacttttgaaggccaaaatgaaggcacaatcagcgtggtggaaggtgagacattgtatgttatcgaggaggacaaaggtgatggctggactcgaataagacggaatgaagatgaagagggatacgtgcccaccagctatgtggaagtctgtttggacaaaaatgccaaggactcctag

SEQ ID NO: 223598 - DNA, 1854 bp, synthetic construct
  misc_feature 1..1854: note = Description of Artificial Sequence: Synthetic coding sequence
  source 1..1854: mol_type = other DNA
atgtcatggggtaccgaactttgggatcagtttgacaatcttgaaaagcacactcaatgggggatcgatatccttgaaaaatatatcaaattcgtgaaagaacggacggagattgaattatcttatgccaagcagctgcggaatctttccaagaagtaccagcctaagaagaactcgaaggaggaggaagagtacaagtatacctcttgcaaagcctttattagcaatttaaatgaaatgaatgactacgctgggcagcacgaagtgataagcgaaaatatggccagtcagataatcgtggacctcgccaggtacgtccaggagctaaagcaagaacgtaagtcaaactttcacgatggcagaaaggcccagcagcatatcgaaacatgctggaaacagttggagtcaagtaagaggaggtttgaacgcgactgcaaggaggctgatagagctcagcaatactttgaaaaaatggatgccgacattaacgtcactaaggcagatgttgagaaggctcgtcaacaggcccagattaggcatcagatggccgaagacagcaaagccgactactcgtctattctccagaagttcaatcacgagcaacacgaatattaccatactcatatccccaacatattccagaaaatccaggaaatggaggagcgcaggatcgtccgtatgggagagtcaatgaagacttacgctgaagtagatagacaggtaatcccaatcataggcaagtgtctcgacgggatcgttaaggccgctgagagtatcgatcagaagaatgacagtcagttagtcattgaggcctataagtcagggtttgagcccccaggagatatcgaattcgaggattatacccagcctatgaaaagaacggtttccgataatagcctgtccaactcccgaggtgaaggaaaacccgacctgaagttcgggggtaaaagcaagggcaaactgtggccattcataaagaagaacaaactgatgtcactgctaacatccccacaccagccacccccacccccacccgcttcggcgtcaccttccgccgtgcctaacggaccacagagcccgaaacaacagaaggagccccttagccataggtttaatgaatttatgacatccaagcctaaaattcactgttttcggtctctcaagagagggttgtctctgaagttgggcgctacacccgaggattttagcaatttacctcccgagcagaggaggaagaagcttcagcagaaagtcgatgaacttaataaggaaatccagaaagaaatggaccagcgggacgcaattacgaaaatgaaggacgtctatttgaagaatccacagatgggcgatcctgcctcactcgaccataaactggccgaagtcagccaaaacattgagaagctgcgcgtggaaacacagaagttcgaagcttggctcgcagaggtggaaggaagactgcccgctaggagcgagcaggctagacggcagtctggcctctatgactctcagaatcccccaacagtgaacaattgcgcacaggaccgagagtcaccagatgggagctacactgaagaacaaagtcaggaaagtgagatgaaggttttggctaccgatttcgacgatgagtttgatgacgaggaacctctgcccgcaattggtacctgtaaagcactctacacattcgaagggcagaatgaaggaactatcagcgttgtcgaaggggaaaccctgtacgtcatcgaggaggacaagggggatggatggacccgaattaggagaaacgaggatgaggaaggatacgtccccacctcttacgttgaggtgtgcctggacaaaaacgctaaagactcctag

SEQ ID NO: 223599 - DNA, 1722 bp, synthetic construct
  misc_feature 1..1722: note = Description of Artificial Sequence: Synthetic coding sequence
  source 1..1722: mol_type = other DNA
taactcagttacgctaagcaactgcgcaacctcagtaaaaagtaccagcccaagaaaaattccaaggaagaggaagaatataagtacacaagttgtaaagcatttatcagcaacttgaatgagatgaacgactatgctgggcagcatgaagtcatttcagagaatatggcctcccagattatagttgatctggcacgatatgtgcaagagctgaagcaagagcgaaagtcgaatttccatgatggacgcaaagcccagcagcacatcgagacctgctggaaacagcttgaatcgtcaaaacgcagattcgagcgcgattgtaaggaggctgatagagcccagcagtacttcgaaaagatggacgcagacattaacgtgaccaaggcagatgtcgaaaaggccaggcagcaggctcaaatacgccatcagatggctgaagattccaaggccgactatagtagcatattgcagaaattcaatcatgagcagcacgaatattatcacacgcacattcccaatatattccaaaagattcaggagatggaggaacgcaggattgtgcggatgggtgaatctatgaaaacttatgccgaagtggatcggcaagtgatccctattatcggtaaatgcctcgacgggatcgtgaaagccgctgagtcgatcgatcagaaaaacgactcacagctcgtgatagaggcgtataaaagcggcttcgagccacctggagacattgaattcgaggattacacccaacctatgaagaggacagtctccgacaactcattgagcaatagccgtggcgaaggcaagccagacctgaaatttggagggaaatccaagggcaaactgtggcctttcattaagaaaaataaaccccctcctcctccccctgccagtgccagccctagtgctgtgcccaacggccctcagtctccaaagcaacagaaagagccattatcccacaggttcaatgagttcatgacctcaaaacccaaaatccactgttttcgtagcttgaaaaggggccacagcctgctgaaaggagcaactcccgaggacttcagcaatctgccgcctgaacaaaggagaaagaagttgcagcaaaaggtggatgagctcaataaggagatacagaaggaaatggatcagagggatgctatcaccaaaatgaaggacgtttatctaaaaaatcctcagatgggtgatcctgcctctttagatcacaaactggccgaggtgtctcagaacatcgagaagctgagggtcgagactcagaagttcgaagcttggctcgccgaagtcgagggacgacttcccgctagatctgaacaggccaggcgccaaagcggtctgtacgatagccagaatcctcccaccgtgaataattgtgctcaggacagagaaagcccagatggcagttatacagaggagcaaagccaggagagcgaaatgaaagttcttgctacagattttgatgacgagtttgacgatgaagagcctctccctgctattggcacttgcaaggcgttgtatacgttcgagggacaaaacgaaggtactatttcagtagtcgagggggaaactctctatgtcatagaggaagacaaaggagatggttggactcgtattaggagaaatgaggatgaagaaggatacgtgccaacaagctatgtggaagtgtgtctagacaaaaatgcaaagggcgcaaaaacgtatatctag

SEQ ID NO: 223600 - DNA, 3495 bp, synthetic construct
  misc_feature 1..3495: note = Description of Artificial Sequence: Synthetic coding sequence
  source 1..3495: mol_type = other DNA
atggccggtggggaggatcggggtgacggggagcccgtgtccgtcgtcaccgttcgggttcaatatctcgaggacacagaccccttcgcctgtgctaattttcccgaaccgagacgggctccgacctgttccttggatggggctctcccactgggggcacaaattccagctgttcataggttgcttggagcccctctcaaactcgaggattgcgccctgcaggtgtctccgtcaggatactatcttgacaccgaattgtccctagaagaacagcgagaaatgctggaggggttttatgaagagatttccaaggggcgaaagcctaccctgatcctgagaacacagttaagcgtgcgcgtgaatgccatccttgagaagctgtactcatctagcggaccggagctccggcgatctttgttcagtttgaagcagatctttcaagaggataaagatcttgtgccagagtttgtccactcagaggggctgtcctgcctgatccgggtcggggcagctgccgaccataactaccagtcttatatcttgcgggctctcgggcagctcatgctgtttgtcgacgggatgctcggagtagtcgctcacagcgacacaatccagtggttatatacactctgcgcatcactctccaggctggtggttaaaaccgcgctgaaacttctgttggtgtttgtggagtactctgagaacaacgcacccctgttcattagggctgtgaatagtgtggcttcaactacaggggcacccccttgggcaaacctggtcagcattttggaggagaaaaatggggctgacccagaactcctcgtctacactgtgacattgatcaacaagacattggccgctctgccggaccaagacagtttctatgatgttaccgacgctctggaacaacaaggcatggaggcccttgtgcaacggcaccttggcactgcaggtacagatgtggacctccggacccagctggttctctacgaaaatgcacttaagcttgaggacggggacatcgaagaggctccaggagcaggaggacgcagggagcggaggaaacctagtagcgaagagggcaaacgcagccgacgtagcctcgagggaggagggtgccctgcgagggcccctgagcctggccctaccggtcctgcttcccctgtgggccctacatcctctaccggccctgctcttctcacaggtcccgcatcctcccccgtgggccctccttcaggcctgcaggcttccgtaaacttgttccccacaatttccgttgccccttcggcggataccagcagcgagagaagtatttacaaagcacggttcctggagaatgtcgcggctgcagagactgagaaacaagtagcactggcccaaggaagagccgagacacttgcaggcgcaatgcccaacgaggcaggcggacatcccgacgcccgtcagttgtgggacagccctgaaaccgccccagctgccaggacacctcaaagtcccgcaccatgcgtcctcctccgggcacagcggagcctggcaccggaacctaaggagcctcttatcccagcaagcccgaaggccgagcctatatgggagttgccgactagagcacctcgtcttagtattggggatcttgacttttctgaccttggcgaggatgaggaccaggacatgctgaacgtcgaatccgtggaggctggaaaagatatacctgcgccatccccaccgttgccgttattgtccggtgtcccaccgcctcccccactgccaccgccaccccctataaagggtccttttcccccaccccctccactcccattagcggcaccactacctcattccgtaccagatagctcggcccttccaacaaaacgcaagactgtgaagctattctggagagagttgaagctggccggtggccatggagtgtccgcctcacggttcgggccatgcgcaactctgtgggcatcactggacccagtctcggtcgacacggctagactagaacatctgtttgagtctagggcaaaggaagtcttgccttctaagaaggccggagagggaagaagaacaatgactactgttcttgatcccaagaggtctaatgccatcaacataggcctgacaacattgccacctgttcacgtaatcaaggcagcactattgaatttcgatgagttcgccgtatcaaaagacggcatcgagaagctccttaccatgatgcctacagaagaggagagacagaaaatagaggaagcacaacttgctaatccagacattccgctgggcccagccgagaactttctgatgacgctcgcctccatagggggtctggccgcacgtttgcagctgtgggccttcaagttggactacgattcaatggagcgcgaaattgccgagcctctcttcgacttgaaagttggcatggaacagctggtgcagaatgccacctttcggtgcatcctggctaccttgctggcagtgggcaattttctgaatggttcccaatcatctgggtttgagctctcctacctggagaaagtatctgaagtgaaggatacagtccgcaggcagtcactgctacaccacctgtgctctttagtgctgcagacgcggccagagagctccgatctctatagcgaaatcccggctctgactcgatgtgctaaggtcgacttcgagcaacttaccgagaatctggggcagctggaaagacgctcaagagccgctgaggagtccctgcgctcgcttgccaagcacgaacttgcgccagccttgcgggctagactcacgcactttctggaccagtgcgctagacgggtcgccatgctccgtatcgtccaccgtagggtgtgtaaccgatttcatgcttttcttctctatctggggtataccccccaagccgcaagggaagtgagaatcatgcagttttgtcacaccctgcgggagtttgccctcgagtatcggacctgtcgagaacgggttcttcagcagcagcaaaagcaggcgacgtaccgggagcggaacaagactcgcggtagaatgattacggagaccgagaagtttagcggcgttgctggcgaggctcctagtaatccttctgtgcccgtggccgtttctagtggacccggaagaggtgacgcggactctcatgcaagcatgaagtctttgctgaccagccgcccagaagacaccacccacaaccgacgcagcagggggatggtgcaatcctcgtccccaattatgcccacggtcggccctagcaccgcctcaccggaagagccccctgggtccagcttgccctcagataccagtgatgaaataatggacctattagttcagtcagtcactaaatcctccccgagggcactggctgcaagagaacggaagcgatcccggggaaaccgcaagtcgctccgaagaaccttaaaatctggattaggcgacgatctggttcaggccctcggcctaagcaaaggcccaggactggaggtttag

SEQ ID NO: 223601 - DNA, 4320 bp, synthetic construct
  misc_feature 1..4320: note = Description of Artificial Sequence: Synthetic coding sequence
  source 1..4320: mol_type = other DNA
atggccacgctggcttgtagagtgcagtttcttgatgacaccgacccatttaactctactaatttcccagaaccatccagaccacctctatttacctttagggaggacctcgcattgggcactcaattagcgggagtgcaccgccttctccaggctccccacaagctggacgattgcaccctgcaactcagtcacaacggcgcataccttgatttggaggccaccctggctgagcaacgggatgaattagaaggcttccaggatgatgcgggtcgcggaaaaaagcatagtattatcctgcgcacacagttgtccgtccgcgtccacgcctgcatcgaaaaattgtataatagttccggcagggatttacgacgcgctttattcagcctcaaacaaatttttcaggatgacaaggacctggtacacgagtttgtggtagccgaagggctcacctgcttgatcaaggtgggggcagaggcagaccaaaactatcagaactacatccttcgcgcacttgggcagatcatgctgtacgtggacgggatgaacggcgtcatcaatcggaatgaaacgattcagtggctctacactcttataggatcgaaatttcgcctcgtcgtgaaaactgcactgaagttgcttctggtcttcgtagaatattctgagtccaacgccccattgttgatacaggccgtaaccgccgtggatactaagcggggtgtaaagccatggtcgaatatcatggaaattcttgaggagaaagatggcgtggacacagaactcctggtatatgccatgactctcgtgaataagaccttgtcaggcctccccgaccaagacaccttttatgatgtggtggattgtctcgaggagctgggaatcgcagcagtctcacagcgccatctgaataaaaagggaacagatctcgacttagtcgagcaactgaatatttatgaggtggccctccggcacgaagatggagatgagaccactgaacctcccccatccggctgtcgcgacaggcgcagagcatcagtgtgctcttccgggggtggcgagcaccggggtcttgaccgaaggcgctccagaagacacagcgtccagtccatcaaatcgaccttaagcgcacccaccagtccctgctcccagtctgcgccttcgttcaagcctaaccaggtgagggacctgagggaaaaatactccaacttcggcaataacagttatcattcgtcaagacccagtagcggaagcagcgtgccaactaccccgacctcatcagtgtcacctccacaggaggccagactggagaggtcttctccgagcgggcttctgacaagctcgtttcgccagcatcaggaaagcctcgccgcagagagagagcggcgtcgccaagagcgagaggaaaggctacagcggatcgaaagggaagagaggaacaagttctctagggattaccttgacaagcgcgaggaacagcggcaggccagggaggagaggtacaagtacctagagcagctcgccgctgaagaacacgagaaggagttgagaagtaggagcgtgtccaggggcagggcagacctctctctagacctcacgagccccgcagcgccagcttgcctggcccctttgtctcatagtccatcatcttcagatagccaagaagctttgaccgtgtccgcaagctccccaggcactccacatcatccccaggcctccgcaggagatccagaaccagaatcagaggccgaacctgaggccgaggctggcgcagggcaggtcgcagatgaggcgggacaggacatcgcaagtgcacacgaaggtgccgagaccgaggtggagcaagcgctcgagcaagagccagaggaacgagcctcattatctgaaaaagagaggcagaatgaaggagtaaacgagagagataattgcagtgcaagttctgtctcgagttcgagtagcaccctcgaacgtgaagaaaaagaggataagctgtcccgcgatcggactacgggattgtggccagctggcgtgcaggatgctggtgtcaacggtcagtgcggggatatactcactaacaaacggttcatgctcgacatgctttatgcccacaaccggaagtctccggatgatgaggagaagggggacggagaagccggaaggacccaacaggaggccgaagcagtagcatccctggccacgcgcatatccacgctccaggctaactctcagacacaggacgaaagcgtgcggcgtgtggatgtcgggtgtttagataaccggggtagcgtgaaggcattcgctgagaagttcaattccggagatttgggccgaggatcaattagccccgacgccgaacctaatgataaggtgcctgagactgcccctgtacagcctaagaccgagtcagattacatctgggatcagctcatggcaaaccctcgagagttgcggattcaggatatggattttacagatcttggcgaagaagatgacattgacgtcctggacgtggatctgggccacagagaagcccctggaccccctcctcctccgccaccgacctttctggggctgccaccccctcctccgccaccgttgctggattccatcccaccccctcccgttcctgggaatttgttagtgcccccacccccagtgtttaatgccccacaaggacttggatggagccaggtgccgagaggtcagcccacctttactaaaaaaaaaaagactatcagacttttctggaatgaggtgcgcccatttgactggccatgcaaaaataatcggaggtgccgggaattcctgtggtctaagctggagccaattaaggtcgacacctctaggctggaacacttgttcgagtccaagagcaaagagctcagcgtcagtaaaaagactgcggctgacgggaagcgacaagaaattattgttcttgactccaaacgcagcaacgccattaatatcgggcttacagtgttgccacctccacggaccattaagatcgccattttgaacttcgatgaatacgctctcaacaaggaggggattgagaagatcctcacaatgattccaacagatgaggaaaagcagaaaattcaggaggcccagctcgctaatcccgagatcccactagggagcgccgaacaatttctgctgaccctcagctcaatttctgagctctctgcgaggttacacctgtgggcattcaaaatggattatgaaaccaccgagaaggaggttgctgagcccctcctggacctgaaagaaggaatcgatcagcttgaaaacaacaaaaccttgggtttcatcctcagtactttgctggcaataggcaactttctgaacggcacgaacgcaaaggcctttgagctcagttaccttgagaaggtgccagaagtgaaagataccgtccataaacagagcctgcttcaccacgtttgcacaatggtggtcgagaattttcccgattcttctgacttgtattccgaaatcggcgcaattactagatccgccaaagtggatttcgatcagctccaggacaatctctgccagatggaaaggcgttgcaaggcttcctgggaccatctgaaagcaattgccaaacacgagatgaaaccggtgctgaaacagaggatgagtgagtttctgaaagactgtgccgaacggataatcatacttaagattgtgcatagacggattataaatcgtttccactccttcttactgttcatgggacacccgccttatgccattcgcgaggtgaatataaataaattctgtcgtattatttccgaatttgccctggaatacaggaccacgcgagaacgggtgcttcagcagaagcaaaagagggccaatcaccgcgaacggaacaagactcgaggaaagatgatcaccgactccgggaagttttccgggtcgtctccagccccaccttcacaaccccaagggctaagctacgccgaggatgctgcagagcacgaaaacatgaaagctgtattgaagactagcagcccaagcgtagaggatgccacacccgctttgggagtcagaacaaggtcacgcgcttcccgcggaagcacctctagttggaccatgggtaccgatgattctcccaatgtgacagacgacgcggcagacgagatcatggatagaatagtaaaatcagccacccaggtgcctagtcaacgtgtggtgccgagagagcgaaaacgctctcgtgccaaccggaaatcgctgcgacggaccctcaaaagcggcctcacgccagaggaagcgcgtgcactgggcctggtcggtacctccgaacttcagctttag

SEQ ID NO: 223602 - DNA, 4269 bp, synthetic construct
  misc_feature 1..4269: note = Description of Artificial Sequence: Synthetic coding sequence
  source 1..4269: mol_type = other DNA
atggccactctggcttgtcgggtacagtttcttgacgacacagatccgttcaatagtactaactttcccgagccaagcagaccacccctttttacattcagggaagatctggcattaggaactcagctcgcaggcgtccaccgtctgcttcaggcgccacacaagctagatgactgtactctccagctttctcacaatggcgcatatttggatttggaggcaaccctggccgagcaacgagatgaactggaagggtttcaagatgacgccggaaggggcaaaaagcattcgataatactgagaactcagctctcagtgagggtccacgcttgcattgaaaagctatacaattccagtggaagagacctgagacgcgcactcttcagccttaaacagatatttcaggatgacaaggacctggtgcacgagtttgtcgtggcagagggcctcacctgcttaataaaagtgggagcagaagccgatcaaaactatcagaattacatcctgcgggctctggggcagattatgctatacgtggacgggatgaatggagtgatcaatagaaacgagacaattcaatggctttataccttaattggtagtaaattccgcctggtcgtcaagactgctctcaagttactgcttgtgttcgtggagtatagcgaatccaacgccccacttctgatccaggcagttaccgcagtggacacaaaacgaggagtgaaaccctggagcaacatcatggagatccttgaagaaaaagacggagtggatacagagctcctcgtttacgctatgaccctcgtgaacaagaccctgtctgggctcccagaccaggatacattttatgacgtggtcgattgcctcgaggagctgggaatagccgcagtcagccaacggcatctcaacaagaaggggaccgacctggatctcgttgagcaactgaacatctatgaagtcgccctgcgtcatgaggacggggatgaaaccacagagccaccccctagcggatgtcgcgaccggagaagggccagtgtttgttcatcggggggtggtgagcatcgtggcctggatagacgcaggtctcgccgacattccgtgcagtcgattaaatcaactttaagtgctccgacatctccctgcagccagagcgcgccttccttcaaaccgaatcaggttagagacctgagagaaaaatacagtaattttggaaataattcctatcacagctctagaccctccagcgggagctcagtgccaactacacctacctccagcgtctccccaccccaggaagctcggcttgagcgcagttcaccttccggcctcctcacctcttcatttcgccagcaccaggagagcctagccgctgagcgagagagacggagacaggagcgggaggaaaggctgcagcgaatcgagagagaagagcgaaataaatttcgatacaagtacctggagcaacttgctgctgaggagcatgaaaaggaactcaggtccagatctgtgagcaggggaagagcagatctgtctctggacttgacctctccagccgctccagcgtgtttggccccactctcacacagcccttcctctagcgatagccaggaagcgctgactgtttctgccagctccccaggaacacctcaccacccccaggcttccgcaggagatcccgagcctgaatccgaagcggaaccagaggccgaggcaggtgccggacaggtggccgacgaggccggacaggatattgcctccgcacatgagggcgcagagactgaggtggagcaggccctggagcaggagcctgaggagagggctagtttgtcggagaaagaaaggcagaatgaaggcgtaaatgagcgcgataactgtagcgcatcctccgtgagctcttcttcttccaccctggaaagggaggaaaaagaggacaagctcagccgagatagaacgaccgggttatggccggctggtgtgcaggatgcaggggtcaacggacaatgcggcgacattttaaccaacaaaagattcatgctggacatgttatatgctcacaaccggaaatctcctgatgatgaagaaaagggcgacggggaagctggcaggactcagcaggaagccgaggccgtggctagtctggcaacccgcattagcaccctgcaagcgaactcccagacccaggacgaatcagtgcgtagggtcgacgtgggctgtctggataacagaggctccgtaaaggcatttgctgaaaagtttaattcaggagacctggggaggggttctatatcacctgacgcagaacctaacgacaaagttccagagaccgccccagttcagcccaagaccgaaagcgactatatctgggaccaactgatggccaaccctcgggagctacgtatccaagacatggacttcactgatcttggcgaggaagacgatatagacgtgcttgacgtagacctcggccacagagaagcgcctggtccgccacccccacccccacctaccttcttgggtctaccacccccaccacctccacccctcctggattcaatcccccctccaccagtgcctggcaaccttttagttcctccacccccagtgttcaatgcccctcagggacttggttggtcacaggttcctagggggcagcctacgttcaccaaaaaaaagaagacaatacggttgttctggaacgaagttagaccattcgattggccttgcaagaacaaccggcgttgtcgtgagtttctttggagcaagctggagcctatcaaggtggacacctctaggttagaacatctgtttgaaagtaaatcaaaagaactgagcgtgtctaagaagacggcagcagacggaaaaagacaggaaatcattgttctggacagtaaaagatcgaacgcaatcaacatcggactgacagtcctgcccccacctcgcacaatcaagatcgccattctaaatttcgacgaatacgccctgaataaagaggggatcgagaagatactcacaatgatccccaccgatgaagagaaacagaaaatacaagaggctcagctggccaatcccgaaattcctcttggtagtgcagaacagtttctgcttacattgtcgagcatcagcgaactctccgctcgcctgcatttgtgggcttttaaaatggattatgagaccacagaaaaggaggtggccgagcccctcctcgatcttaaggaaggcatagaccaacttgaaaacaataagacactgggcttcatactgtccacacttctggcaatcggaaacttcttaaacggaacaaacgccaaagccttcgaactttcttatctagaaaaagtccccgaggtcaaggatacggtacacaagcagagccttctccatcacgtctgcacaatggtagtagagaatttcccagattcatctgatctctacagcgaaattggcgctattacacggtctgccaaggtggactttgatcagttgcaggacaacctctgccagatggaacggagatgtaaggcctcctgggatcatctaaaggcaatagcgaaacacgaaatgaaacctgtccttaaacagcgcatgtccgaatttctcaaagattgcgctgaacgaatcatcatcctgaagatcgtgcatcggaggattatcaatagattccactcatttttactgtttatgggccacccgccatacgcaatacgggaggtcaacattaataaattctgtcggatcattagcgaattcgcactagagtataggacaacccgagagagagtgcttcagcaaaagcagaagcgggctaatcaccgcgagcggaataagacccgaggaaaaatgattacagatagtgggaagtttagcgggtcatcccctgctcctcctagccagcctcaagggctgtcctacgctgaggacgcagccgaacacgaaaacatgaaggcagtgctcaagacgagctctccctcagttgaagacgcgacacctgccttaggggtgcggactagatccagggcctctcgtggatccacttctagctggactatggggacagatgactctccaaatgtcactgacgatgccgcagatgagataatggatcgtatcgtcaaatcagcaacgcaggttccgtcgcagagggtcgtgcctcgtgaacgaaagcgatcccgggcaaacaggaaatccctgcggcgaaccctgaagagcggcttgacgccagaagaagcacgcgcactggggcttgtcggaaccagcgagctgcagctctag

SEQ ID NO: 223603 - DNA, 4206 bp, synthetic construct
  misc_feature 1..4206: note = Description of Artificial Sequence: Synthetic coding sequence
  source 1..4206: mol_type = other DNA
atggccacacttgcttgccgtgtacagtttctggatgataccgacccctttaattctacaaacttccccgagccctctcgaccaccactgttcacgttccgggaagatctcgcattggggacccagctggcaggcgtacaccggcttctgcaggcaccccataagcttgacgactgcacgctgcagctgtcacacaacggcgcatacctcgacttggaggctacattagctgaacaacgcgatgaattggagggattccaggatgacgccggtcgtggtaaaaagcactcaattattttgagaacgcagctgtccgttagagtccacgcctgcattgaaaagctctacaatagctctggcagagacctgcggagagccctcttttcccttaaacagatctttcaggatgacaaggacttggtccacgagtttgtggttgccgaaggcttaacatgtctgattaaagtgggagcagaagcggatcagaattatcagaactatatcctgcgcgctttaggccagattatgctgtacgtggacgggatgaacggtgtaattaataggaatgagacaatccagtggttgtatactcttatcggatcgaagtttcgactggtggttaagacagccctgaagttgctgctggtatttgtggagtactcggagtctaatgcaccgcttctaatccaagccgtgaccgcagttgatacaaagaggggcgtcaaaccatggagtaatattatggagatcctggaagagaaggacggtgtggatacagagcttctagtatacgccatgaccttggtcaacaagaccctgtccggattgccagaccaggatactttctacgatgtggttgattgcctcgaagagctcgggatcgctgctgtgtcgcagagacacctgaataagaaaggtactgacctggatcttgtggagcagctgaacatttacgaggtagcactaaggcacgaagacggcgatgaaacgaccgaaccacccccaagcggctgtcgtgatcgccgaagggcctcagtgtgctctagcggcggtggggagcaccgcggtctggatcgacgcagatcacgaagacattccgtacagagtatcaagtctaccctgtcagctcctactagcccgtgcagtcagtcagccccaagctttaagcccaaccaggtgcgcgatctgcgggaaaagtctagcccctctggcctactgacttcctcatttagacagcaccaagagagtctcgccgctgaaagggaacggcgtcgtcaggagcgggaagaacgcctccagcggatcgaaagagaggagcggaacaaattttctcgggattacctcgacaagagggaagaacagcgtcaagctagagaggagagatacaaatacctggaacagctcgcggcagaagaacatgagaaggagctgagaagccgaagcgtatcgcgtggtcgggctgatctctcactggatctgacaagccctgcagcgccagcatgccttgcacctctgagccactcccctagttcttcggattcacaggaggcacttactgtatccgctagcagccctggaactccacatcacccccaggcttctgccggagatcccgaaccagaaagcgaggctgagccagaggccgaggccggagccggacaggtggcagatgaagccggacaggacattgcctccgcacatgagggcgcagagactgaagtggaacaggccctggaacaggagcccgaggaaagggcttcactgtccgagaaggaacgtcagaacgaaggggtgaacgaacgtgacaattgctcggccagtagtgtgtcaagttcaagcagcacactcgagagggaggaaaaggaggacaaactgtctagggaccgcacaaccgggctgtggccagcaggagtccaagatgccggtgtcaacggacagtgcggcgacattttgaccaataaaaggtttatgctggacatgctctatgcccataatcgcaagtctcctgacgacgaggagaagggcgacggggaagcaggcagaacccaacaggaagccgaagccgttgcttcccttgccactcggatctccacactccaggctaatagccaaactcaggatgagtccgtgagaagggtagacgttggctgcctggataaccggggtagcgtgaaggcctttgccgagaagttcaactctggagacctggggaggggtagtatttcccccgatgcagaacccaacgacaaggttcccgagaccgccccagttcagcctaagacagagagcgattatatttgggatcaattaatggcaaaccctagggaactaaggattcaggatatggacttcaccgacctgggagaggaggatgatatagatgttctggatgtcgaccttgggcacagagaggccccaggcccaccgccacctccgccacccacttttctgggcctcccccctccacctcccccaccgctgctggactctattcctcctcctccggtcccagggaacctcctggtgccaccgcctcccgtatttaacgccccacagggcttaggctggagccaggtacccagggggcaacccacgtttacaaagaagaaaaagacgattcggctgttctggaatgaagtgcgacccttcgactggccttgcaagaacaatagacgatgccgagagtttctctggtctaaactagagccgatcaaagtggatacctcccgtttggaacaccttttcgagtcaaaatctaaggaactgtcagtctcaaaaaagaccgcagccgatggaaagcggcaggagatcattgtcctggacagtaagcgatctaacgccattaacatcggcctgactgttcttccacctcccaggacgatcaagatcgccattcttaactttgacgagtatgcactgaacaaggaagggattgagaaaattctgaccatgatacctactgatgaggagaagcagaaaatccaggaggctcagctcgctaatccagagattccactgggcagcgctgagcaatttttactcaccctctcttcaataagtgaacttagcgcgcgtctacacctgtgggccttcaaaatggattacgaaaccactgaaaaggaggttgctgagcctctgctcgaccttaaggaaggaattgaccagcttgagaataacaagactctgggcttcattctttcaactttgctcgcaatcggtaacttcctcaatggcacgaacgcgaaagcatttgagctgtcttatctggaaaaggtgcctgaagtgaaggacacagtgcacaaacagagtctgctgcaccacgtctgcacaatggttgtggaaaacttccccgatagctcagatctttattctgaaattggggctattactcgcagcgcaaaagtcgacttcgaccagctccaggataacctgtgtcagatggagcggaggtgcaaggcttcctgggaccacctgaaagcgatagcgaaacacgagatgaaaccggttttgaagcaacgcatgtccgagtttttgaaggattgcgcagaaagaattatcatactcaaaatcgtccaccgcagaatcataaaccggttccattctttcctgctattcatgggacacccgccatacgctattcgcgaggtgaacatcaacaaattctgtagaattatcagcgaatttgctctcgagtaccgaaccacaagagagcgggtgctgcagcagaaacaaaagcgtgccaaccaccgagagaggaataagacgcgcggtaagatgatcacagatagcggtaagttcagtggctcatcgcccgcaccacccagtcagccacagggattgtcctacgccgaggatgcagccgagcacgaaaatatgaaagctgtgttgaagacctcctcaccaagcgtggaagacgcgaccccggcactaggagtaaggaccaggagtcgtgcttcaagagggtcaacttcgtcttggaccatgggcacagacgactcacccaacgtgaccgatgatgccgcagacgaaatcatggaccgcatcgttaagagtgcaacccaggtccccagccagagggtggtgccacgtgagagaaaacgtagccgagccaatcgtaagtccctccggaggacccttaaatcaggactaacaccagaagaagctagggcacttggcctggtgggcacgagcgagctccagctatag

SEQ ID NO: 223604 - DNA, 1053 bp, synthetic construct
  misc_feature 1..1053: note = Description of Artificial Sequence: Synthetic coding sequence
  source 1..1053: mol_type = other DNA
atggaaaccaactcaagcttacccaccaacattagtggcggtacgcccgcagtttcagccggttatttgttcttagacatcatcacctatctggtgttcgccgtcacgttcgtgctaggtgtcctgggaaacggtttagtgatctgggttgccggattccgtatgacacatacagtgacaacgatttcctacttaaacctggcagttgccgacttctgcttcacctctaccctgcctttttttatggtgagaaaggcaatggggggacactggccatttggctggttcctgtgtaaattcgtgtttaccatcgtggatataaacttgttcggtagcgtatttcttatagctcttatcgccctcgacaggtgcgtctgtgtcctgcatccggtgtggactcaaaatcacaggacagtgagcttagccaaaaaagtgataatcggcccttgggtgatggccttacttttaacgctccctgtgattatacgtgttacgacagtgcctggaaaaacaggtacggtcgcttgtacattcaatttttccccatggactaatgatcctaaggaaaggatcaacgttgcagtggccatgctgacagtgcggggtatcattcgttttattatcggattttccgcacccatgtctattgttgccgtctcttacgggctcatagcaacaaaaatacataaacagggtttaattaaatccagtcgaccattgagggttttaagctttgtagcggctgcatttttcttatgttggagcccttatcaggttgtagccttaatcgccacagtcagaattagagagctgctccagggcatgtataaggagatcggtatcgccgtggatgtgaccagcgctctagctttttttaattcctgtcttaaccccatgctttatgtgtttatggggcaggactttcgcgagcgactgatccacgccctccctgctagtctggagcgggcattgacagaagactccacccaaacgtctgatactgctaccaacagcacccttccttcagccgaagtggagctgcaagccaagtag

SEQ ID NO: 223605 - DNA, 1053 bp, synthetic construct
  misc_feature 1..1053: note = Description of Artificial Sequence: Synthetic coding sequence
  source 1..1053: mol_type = other DNA
atggagaccaactcctcattgcctactaacatctctgggggtacacccgcagtttctgctggatacctgtttctggacatcataacctatctcgtgtttgccgttacattcgtgctgggcgtgttaggcaacggacttgtgatttgggtggcaggttttaggatgacccatacagtcactacgatttcctatcttaacctggccgtcgccgacttctgttttacctcaaccctgcccttcttcatggtgcggaaggctatgggaggacactggccctttgggtggtttttatgcaaattcgtcttcactattgtagatatcaacttatttggctccgtgtttttgatcgcattaattgcactggataggtgcgtgtgtgtccttcacccagtatggacacagaaccaccggacggtgtctcttgccaagaaggttattattggcccttgggtgatggctctgctgttgactctcccagtgatcatcagggttaccaccgtccccggtaaaacgggaaccgtggcttgtacttttaatttctccccctggacaaatgacccgaaggagcgcattaatgtggccgtggccatgctcacagtgagaggcatcatcaggttcattatcggattcagcgcacccatgtccatcgtggctgtatcatacgggctgattgctacaaaaattcacaagcagggacttatcaagagctccagacctctccgcgttctgtcatttgtggcagccgcattctttttgtgctggagtccctatcaggtggtcgccctaatcgccacagtcagaatcagggagctcctgcagggaatgtataaggagatcggtattgccgtggatgtcacttcagctcttgccttcttcaactcatgccttaaccccatgctctacgtcttcatggggcaggacttccgggagaggctcatccacgccctacccgcaagcttggaacgggcattgactgaagattctacacagacaagtgacactgccacaaattcgacacttccctccgcagaggtcgaactgcaggctaagtag

SEQ ID NO: 223606 - DNA, 1056 bp, synthetic construct
  misc_feature 1..1056: note = Description of Artificial Sequence: Synthetic coding sequence
  source 1..1056: mol_type = other DNA
atggagacaaactttagcacccccttaaatgaatatgaagaagtgagctacgagagtgcaggctatacagtgttgcgaatactgcccctggtagttctcggcgtgacttttgttttaggtgtgctgggaaatggactggtcatctgggtggccggtttcaggatgacaagaaccgttacaactatatgctacctcaatttggccctcgcagacttctccttcactgccacattgcccttcctaatcgtttcaatggccatgggggaaaaatggccttttggatggtttctgtgcaagctgatccatattgtcgtggacatcaatctgttcggatcagttttcctgataggctttatagctctggatagatgcatttgtgttctgcacccagtgtgggcacaaaatcatcgcaccgtttccctggcgatgaaagtgatcgttggtccatggattctcgctcttgtactcaccctgcctgtgttcctgtttttaacaacggtgaccatcccgaacggggacacctattgcaccttcaatttcgcctcttgggggggaacacctgaggaaagactgaaagtcgcgattacaatgttgactgccagggggattattcggtttgtgattggcttctcgcttccgatgtccatcgtcgcaatctgctacggcctcatcgccgctaagatccataaaaaagggatgataaagtcctctagaccgctgcgcgtactcacggctgtcgtggccagtttttttatctgctggtttccgttccaactagtggctttgctggggaccgtctggttaaaggagatgttattctacggaaagtataagatcatagacatcttggtgaacccgacaagtagcctcgccttttttaattcctgtctgaatcccatgctttatgtgttcgtgggtcaagactttcgggagcgactgattcattcacttcctaccagcttagagcgtgcgctcagtgaagactccgcgcctactaatgacacggccgctaacagtgcttccccacctgcagaaaccgagttacaggcaatgtag

SEQ ID NO: 223607 - DNA, 1056 bp, synthetic construct
  misc_feature 1..1056: note = Description of Artificial Sequence: Synthetic coding sequence
  source 1..1056: mol_type = other DNA
atggaaactaacttctccacacctcttaacgagtacgaggaagtaagctacgagtccgccggatataccgtgcttcgtattctgcccctggtggtgttaggagtcacattcgtgcttggcgtcttgggaaatggcctggtcatctgggtcgctggattcagaatgacccggacagtcactaccatctgctatttaaatctggcgcttgccgacttttcttttaccgccacgcttccattcttaatagtgtcgatggccatgggggagaagtggccattcgggtggttcttgtgcaagctgattcatattgttgtagatattaaccttttcggttctgtgttcttaatcggattcatcgccctggatagatgcatttgtgtactacatccagtatgggctcagaatcacaggacagtgtcgctggctatgaaggttatagtgggcccttggattctcgcacttgttcttacgctacccgtgttcctcttcttaaccaccgtaacaattccgaatggtgatacatattgcacctttaactttgccagctggggcggtacccccgaggaacggctcaaggtggcaataactatgcttaccgcccgaggaatcattcggttcgtgattgggttcagtctgccaatgagtattgtggccatctgctatggcctgattgccgcaaaaatccacaagaagggaatgataaagtcatctagacccttgcgggtgctgaccgccgttgtagcaagctttttcatttgttggttcccatttcagcttgtagcactgctcgggactgtgtggctgaaagagatgttgttttatggcaaatacaagatcatagatattctcgtcaatccaacgagcagcctggcattctttaacagctgcctaaacccgatgttgtatgtcttcgtggggcaagacttcagggagcggctgatccactctctgcctacttctttggagagggcgctcagcgaagacagcgccccaaccaacgacacagcagctaactccgcctcaccaccggctgagacagagctccaagctatgtag

SEQ ID NO: 223608 - DNA, 1062 bp, synthetic construct
  misc_feature 1..1062: note = Description of Artificial Sequence: Synthetic coding sequence
  source 1..1062: mol_type = other DNA
atggagacaaacttctccatcccgctgaatgagacagaagaagttctgccagagcctgcgggacatacggtattatggatcttttctctgttggttcatggagtcacttttgtcttcggtgtcctcggcaacggacttgtaatctgggtggccggattcagaatgaccaggactgtgaatacaatctgctacctcaacctggccctcgccgacttctcctttagcgcaatattacctttccgcatggtttcagtcgccatgcgggagaaatggccttttggtagtttcttatgtaaactggtgcatgtcatgatcgacatcaatctgttcgtgagcgtgtacttgattaccatcattgcactagatagatgcatttgtgtactgcaccccgcttgggcacaaaaccataggaccatgtcgctggcaaaacgggtcatgaccggcctttggatcttcacaatcgtgctgacactgcccaacttcatattttggaccacaatttctaccactaacggcgatacatactgtatctttaacttcgccttttggggtgacacagccgtcgagcgcctcaacgtgtttattactatggcgaaagtctttcttattcttcattttattatcgggttcagcgtcccaatgagcataattacagtatgttatggtatcatcgccgcaaagatccataggaaccacatgatcaaaagctccagaccgctgagagtgtttgcagctgttgtggcaagtttcttcatctgttggtttccttacgagctgatcggcatcctgatggcagtctggctaaaggaaatgctgctcaacgggaagtacaagataattctggtcctaatcaaccctacctcctcgctggccttcttcaatagctgcttgaaccctattctctacgtctttatgggccgaaacttccaggagcgactcatccgcagtttgcccacctctcttgaaagggcactgactgaagtcccagactctgcccaaacctctaataccgacaccacttcagcttctcccccagaggagactgagcttcaggccatgtag

SEQ ID NO: 223609 - DNA, 816 bp, synthetic construct
  misc_feature 1..816: note = Description of Artificial Sequence: Synthetic coding sequence
  source 1..816: mol_type = other DNA
atgttccgtgatttcggcgagccaggccctagcagcggcaacggaggaggatacggcggtccagcccaacctcccgcagctgcccaagccgctcaacagaagtttcacctagtgccaagcatcaacaccatgtctgggtctcaggagctgcagtggatggtgcagccgcatttcttggggcctagcagctacccgagaccactaacctacccgcagtattcccccccacagccccgacccggtgtgatacgcgcattgggccctccacccggagtgagacggagaccctgcgaacaaatctcaccagaagaagaggaaaggcggagagtgcggagagagcgcaataagcttgccgctgctaagtgccgaaatagacggaaagagcttacggatttcctccaggccgagactgacaaattggaggatgagaagtccgggcttcaaagggagattgaggaactccagaagcagaaagagcggctggagcttgtactggaggcgcaccgtcctatatgcaaaattcccgagggcgctaaagagggcgataccggaagcacatccgggacttctagccctcctgctccctgtaggcctgttccttgtattagtttatcccctggacccgtccttgaaccagaagccttgcacacccccacacttatgactaccccatcactgacaccctttacaccctctcttgtgtttacttacccttccacacctgagccctgtgcatcagcgcatcggaagtcatcgtcgagtagcggcgaccccagtagcgacccattgggctcacccactctgctggccctctag

SEQ ID NO: 223610 - DNA, 510 bp, synthetic construct
  misc_feature 1..510: note = Description of Artificial Sequence: Synthetic coding sequence
  source 1..510: mol_type = other DNA
atgttcagggacttcggagagcccggacctagttcgggcaatggaggtgggtacgggggaccagcccagccccctgccgctgctcaagcggcacagcaagaaactgataaacttgaggatgagaaaagtggcctgcagagagaaatagaggagctccaaaagcagaaggaaagattggaactcgtcctggaggcacatcggcctatttgtaaaatcccagaaggcgcaaaagagggcgatactggaagcaccagcggaacatcctcccctcccgctccttgcagaccggtcccgtgcattagcctctcaccaggtccagtgctcgagcctgaagccctgcacaccccaaccctgatgacgacaccctcactaacgcctttcacgccctccttagtgtttacatatccttccacgcctgagccttgtgcctccgcgcacaggaagtcctcatctagcagcggcgacccctccagtgaccctctcgggagtcctaccctgttggcactgtag

SEQ ID NO: 223611 - DNA, 351 bp, synthetic construct
  misc_feature 1..351: note = Description of Artificial Sequence: Synthetic coding sequence
  source 1..351: mol_type = other DNA
atgttccgagactttggcgagcctgggccttctagcgggaacggagggggttacgggggtcccgctcagccacctgccgcagcccaggctgcccagcaaaagttccacttggttccgtccatcaataccatgtccggatctcaagagctgcagtggatggtccagccacactttctaggccctagttcataccctcgccctctcacttatccccaatactccccccctcagcccaggccaggagtgattcgcgctctgggcccaccacctggggtgcggaggcgtccatgtgaacagatctcccctgaggaagaagagagctggcaacctcgggactttgtagacccgtag

SEQ ID NO: 223612 - DNA, 981 bp, synthetic construct
  misc_feature 1..981: note = Description of Artificial Sequence: Synthetic coding sequence
  source 1..981: mol_type = other DNA
atgtaccaggactaccctggaaatttcgatacttcatctcgaggctcatccggctccccagcccacgctgaatcctacagctctggcggaggtggccaacagaaatttagggttgatatgcccggatctggatctgcattcatccctacaataaatgctattacgacatctcaggatctacaatggatggtacagcccaccgtaatcacatctatgagcaacccttatccaagatcgcatccttatagtcccctgcctgggttagcaagcgttcctggccacatggcgctgccacgtcctggcgtgataaaaacaataggcaccaccgtcgggaggcgacgtcgagatgaacagttgagccctgaggaagaagagaaacgcaggattagacgcgagcggaacaagctggcagccgcaaaatgtaggaatcggcgacgggagctcactgagaaacttcaggccgaaaccgaggagctggaggaagaaaaaagcggtttgcaaaaagagatagccgaattacagaaggagaaggaaaaactcgagtttatgttagtggcacatggcccagtgtgtaaaattagccctgaagaacgccgttccccaccagccccaggtctgcagccgatgaggagtggaggagggtcagtgggcgcagtagtcgtcaagcaagagcctctcgaagaagacagtccatctagctcatcagcaggcctggacaaagcccagagatcagtgataaagccaatcagcattgccggaggcttctacggcgaggagccactgcacacgcctatcgtggtgacctctaccccagctgtgactccaggaaccagtaatctggtgttcacctacccatctgtgctggagcaggagagccccgcttctcctagtgagtcatgctcaaaagcccaccggaggagctcgtcatctggggatcagtcatccgacagtctcaattcaccaacgctgctggctctatag

SEQ ID NO: 223613 - DNA, 864 bp, synthetic construct
  misc_feature 1..864: note = Description of Artificial Sequence: Synthetic coding sequence
  source 1..864: mol_type = other DNA
atgccaggatcaggctcagctttcataccgaccattaacgctattaccacaagtcaggatctccaatggatggtgcagccgaccgttatcacgtcgatgtcaaacccttacccgcgaagtcacccttactcccccttgccaggacttgcttctgtaccgggacacatggctctgccacgacctggtgttatcaaaaccatcggcactaccgtggggagaaggcggcgagatgaacagcttagcccagaagaggaggaaaaaaggcgcatccggcgtgagcgtaacaaactggcagccgctaagtgtagaaatcggcgaagggaactcaccgaaaaacttcaggccgaaaccgaagagctggaggaggaaaaaagcggcctgcaaaaagagatcgcggaactgcagaaggaaaaagagaaattagagtttatgcttgtagcccatgggccagtttgtaagatctctcctgaggagcggaggtctcctccagcccctggtctgcaaccgatgcggtcaggaggcggttctgtcggtgccgtggtcgtgaagcaagaaccactggaagaagattcccccagctcctcgagtgctgggctggacaaagctcaacggtccgtgattaagcccatcagcatcgccggagggttttacggtgaagaacctttgcatactcccattgttgtgacttctacccccgctgtcactccaggcaccagcaacctcgtctttacttacccatccgtgctggagcaggagagcccagctagcccatccgagtcatgttctaaagcacaccggaggagttccagcagcggagaccagagctctgactccctgaactctcccacactcttggccctgtag

SEQ ID NO: 223614 - DNA, 972 bp, synthetic construct
  misc_feature 1..972: note = Description of Artificial Sequence: Synthetic coding sequence
  source 1..972: mol_type = other DNA
atggcagagaagtttgactgccattactgccgagacccactgcagggtaagaagtatgtgcagaaggacggtcatcactgttgcttaaaatgctttgataaattctgcgctaacacctgtgtggaatgtcggaagccaatcggtgcggattctaaggaagttcattacaagaatagattttggcatgatacatgctttaggtgcgcgaagtgcctgcatcctctcgcaaatgaaaccttcgtggcaaaagataacaagatcctctgtaacaagtgcaccacccgtgaggacagtccgaaatgtaagggctgcttcaaagccattgtggcaggggatcagaacgtggagtacaaagggactgtttggcacaaggactgctttacctgctcaaactgcaagcaggtcatcggaaccggctcattttttcctaagggggaagacttctattgtgttacatgccatgagaccaaatttgccaagcattgtgtcaagtgcaacaaagccatcacttcgggtggaatcacctaccaggaccagccttggcacgcagactgtttcgtttgcgtgacttgctctaaaaaactcgctggccagagatttaccgccgtggaggaccagtactactgcgtagactgttacaagaatttcgtagcaaagaaatgtgccggatgtaagaacccaatcaccggtaagagaactgtctctagagttagccatcctgtaagtaaggctcgcaagcccccagtttgccatggcaaacgactgcctttaaccctcttcccctctgctaatttgcgcggtcgtcacccaggaggagagcgcacatgtccatcctgggtggtggtcctgtaccgcaaaaacaggagcctcgccgctccccgaggcccaggcctggtcaaggctcctgtgtggtggcctatgaaggacaatccgggaaccaccacagctagcaccgctaaaaatgccccatag

SEQ ID NO: 223615 - DNA, 774 bp, synthetic construct
  misc_feature 1..774: note = Description of Artificial Sequence: Synthetic coding sequence
  source 1..774: mol_type = other DNA
atggctgagaagttcgactgtcattattgcagggatccgctccagggcaagaagtacgttcagaaggatggacatcattgctgcctaaaatgtttcgacaaattctgcgctaacacatgcgtggagtgtaggaaaccaatcggagcggacagtaaagaggtccactacaagaatcgcttctggcacgatacatgctttagatgtgcaaagtgcctgcacccgctcgctaatgagacattcgtggctaaagataataagatcctatgcaacaaatgtactaccagagaggattcgcctaagtgcaaggggtgtttcaaggcaatagtggccggtgaccagaatgtcgagtacaagggcaccgtgtggcacaaggactgctttacatgttcgaattgtaagcaagtgatcggcactggttctttcttccctaagggagaagatttctattgtgtaacttgtcacgagacaaagttcgcaaaacattgtgtgaaatgcaacaaggctattacctccgggggtattacctatcaggaccaaccctggcacgcagattgcttcgtctgcgtgacctgttctaagaagctcgccggacaacgcttcaccgccgtggaagaccagtattactgtgtggactgttacaagaattttgtggccaagaaatgcgctggctgcaagaatccaatcacaggcttcgggaaggggtcctctgtggtggcctatgagggccaatcctggcacgattattgcttccattgcaaaaaatgtagcgtatag

SEQ ID NO: 223616 - DNA, 633 bp, synthetic construct
  misc_feature 1..633: note = Description of Artificial Sequence: Synthetic coding sequence
  source 1..633: mol_type = other DNA
atggccagccatcggcactccggtccttcatcctacaaggtggggacaatggctgaaaagtttgactgccattactgccgcgaccctctgcagggcaagaagtatgtgcagaaggacgggcatcattgctgcctgaagtgttttgacaaattttgtgcaaacacatgcgtcgagtgtcggaagcctatcggggctgattccaaagaggttcactataagaatcgcttctggcatgatacctgctttaggtgtgcgaagtgtctgcaccctctggcaaatgagacatttgtggctaaggacaataagattctgtgcaacaaatgtactactcgggaggacagcccaaagtgcaaagggtgctttaaggctatagtagctggcgatcagaacgtcgagtacaagggcaccgtctggcacaaggattgcttcacatgttcgaattgtaaacaggttatcggcactggaagttttttccctaaaggggaagacttctactgcgtgacctgccatgaaacaaagttcgctaagcactgtgtcaaatgcaacaagggtcttgtgaaggcaccagtgtggtggcctatgaaagacaaccctgggactaccactgcttccacggccaagaatgcgccttag

SEQ ID NO: 223617 - DNA, 891 bp, synthetic construct
  misc_feature 1..891: note = Description of Artificial Sequence: Synthetic coding sequence
  source 1..891: mol_type = other DNA
atggcatcccacaggcacagtggaccaagttcatacaaggtggggactatggcagaaaagtttgattgccactactgtagagaccctctgcagggcaagaagtacgttcagaaggacggccatcactgttgtttaaagtgtttcgataagttctgcgccaacacctgcgtcgagtgcaggaaaccgatcggcgctgacagcaaggaagtacactacaagaaccggttttggcatgatacatgttttagatgtgcaaagtgtctgcatccgctggctaacgagacctttgtggccaaagacaacaagattctctgcaataaatgcaccaccagggaggatagcccgaaatgcaaggggtgcttcaaggctatcgtagctggcgaccagaatgttgagtataagggcacagtgtggcacaaggactgttttacatgctcgaactgcaagcaggtgatcggcacaggctctttttttccaaagggagaggacttttactgtgtcacatgccatgagacgaagtttgcaaagcactgcgtgaagtgtaacaaagcaattaccagtgggggaattacctatcaagaccagccctggcatgctgattgttttgtctgcgtcacgtgtagtaagaagctggccggtcagcggttcacagccgttgaggaccaatattactgtgtggactgttataagaatttcgtagcaaagaagtgtgccggatgtaagaatcctatcaccgggttcgggaagggttcatctgttgtagcttacgagggacagtcttggcacgattattgtttccattgtaagaagtgttctgtgaacctggccaacaagcgctttgtgtttcatcaagagcaagtctactgccctgattgcgcaaaaaaattgtag

SEQ ID NO: 223618 - DNA, 843 bp, synthetic construct
  misc_feature 1..843: note = Description of Artificial Sequence: Synthetic coding sequence
  source 1..843: mol_type = other DNA
atggctgagaagtttgactgccattactgccgagaccccctgcaggggaagaagtatgtgcagaaggacggacaccattgctgccttaagtgtttcgataagttctgcgctaacacttgtgttgagtgccgcaaacccatcggcgctgatagtaaggaggtgcactataaaaataggttttggcatgatacttgctttcgatgcgctaaatgcctgcaccctctggctaatgagacttttgttgccaaggataataagattctgtgcaacaagtgcactactagagaagactcccctaagtgtaagggttgttttaaggccatcgtggctggtgaccaaaatgtagaatataagggaacggtgtggcataaggattgtttcacctgttcgaattgcaagcaggtcatcggaactggaagcttttttcctaagggggaagatttttactgcgtgacctgccacgagactaagtttgctaagcactgcgtgaagtgtaataaggcgataacatcaggcggaattacttatcaggaccagccatggcatgccgactgttttgtttgtgtcacatgttccaagaagctggccggacaacgctttactgccgtggaagatcaatactattgtgtggactgttataagaattttgttgccaaaaagtgtgccggatgtaagaaccccattaccggtttcggcaaggggtccagcgtggtcgcttatgaaggtcaatcatggcatgattactgcttccactgcaagaagtgttctgtgaacctggcgaataaaagattcgtgtttcaccaggaacaggtttactgccccgattgcgcaaagaagctgtag

SEQ ID NO: 223619 - DNA, 843 bp, synthetic construct
  misc_feature 1..843: note = Description of Artificial Sequence: Synthetic coding sequence
  source 1..843: mol_type = other DNA
atggccgaaaaattcgattgccattactgccgcgatcctctgcaggggaagaagtatgtgcagaaggacggccatcactgttgtcttaaatgttttgacaaattctgtgctaatacctgtgtggagtgtcgaaagccaatcggtgccgactctaaggaagttcactataagaaccgattttggcacgatacctgctttaggtgcgcaaaatgtcttcatcccctggccaacgaaacatttgttgccaaagataacaagatcctatgtaacaagtgcaccacacgagaggatagcccaaaatgtaaggggtgcttcaaggcaatcgtggctggggaccagaacgtggaatacaaagggactgtctggcacaaggattgtttcacctgctcaaattgtaaacaggtaatcggtaccggctccttctttcctaaaggcgaagacttttactgtgttacgtgccacgaaaccaagttcgccaagcactgtgtgaagtgcaataaggctattacttctgggggtattacataccaagatcagccatggcacgctgactgttttgtatgtgtgacctgttcaaaaaagttggcagggcagagatttactgctgtcgaagatcaatattactgtgttgactgctataagaacttcgtcgccaaaaagtgcgctggttgcaaaaaccccataaccggatttggcaaaggatcaagtgttgtagcatacgagggccaatcctggcatgactactgctttcactgtaagaaatgtagcgtcaacctggcgaataaaaggtttgtctttcaccaagagcaggtgtactgccctgattgcgcaaaaaagttgtag

SEQ ID NO: 223620 - DNA, 972 bp, synthetic construct
  misc_feature 1..972: note = Description of Artificial Sequence: Synthetic coding sequence
  source 1..972: mol_type = other DNA
atggccgagaagtttgattgccactactgtcgggaccctcttcaaggcaagaaatatgtgcagaaagatgggcaccactgttgtctgaagtgtttcgataagttttgcgccaatacttgtgtggagtgccggaaacccataggggcagattctaaagaggtccattataaaaatcggttctggcatgatacttgctttcggtgcgccaaatgcctacaccctctcgcaaacgaaacgtttgtggcaaaggacaacaaaatcctctgtaataaatgcaccacccgcgaggacagtccaaaatgtaagggctgtttcaaggctatcgtggccggtgatcaaaacgtcgagtataaagggacagtgtggcacaaggattgttttacgtgctctaattgtaaacaagttattggaaccgggagtttctttcccaagggcgaggatttctattgcgtgacttgtcacgagactaagttcgcaaaacactgtgtgaagtgcaataaagcaattacaagcgggggaatcacctaccaggatcagccatggcatgccgactgtttcgtttgtgtgacatgctctaagaaattggctggacagcgcttcacagccgtcgaggaccagtactactgtgtggattgttacaagaatttcgtggctaagaagtgcgccggttgtaagaatccaatcactggcaaaaggacggtatccagggtcagccaccccgtctccaaggccaggaagccccctgtttgtcatgggaaacgcctgcctttgacactgtttcctagcgcaaatctgcgcggaagacatccgggaggcgaacgaacctgtccctcctgggtggtggtcctctaccggaagaaccgatctctggcagcgccacggggtccagggctcgtgaaggcaccagtgtggtggcccatgaaagataatccaggcactacaaccgcgtctaccgccaagaacgccccatag

SEQ ID NO: 223621 - DNA, 615 bp, synthetic construct
  misc_feature 1..615: note = Description of Artificial Sequence: Synthetic coding sequence
  source 1..615: mol_type = other DNA
atggctgaaaagttcgactgccattattgtcgggatccactgcaagggaagaaatacgtgcagaaagacgggcatcactgctgcctgaaatgtttcgacaaattttgcgccaacacatgtgtagagtgtcggaagccaattggggctgattccaaggaggtgcactataagaatcgtttttggcacgacacttgttttcgctgtgccaagtgtctgcacccgctcgcaaatgaaactttcgtggcgaaggataacaaaatcctgtgtaataagtgtactaccagagaagattctcctaaatgcaaagggtgttttaaggctatcgtggcgggtgaccaaaacgtagaatacaaggggaccgtgtggcataaagactgctttacctgtagtaactgcaaacaagtcattgggactggcagttttttccctaaaggcgaggatttttactgtgtgacgtgtcatgaaacaaagtttgctaaacattgtgtgaagtgcaataaagcgattacgtcaggagggattacataccaagatcagccctggcatgccgactgctttgtatgcgtcacatgtagtaagaagctcgctggacagaggtttaccgcagtggaatag

SEQ ID NO: 223622 - DNA, 624 bp, synthetic construct
  misc_feature 1..624: note = Description of Artificial Sequence: Synthetic coding sequence
  source 1..624: mol_type = other DNA
atggccgagaagtttgattgccactactgcagggatcccctccagggaaagaagtacgttcaaaaggacggtcatcattgctgtctcaagtgctttgacaagttctgtgcgaacacttgtgtcgagtgccggaagcccataggagctgacagtaaagaagttcattacaagaaccgtttctggcatgatacatgctttcgctgtgccaaatgtctccatccccttgccaatgagacctttgtagctaaggacaacaagatcttatgtaacaaatgtactacccgagaggattcaccaaaatgcaagggatgcttcaaggccatcgtggcaggagaccagaatgtagaatacaaaggcactgtctggcataaagactgtttcacatgttctaactgtaagcaggtaattggcacaggctcttttttccctaagggcgaggatttctattgtgtgacatgtcatgaaaccaagttcgcgaagcattgcgtgaaatgtaacaaggcaatcacctccgggggtatcacctaccaagatcaaccatggcacgctgactgcttcgtctgtgtaacgtgtagtaagaagctcgcagggcaaaggttcactgcagtggaggaccaatattag

SEQ ID NO: 223623 - DNA, 426 bp, synthetic construct
  misc_feature 1..426: note = Description of Artificial Sequence: Synthetic coding sequence
  source 1..426: mol_type = other DNA
atggctgaaaaatttgactgtcattactgtagggaccccctgcagggtaaaaagtacgtgcagaaagacggtcaccattgttgtctgaaatgtttcgataagttctgcgcaaacacctgcgttgaatgtcgtaaacccattggggctgatagcaaagaggtccactacaagaatcgtttctggcacgacacgtgctttcgctgcgccaagtgcctgcaccccctggccaacgaaaccttcgtggctaaggacaataagattttgtgtaataagtgtaccacaagggaagattctcccaagtgtaaagggtgtttcaaggccattgtcgctggtgaccagaacgtcgaatacaaggggacagtctggcacaaagattgcttcacttgttctaactgtaaacaggtgatcgggacgggctccttttag

SEQ ID NO: 223624 - DNA, 624 bp, synthetic construct
  misc_feature 1..624: note = Description of Artificial Sequence: Synthetic coding sequence
  source 1..624: mol_type = other DNA
atggctgagaagttcgattgccactactgccgcgaccccctccaaggcaaaaagtatgtgcaaaaggacgggcatcattgttgcctgaagtgctttgataagttctgtgcaaatacatgcgtcgagtgccgaaagccaattggggctgatagtaaagaagtgcattacaagaaccgcttctggcatgacacttgtttccgatgcgccaaatgtctccaccctctggcaaatgaaactttcgtcgcaaaagataataagatcctttgtaataagtgtaccactagagaggatagccctaagtgtaagggttgtttcaaggcaatagtggcgggtgatcaaaacgttgaatataaaggcactgtgtggcacaaagactgctttacatgtagtaattgcaagcaggtgattggaacaggctccttttttccgaagggggaagatttctactgtgtgacctgccacgaaaccaagttcgctaaacattgtgtgaaatgcaacaaggcaattacttccggagggattacgtatcaggaccagccatggcacgcggactgttttgtgtgcgtaacgtgttcgaagaaactcgctggacagcgtttcaccgccgtggaagatcagtattag

SEQ ID NO: 223625 - DNA, 963 bp, synthetic construct
  misc_feature 1..963: note = Description of Artificial Sequence: Synthetic coding sequence
  source 1..963: mol_type = other DNA
atgagccacttcatcctcagacacctgggctcctgctttcagccctatcccgctttcgcggaatatatcctttctgcgacacatcccgcaagcggtccatcatcctacaaagtcggcacgatggcagaaaagttcgactgccactattgcagggacccgctgcaggggaaaaagtacgtccagaaagacggacatcactgttgcctgaaatgcttcgataagttttgcgcaaacacttgcgtggagtgtaggaaaccaatcggcgcagacagtaaagaagtacactataaaaaccggttctggcatgatacctgttttagatgtgccaagtgtctgcatcctctcgctaacgagacgttcgtcgcaaaggataacaaaatactgtgtaataaatgcactacacgggaggattcccccaagtgtaaagggtgtttcaaggccattgtggcaggggaccagaacgtggaatataaagggaccgtgtggcacaaagactgctttacctgttcgaattgtaagcaggtgatcggaaccggatccttcttcccaaagggcgaagacttctactgcgtcacctgtcatgaaacgaagttcgctaaacactgcgtgaagtgcaacaaagccataacctctggcggtatcacataccaggatcagccgtggcacgcggactgcttcgtgtgcgtcacttgctctaaaaagctggcgggtcaacggttcacagccgtggaagaccagtactactgtgttgactgctataagaatttcgtggcgaaaaagtgtgccggatgcaaaaatccaattactggatttgggaagggctcttccgtagtcgcttatgagggacaatcctggcatgactattgctttcactgtaaaaagtgcagtgtcaacctcgccaataaaagatttgtgttccaccaggagcaggtctattgccccgattgtgccaaaaagctgtag

SEQ ID NO: 223626 - DNA, 618 bp, synthetic construct
  misc_feature 1..618: note = Description of Artificial Sequence: Synthetic coding sequence
  source 1..618: mol_type = other DNA
atggccgagaagtttgactgtcactattgccgggacccgcttcaggggaagaagtacgttcagaaggacggtcaccactgttgcttaaagtgtttcgataaattttgcgccaacacctgtgttgagtgcaggaagccaatcggggctgacagtaaggaagtccattacaagaaccggttctggcacgatacatgttttcggtgtgccaagtgcctgcacccgctggcgaacgagacctttgttgccaaagataataagatattatgcaacaaatgtactacgcgcgaagattctccaaaatgtaaaggatgcttcaaagctatcgtggctggggatcaaaatgttgagtacaaagggactgtctggcacaaagattgttttacatgttcaaattgcaagcaggtgattggcactggctcgttcttcccaaagggcgaggacttctattgtgtgacatgtcatgaaacaaagtttgctaaacactgcgtcaaatgcaacaaagcgattacttccggcggtatcacgtaccaggatcagccctggcacgcagactgttttgtatgcgtaacctgcagcaaaaagcttgcaggacaacgcttcaccgcagttgaagattag

SEQ ID NO: 223627 - DNA, 468 bp, synthetic construct
  misc_feature 1..468: note = Description of Artificial Sequence: Synthetic coding sequence
  source 1..468: mol_type = other DNA
atggccgagaaatttgactgtcactattgtagggatcccctgcaggggaaaaaatacgttcaaaaggatgggcaccactgttgcttgaagtgttttgacaagttttgcgcgaatacctgcgtggagtgccggaaaccaattggagcagactcaaaggaggtccactacaaaaaccgtttctggcacgatacttgtttccgttgtgcaaagtgcttgcaccccttggcgaatgagaccttcgtggccaaggacaacaaaattttgtgtaataagtgtacaactcgcgaggatagcccaaagtgtaagggctgctttaaggcgatcgttgcgggagatcagaatgtcgaatacaagggcacggtgtggcacaaggactgttttacatgcagcaactgcaaacaggtgatcggtacaggttcctttttccctaaaggcgaggacttctattgcgttacatgccatgaatag

SEQ ID NO: 223628 - DNA, 843 bp, synthetic construct
  misc_feature 1..843: note = Description of Artificial Sequence: Synthetic coding sequence
  source 1..843: mol_type = other DNA
atggccgaaaagttcgattgccattactgtagggatcccctccagggcaagaaatacgttcagaaggacgggcaccattgctgtctgaagtgtttcgacaaattttgcgccaatacatgcgtcgaatgtcgaaagcccatcggtgccgatagcaaggaagtgcactataagaaccgattttggcatgatacatgttttcggtgcgcaaagtgtctccacccattggccaatgaaactttcgttgccaaggataataagatcctgtgcaataagtgtacaactcgcgaagactcccctaaatgtaagggatgcttcaaagctattgtggcaggcgatcaaaatgttgagtataagggcacagtttggcacaaggattgctttacgtgcagcaattgcaaacaggtgatcgggacaggttctttctttccgaaaggtgaagacttctactgtgtgacctgccacgagaccaagtttgccaaacattgcgtgaaatgcaacaaagccatcaccagtggcggtatcacgtatcaggaccaaccctggcacgccgactgctttgtttgcgtaacctgcagcaaaaagctggccggtcaacgcttcaccgccgtcgaagaccagtattattgtgtggattgctacaagaactttgtcgcgaaaaagtgcgccggatgcaaaaacccgataactgggttcggcaaggggagcagtgttgtagcctatgaagggcagtcctggcacgattactgcttccattgtaaaaagtgtagtgtgaatctagcaaacaagaggtttgtgttccatcaggagcaggtctattgtcccgattgtgctaaaaagctgtag

SEQ ID NO: 223629 - DNA, 783 bp, synthetic construct
  misc_feature 1..783: note = Description of Artificial Sequence: Synthetic coding sequence
  source 1..783: mol_type = other DNA
atggctgaaaagttcgattgctgtctcaaatgcttcgataagttttgcgctaacacttgcgtcgagtgccgtaaacccattggcgcagactcaaaggaagttcattacaaaaacaggttctggcatgatacctgctttcgctgcgctaagtgcttgcaccccctggctaacgaaacttttgtggccaaggataacaagattttgtgtaataaatgtaccactcgcgaggactcccctaaatgtaagggatgcttcaaagctattgtcgccggtgaccagaacgttgaatataaaggaactgtgtggcacaaggattgtttcacttgcagcaactgtaagcaagtaattggtactgggtcgtttttcccaaaaggggaggacttctattgtgtgacttgtcacgaaacgaagttcgcaaagcactgcgtgaagtgtaataaagcgattacttctggaggaatcacctatcaggaccagccctggcatgcagactgcttcgtgtgcgtgacctgcagcaaaaagcttgcaggtcagcgctttaccgccgtcgaagaccagtattactgcgtcgactgttacaagaactttgtagctaagaaatgcgccggttgtaagaaccctattaccggattcggtaaaggttccagtgtcgttgcctacgagggacaaagttggcatgactactgtttccattgcaaaaagtgttcagtgaacctggccaataaacggtttgtgtttcaccaggagcaggtgtactgtcccgactgtgcgaaaaagctgtag

SEQ ID NO: 223630 - DNA, 930 bp, synthetic construct
  misc_feature 1..930: note = Description of Artificial Sequence: Synthetic coding sequence
  source 1..930: mol_type = other DNA
atgacattttacgtcgccagtttagcactggagctgatttggatgctgagcagcccggctgggccttccagctataaagttgggaccatggccgagaagttcgattgccattactgtagagacccactccagggaaagaagtacgtgcagaaagatggccatcactgttgtctcaaatgctttgataagttctgcgctaacacctgcgtggagtgtagaaagcctatcggcgctgacagtaaggaagtccattataaaaacaggttttggcatgatacttgctttcggtgcgcaaaatgtctccacccactggctaacgaaaccttcgtggccaaagataacaagatcctatgtaacaagtgcaccacaagagaagattctccaaaatgtaaggggtgcttcaaggctattgtggccggagaccagaacgtggaatacaagggtacggtatggcacaaagattgttttacatgctccaattgtaagcaggtaatcggaacgggatccttcttccctaaaggggaagatttctattgcgtcacctgtcacgaaacaaagttcgctaaacactgcgtaaaatgtaataaggcaatcacttctggcggaattacttaccaggaccagccctggcatgcggactgctttgtttgcgtgacttgctcaaagaagctggcagggcagagatttactgcggtagaagaccaatactactgcgtcgactgctataagaacttcgtggccaagaagtgcgccggttgcaaaaaccccattaccgggttcggcaaaggttcttccgtggtcgcgtacgaggggcaaagttggcacgactattgtttccattgtaaaaagtgttctgttaacttggcaaacaagagattcgtcttccaccaggagcaggtctattgccccgattgtgctaaaaaactgtag

SEQ ID NO: 223631 - DNA, 828 bp, synthetic construct
  misc_feature 1..828: note = Description of Artificial Sequence: Synthetic coding sequence
  source 1..828: mol_type = other DNA
atggcctcccaccggcactcagggccatcttcctataaggtggggacaatggccgagaagttcgattgtcactactgtagggacccacttcagggaaagaagtacgtgcagaaggacgggcatcactgctgcttgaaatgctttgataaattttgtgccaacacgtgcgtcgagtgtcgcaagcccatcggagccgattccaaggaagtccactacaagaaccggttctggcacgacacttgctttagatgtgcaaagtgtactacacgggaagacagccctaagtgcaaggggtgcttcaaggccatagtggcaggagaccagaacgtcgagtataaagggactgtttggcacaaagactgctttacatgctcaaattgtaaacaggttattgggacaggctcattttttcctaaaggggaggatttttactgtgtcacatgtcacgagacaaagtttgcaaagcattgcgtgaaatgtaacaaagccatcacctctggagggattacctaccaagaccagccatggcatgccgattgtttcgtatgcgttacttgtagcaaaaagctggccggacagcgtttcaccgccgtggaggaccagtattattgcgtggattgctataagaacttcgtcgcgaagaaatgcgctggatgtaaaaatcctattacgggcttcggtaaaggaagttcagtggtggcgtacgaagggcagtcctggcacgattactgcttccactgcaagaagtgctccgtgaatctagccaacaagcgctttgtgtttcatcaggagcaggtttattgtcctgattgtgccaagaagttatag

SEQ ID NO: 223632 - DNA, 843 bp, synthetic construct
  misc_feature 1..843: note = Description of Artificial Sequence: Synthetic coding sequence
  source 1..843: mol_type = other DNA
atggccgagaagttcgattgccattactgccgggacccgctgcagggaaagaagtacgtccagaaggacgggcatcactgttgcctcaaatgctttgataaattttgtgcaaatacctgtgtggaatgtaggaaacccatcggcgcagactcaaaggaagtgcactacaagaatagattttggcacgacacttgcttccgatgcgcgaaatgtttgcacccgcttgccaacgagaccttcgtagcaaaggacaataagatactttgtaataaatgtacgactcgggaggatagtcccaagtgtaagggatgcttcaaggcaattgttgcaggggatcagaacgtggagtacaaggggaccgtgtggcataaggactgtttcacttgttcaaactgtaaacaggtcatcggaactggcagcttctttcctaagggggaagatttctactgcgtcacctgccacgaaacaaagttcgcaaaacattgcgtgaagtgcaacaaggccataacatcagggggtattacataccaggaccagccctggcatgctgattgctttgtttgcgtgacctgttccaaaaaattagctggacaacggttcaccgccgtggaggaccagtattattgtgtggattgttacaagaatttcgtagccaagaagtgcgctggctgcaagaatccaatcaccggttttggcaaagggagctctgtggtagcttacgagggccaatcatggcacgactactgcttccactgcaagaagtgctcagtaaatttggcgaacaaacgcttcgtgttccaccaagagcaggtgtactgccctgactgtgcaaagaagctgtag

SEQ ID NO: 223633 - DNA, 840 bp, synthetic construct
  misc_feature 1..840: note = Description of Artificial Sequence: Synthetic coding sequence
  source 1..840: mol_type = other DNA
atgacagagaggttcgattgccaccactgcaatgaatcactgtttggcaaaaaatacatcctcagagaggagtccccatactgcgtcgtgtgtttcgaaactttgtttgccaatacttgcgaggaatgcggcaaacctatcggttgtgactgcaaggacttgtcttataaggatagacactggcacgaagcctgcttccattgctcccagtgccggaattcactcgtcgataaaccatttgcagccaaagaggatcagttgttatgtactgattgctactctaacgagtactcctctaagtgccaggaatgcaaaaagaccataatgccaggcacaaggaaaatggagtacaaagggtcctcctggcatgagacctgctttatctgccacaggtgccaacagcccatcggaaccaagtcttttatccccaaggataaccagaacttctgtgtgccatgctacgagaagcagcacgccatgcagtgcgtgcagtgtaagaagccgatcacaacgggaggggtgacatatcgagagcagccttggcacaaggagtgctttgtctgcactgcctgccgtaagcagctctccggtcagagattcaccgcaagggacgattttgcctactgtctgaactgcttttgcgatttgtatgccaagaagtgcgccggttgtacaaatcctattagcggactgggcggaactaagtatatcagctttgaagaaaggcagtggcacaacgactgcttcaactgcaagaaatgttctctgagcttggttgggcgaggcttcttgaccgaaagagatgacatactgtgccccgattgcggaaaggacatctag

SEQ ID NO: 223634 - DNA, 456 bp, synthetic construct
  misc_feature 1..456: note = Description of Artificial Sequence: Synthetic coding sequence
  source 1..456: mol_type = other DNA
atgacggagaggtttgattgtcatcactgcaacgagtccctgttcggaaaaaaatacatcctgcgggaagagagcccatactgtgtggtatgttttgagaccctgtttgctaatacttgtgaagaatgcggtaagcccatcggctgcgattgtaaagtcccagcaaggtggtccacccgcgctgccgcaggcatgagacccgcatcatctgccaccgccgcatccagccagcttgaaccacgggtatcaagccccaagacaatccgtatcagcgtatgtcctgccatgcgaaacaacatgccctgctccgccttttccgccaagtcacctagtcctagggaaggctcactgaccggcagctctcctggcactcgctcagctagttgcgcccctcctgcaggatcaagttgcctgggatccgcgagccagctggcgatgactcttcctacagcttag

SEQ ID NO: 223635 - DNA, 1170 bp, synthetic construct
  misc_feature 1..1170: note = Description of Artificial Sequence: Synthetic coding sequence
  source 1..1170: mol_type = other DNA
atgaccaggcggggattcagtagagcgggtgccgcacagagatctactcgccctgccgcagaaccccagcctcctgcagctcgggcactgcagcccagaccaggcgtccccggacccctgaggtgtcgtgaatatctacagccccctgcgcctaggcgggaggccgaaggcctctcacaccagggaagcgaagtgggcgcagaaagtggcgctaggcccaaggaaagaggcgcagagcctgaattgggcaggctttggctgcgaacagtgagcagttggcgcctgggatggcacttcgacttcggggtagcagagaaacccggtgtcaagatgaccgagagattcgactgccatcactgtaacgagtcattgtttggaaaaaaatatatcctgcgggaagaaagcccatattgtgtggtttgctttgagacactctttgcaaacacctgcgaagaatgtggaaagccgattggttgtgactgtaaggatctctcctacaaagacaggcactggcacgaagcatgttttcactgttcccaatgcagaaactctttagtcgacaagccttttgcagccaaagaggatcagctgttatgtaccgattgctattccaacgagtattcctctaaatgccaggaatgcaagaagacaatcatgccaggaaccaggaagatggaatataagggttcaagttggcatgagacctgcttcatttgccacaggtgtcagcaacccatcggcacgaagagttttataccaaaggataatcaaaatttttgtgtgccctgctacgagaagcagcatgctatgcagtgtgtccagtgtaagaagcccatcactaccggcggtgttacctaccgcgaacagccctggcataaggagtgctttgtatgtaccgcttgcagaaagcagctgtctggccagcgttttacagcaagagatgactttgcatactgcctgaattgcttctgcgacttgtatgctaaaaaatgcgctggttgcacaaatccgatttcaggcttaggcggtactaagtatataagttttgaggaaagacaatggcacaacgactgcttcaactgcaagaagtgttctctatcactggttgggagaggctttcttaccgaaagggacgatattctctgtccagattgtgggaaagacatttag

SEQ ID NO: 223636 - DNA, 840 bp, synthetic construct
  misc_feature 1..840: note = Description of Artificial Sequence: Synthetic coding sequence
  source 1..840: mol_type = other DNA
atgaccgagcggtttgactgccatcactgcaacgagagcctgttcggcaaaaagtacattctaagggaagagagcccctactgcgtcgtttgtttcgaaactttgttcgctaatacttgtgaggaatgcggcaaacctattggctgcgactgtaaagaccttagctacaaagaccgccactggcacgaggcctgctttcactgttctcagtgccggaatagcctcgtcgataagcccttcgcagctaaagaggaccagctattgtgtacagattgctactctaatgagtactctagtaagtgccaggaatgcaaaaagactattatgcctggcaccagaaagatggagtacaaaggttcctcttggcatgagacttgcttcatttgccaccgttgccagcaacctatcggtacaaagagttttattcctaaagacaaccagaatttttgcgtgccttgctatgaaaaacagcacgccatgcagtgtgtgcagtgcaagaaacccattacaacaggcggagtcacttatcgggagcaaccgtggcataaggagtgtttcgtgtgtactgcatgtagaaaacagctgtccggccagcgtttcacggccagagatgattttgcctattgcctgaactgcttctgcgacctgtacgcaaagaaatgtgccggatgcacgaatcccatatccggtctcggaggaaccaagtacataagctttgaggagaggcagtggcacaacgactgtttcaactgtaaaaagtgttctctttccctggtggggagggggttcctgactgaacgcgatgatattctgtgtcccgactgtgggaaagatatctag

SEQ ID NO: 223637 - DNA, 840 bp, synthetic construct
  misc_feature 1..840: note = Description of Artificial Sequence: Synthetic coding sequence
  source 1..840: mol_type = other DNA
atgaccgaacggtttgactgtcaccactgtaacgagtccttgtttggaaagaaatacatactgagagaagaatcaccttactgtgtggtgtgcttcgagaccctttttgcaaacacctgtgaagaatgtggtaagcctatcggctgtgactgcaaagacttgagctacaaggacagacactggcatgaggcatgctttcactgctctcagtgtcgaaactctttggtcgacaagccctttgctgccaaggaagaccagctcctgtgtacagactgctatagcaatgaatattcctcaaagtgtcaggagtgcaagaagactatcatgcccggaactaggaagatggaatacaagggaagtagttggcacgaaacctgctttatttgtcacaggtgccagcagcccatagggaccaagagctttatcccaaaagataaccagaacttttgcgtgccgtgctatgagaaacagcacgctatgcagtgtgtgcagtgcaaaaagcccatcacgactgggggagtgacctatagggaacagccttggcataaggagtgctttgtatgcactgcctgtaggaagcaactgtctgggcagaggttcaccgccagagacgacttcgcctattgcctgaattgtttctgtgacttgtatgccaagaagtgtgctggctgcactaaccctatttctggcctgggaggtaccaagtatatttcctttgaggagagacagtggcacaacgactgctttaattgtaaaaaatgcagtttgtctctcgtcgggagaggctttctcaccgagagggatgatattctgtgcccggattgcggaaaagatatctag

SEQ ID NO: 223638 - DNA, 840 bp, synthetic construct
  misc_feature 1..840: note = Description of Artificial Sequence: Synthetic coding sequence
  source 1..840: mol_type = other DNA
atgaccgagaggtttgattgtcaccattgcaatgaatctctgtttggaaaaaagtacatcttgagggaggagtctccttactgcgtggtgtgcttcgaaacactttttgctaatacctgtgaagaatgtggaaagccaataggatgcgattgcaaagacctgagttataaggacagacattggcatgaggcatgtttccactgctcacagtgccgcaactctttggtggataagccatttgccgctaaggaggatcagctcctatgtaccgactgctactccaacgaatattcctctaaatgtcaggagtgtaagaagaccataatgcctggtaccaggaagatggagtataaaggctctagctggcatgagacttgctttatttgtcaccgctgtcagcagcccataggcacaaaatccttcatcccaaaagataatcagaacttttgtgtgccatgctacgagaagcagcacgcaatgcagtgcgtccaatgcaagaagcccattactaccggaggcgtaacctaccgggaacagccttggcacaaagagtgctttgtctgtaccgcttgtagaaagcagctctcaggccagagattcactgcaagagacgatttcgcatactgtcttaactgtttttgcgacctgtacgccaaaaagtgtgccggatgtactaacccaatctcaggacttgggggaacaaaatacatatctttcgaggagcgccagtggcataacgattgctttaactgtaagaagtgtagcctcagtctagtgggaagaggatttttaactgaaagagatgacattttatgtcctgactgcgggaaagatatctag

SEQ ID NO: 223639 - DNA, 840 bp, synthetic construct
  misc_feature 1..840: note = Description of Artificial Sequence: Synthetic coding sequence
  source 1..840: mol_type = other DNA
atgactgagcgattcgactgccaccattgtaatgagtcactgttcggcaagaagtacattttgagagaggaatctccctactgcgttgtttgctttgaaaccctgttcgctaacacttgtgaggaatgtggcaagccgatcggatgtgactgcaaggatctgtcctataaggacagacattggcatgaggcgtgctttcactgtagccagtgtcggaacagcctggtggacaagccttttgctgctaaagaagaccagcttctctgtacagactgttatagcaatgaatactcctccaagtgccaagagtgcaagaagactattatgcccggtacacgcaagatggagtataaaggcagctcctggcacgaaacctgcttcatctgccaccggtgtcaacaacctatcggaacaaaaagttttatacccaaggacaaccaaaacttctgtgtgccatgttatgaaaagcagcacgccatgcagtgtgtgcaatgtaaaaaaccaattacaaccgggggagtcacataccgggagcaaccctggcataaggagtgcttcgtctgcacagcctgtagaaaacagttgtcagggcagcggttcactgcacgcgatgatttcgcctattgtctcaactgcttctgcgatctgtatgccaagaaatgcgcaggttgtaccaatccaatctcaggactaggaggaacaaaatatattagcttcgaggagaggcaatggcataatgactgcttcaattgtaagaagtgctccctgagcctcgtaggtcgtggcttcttaaccgaacgtgacgatatcctttgccccgactgcgggaaggacatttag

SEQ ID NO: 223640 - DNA, 840 bp, synthetic construct
  misc_feature 1..840: note = Description of Artificial Sequence: Synthetic coding sequence
  source 1..840: mol_type = other DNA
atgaccgagcggttcgattgccatcactgcaatgaaagcctgttcggaaagaaatatattctgcgggaggagagtccatactgcgtggtgtgcttcgaaacactgttcgccaacacctgcgaggaatgcggaaaaccaatcggatgtgattgcaaagatcttagttataaggaccgccattggcacgaagcttgctttcactgctcacagtgtcgcaacagccttgttgacaagcccttcgcggctaaagaggatcagctcctgtgcactgattgctatagtaatgagtacagctcaaagtgtcaggagtgcaaaaaaacaatcatgcctggcaccagaaagatggagtacaaggggtcatcctggcacgaaacttgtttcatctgtcaccgttgccagcagcctattgggacaaagtctttcattccaaaggataaccagaatttttgcgtcccatgctatgagaagcagcacgctatgcaatgtgtacagtgtaaaaagcccatcacaacaggtggcgtgacttaccgcgagcagccttggcacaaagaatgttttgtatgcaccgcctgccgcaaacaactgagcgggcagcgcttcacagcgagggatgactttgcctattgtctgaattgcttttgtgatttgtacgccaaaaaatgtgcagggtgcaccaaccccatctctggactggggggaaccaagtacatcagctttgaggagcgccaatggcataacgattgttttaactgcaagaaatgctccttgtctctggttggacgcggtttcctcaccgagagggacgatatcctgtgccccgattgtggaaaagatatctag

SEQ ID NO: 223641 - DNA, 840 bp, synthetic construct
  misc_feature 1..840: note = Description of Artificial Sequence: Synthetic coding sequence
  source 1..840: mol_type = other DNA
atgacagagcggttcgactgccatcactgtaatgagagcttatttggtaagaagtacattctgcgggaagagtccccttactgtgtcgtatgttttgaaactctgtttgcaaacacatgtgaagaatgcgggaagcctatcgggtgtgactgcaaggatctgtcctataaagatagacactggcacgaggcttgctttcactgttctcagtgccggaactcactagtggataaaccattcgctgccaaagaggaccagctgctgtgcaccgactgctacagcaatgagtattcctccaaatgtcaagaatgcaagaagacaataatgcctggtacaagaaagatggagtacaagggaagcagctggcatgagacgtgctttatctgccaccggtgtcaacaacccattggaactaagtcgtttatccccaaggataatcagaatttttgcgtcccctgctatgagaaacagcacgcaatgcagtgtgtgcaatgcaaaaaacctataaccacaggaggcgttacctaccgggaacagccttggcacaaggagtgctttgtgtgcacagcctgccgcaaacagctgagtgggcagcgattcactgctagggatgattttgcttattgtttaaattgcttctgtgacctgtacgcgaaaaaatgtgcaggatgcacaaacccaatctctggcctaggaggcaccaagtacattagttttgaagagcggcagtggcacaacgactgcttcaattgtaaaaagtgctcccttagccttgtagggcgtggattcctgactgagcgggatgacatcctgtgcccggactgcgggaaagacatctag

SEQ ID NO: 223642 - DNA, 60 bp, synthetic construct
  misc_feature 1..60: note = Description of Artificial Sequence: Synthetic coding sequence
  source 1..60: mol_type = other DNA
atgacagagcgcttcgactgtcaccactgcaatgaatcactctttggcaaaaaatactag

SEQ ID NO: 223643 - DNA, 435 bp, synthetic construct
  misc_feature 1..435: note = Description of Artificial Sequence: Synthetic coding sequence
  source 1..435: mol_type = other DNA
atgaccaggcggggtttcagtagggctggcgcagcgcagcgcagcacacgtcccgcagccgaaccccagccacctgcggctagagctctgcagccgcgaccaggagtccccggacccctgcgatgtcgagagtatcttcagccccctgcgcctagacgggaggccgaaggactaagccatcagggaagcgaggtgggtgcagagagcggtgcccgacccaaggagcggggagccgagcccgagttgggtcgcctatggctccgcacagtctcatcgtggagattgggttggcacttcgatttcgggaccgagagcaggttcgttgcacaagcaggagtgcaatggcatgacctctccagtctgcaagctctccctctaggatctcgccactccccggctcccgcatcccaggtcgccggaacgactggctgttag

SEQ ID NO: 223644 - DNA, 843 bp, synthetic construct
  misc_feature 1..843: note = Description of Artificial Sequence: Synthetic coding sequence
  source 1..843: mol_type = other DNA
atgtccgagtcattcgactgtgccaagtgtaatgaatccctgtacggaaggaagtacatccagacggatagtggcccatattgcgttccgtgctacgataacacatttgcaaacacctgtgcggaatgtcagcaactgatcggacacgattcaagagaactattttacgaagatagacacttccatgagggctgttttcgatgctgcaggtgtcaacggagcctggccgacgagccatttacctgtcaggatagcgaattgctgtgcaacgattgctactgtagtgccttctcctcccagtgcagcgcatgcggcgagaccgtaatgcctggaagccgcaagcttgagtacggcggtcagacttggcacgaacactgcttcctgtgttctggctgcgagcagcccctaggcagcaggagcttcgtgcccgataagggcgctcactattgcgttccctgctatgagaacaaattcgccccacggtgcgcgagatgctccaagacactcacccagggaggggtaacctaccgcgaccagccttggcaccgggagtgcctggtctgtacgggttgccagaccccactggctggacagcagtttactagtagggatgaggacccttactgtgtagcctgtttcggtgagttgttcgcgcctaagtgctctagttgcaagagaccaatagtgggcctgggaggtggtaaatatgtatctttcgaagaccggcactggcaccataactgctttagctgtgccaggtgttcaaccagtctggtgggccagggattcgtgcccgacggcgatcaagtactgtgccagggttgttcgcaggcaggcccttag

SEQ ID NO: 223645 - DNA, 855 bp, synthetic construct
  misc_feature 1..855: note = Description of Artificial Sequence: Synthetic coding sequence
  source 1..855: mol_type = other DNA
atgactaccgcccacttttactgtcagtattgtaccgcctcactgctcgggaaaaagtatgtcctcaaggacgatagcccctactgcgtgacttgctacgacagagtgttctcaaactattgtgaggaatgtaagaaacccatcgaatcagatagcaaagacctgtgttataaggataggcactggcatgaaggttgctttaagtgcaccaagtgcaatcatagtctggtggaaaagcccttcgctgccaaagatgaacggctgctttgtacggaatgctacagcaacgagtgcagctctaagtgtttccattgtaagagaactatcatgcctggctctcgcaagatggagtttaagggcaactattggcatgagacctgtttcgtgtgcgagaattgtcggcaaccgatagggactaaacctctaatatcaaaagaatcgggtaattattgtgttccctgctttgaaaaggagttcgcacactattgtaatttctgcaagaaagttatcacctccggtggcattacattctgcgatcagttatggcacaaggaatgtttcctatgttcaggttgccggaaggacctgtgtgaagagcaatttatgtccagagacgactaccctttttgtgtggactgctataaccatctctacgcaaacaagtgtgtggcttgcagtaaaccgatatccggtttgactggtgccaaattcatatgctttcaagatagccagtggcatagcgagtgcttcaattgtggtaaatgcagcgtatctttagtgggcaagggctttctgacccagaacaaggagattttttgtcagaaatgtgggtctggcatggatactgacatatag

SEQ ID NO: 223646 - DNA, 633 bp, synthetic construct
  misc_feature 1..633: note = Description of Artificial Sequence: Synthetic coding sequence
  source 1..633: mol_type = other DNA
atgaccaccgcccacttttattgtcaatactgcacagcgtctcttctgggcaagaagtatgtgctaaaggatgattctccttattgcgtgacgtgctatgaccgagtttttagcaactattgtgaagaatgcaagaagccaattgaatcagattcaaaggacttatgttacaaggatcggcactggcatgaaggctgtttcaaatgtaccaaatgcaaccactccctagtagagaaacctttcgctgctaaagacgaacggttgttatgtaccgagtgttactccaatgaatgctcctcaaagtgcttccattgtaaacggaccatcatgcccggtagtagaaagatggaatttaaggggaactattggcatgagacatgctttgtgtgcgaaaactgcagacagccaatcggtacaaagccactgatttccaaggagtccgggaattactgtgtcccttgtttcgaaaaagaatttgctcattattgcaacttttgtaagaaagttattacatccggcggaatcacattctgtgatcagttgtggcataaagaatgctttttgtgttcgggctgcaggaaagatctttgcgaggaacagtttatgtcccgggacgactacccgttttgctag

SEQ ID NO: 223647 - DNA, 855 bp, synthetic construct
  misc_feature 1..855: note = Description of Artificial Sequence: Synthetic coding sequence
  source 1..855: mol_type = other DNA
atgaccaccgcccatttctactgtcagtactgtaccgcatccctgttaggcaagaaatacgtgctgaaggatgatagcccctactgtgtgacttgttacgaccgagtgttttctaattactgcgaagagtgtaaaaagcccatagagtctgactccaaggacctctgttacaaggatcggcactggcatgagggctgttttaagtgcaccaagtgtaatcactctctggtggagaaaccattcgccgcaaaagacgagagactgctgtgtactgagtgctactcaaacgagtgttctagcaagtgctttcactgtaagagaaccatcatgcccggatcccgaaagatggaattcaaaggcaattattggcatgaaacgtgctttgtgtgtgagaattgtcgccagcccatcggaaccaagcctttgattagcaaagagtctgggaactactgcgtgccgtgcttcgagaaagagtttgcccactactgtaatttctgtaagaaagtcataacaagtggtgggatcactttctgtgaccagctgtggcacaaagaatgctttctgtgctccgggtgcagaaaggacctgtgtgaagaacagttcatgagcagagacgattacccgttctgtgtcgactgctataaccatctatacgcaaataagtgtgtggcttgttccaaacccatctcggggctgacgggggctaaattcatttgctttcaagattctcagtggcactccgagtgttttaactgtggaaagtgttctgtgtcattagtaggcaaggggttcctgacccagaacaaggagatattttgccagaaatgcggctcaggcatggatactgatatttag

SEQ ID NO: 223648 - DNA, 1314 bp, synthetic construct
  misc_feature 1..1314: note = Description of Artificial Sequence: Synthetic coding sequence
  source 1..1314: mol_type = other DNA
atgggtcgtagaatgcggggagctgccgctacagccggactgtggttgctggctctggggtctctgttagccctgtgggggggtctgctgcccccacggaccgagctccccgcaagccggccacctgaggaccggctgcccagaagacctgccagatctggcggacctgcccctgcccctaggttccccctgccccctccgttggcctgggatgctcgagggggatccctgaagacttttcgggcactacttaccttggctgcgggtgctgacggacctcctcggcagtcgagaagcgagccgagatggcatgtgagcgccagacaaccccgtccagaagaatccgccgcagtacacggaggcgtgttttggtcccgaggactggaggaacaggtgcccccaggcttttccgaagcccaggcagcggcttggttggaggctgctaggggggcaagaatggtggccctggaacgtggaggctgtggcaggagtagcaatcgacttgccagatttgccgatggtacccgcgcatgcgtgagatatggcatcaaccctgaacagattcagggggaagcactgagttactacctggcaaggcttctgggcttacagagacacgtaccaccccttgcccttgcaagagtggaggcacgtggtgctcagtgggcgcaagtgcaggaggagctgcgcgcagcacattggacagaaggctctgtcgtgtcactcacgcgctggttacccaatttgaccgacgtcgtcgtgccagctccatggcggtccgaggatgggaggttaaggccactacgcgacgcaggcggagaattggcgaatttatcgcaggccgagctggtcgatctggtgcagtggacagacctcatcctgtttgattatctaaccgcaaactttgatcgactcgtctctaacctgtttagcctgcagtgggatccaagggtaatgcagagagctacatccaacctgcatcgcggacctgggggagccttggtgtttctggacaatgaagccggacttgtgcacggttatcgcgtggcaggcatgtgggacaaatataatgagccacttcttcagagtgtgtgcgtattccgcgagagaaccgcccgaagggtgttagagttacaccgcggtcaagatgcggcagcacgtctgttgaggctctatcggaggcacgagccaagatttccagaactggccgctctggcagatcctcacgctcagttgctgcagagacgcctggatttcctggccaagcacattctccattgcaaggctaaatatggaaggaggtctgggacctag

SEQ ID NO: 223649 - DNA, 312 bp, synthetic construct
  misc_feature 1..312: note = Description of Artificial Sequence: Synthetic coding sequence
  source 1..312: mol_type = other DNA
atggagagacagcagcagcagcaacagcaactgagaaacctcagagactttctcctggtgtataacaggatgacagaactgtgcttccagagatgtgtgccttccctgcaccatcgcgcacttgatgccgaggaggaggcttgcctgcactcatgtgctggcaaactgatccacagcaatcatcgactgatggccgcttatgtacaacttatgcctgctctggtgcagcgcaggattgccgattacgaagccgcttcagccgtgccaggggttgccgcagagcagcctggggtttcaccaagcgggagttag

SEQ ID NO: 223650 - DNA, 312 bp, synthetic construct
  misc_feature 1..312: note = Description of Artificial Sequence: Synthetic coding sequence
  source 1..312: mol_type = other DNA
atggagaggcagcagcaacagcagcagcagctccgaaacttgagggattttctcctggtgtacaatcgaatgacagagctctgcttccagagatgtgtgccttccctccaccacagggccctcgatgccgaggaggaggcatgcctccattcttgcgcaggaaaactaatccattccaaccaccggctgatggctgcatatgttcagctgatgccagccctggtccagcgacgcatcgccgactatgaagccgctagcgcggtgcctggcgtcgcggcagagcagccaggagttagcccatcaggcagctag

SEQ ID NO: 223651 - DNA, 312 bp, synthetic construct
  misc_feature 1..312: note = Description of Artificial Sequence: Synthetic coding sequence
  source 1..312: mol_type = other DNA
atggagcgccagcaacagcagcaacagcagttacgaaatctgcgcgattttctgctggtgtacaaccgcatgactgagttatgctttcagcgctgtgtgccatctctccaccatagggcactggatgctgaggaggaggcatgtctgcacagctgtgcaggcaagctcatccacagtaatcatcgactgatggccgcatatgtgcagctgatgcctgccctagtgcagcggaggatcgcagactatgaagcagccagtgccgttcctggcgtggcggctgagcagcccggagttagtccatccggtagctag

SEQ ID NO: 223652 - DNA, 948 bp, synthetic construct
  misc_feature 1..948: note = Description of Artificial Sequence: Synthetic coding sequence
  source 1..948: mol_type = other DNA
atgcacggccatggtggatacgatagtgacttctctgacgacgaaaggtgcggggagtcaagcaagcgtaaaaagagaacagtcgaggacgaccttctgctgcagaaaccgttccagaaagagaagcacggtaaggtggcccataaacaagtcgccgctgaattgctcgatcgcgaggaagcccgtaatcgcaggtttcatctcatcgccatggatgcgtatcagagacacactaagtttgtgaacgattacatcctgtactacggaggcaaaaaggaagatttcaaaaggctgggcgaaaatgataagacagatttggatgtgattagagaaaaccatagatttctctggaatgaggaggacgagatggatatgacatgggagaagagactcgccaaaaaatattatgacaaactgttcaaggaatactgtatcgctgatctgtcgaaatataaagagaacaagttcggctttaggtggagggtcgagaaagaggttatttccgggaagggacaatttttttgcggcaacaaatactgtgacaagaaagaagggttaaagtcatgggaggtgaactttgggtacatcgagcatggtgagaaacgaaatgccctcgtgaaactacgactctgtcaagagtgttcaattaagttaaattttcatcatcggagaaaagaaatcaagtccaagaagagaaaagacaagacaaagaaggactgcgaagaaagctcccacaaaaaaagcagactgagtagcgcggaggaagccagcaagaagaaggacaaggggcacagtagttccaaaaagagcgaggattcactcctgaggaattccgatgaagaagagagcgcctctgaaagcgagctgtggaaggggcctctgcctgagaccgatgaaaaatcccaggaggaggagtttgacgagtactttcaggacctctttctttag

SEQ ID NO: 223653 - DNA, 948 bp, synthetic construct
  misc_feature 1..948: note = Description of Artificial Sequence: Synthetic coding sequence
  source 1..948: mol_type = other DNA
atgcatggccacggcggatatgattccgacttctcagacgatgaacggtgcggggaatcctcaaagcgtaagaaaagaaccgtggaagatgatttgctgttgcagaaaccctttcagaaggagaaacatggcaaggtcgctcacaaacaggttgcggctgagctcctcgacagggaggaagcaagaaacagaaggtttcatctgatcgccatggatgcctatcagagacataccaagtttgtgaatgactacatcctctattacggcggaaagaaagaagatttcaagcgcttgggcgagaacgacaaaactgacctggacgtgattagggaaaaccaccggtttctctggaatgaggaggacgagatggatatgacctgggaaaaacgcctggccaagaaatactatgacaagctgttcaaagaatattgcatcgcagacctgtccaaatataaagagaacaaattcgggtttcgctggcgggtggagaaggaagtgatcagcggcaaaggccagttcttctgcggcaacaagtactgtgataagaaagaaggccttaaaagctgggaggtgaatttcggttatatcgaacatggcgaaaaaaggaacgccttagttaaactgaggctctgccaagagtgtagcattaagctaaacttccaccatcgcaggaaagaaataaagtcaaaaaagagaaaggacaagaccaagaaggactgtgaagagagttctcacaaaaaaagcaggctatcctccgcagaggaagcttcaaagaagaaagacaagggccacagctcctcgaagaagagtgaggattcccttctcaggcggatgttggaggagctgcaaatgtttacttgggaaaagagtgagcgcatgggtggtaaaagactgatcatcattatcggcgaagagctatctgccaatgtgacaacgtttaaaatgtag

SEQ ID NO: 223654 - DNA, 942 bp, synthetic construct
  misc_feature 1..942: note = Description of Artificial Sequence: Synthetic coding sequence
  source 1..942: mol_type = other DNA
atgcatgggcacgggggttatgatagcgattttagcgacgacgaacgttgcggcgagtcatccaaacggaagaagcgcacggtagaggacgatttgttgctgcagaaacctttccagaaggagaagcacggcaaggtagcccacaaacaagtggctgccgagctgcttgacagagaagaggcccgtaaccgcagattccatctgattgcaatggacgcctatcagcgccataccaagttcgttaacgactatattctatactacggaggcaagaaggaggattttaaacgtctgggagagaatgataaaactgatctggacgtgattcgggaaaatcaccgcttcctgtggaatgaagaggacgaaatggacatgacctgggaaaagagactcgcaaagaaatactatgataaactcttcaaagaatactgcattgccgaccttagtaaatacaaggaaaataaattcgggtttcggtggcgagtagagaaagaggtaatcagcgggaagggccaatttttctgtggcaacaaatattgtgataagaaggaaggccttaaatcctgggaagtgaactttggatatatcgagcacggggaaaagcgcaatgccttagtgaaattaaggttgtgtcaagagtgttccatcaaacttaactttcaccaccgtcgtaaagagatcaagtcaaagaaacggaaggataaaacaaaaaaagattgcgaagagtcatctcacaagaaatcacgcctatcaagcgcagaggaggcctctaagaagaaggacaagggacacagcagctccaagaagtctgaagatagtcttctcaatggcgtgatgctgttccaccccggttggtctgcggtggctcgttctcaactaacagccgcacccgcatcgcaagtgcagactaataatcactactggcgcggtgttgtctgctag

SEQ ID NO: 223655 - DNA, 879 bp, synthetic construct
  misc_feature 1..879: note = Description of Artificial Sequence: Synthetic coding sequence
  source 1..879: mol_type = other DNA
atgcatggacatggcggttacgactcagatttctctgacgacgagagatgcggggaatcgagcaaacgcaaaaagcgcaccgtcgaagacgacctgctgctccaaaaacccttccaaaaggagaaacacgggaaagtcgctcacaagcaggtggccgctgagctgctggaccgagaggaagctcgaaaccggagattccatctgatcgccatggatgcctatcaacggcatacaaaatttgttaatgactatattctgtactacggaggcaagaaagaggactttaagagactgggggagaatgacaagactgatctcgacgtaattagggaaaatcatcgttttctgtggaatgaggaagacgaaatggatatgacatgggagaaacggctagccaaaaagtactatgacaaactgtttaaggagtattgtatcgcggacctgtcaaaatataaagagaataaatttggcttcagatggagagtggaaaaagaggtcatctctggcaaagggcagtttttctgtggcaacaagtattgcgataaaaaagaaggcctgaaatcctgggaagtgaacttcgggtatatcgaacacggcgaaaagcgaaatgccctggtgaagctgcggctgtgccaggaatgttccatcaaactcaacttccaccaccgaaggaaggaaataaaatcaaaaaaacgcaaggacaagaccaagaaggactgcgaagaaagttcacataaaaaatcaagactgtccagcgcagaagaggccagtaagaagaaagacaaggggcatagttcctccaagaagtcagaagattctctgttgaaaacttactttgtgggtttattgagcgagtcaaacgagaagacctatatgtag

SEQ ID NO: 223656 - DNA, 831 bp, synthetic construct
  misc_feature 1..831: note = Description of Artificial Sequence: Synthetic coding sequence
  source 1..831: mol_type = other DNA
atgcacggccacggcggttatgacagcgacttctccgacgacgagcggtgtggagagagctcaaagcggaagaaacggacagttgaggatgatctgctgcttcaaaaacctttccagaaggaaaaacacggtaaggtagcccacaaacaggtggcagcagagttgttagaccgcgaggaggctaggaacagaaggttccatctaatcgccatggacgcatatcagcgccatacaaagtttgtgaacgattacatactgtattatgggggtaagaaggaagacttcaagagattaggagagaatgacaagactgacttggatgtcattcgcgaaaaccacagatttttatggaacgaagaagacgagatggatatgacttgggaaaagcgcttggcaaagaagtattacgacaagctgtttaaagagtattgcatcgctgacttaagcaagtacaaagaaaacaaattcggcttccgctggcgtgtggagaaagaagtgattagtgggaaggggcagttcttctgtggcaataagtactgcgacaagaaggaaggtctgaaaagctgggaagtgaattttggatatatcgagcacggcgaaaaacgcaatgcactggtcaaattgagattgtgccaggagtgtagcattaaactgaacttccaccatcggcgaaaagaaattaagagcaaaaagaggaaagataagaccaagaaagactgcgaggaatcctctcacaagaagtccagactaagtagcgctgaggaagcgagtaagaaaaaggataaaggacattcttcgagtaagaagtcagaagacagcttgctaaattag

SEQ ID NO: 223657 - DNA, 978 bp, synthetic construct
  misc_feature 1..978: note = Description of Artificial Sequence: Synthetic coding sequence
  source 1..978: mol_type = other DNA
atgggcatctttccgggtatcattctcattttcctgagagttaaatttgccaccgctgccgtgattgtcagtggacaccagaagagtaccaccgtgtcccacgagatgtctggattaaattggaagccatttgtctatggaggtctcgcttctattgtcgcagagttcggcacattccccgtggacttgacgaaaactcgccttcaagtccaggggcagtctattgacgcgaggtttaaggaaatcaaatatcggggtatgttccatgcactttttagaatttgtaaggaagagggtgtcctggctttgtactcaggcatcgcacccgcactgttacggcaggcctcctatgggacaattaagatagggatttaccaatccctgaaacgcctgtttgtggaacgcctagaagacgagactttactgattaatatgatctgcggggtggtgagtggagtcattagcagcactatcgcgaatcccacagacgtacttaagatccgcatgcaggcacagggtagcctgtttcagggcagcatgatcggttcctttatcgatatataccagcaggagggcacacgaggcctatggcgaggcgtggttcctaccgcacagcgtgctgccattgtcgtaggagtggaactccccgtgtacgacatcacaaaaaaacatctcatcctgtccgggatgatgggcgacaccatcctcacgcattttgtgagctccttcacttgtgggttagccggtgccctggcgtccaatccagtcgacgtggtacgcactcgcatgatgaatcagagagcgatagtgggccacgtagatctgtacaaaggaactgttgatggcatcctgaagatgtggaagcatgagggcttcttcgccctgtataagggtttctggcccaactggctgcggctggggccttggaatattattttcttcatcacttacgaacaactgaagcgtctccagatctag

SEQ ID NO: 223658 - DNA, 894 bp, synthetic construct
  misc_feature 1..894: note = Description of Artificial Sequence: Synthetic coding sequence
  source 1..894: mol_type = other DNA
atggaggaactggtcgtggaggtccggggttccaatggcgcattttataaggcttttgtcaaagacgtgcatgaagactctatcactgttgcctttgaaaacaactggcagcctgaccgccagattccatttcatgatgtacgttttccacctccggtgggatacaataaggacattaacgagtcggacgaggtggaggtgtactctcgggcaaacgagaaggaaccctgctgttggtggctcgccaaagttcgcatgattaagggggagttctatgtcattgagtatgccgcatgtgatgctacatataacgagattgttaccatcgaacgtctgcgttcagtgaaccccaataaaccggctacaaaggatacgttccacaaaatcaagctggatgttccggaggacctccgacagatgtgtgctaaggaggctgcccacaaggactttaaaaaggcagttggtgcttttagtgtgacctacgacccggaaaattatcagctcgtgattctctccatcaacgaggtgacctccaaaagagcacacatgcttattgacatgcattttagaagcttgcgcaccaaactatctttgataatgcggaacgaagaggcctccaaacaactggagtcatcaaggcagctcgccagtcggttccatgaacagttcattgtgagagaggatcttatgggtttagcgatcggtacccatggagctaacattcagcaggccagaaaggtcccaggcgtcactgcaatcgatctcgatgaggatacttgcacctttcatatctacggcgaagatcaggatgctgtgaagaaggccagatcattcctggaatttgctgaggatgtgattcaggttcccaggaacttagtgggcctgaagatctag

SEQ ID NO: 223659 - DNA, 1773 bp, synthetic construct
  misc_feature 1..1773: note = Description of Artificial Sequence: Synthetic coding sequence
  source 1..1773: mol_type = other DNA
atggaggagctggtcgtagaagtgagagggagcaatggggctttctacaaggcatttgttaaagatgtgcatgaagattctatcacagtggcctttgaaaataattggcagcctgatcgccagataccctttcatgatgttaggtttccccctcccgtgggctacaacaaggatatcaatgagtccgatgaagtcgaggtgtactctcgagctaatgagaaagagccatgttgttggtggctggcgaaagttcgcatgattaagggagaattttacgtaatcgaatacgccgcatgtgacgccacatacaatgaaatcgtcacaattgagcgcctgagaagcgtgaaccccaataaacccgcaactaaggatacttttcataagatcaagcttgacgtacccgaagacctcaggcagatgtgtgcaaaagaggccgctcacaaagattttaagaaggccgttggcgctttctcggtgacatacgacccggaaaactaccagttagtgatactcagcatcaacgaggtgacatctaaacgcgcacacatgcttatagacatgcattttagatcgctccggacaaagctttcattaatcatgagaaacgaagaagccagcaaacagctcgagagcagccggcaacttgccagccgcttccatgaacaattcatcgttcgagaggatttgatggggcttgctattggcacacacggggctaatattcagcaagcaaggaaggtgccgggtgtcacagcaattgacctcgacgaagatacctgtacctttcacatatacggagaggaccaggacgccgtgaaaaaagcacgaagctttctcgaattcgccgaggacgtaatacaggtgccacgaaacctggtgggtaaggttattggcaagaatggcaaactaattcaagagatcgtggataaatctggcgtagtacgggtgcgcattgaagccgaaaacgagaagaacgtgcctcaggaggaagagattatgcctccaaatagcctccctagcaacaattcacgtgttgggccaaacgccccagaagagaaaaagcacctcgatatcaaagagaattctacacacttttcacagccaaattctacaaaggtacagcgggtcctagtggccagcagcgtggtcgcgggagaaagccaaaaaccagaactgaaggcctggcagggcatggtgccgttcgtcttcgtgggcaccaaggattccatcgcaaatgctacagtgcttctggattaccacttaaactatctcaaagaggtcgatcaactaaggctggagagattgcagatcgacgaacagctgcgccagatcggcgctagcagccggccaccacccaataggaccgataaagagaaatcttatgtaactgatgacggacaggggatgggcaggggaagtcgcccttaccggaaccgaggacacggcaggaggggccctggttacaccagcgcgcctaccgaagaggaacgcgaaagtttcctgcgcaggggtgacggtaggagaaggggtggtgggggtcggggacaagggggtcgcggacggggtggcggattcaaaggaaatgacgatcattcccgcactgataacaggccgcgaaaccctagagaagccaaaggcagaacaactgatggtagcctgcagaatacatcaagcgaaggctcaagactcagaacaggcaaggatcgaaatcagaagaaagagaagccggactctgtggatggacaacagcccctggtaaatggggtcccatag

SEQ ID NO: 223660 - DNA, 1614 bp, synthetic construct
  misc_feature 1..1614: note = Description of Artificial Sequence: Synthetic coding sequence
  source 1..1614: mol_type = other DNA
atggaggagctggtggtggaggtgaggggaagtaacggcgctttttacaaagcctttgtgaaagacgtgcacgaagatagtattaccgtggcctttgaaaataattggcaacctgacaggcaaatccccttccacgacgtgcgcttccccccacctgtggggtataataaagatattaacgagagtgatgaagttgaggtatacagccgcgctaatgagaaggagccctgctgctggtggctggcaaaagtgagaatgatcaaaggagagttttacgtgattgagtacgctgcatgtgatgcaacttacaatgaaatcgtgacgatcgaacggctcaggagtgtcaatccgaacaagccagccaccaaggatacattccacaaaataaagctggatgttcccgaagatctgaggcagatgtgtgctaaggaggccgctcataaggacttcaagaaagcggtaggagctttcagtgtaacttacgatcccgaaaattatcaactagttatactgtccataaacgaagtgacatctaaacgcgcacatatgctaatcgacatgcactttaggtccctgcgaacgaagctcagcctcattatgcggaacgaagaagcgagcaagcaactcgaatctagtaggcagctggcgtcacgttttcacgagcagtttattgtgcgcgaggatttgatgggtctcgccatcggaactcacggggcaaatattcagcaggcgagaaaggtccctggcgtcacagccatcgatttggatgaggatacgtgcaccttccacatctatggcgaggaccaagatgccgtaaagaaggcaagaagcttcctggaatttgcagaagacgttattcaggtgcctcgcaatttggtaggaaaagttattgggaagaatgggaagctgatccaggaaattgttgataagtcaggagtggtccgagtcagaatagaagcagagaacgagaagaacgtgccccaggaggaggagatcatgcccccaaacagcctgcctagcaataacagtcgagttggccctaatgcccctgaggaaaaaaaacacctggatatcaaggagaacagtacccatttttcccaacccaactcaacaaaagtccaaagggtgctcgtggctagctcagttgttgccggtgagagtcagaaacctgagctcaaagcttggcaagggatggtgccttttgtgttcgtgggcactaaggacagcatagcaaacgcaaccgtgttactggattaccacctgaactatctgaagctgcagcagcggaagcggggacgcgcatcttgcgctgaagagacggatggcggtgttgaaggtgaggaggaggacaaagaggaggaagatgtcgaggaggcgtcgaaagagaccactattactccagaacagatcattgtgcacgtcatccaggaaaggctgaaggaggagcagcagatggacccttttaggagtgagctgaccgccattatgaagggagtctctacgttgaagcattacagaatccctcccgtgaaagtggtcggatgtgcccgtgtgaagattgtgacacgaagaaaacggagccagaccgcatggatggtcagcaatcacagctag

SEQ ID NO: 223661 - DNA, 1899 bp, synthetic construct
  misc_feature 1..1899: note = Description of Artificial Sequence: Synthetic coding sequence
  source 1..1899: mol_type = other DNA
atggaggagctagtcgtggaagttcgaggctccaatggtgccttctataaggccttcgtcaaggacgtccatgaagatagtattaccgtggcttttgaaaataactggcagccggatcggcagatacctttccacgatgtgcggttccctccacctgttggctacaacaaggatattaatgaatccgatgaggtggaagtgtacagccgcgcaaacgaaaaagaaccctgttgttggtggctggctaaagtgaggatgattaagggcgaattctatgtaattgaatacgccgcttgcgatgccacatataatgagatcgtgactattgagcgcttgagatccgtcaaccccaacaagcccgctacgaaggatactttccataagattaaactcgatgtacccgaggacctgagacagatgtgtgccaaggaagcagcccataaggactttaagaaagccgttggggcttttagcgtaacctatgacccagagaattatcagctcgtgattttatctatcaatgaagtaactagtaagagggcgcatatgctcatcgacatgcattttagaagtctgcgaacaaaactgagtctgataatgcgaaacgaagaggcctctaagcagctggagtcctcaaggcaactggcatccagatttcacgagcagtttattgtacgggaggatctgatggggctggccatcggcactcacggagccaacattcagcaggcacgaaaagtccctggcgtgactgctattgatctggatgaggatacttgcacattccatatttatggcgaagatcaagatgctgtaaaaaaggctagaagcttcctggaattcgccgaagatgtgattcaggtgcctcgaaaccttgttggaaaagtgattggcaaaaacggaaaattgattcaggaaatagtcgacaaatcaggagtagtccgagtgcggatcgaggctgaaaatgagaagaacgtgcctcaggaagaagagattatgccacccaattctctcccgtctaacaatagtagggtcggacccaacgcccctgaggagaagaaacaccttgacattaaagagaacagcacccatttcagccagcctaatagcaccaaggttcagcgggtattagtggcaagttccgtggtagccggtgaatctcagaaaccagaactcaaggcttggcaagggatggttcctttcgtgtttgtgggcacaaaggatagcatcgcaaacgccacagtgttgcttgattaccacctgaactatcttaaagaggtcgaccagctgcgcttggagagattacagattgacgaacagctccgtcagattggagctagttctcgaccacctccaaatcgcacagacaaagagaaatcatatgtcaccgatgacgggcaaggcatggggcgagggtcccgaccctaccggaatcgcggacacggaaggagaggtccaggttacacatcgggcaccaattctgaggccagtaacgccagcgaaaccgaaagcgaccaccgcgacgagctgagcgactggtcactcgcccctacagaagaggaacgtgaatcatttctgagaaggggcgacggcaggcgtagagggggagggggaagaggccaggggggtcgcggtcgcggaggtggttttaaaggcaatgatgaccattccagaactgataataggccaagaaacccaagagaagctaagggccgaactactgatggctctctgcagatcagagttgactgcaacaacgagcggtccgtacatacaaaaaccctgcagaacaccagctccgaggggtccagactgagaactggcaaagaccggaaccagaaaaaggaaaaaccagactcagtcgatggccaacagcctctagttaatggagtcccctag

SEQ ID NO: 223662 - DNA, 1749 bp, synthetic construct
  misc_feature 1..1749: note = Description of Artificial Sequence: Synthetic coding sequence
  source 1..1749: mol_type = other DNA
atggaagaattggtcgtggaagtcagaggctcaaacggcgcattctacaaggcctttgtcaaggatgtgcatgaggacagtattacagtcgcttttgagaataactggcaacccgaccgacagattcccttccatgacgtgcgcttcccccctcctgtcgggtacaacaaggatattaacgagagcgacgaggtggaggtatattctcgcgcaaatgagaaggaaccctgttgttggtggcttgccaaagtgcggatgattaagggcgagttttacgtaattgagtacgctgcctgcgatgcaacctacaatgaaatagtgaccatcgaaagactgagatccgtgaatcccaacaagcccgctaccaaggacacctttcacaagatcaaactagacgtgcctgaggacttaagacagatgtgcgctaaggaggcagcgcataaggacttcaagaaagccgtgggagcgtttagcgtgacatatgatccagaaaactaccagttggtgatccttagcattaacgaagtgacctcaaagcgggctcatatgctcattgatatgcacttccgttcactcaggacgaaattgtctttaatcatgagaaacgaagaggcctctaagcagttggagtctagcagacagctggcaagccgatttcacgaacaatttattgtccgtgaggacctgatggggctagctattggtactcacggggctaacatccagcaagcaaggaaagtccccggagtgactgcaatcgacctggacgaggacacatgcacattccatatttatggagaggatcaggatgccgtgaaaaaagcaaggtcattcttggaatttgccgaggatgtgattcaggtgccaaggaatttagttggcaaagtaattggcaagaacgggaaactgatccaagagatcgttgataagtctggcgtcgtaagggtgaggatcgaggcggagaacgaaaagaatgtcccccaggaggaggagatcatgcccccaaactctttaccctccaacaacagcagagtagggcctaacgctccagaggagaagaagcacctggatataaaggaaaactccactcatttttctcagcctaattccacaaaagttcaacggggaatggtgccttttgtcttcgtaggaaccaaggacagtatcgccaacgctacggtgctgctcgattaccatctcaattacctgaaagaagtcgaccagcttagacttgaacgactgcagatcgatgagcaattgcgccaaatcggggcttccagcaggccgcctcctaataggactgataaagaaaaaagctatgtgaccgacgacggacaagggatgggtcggggatcccgaccgtacagaaaccgcggtcacggcaggcgaggaccaggctatacaagcgaatccgaccaccgcgatgagctcagtgattggtccctcgcccctacagaagaggagcgggaaagttttctgcgccgaggggacggcagacggaggggcggaggcggaagggggcaaggaggcagggggagaggtgggggattcaaaggtaatgacgaccatagtagaaccgacaataggcccagaaatccaagggaggccaagggaagaacaacggacggctccctacagaatacatctagcgaaggatccagactgaggacaggcaaagatcgaaaccaaaaaaaggagaaaccagattcagttgacggacagcaaccattggtcaacggtgtgccctag

SEQ ID NO: 223663 - DNA, 1779 bp, synthetic construct
  misc_feature 1..1779: note = Description of Artificial Sequence: Synthetic coding sequence
  source 1..1779: mol_type = other DNA
atggaagagctggtggtggaggtgcggggaagcaatggcgcattctataaagcttttgtgaaggatgtccacgaagactccatcacagtcgctttcgagaataactggcagccagatcggcaaatccccttccacgacgtgagattcccaccacctgtcggctataacaaggacatcaacgagtccgacgaagtcgaggtctattctagagcaaacgagaaggaaccctgttgttggtggttggccaaagttaggatgataaaaggtgaattttacgttattgagtacgctgcctgtgatgccacctacaacgagattgttacaattgaaaggctacggagtgtgaatcccaacaagcccgcaacaaaagacacattccataaaattaagctggatgtacccgaggatctgcggcagatgtgcgccaaggaggccgctcataaagatttcaagaaggcagtgggcgcattttcagtcacctatgatccggaaaattaccagctggtgatattgtccatcaacgaagtcacttcaaagcgagcccatatgctcatagatatgcacttccgatccctgaggaccaagctgtctctgattatgcggaacgaggaagctagcaagcagctggagagcagccgccaactagcatccaggttccacgagcaatttattgtgcgtgaagaccttatgggactagccattggcacacatggggctaacatccagcaggccagaaaggtccctggcgtaaccgccatcgatctggatgaagacacctgtaccttccacatttatggggaggatcaggacgccgtgaaaaaagcgaggtctttcctagaatttgccgaggatgtcatccaagtgcctaggaatcttgtggtaataggcaagaatggcaaactgattcaagaaatcgtggataaaagtggggtggtgagagtgcggatcgaggcggaaaatgagaaaaatgtgccacaagaagaagaaattatgccccctaatagcctccccagtaacaattcaagggtcgggcctaatgccccagaagaaaagaagcacctggatataaaagagaatagtactcacttttcccaacctaatagcacgaaagtgcagcgcggaatggtgccctttgtgtttgtggggacaaaggattctattgccaatgctacagtactgctcgactaccacttaaactatttaaaagaggtggaccaactgagactggagcggttgcagattgacgaacagttaaggcagattggcgcaagttcccggccaccacctaacaggacagacaaagaaaagagttacgttacagacgatggacagggaatgggacgcggatcgagaccttaccgaaaccgcggtcacggccgtcggggacccggttacacttccggcactaacagtgaagcctcgaacgcttcggaaactgaaagtgatcaccgcgacgagctgagtgattggtccttagctccgacagaggaggagcgggagtcctttttgcggagaggcgatggccgaagaagggggggaggaggtcgaggccagggtggtcggggtaggggtggcggattcaagggtaatgatgaccactctcggacagacaaccgccctcggaatcccagagaagctaaaggcaggacaacagacgggtcgcttcagaacacatcaagcgagggaagccgccttcggaccgggaaggataggaaccagaaaaaagaaaagcccgacagtgtggatgggcagcagcctctggtgaatggagtaccttag

SEQ ID NO: 223664 - DNA, 789 bp, synthetic construct
  misc_feature 1..789: note = Description of Artificial Sequence: Synthetic coding sequence
  source 1..789: mol_type = other DNA
atgccgcctaacagccttccatccaataatagccgtgtcggtcccaacgctcccgaagagaagaagcacctggatatcaaagaaaactcaactcatttttcacagccaaatagcacaaaggtgcagcggggaatggtcccatttgtattcgtcgggacaaaggatagcatcgccaacgcgacggtcctgctggactatcacctgaattacttgaaagaagtggatcagctgaggcttgaaaggctgcagattgacgagcaattgcggcagatcggtgctagttctcgcccaccacccaatagaactgataaggagaagtcgtacgtcactgacgatggacaggggatgggcaggggatcacgaccctacaggaaccggggacacggacgacgcggtcccggatatacttcaggcaccaactcggaggcgtcgaatgccagtgagactgagagtgatcatcgcgatgagctgagcgattggtccctcgcacccaccgaggaggaaagagagtcattcctgcgtagaggcgacggtaggaggcggggtgggggtgggaggggccaaggcggacgtggtaggggagggggattcaaaggcaatgacgaccactcccgcacggataaccgcccaaggaatccaagggaagctaaggggcgtacaactgatggctctctgcaaaatacctccagcgaaggctcgcgactaaggaccgggaaggatcggaatcaaaagaaggaaaagccggatagtgttgacgggcagcagcctcttgtaaatggagtgccctag

SEQ ID NO: 223665 - DNA, 1611 bp, synthetic construct
  misc_feature 1..1611: note = Description of Artificial Sequence: Synthetic coding sequence
  source 1..1611: mol_type = other DNA
atgatgaagggagaattctatgtgatagaatacgccgcttgtgacgcaacctacaacgaaatagtaacgttcgagaggctccgacctgttaatcagaataagactgtcaagaagaacacattcttcaagtgcactgtggacgtgccagaagaccttcgcgaagcatgcgctaacgaaaatgcccacaaagattttaaaaaagctgtcggtgcttgcaggatcttctaccacccagaaaccacacagttaatgattctctcagcctctgaagccacggttaagcgcgtcaatatacttagcgatatgcatctgcggtccattcggacaaagcttatgttgatgagtcgcaacgaggaagccacaaaacacctggagtgtaccaagcagttggcagccgctttccacgaggagttcgttgttcgcgaggatttgatgggattggcaataggtacgcacggctcgaacatccagcaggctaggaaagttcctggagtcacagcaattgaactcgacgaggatactgggacctttcgaatctatggtgagtcagcagatgctgttaaaaaggcccgtgggtttttggaattcgtcgaagacttcatccaagtgccacggaatctggtcggcaaagtgattggaaagaacggcaaggttatccaagagatcgtcgacaagagtggtgtggtgagagtaagaattgaaggtgataatgagaataaattgcctagagaggacggtatggtgccgtttgtattcgtcgggaccaaggaatctatcggcaacgtgcaggtgttactcgagtaccatatcgcatatttgaaagaggttgagcagctccgaatggagaggttgcaaatagatgagcaattgagacagatcggaagccggtcctattcaggcagaggaagaggaaggagggggcctaactacaccagcgggtatggtacaaactccgagctaagcaatccaagtgagaccgagagtgagcggaaggacgaactgtccgactggagtctcgcgggagaagatgaccgcgactcgagacatcaacgcgactcccgcaggagacctgggggaaggggcagaagtgtcagtggagggagaggacgaggaggccctcgcggaggtaaatcttcaattagctcagttcttaaggatcccgatagcaatccctatagcctgctggataatacagagagcgatcagactgctgataccgacgcctctgagtctcaccactccactaaccggagacgccgtagccgtcgcaggcggactgatgaggatgcagtgttgatggacggaatgacggagagcgatactgcgtcagttaacgagaatgggctggtaaccgtggccgattacatttcccgggcagagagccaatccagacagcgcaatctgccccgagagacattggccaaaaacaagaaagagatggcaaaggacgtcatcgaggagcacggcccatctgaaaaggccataaatgggcctacaagcgcttcaggagacgacattagtaaacttcagcgcactccgggagaggaaaaaattaacacacttaaggaggaaaacacccaggaagccgctgtgctcaatggcgtgagctag

SEQ ID NO: 223666 - DNA, 1866 bp, synthetic construct
  misc_feature 1..1866: note = Description of Artificial Sequence: Synthetic coding sequence
  source 1..1866: mol_type = other DNA
atggccgaacttacagtcgaggtacggggtagtaatggcgcattttacaagggctttatcaaggacgtgcacgaggatagccttactgtggtcttcgaaaataactggcaacccgagaggcaagtgcctttcaacgaggtgcgccttccaccaccgccagatataaaaaaagaaatctctgaaggcgatgaggttgaggtgtactcacgggcaaatgatcaggaaccatgcggatggtggctcgctaaggtccggatgatgaagggagagttttatgtgattgagtacgctgcgtgcgatgcaacctacaacgagattgttacctttgagagactccggccagtgaaccagaacaaaacagttaaaaagaacacctttttcaagtgtactgtggatgtccctgaggacctccgcgaggcctgcgctaatgaaaacgcacacaaggacttcaagaaagctgtgggtgcatgccgcatcttctatcacccggagactacacagttgatgatacttagcgcatctgaagctaccgtgaagagggtaaacatcctctccgacatgcatcttaggagcataagaactaaactcatgcttatgagccgtaatgaggaagcaaccaagcacctcgagtgtacaaagcaactggctgcagccttccatgaggaattcgtggtgagggaggacctaatggggctggctataggaacacacggatctaatatccagcaggctcgcaaggtccctggcgtaaccgccattgaattggatgaggatacaggcactttcagaatctatggcgaatccgccgatgccgtgaagaaagcacgcggattcctggaattcgtcgaggactttatccaagtaccacggaatctggtagggaaagttatcggaaaaaatggcaaggtaatccaggagattgttgataaatctggcgttgttcgggtgaggattgaaggagacaacgaaaataagctccctagagaagatggtatggtccctttcgtattcgttggaaccaaggagtcaattggaaacgtgcaggtgctgctggagtatcacatagcctacctgaaagaggtggaacagctgcgcatggagaggctccagattgacgaacaactgcgtcagatcggcagtaggtcttactcaggcaggggacgaggacggagggggcctaactatacctctggctatggaacaaactccgaactgagcaatcccagcgaaacagaaagcgaaagaaaggacgaactatccgattggagcttagccggagaggatgatagggactcccgtcaccaaagggacagtcgccgacggcctggagggcgaggcaggtctgtgagcggcggaaggggacgtggcggtccaagaggcggtaagtcgtctatatccagcgtcctcaaggaccccgacagcaatccctattctctgcttgataacacagaatctgaccaaaccgctgacacagacgctagcgaatcacatcattccacaaacagaagacggcgaagccgaagaagaaggaccgatgaagatgccgtcctgatggatggaatgaccgagagcgatactgctagcgtgaatgagaatggtctcgtgactgtggctgactacatctctagagcggaatcgcaatctcgacaaaggaacctcccccgagaaaccttggctaaaaacaagaaagagatggccaaggacgtgattgaggaacacgggccaagcgagaaggccatcaatggccctacaagcgcctccggtgacgatatcagcaagctgcagaggactcccggtgaagagaagatcaatactttaaaggaggaaaatacccaagaggcagcagtcctcaatggtgtgagctag

SEQ ID NO: 223667 - DNA, 1620 bp, synthetic construct
  misc_feature 1..1620: note = Description of Artificial Sequence: Synthetic coding sequence
  source 1..1620: mol_type = other DNA
atggccgagctgacagtggaggtgcgaggctctaatggggctttctataagggtttcattaaagatgttcatgaggatagcctgacagtggtgttcgagaataactggcaacccgaaagacaagttcccttcaatgaagtaagattgccacctccccctgatatcaagaaagagattagtgaaggcgacgaagtggaggtgtactctcgagccaacgaccaagaaccttgcggctggtggctggcaaaggtaagaatgatgaagggggagttttacgtcatcgagtacgccgcttgcgatgccacctacaatgaaatagtcacgtttgaaaggctgcgaccagtcaaccagaacaaaactgtgaagaaaaatacattctttaagtgcactgtcgacgtgcccgaggatcttagggaggcatgtgcaaatgagaacgctcataaggacttcaaaaaagctgtgggagcctgccggatcttttatcaccccgagacaacccaactgatgatcctgagcgcaagcgaagcgactgtcaagagggtcaatatcttaagtgacatgcatcttcgctcaatccggaccaagctgatgctgatgagccggaacgaggaggcaaccaagcacctggaatgtaccaaacaactcgctgctgccttccacgaagaattcgtagttagggaggatctgatgggtctggctatcgggacccacgggtcgaatattcagcaggctaggaaggtgcccggagttacggccatcgagttggacgaggacacaggtacttttcgaatctacggagaatccgcggatgctgttaagaaagctaggggcttcctggaatttgttgaggattttatacaagtgcccagaaacctggtgggtaaagtgataggcaagaatgggaaagttattcaggagattgtggacaaatccggcgtggttagagttcgtattgaaggggacaacgagaacaaactccccagagaggatgggatggtgccctttgttttcgtgggtacgaaagaatccataggaaacgtccaggttctgctcgagtaccacatcgcatatttgaaggaggtggaacagctgcgcatggagcggctgcagattgacgagcagctaagacagattggatcacggagctatagcggccgagggaggggtcggcgtggaccaaactatacatcaggctacggaaccaatagcgagctgtcgaacccaagtgagactgagagtgagcgcaaagatgagctctctgattggtcgctcgccggagaggacgatagggatagtcgacatcagcgtgattctaggaggaggccaggcggtcgcggtagatctgtttccgggggaagaggcagagggggaccaagagggggaaagtccagtatcagctctgtgctcaaggacccggactctaatccttacagcttgctagacaataccgagtcagaccagaccgccgacaccgatgcatccgaaagtcatcatagcaccaatagaaggaggcgatcccgccgacgccgaacagatgaggacgccgtactgatggatggaatgacagaatccgacacggcttctgttaacgaaaacggcctcggtaagagatgcgattag

SEQ ID NO: 223668 - DNA, 1827 bp, synthetic construct
  misc_feature 1..1827: note = Description of Artificial Sequence: Synthetic coding sequence
  source 1..1827: mol_type = other DNA
atggtcaccgaggggttcattaaggacgttcatgaagactccctcacggtcgtgttcgaaaacaattggcagcctgaacgtcaagtgccgtttaatgaggttaggctgccccctcctccagatattaagaaagagattagcgaaggcgacgaagtggaggtgtactcccgcgcaaatgaccaggagccatgtgggtggtggctagctaaagtacggatgatgaagggagagttttacgtgatcgaatatgctgcctgcgacgctacgtacaacgaaattgttacatttgaaaggctccgcccagtgaatcaaaataaaactgttaagaaaaatacattctttaaatgcacagtagatgttcctgaagacctgagagaggcctgtgccaatgaaaacgcccacaaggattttaagaaagccgtgggcgcttgtcggattttttaccaccccgaaaccacccagcttatgattctctctgctagcgaagcaacagtcaaaagagtgaacatactcagcgacatgcacctcaggtccattcgaactaagttgatgctcatgagtagaaatgaagaagctaccaaacatctagaatgcacaaaacaactggcagccgcatttcacgaagaatttgtggttagagaggacctgatggggctggccatagggactcacggatccaacattcagcaggccagaaaagtgcccggtgtgaccgctatcgagttagacgaggatacagggacgttccgcatttacggggaaagtgctgatgccgtcaagaaggctcgtgggtttctggaatttgtagaggattttatacaagtccccagaaaccttgttggtaaagttatcggaaaaaatggtaaagtgattcaggagatcgttgacaagagcggggtggtgagggtgcgcattgagggcgataacgagaacaagttaccccgtgaggacggtatggtgccgttcgtgtttgttgggaccaaagagtccatcgggaacgtgcaggtcttactcgagtatcatatcgcctatctgaaggaggtggagcaactgagaatggagagactgcagatcgacgagcagttgcggcagataggctcccggtcctactctgggaggggacgtggacggcgtgggccaaattacacgtctggctatggtacaaatagcgagctctccaacccatctgaaacagagtctgagcggaaagatgagctgagtgattggtccctcgccggagaagacgatagagatagtaggcatcagagggactctaggcgccgaccaggcggacgcggtaggagcgtaagtggtgggagaggcaggggtggacctagggggggaaagtcatcaatcagctctgtcctgaaggacccagattcaaacccgtactcccttctcgataatactgaatccgaccagaccgccgacaccgatgcttccgagagccaccactcaacaaacaggcgtcgacggtccagacgcagacgcaccgatgaagatgcagtgctgatggacggaatgactgaaagcgacaccgccagcgtgaacgaaaacggcctcgtcactgtggcagattacatcagccgcgcagaaagtcagagcaggcaacgtaacctccctagagagacccttgctaagaataagaaggaaatggcaaaggacgtcatagaggagcacggtccttccgagaaagcaattaacggcccaactagcgcgtccggcgacgatatttcaaaacttcagcggacacctggggaggagaagatcaataccctgaaggaggagaacacacaggaagccgctgtactaaatggcgtcagctag

SEQ ID NO: 223669 - DNA, 2022 bp, synthetic construct
  misc_feature 1..2022: note = Description of Artificial Sequence: Synthetic coding sequence
  source 1..2022: mol_type = other DNA
atgggcggactcgcttctggtggcgacgtcgaacctggtctccccgttgaagtcagaggctcgaacggtgctttttataagggtttcgtgaaagatgtgcatgaggatagcgtcacgatcttctttgagaataattggcagagcgagcgtcagatcccgtttggagacgtgagattaccacccccagcggactacaacaaggaaattaccgagggcgacgaagtggaggtgtatagtcgcgctaatgagcaggagccctgcgggtggtggctggctagggtacggatgatgaaaggagatttttacgtgatcgagtacgccgcttgtgatgccacctataacgagatcgtcacactagagaggttaaggccggtgaatcctaatcccctcgccactaaaggatcgttttttaaagtgacaatggccgtgcccgaagatctgcgtgaagcatgcagcaacgaaaacgtgcataaggagtttaaaaaggcactgggggctaactgtatcttcctgaacataactaatagcgagctctttattctgtcaactaccgaggcccctgtgaagagggcttccttactcggagatatgcatttccgcagtcttagaacaaagttgctgttgatgtcgagaaacgaagaggctacgaaacatttggagactagtaaacagctggcagccgcatttcaggaagaatttaccgtcagagaggatctgatggggttggccataggaactcatggtgctaacattcaacaggctaggaaggtacccggtgttactgccattgagctcggggaagaaacatgtacgttccggatttatggcgaaaccccggaggcatgcagacaggcgagatcatacctggaatttagcgaagattctgtgcaggttcctcggaaccttgtgggaaaggtaatcggcaaaaacggaaaagtcatccaggaaatcgtcgataaaagcggtgttgtccgggttcgggtggagggggataacgacaaaaagaaccctagagaagagggtatggtgccattcatatttgtgggcactcgcgagaacatttctaacgcccaagctttgctggagtaccacctgtcctatcttcaggaggtagaacaactcaggctggagaggctacagatcgatgaacaattgcggcagatcggtcttgggttcagaccacccggaagcggacggggtagtggtgggtcagacaaagccggatactcaactgacgagagctcgagctctagcttgcacgcaacgaggacctatgggggatcatatgggggtcgtggtagggggagaaggaccggaggtcccgcttacgggcctagttccgatgtgtcgaccgcgtccgagactgagtccgagaaacgcgaggagcccaaccgagcagggccaggtgatagggatcctcccacaagaggcgaagagtctaggcgaaggcccaccggcggaaggggaagagggccaccaccggctccaagacccacctcacggtataattcaagctcgatttcctccgtattaaaagatcccgactccaacccatattctctcctggataccagcgaaccagagccaccagtggatagcgaaccaggggaaccacctcctgcgagtgccaggcggcgacggagccggaggcgtaggaccgacgaggatcgaactgtgatggatggcggtctcgagtccgacggcccaaatatgactgagaatggacttgaggatgagagcagaccacagaggaggaacaggtcacgacgcaggcgcaaccggggtaacaggacggatggcagtatcagcggggaccgtcagcccgtgactgtggcggattacatcagccgggctgagtcgcaatccagacaaagaccaccactggagcgcacaaagccatctgaggatagtctgagcggtcaaaaaggcgatagcgtgtcaaagctgcctaagggtccctccgagaatggcgaattgtcagctccactggagttgggcagtatggtgaatggcgtgtcatag

SEQ ID NO: 223670 - DNA, 6539 bp, synthetic construct
  misc_feature 1..6539: note = Description of Artificial Sequence: Synthetic coding sequence
  source 1..6539: mol_type = other DNA
atgaattctctgagctggggagccgctaatgccgtgctgttgcttctgcttctcgcctgggccagccctacctttatttctataaaccggggagtgagagtgatgaaaggacattctgcgtttctgtcaggcgatgatctgaaattcgccattcctaaggagaaagacgcgtgtaaagtggaggtggttatgaatgagcccatcacgcagcgggtgggtaagctgaccccccaggtttttgactgtcactttctgcccaatgaagtgaaatatgtccataacggctgcccgattctggatgaagacaccgtgaaactaaggttgtatcggttcaccgaaagggatacattcatagaaacattcattttgtgggtgtacctattggagccggattgcaatatcatccacatgagtaacaatgtgctcgaggttcccgagtttaacggcctgtcccaggctattgacaagaatctgctccggtttgattatgatcgcatggcaagcctggagtgtaccgtgtcgctggataccgccaggacccgactgcccgctcacggccagatggtgcttggagaacccaggcctgaagagcccaggggcgaccagcctcactcctttttccccgagtcgcagctccgcgctaaacttaaatgcccagggggtagttgcaccccaggcctgaagaaaatagggtccttgaaggtgagttgcgaagagttcctgcttatgggactgcgctatcagcatctcgacccaccatccccaaacatcgactatatttctatccaactggacctgacagatacacgcagcaagatcgtctacaaaagcgaatcggcttggttacctgtttacatacgggctggcatacctaatcagattccaaaggcagctttcatggccgtctttatactggaggtggatcagtttatcttgactagcctgacaacctcggtacttgactgcgaggaggatgaaacccccaaacctttgcttgtttttaacatcactaaagcccctctccagggatatgtgactcacctgctggaccacacccggccaattagcagtttcacttggaaagacctttccgatatgcagattgcttatcagcctccaaacagctctcactccgaacgcagacatgacgaggtggagctagaggtgtacgattttttcttcgaacgtagtgcccctatgaccgttcacataagtataaggaccgctgatacgaacgcgcctcgggtctcttggaataccggtctgagtctcttagaaggtcagagtcgcgcaattacttgggagcaatttcaggtagtagacaatgacgatatcggagcggttagactggttactgttggtggactacagcatggctggctgaccctgcgcggaggtaaaggctttctgtttacagtcgccgacttacaggctggagtggtacgttaccatcacgacgacagtgattcaaccaaggattttgttgtctttagaatctttgacggtcaccattctatcaggcacaaattcccaattaacgtcttgccaaaggatgactccccgccattcttaatcacaaatgtcgtgattgagctggaggaggggcagactatacttattcagggctctatgctgagagcctccgacgttgatgcatctgatgattatatattctttaatatcacaaagccgccacaggcaggcgagataatgaagaagcccggacctggcttgatcggataccccgtgcatgggttcctgcaaagggatctttttaacggcattatatactatagacattttgggggagaaatctttgaggatagtttccagttcgtcctctgggactctcacgagcccccaaacctaagcgtgccgcaagtggccacgatacacataacacctgtggacgatcaacttccgaaagaggcccctggagtttctagacatttggtcgtcaaagaaactgaggttgcctatattaccaaaaagcagctgcatttcatcgattcagaaagctatgatagggagctggtctatacaattaccactccccctttcttttcattctcacaccggcatctggatgccggaaagctttttatggttgactcaatccctaaagtggtgaagaatcctacggctttagagcttaggtctttcactcagcacgccgtgaattatatgaaagtggcctacatgccccctatgcaggacatcggtccacattgccgcgacgtgcagtttaccttttcggtgtcaaatcagcatggcggaacacttcacggcatctgctttaatattactattctgccagtggataatcaggtgcctgaagcgttcaccaatcctctcaaggtcacagaaggtggccagtccatcataagtaccgaacatatcctgatctccgacgccgatactaagttggacaatattgacctgtcactgagagagctccctctccacggaagagtcgagctgaacgggtttcctctgaattccggcggtacatttagctggggagaccttcatactctgaaggttcggtaccagcacgacggtaccgaggtgcttcaggatgatctgctcttagaggtgactgatggcacaaattctgcggaattcgtcctgcatgtcgaagtgttccctgtcaacgatgagccacctgtcctcaaagcagacctgatgccagtgatgaattgcagcgaagggggtgaggtagtgatcacatcggagtacattttcgcaacagatgtggacagcgacaacctgaagctgatgttcgtcatcgcacgagaaccccaacatggggttgtgagaagggcaggagtgacggtcgaccaattctctcagagagatgttatatcggaggccgtaacatataagcacactgggggtgagattggcttaatgccctgtttcgataccattacgttggtggtttctgacggggaggctggacctttcgttaatggatgttgctataatggcccaaatccctctgtgccattacatgcgtcttttccggtctatgatctcaacatcacagtttaccctgtggacaaccagcccccatctattgccattgggccagtgttcgtggtagatgaaggttgttctaccgctctgaccgtgaaccatctgagtgctactgacccggacaccgctgctgacgatctggaatttgtgctggtgagccctccacagtttgggtatctggaaaacattttgccatcagtcggctttgaaaaaagtaatatcggtatctcaattgactcctttcaatggaaggatatgaacgcattccatattaactatgtacagagcagacacctccggatagagcctacagcggaccagtttaccgtctatgtgactgacgggaaacaccactctctggaaattcctttcagcattattattaacccaacaaatgatgaggcccctgacttcgtggttcagaatatcactgtgtgtgagggacagatgaaagaactggattcctcaatcatttctgctgtagacttggacatcccccaggatgcattgctgttttccatcacacagaagccaaggcatggactgttgatagaccgcggattttctaaggatttcagcgagaataaacaaccagctaatccccatcagaagcacgctcctgtccattctttctcaatggagctgcttaagacgggaatgagactgacgtacatgcatgatgattccgagtctttggccgacgatttcacgattcaactcagcgatggaaagcacaagatcttaaagaccattagcgtcgaagttattccagtgaatgacgaaaagcccatgctaagcaagaaagcggagatcgccatgaacatgggggagactcgcatcataagcagcgctattttgtccgcaatcgatgaggattctccacgggaaaagatctattatgtattcgaaagattgccccagaacggccaactgcagctcaagattgggagggactgggtgcccctgagcccgggaatgaagtgcacccaggaagaggtcgatctgaacctcctccgctacactcacaccggagcaatggatagccaaaatcaggattctttcaccttctacttgtgggacgggaacaaccggagtccagcacttgactgtcagatcaccattaaagatatggagaagggtgacattgtgatcttgaccaagcccctggtggtttccaagggggatcgcggatttctcacgacgactaccctgctggcagtggatggcaccgacaaacctgaggaactgttgtatgtgatcactagtcctcccaggtatggccagattgagtacgtgcattatcctggcgttccaattaccaacttttctcagatggacgtcgtaggccagacagtatgttacgtgcacaagtcaaaggtgaccgtctctagcgatagattccgctttataatctcaaatggtctgagaacagagcacggggttttcgagataaccttagagacagtcgaccgtgccctccccgtagttacccgtaataaaggcctgcgccttgctcagggcgctgtagggttgttatcccctgacctcttgcagctaacagatccggatacccccgctgaaaacttaacctttcttcttgtgcagcttcctcagcacggacagctgtacttgtggggaacgggattgctacagcacaacttcacccagcaggatgtggacagcaaaaacgtggcctaccgccattctggcggagatagtcaaaccgactgctttacctttatggccactgatgggacaaatcaaggatttattgtaaacggaagggtgtgggaagagcccgtcttgtttacaattcaagtggaccagctcgacaagactgcgcctcgaattacactgcttcacagtccatcacaggtgggcctgctgaagaacgggtgctacggcatctatatcaccagtcgagtgctgaaagcctctgatccagacacagaagacgaccagatcatctttaagatcttgcagggccctaagcatggtcacctggagaacacaacaactggagagttcatccatgagaaattctctcagaaggacttgaatagcaagaccattctatatattattaatccttctctcgaagttaatagcgacactgtggaattccagataatggatcccacaggcaacagtgcgactccccagattctggagttgaaatggagccatatcgagtggtcccagactgaatacgaggtgtgcgagaatgtcggattgttgcccctggagatcattcgacggggatactccatggattcagcctttgtggggattaaggtcaatcaggtatccgcagcagtcggaaaggacttcacagtcatcccgtcaaaactgattcagttcgatcccggtatgtcaaccaagatgtggaacatcgccatcacctatgacgggcttgaggaagacgatgaggttttcgaggttattctgaactccccagtgaatgccgtcctgggtaccaagaccaaagccgctgtgaagatcctggacagtaaaggcggacagtgtcatccatcctattcctctaatcagtcaaagcattcaacctgggagaaaggcatatggcatctgctgccacccggtagctccagctccaccacttctgggtccttccaccttgagcgaagaccactgccatcatcgatgcaacttgcagtaatccggggagacaccctacggggattcgatagcactgatctctcccagcggaagctgaggactaggggcaatggaaagaccgtgcgaccgtcctccgtgtaccggaacggtaccgacatcatttacaactatcacgggatagtgagcctgaagctggaggacgactcattccctacccataaaagaaaagcgaaggtctctattatctcacaaccgcagaaaacaataaaggtcgccgagctccctcaggcagacaaagtggagtccacaaccgactcccatttccctcgccaggatcaacttccaagcttccctaagaattgtactctcgaactgaaggggctgtttcacttcgaggaagggattcagaagctgtaccagtgtaacggcattgcatggaaagcatggtccccgcagaccaaagatgtcgaagataagagctgccctgccggttggcaccagcactccgggtattgtcatatattaatcaccgagcaaaaggggacctggaacgctgccgcacaagcctgtagagagcagtacctgggaaacctggtcactgtcttttctagacagcacatgaggtggctatgggacattggcggtaggaaatcattttggattggtctcaatgatcaggtgcacgcagggcattgggagtggataggaggtgaacccgttgccttcaccaatggccgacggggaccaagtcaacgcagcaaactcggcaaatcatgcgtgctcgtgcagcggcagggtaaatggcagaccaaggattgtagacgggctaagcctcacaattatgtgtgtagccggaaacttta

SEQ ID NO: 223671 - DNA, 6542 bp, synthetic construct
  misc_feature 1..6542: note = Description of Artificial Sequence: Synthetic coding sequence
  source 1..6542: mol_type = other DNA
atgaattcactgagctggggggcagcgaatgcagttttgctcttattgctgctggcctgggcctcccccaccttcatctccattaacaggggggtccgagtaatgaaaggccacagtgctttcctgtctggagatgatttgaaatttgccatcccaaaggagaaggacgcctgcaaggtggaagtcgttatgaacgagccaataacacaaagagttgggaaactgactccgcaggtatttgattgccacttcctgcctaatgaagtgaagtacgtgcacaatgggtgtccgattctggatgaggacaccgtaaagcttcggctctataggttcacagaaagagataccttcatcgagaccttcattctttgggtgtacctgctcgagccagactgcaatattatccacatgtcaaacaatgtcctcgaggtgccagagttcaacggcctatcccaggcaatcgacaagaacctgctccgtttcgactacgaccggatggctagcctcgaatgcactgtgtccctggatactgctcgtactcggttacccgctcacggccaaatggtgctgggagagccccgtcctgaagagcccagaggtgaccagcctcatagctttttcccagaatcacagctccgggctaagcttaagtgccctggcggtagctgtacacctggtctcaaaaaaatcggctctttaaaggtgagttgtgaagagttcctgttgatgggccttagataccagcatctcgaccctccttcccccaatattgactatatttccattcagctggacttgaccgacacgagatccaagatcgtctataagaaatctgagtctgcttggcttccagtttatatcagagcgggaatcccaaatcagatacctaaggcagcatttatggcggtgtttatactcgaagtagaccagtttatcctgacatctctgaccaccagcgtcttagactgtgaagaggacgagacaccaaaaccattgttggtatttaatataaccaaagccccattacagggctacgttactcacctactggaccatacacgcccaatctcctccttcacctggaaagatctcagcgacatgcagattgcgtaccagcccccaaatagttctcattcagagcgaaggcacgatgaggtcgagcttgaagtatacgacttcttcttcgaacggtcagctcctatgacagtgcatatctcgatccggaccgcagacactaacgctcctcgggtgtcatggaatactggcctcagtttgctcgaaggccaatcccgtgccattacctgggagcaattccaggtcgtggacaacgatgacattggtgcggtgcggctggtcacagtggggggtcttcagcacgggtggttgactctgcgaggaggtaaaggattccttttcacggtcgccgatctgcaagctggcgtggtgcgttatcatcatgatgacagtgactctacgaaagacttcgtagtatttaggatttttgatggacaccatagcattcgccacaaatttcctattaacgtgctgcctaaagatgacagtcctccatttctgattaccaatgtcgttattgagctggaagagggacagacaattttgattcaaggttccatgttgcgcgcttcagacgttgacgcaagtgatgattatatatttttcaacataaccaagccgccacaggctggagaaatcatgaaaaagcccggtcccggtttgataggctatccagtgcatgggtttctccaaagagatttgtttaatggaatcatttactataggcatttcgggggagaaattttcgaggactcgttccagttcgtcttgtgggactcccacgagccgccaaacttgtcagtccctcaagtcgccaccatccacattacaccggtcgatgatcagctgcctaaggaagcacctggcgtgtctagacatctcgtggttaaggagacagaggtcgcttatatcactaagaagcagctgcactttattgattctgagtcatatgatagagagctggtgtatacaatcaccacccctccattctttagcttctcgcatagacacttagatgctggcaagctgtttatggtggattccatccccaaggtggtgaagaatcctacagcactggaactgaggtcattcacacagcacgctgttaattatatgaaggtggcctatatgcctccaatgcaggacatcggccctcattgccgggatgtgcagtttactttcagtgtgagtaaccaacatggaggaacgctgcatggcatctgtttcaacatcacgatacttcctgttgacaatcaggtcccagaagctttcacaaaccctctgaaagtgaccgagggcggtcagtcgatcatcagtacagagcatatcctgattagcgacgcagacacaaaattggacaacatcgatctgtccctgagagaactgcctctgcacggccgagtggaactaaacgggtttcccttgaacagcggcggtaccttcagttggggcgacctgcacactctaaaagtgcgctaccagcatgatgggaccgaagtccttcaagacgatttactccttgaagtcacagatgggactaactcggcagagtttgtgcttcacgtcgaagtatttccagttaacgatgaaccaccagtgctcaaagcagacttgatgcctgtgatgaactgttcggagggcggtgaggtggtcatcacttctgaatacattttcgctaccgacgttgattccgacaacctgaagttaatgttcgtcatcgcaagggagccacagcacggtgttgttagaagggctggggttactgtggaccagttctcacagagggatgtgatcagtgaggccgtcacctataagcacactggcggtgagattgggcttatgccttgtttcgatacgatcaccttagttgtctcagacggcgaagctgggccatttgtgaacggatgttgctataatgggcctaacccaagtgtgcctctccacgcctccttccctgtgtacgacctcaatattaccgtctacccagtagacaatcagcctccctctatcgcaatcgggcctgtgtttgtggtcgacgaggggtgtagcactgccttgaccgtgaatcacctgtccgcgactgacccagataccgcagccgacgacctggagttcgtactcgtatcccccccacaattcggctatctagaaaatatactccccagcgttggcttcgaaaaaagtaatattgggatcagcattgacagttttcagtggaaggacatgaacgcatttcacataaactacgtgcagtcgcggcatctccgcatcgagcccaccgctgatcagttcactgtgtatgtcactgacggtaagcaccacagcttggaaatcccattttcaatcattatcaatccgacaaatgatgaggccccagactttgtcgtgcaaaatatcacagtatgtgaaggccagatgaaggagctggattcctctatcatatctgcggtagacctggacattccacaggacgcgctgctgttttctattacacagaaaccacgccacgggctgttgattgatcgtggattctccaaggatttttctgagaataagcagcctgccaatccgcaccaaaagcacgcacctgtgcactcgttttccatggagcttctgaagacaggcatgcgactgacgtatatgcatgacgactccgagtcactggcggacgattttacaatacagctgagtgatggcaagcacaaaatcctaaagaccatctccgttgaagtcattcctgtgaatgatgagaaaccaatgctctccaaaaaggcggaaattgcaatgaacatgggtgaaaccagaatcatctcaagcgcgatactctccgctatcgacgaggactcccccagggagaagatctattatgtgttcgagcggctccctcagaatgggcaactgcaactgaaaattgggagagattgggtgcctctgagcccaggaatgaagtgtacccaggaagaggtggatctcaacctacttaggtatacacataccggggcaatggattcacaaaatcaagacagcttcaccttttatctgtgggacggcaataatcggagccccgctcttgactgtcagattactatcaaggatatggagaagggcgatattgttattttgaccaagccactcgtggtgagtaaaggggaccggggattcctgacaacaacaacactgctagcagtcgacggcacagacaaacccgaggagttgctgtatgttattactagtcctccacggtatggtcagatcgaatacgttcattatcccggtgtcccaataaccaatttcagtcagatggacgttgtgggacaaacagtctgctacgttcacaagtccaaagttacagtgtcctctgacagatttaggttcattattagcaatggccttcgaactgagcatggcgtgttcgaaatcactctggagacagttgacagggccctccccgttgtaacccgcaataagggacttcggctggcacaaggagctgtggggctgctcagtcccgacttgttgcagttgacagatcccgacaccccagccgagaacctgaccttcctcctggttcagctgccacaacatggacagctgtacctgtgggggacaggtctgctgcagcataatttcactcagcaggatgtggacagcaagaatgtcgcctacagacacagcggaggggattcacagactgattgtttcaccttcatggccacggacggaacaaaccagggctttatcgtaaatggcagagtctgggaggagcccgtgttgtttaccatacaagtggatcagctggacaagacagccccacggatcactctgctccactctccttctcaggttggcctcttgaaaaatggatgttacggaatttatatcacgtcaagggttctcaaggcttccgatcccgacacagaagatgatcagattatattcaagatcttgcaggggcctaaacacggccacctagaaaacactacaacaggtgagttcattcatgagaagtttagccagaaagatctcaattctaagacaatcctctacatcatcaatccaagcttagaggtgaattctgatacggtagaattccaaatcatggaccccacaggcaactctgctacccctcagatccttgagcttaagtggtcacatattgagtggtcgcagactgaatacgaagtgtgcgaaaatgtaggcttgttaccgttggagatcattcggcgaggctatagcatggatagcgcttttgtgggaatcaaagtcaatcaggttagcgccgcagttggtaaggattttaccgtgattccttctaaacttattcagtttgaccctgggatgtctactaagatgtggaatatcgctatcacttatgacggtctagaggaagacgatgaagtcttcgaggtaatcctgaactcgcctgttaatgcagtactgggcaccaaaacgaaggctgccgtgaaaatcctggacagcaagggcggacagtgtcatcctagctatagcagcaaccagtccaagcactccacatgggagaaaggaatctggcacctgcttcccccaggatctagctcctcaacaacatcggggtcattccacttggaacggaggcctctgccgtcatccatgcagcttgcagtgatccgcggagataccctccgaggcttcgacagcaccgacttatctcaacggaaactgagaacacggggaaatggaaagaccgttcggccaagttctgtctacaggaatggaaccgacattatatacaattaccacggcatagtcagcctcaagctcgaagatgactcattccctacgcacaagcggaaggctaaggtgtcaatcatctcgcagccccagaagaccatcaaggtggccgaacttccgcaggctgacaaggtagagtcaacaaccgactcacacttcccacgccaggaccagctgccgtcatttcctaagaattgtacacttgaactaaaagggttattccatttcgaagaggggatccaaaaactctaccagtgtaatggaatcgcttggaaagcctggagcccacagacaaaagacgtggaggataaaagttgccctgctgggtggcaccagcattctgggtactgtcatatccttatcacagagcagaaagggacatggaatgctgctgcccaggcctgtagagaacagtaccttgggaaccttgtgaccgtcttctccaggcagcatatgagatggctctgggacatcggcggtcggaagtcattctggataggactcaatgatcaggtacacgccggacactgggaatggattgggggtgagcctgtggcattcaccaacggcaggagaggcccttctcagaggtcaaaactgggcaaatcatgtgttctcgtgcagagacagggaaagtggcagaccaaagattgtagacgggctaagccgcacaactatgtgtgctctaggaaattgta

SEQ ID NO: 223672 - DNA, 648 bp, synthetic construct
  misc_feature 1..648: note = Description of Artificial Sequence: Synthetic coding sequence
  source 1..648: mol_type = other DNA
atgctggatgagagcctggctgttaggagaagtaagaaatgcaaggagatgattatgcactgggaaaaaaaggaggatatcgatatcgtcaacacagtggaccaacttgataaaacagcgcctaggatcacattactacattcaccatcccaggtaggacttctgaagaatggttgctacgggatttacatcacttcccgggtgttaaaggctagcgatccggacaccgaggatgaccagataattttcaagatccttcagggacccaagcatggccatcttgaaaacacaaccactggtgagttcattcacgaaaagttcagccagaaagacctgaatagcaagacaatcctgtatatcattaacccatccctcgaagtcaactccgacaccgtggagtttcagataatggatcccacaggcaacagtgcaaccccacaaatcttagagctgaaatggagccatatagagtggagccaaaccgaatacgaggtttgtgagaatgtgggtttacttcctttagaaatcataaggcgcggttattcgatggacagcgctttcgtggggatcaaggtgaatcaggtgtccgctgccgtaggcaaagactttaccgtgattcccagtaaattgattcagttcgatccttag

SEQ ID NO: 223673 - DNA, 2148 bp, synthetic construct
  misc_feature 1..2148: note = Description of Artificial Sequence: Synthetic coding sequence
  source 1..2148: mol_type = other DNA
atggtaacccaggagagcatgctcaaggccgcactgcccttgtttactagattcataatctcaaatgggctgcggacagaacatggcgtgtttgagataaccctcgaaaccgtggacagagccctgcctgttgtcactcgcaataaaggtctcaggcttgcccagggtgccgtcgggctgctgagtccagacctgctccagttaactgatcctgatacaccagctgagaatcttacctttctgctcgtacaacttccacagcatgggcagctgtacctgtggggcaccggccttctgcagcacaactttacacagcaagacgtggacagcaaaaacgttgcttataggcactctggcggtgactctcaaactgactgctttaccttcatggcaacggacggaactaatcagggttttattgtcaatgggcgagtttgggaagaacccgtgttgtttacaattcaggtagaccaactggacaagaccgcccctagaattacactgctccattcaccctctcaggtggggttactaaagaacggctgttacggaatatacattaccagtcgagtgcttaaggcctcagacccagacacagaggatgatcaaataatctttaaaattctgcaggggccaaaacatggtcacctggagaacaccaccacgggcgaatttatccacgagaaatttagccagaaggatctgaatagcaagaccattctgtatattatcaatccctccctggaggtgaattctgatacagtggagtttcaaatcatggatcccacgggaaacagcgcaacccctcagattttggaacttaagtggtcccatattgaatggtcccagactgaatacgaggtctgcgaaaatgtgggcctgctacccctggaaattatccgtaggggttattctatggattccgccttcgtaggcataaaggtgaaccaagttagcgccgcagtgggcaaagatttcactgtgattccctctaagctgattcagtttgatcctgggatgtctaccaaaatgtggaatattgctataacctatgatgggctggaagaggacgatgaagtcttcgaagtcatcttgaattcccctgtgaacgccgttctgggcacaaagacaaaagcagccgtcaagattttagactccaagggagggcagtgccatccctcttattcatccaaccagtctaaacacagtacctgggagaagggaatctggcacctgttgccgccaggaagtagtagctccacaacctccggctcctttcatctcgaaagacgaccactaccgtctagcatgcagttagcagtgattagaggggatacactccggggattcgattccacagacctgtcacagaggaagctccgtacgaggggaaatgggaaaaccgtgagaccatcatcagtctatcgtaacgggaccgacattatttataattaccatggcatagtgagcctcaaactggaagacgacagctttcccacacataagaggaaagcaaaagtgtccatcatttcgcagccgcagaaaaccatcaaagtagcagaactacctcaagcggataaggttgagagcactacagactcccatttcccacgtcaggaccaactgcctagcttcccaaaaaactgcacactggaactgaaaggactctttcactttgaggaggggatacagaaattatatcagtgtaatgggatcgcttggaaagcttggtctccccagacaaaggacgtggaggacaagagttgccccgcaggatggcaccaacattctgggtattgtcacattttaattaccgagcagaaagggacctggaatgctgccgctcaggcttgtcgagaacagtacctggggaacttagtcaccgtgttctcacggcaacacatgcggtggctgtgggatattggaggacgcaaatctttctggatcggactgaacgatcaggtgcatgcgggacactgggagtggatcgggggagagccagttgctttcacaaacggcagacgcggaccatctcagcgctctaagcttggtaagagttgtgttttggttcagaggcagggaaagtggcagaccaaggactgtcgacgcgctaagcctcataactatgtgtgctctaggaaactgtag

SEQ ID NO: 223674 - DNA, 6539 bp, synthetic construct
  misc_feature 1..6539: note = Description of Artificial Sequence: Synthetic coding sequence
  source 1..6539: mol_type = other DNA
atgaatagtttgtcttggggagccgcaaatgccgtgctgctgctcttattactcgcttgggctagcccaaccttcatcagtattaataggggcgtaagggttatgaagggccactccgcattcctgtccggagacgatctgaagttcgctatccccaaagagaaggacgcctgtaaagtggaagtcgtgatgaatgaacctataacgcagagagtggggaagctgacaccgcaggtgttcgactgtcatttcttgcccaacgaggtgaagtatgtgcataatggatgcccaattctcgacgaggacacggtgaaactcagactctacagattcactgaaagagacaccttcatcgagaccttcatactgtgggtctatctgctggagccggactgtaatataattcacatgagtaataatgtactcgaggtgcctgaatttaatggactctcgcaggccattgataagaacctgctgaggtttgattacgatcgaatggcatccctggaatgtacagtctctctggacacggcccgaacccgactccccgctcatggacagatggttctgggggagcctcggcctgaggagcctcgaggagaccaacctcactcgttcttcccagaatctcagctgcgggctaagcttaaatgccctgggggatcttgcaccccaggtctgaagaaaattggatcgttaaaagtgtcctgcgaagagttcctgctgatgggattgaggtaccagcatcttgatcccccatcacccaacatagattacatttccattcagctggatctcactgatacacgctctaaaattgtgtacaaatcagaaagtgcatggctgcccgtctacatcagagccggaatccccaaccagatccccaaagccgcttttatggccgtttttatcctggaagtggatcagtttattctaacctctctgaccaccagcgttctggattgtgaggaagacgagactcctaaacccctgctggtctttaatatcactaaggcccctctgcagggctatgtgacccatcttctagatcatacacgtcccattagctctttcacctggaaggatctttctgatatgcagattgcttaccaaccccctaatagctctcactcagaacggaggcacgacgaagtcgagctggaggtgtacgattttttttttgagagaagcgcccctatgacagtccacatcagtatcaggacggccgatactaatgcacctcgtgtgtcttggaacaccggattgtcacttctggagggacaatcacgggcaattacatgggagcaatttcaggtagtagataatgatgatatcggggctgtacgcctcgtgacagttgggggactgcagcacggatggctgaccttgcggggaggtaagggttttctgtttaccgtggctgatctccaggcaggggtggtgaggtaccatcacgatgactccgattctacaaaagacttcgtagttttccggatcttcgatgggcaccacagtatcagacacaagttccccattaacgtgcttccaaaagacgactcgcccccattcctgatcaccaatgtggtcatcgagttggaagaggggcagaccattttgatacagggaagtatgctccgtgccagcgatgttgatgcatcagacgactatatcttcttcaatatcactaaaccaccccaggccggtgaaattatgaaaaaacctggccctgggttgattggctatccggtccatggtttcctccagcgcgacctatttaatggcattatttattataggcacttcgggggagaaattttcgaggactctttccagtttgtgctgtgggattctcatgaaccccctaacctaagcgtcccccaggtggccaccatacacataacgcccgttgacgaccaacttcctaaagaagccccaggcgtaagccggcatcttgtagtcaaagaaacggaagttgcctatattaccaaaaagcaactgcacttcatcgatagcgagtcatacgaccgcgaactcgtttacaccataaccacacctcccttcttttcgtttagccatcgtcacttggatgccggaaaactcttcatggtcgattctatacccaaggtcgtgaagaatcctaccgcgctggaactgcgatcttttacccagcacgccgtcaattacatgaaagtcgcttacatgccacccatgcaggacatcggcccacattgcagggacgttcagtttacattttctgtctccaaccagcacggtggcacactgcatggcatatgctttaacatcacaatcttaccagttgacaatcaggtaccagaagctttcacaaaccccttgaaggttacagagggcggtcagagcatcatctccactgaacatatcctcattagtgatgccgataccaaattggacaatatagacctcagtctgagagaattacccctgcacggcagggtggaattaaacgggtttccattgaactctggcggaaccttctcttggggcgacctgcacactctcaaagtccgctaccagcacgatggaacagaggtactgcaggacgacctgctgctggaggtcaccgacggcactaactccgcagaattcgtgctgcatgtggaagtcttccctgttaatgatgagcctccagtcttaaaggctgatttaatgccagtcatgaattgtagtgaaggcggagaagtcgtcatcactagtgaatacatcttcgctactgacgtagattcagacaatttgaaacttatgttcgtgatcgctcgcgagccacagcacggagttgtcagacgtgccggtgtcactgtggaccaattttctcaaagggatgttataagcgaggcagtaacctacaagcacactgggggagagataggactgatgccttgctttgacacaatcaccctggtggtgagtgacggggaggcgggacccttcgtaaatggctgttgttataatggcccaaaccccagcgtgccactccatgcgtccttcccagtttacgacttgaacattacggtttacccggtggataatcagcctccctccatagctatcgggcctgtcttcgttgtggacgaggggtgctcaaccgcgctgacagtcaatcatctgagcgccacggacccagataccgctgccgatgaccttgagtttgtgcttgtctccccacctcagtttgggtacttggaaaatattctgccctctgttggattcgagaagtcaaatatcgggatctcaatagattctttccagtggaaggatatgaacgcctttcatattaactacgtgcaatcccgacatctcaggattgaacccacagccgatcagttcacagtctacgtgactgatggaaaacaccacagcctggagattccattttctatcattattaaccctaccaatgacgaggccccagacttcgttgttcaaaacataaccgtctgcgaagggcagatgaaggagctagacagttcaattataagtgccgtggacttggatatcccccaggacgccctgcttttttcaatcacccaaaagcccagacatggtttacttattgacagaggattcagtaaggacttcagtgaaaataagcaaccggctaaccctcatcagaaacatgcgcctgtccactcgttttctatggagcttctgaaaaccggaatgcgactgacctacatgcacgatgacagtgagtctctggccgacgatttcacaattcaactcagcgatggcaagcataagattcttaaaactattagtgtcgaagtcatcccagtgaatgacgaaaaacccatgctgtctaagaaagccgagattgccatgaacatgggggagactcgaatcatctctagtgcgatcctgtcggctattgacgaggactcacccagagaaaaaatttactatgtgttcgagcgtctgcctcaaaatggtcagctgcagctcaagatcggacgggattgggtgcctctctcccccggaatgaaatgcacacaggaggaggtcgatcttaaccttcttcggtacacacacactggcgcaatggattctcagaaccaggactcgtttacattctacctatgggacggaaataaccggagccccgcactcgactgccagattactatcaaggatatggagaaaggggacatagtgatcttgacgaaaccattggtggtttctaaaggagaccggggattccttaccaccaccacccttttggcagtcgacggcacggataagccagaagaattactttacgtcattacctctccccctaggtacggccaaattgagtacgtgcattaccctggagtgcccattacaaacttctcacagatggatgtcgtgggccagaccgtctgctatgttcataaaagcaaagtcactgtgtcctccgacaggttccggtttatcattagcaatggtcttaggactgagcacggtgtcttcgaaatcaccctggaaacagttgatcgcgctctccccgtggtaacacggaacaagggcctgagactggcccagggcgcagttggtttgttaagcccagaccttctgcagctgaccgatccggacacgccagctgaaaatctgaccttcctgctcgtgcagttacctcagcatggtcagctatatctatggggcaccgggctactgcagcataactttacccagcaggatgtggattcaaagaatgtggcctaccggcacagcggtggcgatagccagactgattgctttacattcatggctactgatggtacaaatcaagggtttatcgtgaacggacgggtgtgggaagaacctgtcctgttcacaattcaggtagaccagcttgacaaaacagctcctagaataactctcctgcacagcccctctcaggtcggcttacttaagaatggctgttatgggatatacattacatcaagggtgttaaaagcgtctgatcctgataccgaggatgaccagattatctttaaaatcctccagggaccaaagcacggacacctggagaatacgactactggtgaatttattcatgagaagttctctcaaaaagatctcaactccaaaacaattctgtacatcatcaatccgtccctggaagtaaactccgatacagtggaattccagatcatggaccccaccggaaacagtgccaccccacagatcctagagctgaagtggtcgcatattgagtggtctcagactgaatatgaagtgtgcgagaacgtggggctattgccacttgaaatcatccgcaggggctactctatggactccgcttttgtgggcattaaggtcaatcaggttagcgccgcagtagggaaagactttacagttatccccagcaagctcatccagttcgaccctggcatgtccacaaagatgtggaatatagccatcacctatgatggcctggaggaggacgacgaggtgtttgaggtgatccttaatagtcccgtgaacgccgtgctagggacaaaaaccaaagcggcagttaaaatactcgacagtaaaggaggtcagtgccacccatcctattcttctaatcaaagcaagcacagtacatgggagaaagggatatggcatctccttccacccggaagctcctcatccactacatccgggagctttcacctagaacgacgaccactgccctccagcatgcagctggccgtcatccgcggagatacactgcgaggttttgactccaccgatctcagccagaggaaacttcggacccggggtaacggcaagaccgttcgcccatcatctgtctatcgtaatggaaccgatatcatatacaactatcatgggattgtgtctttaaaactggaggacgattcttttccgacacataagcgcaaagccaaagtgagcatcatctcacaaccccagaaaacgattaaagtcgccgaactccctcaggctgataaggtcgaaagcaccaccgactctcatttccccagacaagatcagctgcctagcttccctaaaaattgcactctggaactaaaaggactgttccacttcgaggagggaatccaaaagttgtaccagtgcaatgggatcgcatggaaggcatggtctccgcaaacaaaggacgtggaggacaaaagctgcccggcaggttggcaccagcattccggctactgccacattctgataacagagcagaagggcacctggaacgcggctgctcaagcatgccgagagcaatatctgggtaatctggttacagtattctcccgccaacacatgaggtggctgtgggacatcggaggacgcaaatcgttttggatcggtctgaacgatcaggtgcatgcaggacattgggaatggataggcggagaacctgttgcctttaccaacggaagaagaggaccatctcagcgctccaaattaggtaagtcttgcgttcttgtgcaacggcaggggaaatggcagacgaaagactgtcggagggcaaagccacataactatgtttgttcaaggaagttgta

SEQ ID NO: 223675 - DNA, 9510 bp, synthetic construct
  misc_feature 1..9510: note = Description of Artificial Sequence: Synthetic coding sequence
  source 1..9510: mol_type = other DNA
atgcattcagcagggacgcccggactgagttctcggcgaacaggcaatagcactagtttccagcctggcccacctccaccgccaagacttctcctgctccttctactgctgctgtcattagtctcaagagtccctgcccaacccgcagccttcggcagagcccttttgagcccaggtttagccggtgccgcaggcgtccccgctgaggaagccattgtcttggctaatcgcggtttaagggtaccctttggtcgcgaggtttggttagaccctctccatgacctggtactccaggtgcagccaggcgacagatgtgcggtgtcggtccttgataacgacgcattggcccaacgccctgggaggttgtctccgaaacggtttccatgtgatttcggccctggcgaagtcaggtactctcacctcggagctcgttctccatcaagagatagagtgcgtttgcagctcagatatgacgcacctggtggcgcagtagtcctgccattagtgcttgaagtggaagtggtgttcactcagcttgaggtcgttactcgcaatctgcctctcgtggtagaagagctgctgggaaccagtaatgctttagacgccagatcccttgagttcgccttccaacccgagactgaggagtgccgcgtgggaatcttaagcggattaggagccctgcctagatacggagagttgcttcactacccccaagtgcctgggggagccagagaggggggagccccagagaccctgcttatggattgtaaagcattccaggaattaggtgtgagataccggcatacagcagctagtcgctcgccaaacagggactggataccaatggtggtcgagctgcggagcaggggcgcacccgtgggaagccctgcattaaaacgggagcatttccaggtgttggttcgcattagggggggagccgaaaataccgcgccaaagccgtcattcgtggccatgatgatgatggaagtggaccaatttgttctaaccgcactgacacctgacatgctggcggcagaggatgccgagagcccgtctgatctgctcatctttaatctcacaagcccgtttcagcccggacagggctatttggtgagtaccgatgatcggagtctccccttgtcgtctttcacccaacgggaccttagactgctcaagatcgcgtatcagcctccttccgaggattccgaccaggaacggctgttcgagctggaactggaggtcgtagaccttgagggcgcagcctccgatccgttcgcttttatggtggtagtgaagcccatgaacacaatggccccagtggtcactcggaatactggtctaatcttgtacgagggccagagcaggcccctcacaggcccagccggttcaggacctcagaatctggtcatcagcgatgaggatgacctggaagccgtccgattggaagtcgttgctggtctgcgccacggtcatttggtcatattaggcgcatccagtggatcaagcgctccaaagtcttttactgtcgccgagctcgcagccggacaggtcgtgtaccagcacgatgaccgagacggctcactgtcagataatctcgtcttgcgaatggtggacggtggagggcgtcatcaggttcaatttttgttcccaatcacattggtgccagtggacgatcagcctccagtcctgaatgcaaacaccgggcttaccctggcagaaggggagaccgtgcccatcctgcccttgtcgctttcagcgacagatatggattcagatgacagcctccttctttttgtgctggagtcacccttcctgaccaccggacatctgctcctcagacagactcacccaccacatgagaagcaggagctgctacggggtttatggaggaaggaaggtgcattctatgagaggacggtcaccgagtggcagcagcaggacatcacagaaggccgtctgttttacagacactccgggcctcactctccgggacctgtgacagaccagtttacatttagagtgcaagacaatcacgatccacccaaccagagtgggctgcagcgatttgtgatccgtatacatcccgtagaccggctccctcctgagttaggatccggatgccccctgagaatggtggttcaggaaagtcaattgacacctctccgcaagaagtggttacgttatacagatctggacacagacgacagggaattacgctatactgtaacacaatcacctaccgacactgacgagaaccacctgcctgctcccctgggaactttggtgctcacagataacccttccgtagtcgtgacccactttacacaggctcagatcaaccatcacaagatcgcttatcggccaccaggacaggagctcggagttgctactagagtggcccaattccagttccaggtggaagaccgagcaggaaacgtggcaccagggactttcaccctgtatctgcatcctgtggacaaccagccacccgagatactcaacactggattcaccattcaggagaagggtcaccacatcctaagcgaaacagagctacacgttaatgacgtggataccgatgttgcccacatctcattcactctcactcaggctcccaaacatgggcatatgcgcgtgagcggccagatcctccacgtgggcggactcttccacctggaagatatcaagcagggtcgggtgagctacgcacataatggagataagtcactgacagattcctgctctttggaagtttcagatcggcaccacgtcgttcctatcactctgcgcgttaacgtgcgaccggtagatgatgaggtaccgatactgtctcacccaactggaacactggaatcatacctggacgtcctggagaatggggcaacagaaatcaccgccaacgtcatcaaaggtacaaatgaagaaacagatgacctgatgctgactttcctactagaggacccccctctgtacggtgagatcctggtcaacggcatccccgctgagcagttcactcagcgggacatcctagaggggtcggtggtgtacacccataccagtggtgaaatcggcctgctccccaaggctgattcgtttaatctctctctgtccgatatgtcccaagagtggcgcattggtggtaatactatccagggagtaacaatttgggtcacgatattaccagtggatagtcaggcacccgagatattcgtgggggaacagttaattgttatggagggcgacaagagcgttatcacatcagttcacatcagcgccgaagacgtcgacagcctgaacgacgatattctctgcactattgtcattcagcccacctcaggctatgtcgagaacataagcccagcccctgggtcggagaaatctagggcgggtatcgctatttctgctttcaacttgaaagatttgagacagggacatataaattacgtccaatccgtgcacaaaggagtggaacctgtggaggaccggtttgtgttcaggtgtagcgacggtattaatttttctgaaagacagtttttcccaattgtcataattccaactaatgacgagcaacctgagatgtttatgcgcgagttcatggtgatggaggggatgtcactggtcatcgacacacctatcttaaatgctgccgacgcggacgtccctctcgatgatctcacgtttaccattacacaatttccaacacacgggcatatcatgaatcagctaatcaatgggactgttctggtggagagttttaccctagatcaaataattgagagctcttccatcatttacgaacacgacgattccgaaactcaggaggacagctttgttattaagctgacggacggtaaacattctgtggagaagaccgtgcttataatcgttatccctgtggatgatgagacacccagaatgaccattaacaatggtttggaaatcgagatcggggacaccaagataattaacaataaaatcttgatggcgaccgatttggattctgaagacaaatcgctggtgtacattataaggtacgggccaggtcacggattacttcagcggagaaaacccacgggcgcttttgagaacatcacccttggtatgaacttcacacaagacgaagtcgatcgaaacctcattcagtacgtgcatttggggcaggaaggcatacgggatctcatcaagtttgacgtcactgatggcataaatccccttatcgacagatacttctacgtctcgatcggttccattgatatcgtatttccggatgtcatttcaaagggagtcagccttaaggagggcggaaaggttacgctgacaacagacctcctctcaacttcagacctgaactcgcccgatgaaaacttggtcttcactatcactcgagcgccaatgcgcggacatctggagtgtacggaccagccaggcgtctcaattacctccttcacacagctacagcttgcgggaaacaaaatctattatatccatacagctgacgatgaagtgaagatggactctttcgagttccaggttaccgacggacgcaacccggtgttccgaacattcagaataagcatcagtgatgtggacaacaagaaaccagtagtgacgattcataagttagtggtgtcggagagcgaaaataagttgataacaccgtttgaattaaccgtcgaggatagggatacgccagacaaacttctaaagttcacaattactcaggtccccattcatggacacctactgttcaataacactcggcctgtgatggtgtttacgaagcaggacctgaacgagaacttgatctcatataagcatgatggcaccgagagctctgaggattcattttcttttactgtgaccgatggcacacatacggatttctacgttttcccggatactgtttttgaaacacgtaggccacaggtgatgaaaattcaagtgctggctgtagacaacagtgtaccacaaattgccgtaaataagggggctagcactctgcgaacccttgccacaggccacctgggtttcatgattacctccaaaatcttaaaagttgaggatagagactctctgcatatttctcttagatttattgttaccgaggcccctcagcatgggtatttacttaacctggataagggtaatcattccattacacaattcacgcaggctgacattgatgacatgaaaatctgctatgtgttgcgggagggagccaacgctacgtccgacatgttctacttcgctgttgaggatggcggagggaataaactaacttaccagaatttcaggctgaactgggcctggatttcattcgagaaggaatactatctggtgaatgaagacagtaagttcctagatgtcgtcttgaaacgacggggttatcttggcgaaacttcattcatttccataggcactcgggaccggacagccgagaaggataaggatttcaaaggaaaagcgcagaagcaggttcaatttaaccctgggcagactcgcgcaacttggcgggtgagaattttgtcagatggtgagcatgagcagagcgagacattccaggtcgtactttccgaacctgttctggccgcactggaattccctaccgtcgcgaccgtcgagattgtggaccccggtgatgaacctactgtgtttataccacaaagcaaatatagtgtggaagaggacgtcggcgaactcttcataccaattagaaggtcaggggatgtctctcaggaattgatggtggtgtgttacacgcagcaggggaccgctacgggaacggtgcctacatctgtcttatcctactctgattatatctctagacccgaggaccatacctccgttgtgaggtttgataaagacgagagggagaagctctgcaggatcgttattatcgacgactctctgtatgaagaagaggagaccttccatgtgctactgagtatgccgatgggcggaaggatcggcagcgagtttcccggagcccaggtgactatcgtgccagataaggacgatgagccaattttttatttcggggatgtggaatactctgtggatgagtctgccggatatgtggaagttcaagtctggaggaccggaacggatctgtcaaaaagctcctctgttactgtcaggagcaggaaaaccgatccaccatccgctgacgcagggactgactacgtcggaatctccaggaacttggactttgccccaggcgtaaatatgcagcctgtacgcgttgtaattcttgatgacttgggccagcctgcccttgagggcattgaaaaattcgagcttgtactgcggatgcccatgaacgccgcattgggtgagccctctaaagccactgtttcaattaatgattccgtgagcgatctgcccaaaatgcagtttaaggagcggatctacaccggatccgaatccgatggacagattgtgaccatgatccatcgaacgggcgacgtacaatacagatcttccgtcaggtgctacacacgccaaggctccgcccaggtgatgatggacttcgaggagcgtccaaatacagatacctccatcataactttcttgcccggtgaaaccgagaagccctgtattctcgaacttatggacgacgtgctgtacgaggaggtggaggaattgcggctcgtactcggaactcctcagtccaactctcccttcggcgctgcagtgggcgagcagaacgaaactctcatccgcatacgcgatgacgcagacaagacagttatcaaattcggggagaccaagttttctgtcaccgagccgaaagaacccggagagtcagttgtgattcgtatcccagtgatcaggcagggggacacatcaaaagttagcattgtgagagtccacacaaaggacgggtcagcaacatcaggtgaggattatcaccccgtttccgaagagatcgagttcaaggagggggagacacaacacgttgtggagatcgaggtaaccttcgatggagtgcgcgagatgagggaggcgtttacagttcatcttaagcctgatgaaaacatgatcgcagagatgcaactgacgaaagcgatcgtctacatagaggagatgagctcgatggccgacgttaccttcccatcggtaccacaaatcgtgagtctgctcatgtacgatgatacctcaaaggccaaggagagcgctgagccaatgtccggctatccggtcatatgcatcactgcttgcaatcccaagtactccgactatgataaaacaggatccatatgcgcctctgaaaatatcaacgatacactgacccgatatcgctggttgatctccgctccagctgggcctgatggagtgacgtcacctatgagagaggttgactttgataccttcttcacatctagtaaaatggtaacactcgattctatttattttcagcccggatcccgtgtacagtgcgccgcaagggcagtgaatactaacggagacgaaggattagagttaatgagccctatcgtgacaattagcagagaagagggactatgccagcctagagtgcctggagtggtcggcgcagaacccttctctgctaaactgcggtataccggaccagaggatgctgattacactaacttaattaaactgaccgtcaccatgccccacattgatggtatgctgcccgtgattagcacaagagagctcagcaacttcgaactcaccctgagcccagacggcacgagagttgggaatcacaagtgctcaaacctcctggattataccgaggtgaaaactcactatggctttctcaccgacgcaacaaaaaaccccgaaataatcggcgaaacatacccttaccagtacagtctgagtattcgcggatctacaacacttcgcttttatcgcaatctgaatctggaagcctgtctatgggagtttgtgagttactacgacatgagcgaacttttggccgactgtggtggaacaattggtacagacggtcaggttctgaatctcgtacagagctacgttaccctcagagtacccctgtacgtcagttatgtctttcatagcccagtcggtgtgggaggctggcagcattttgatctgaaaagtgaacttagacttaccttcgtgtacgatacggcaatactctggaacgatggaataggctccccacccgaggccgagcttcaaggtagtttgtaccccacttctatgcggataggggatgaggggagactggcagttcacttcaagactgaggcacagtttcatggactcttcgtactcagtcatcctgcttcatttacaagttccgtgatcatgtcagctgatcatcctggcttgaccttttcattacggctgattcgcagcgagccgacctacaatcagccagtgcagcagtggagcttcgtgtctgattttgctgtgagagactactcaggaacttacaccgtaaagctggtgccgtgcacagccccaagccatcaggagtatcggctgcccgtaacatgcaaccctcgtgagcctgtgaccttcgacctcgatattaggttccagcaggtgtcagatcctgtcgctgccgaattctctctgaatacccagatgtacctgctgtccaaaaagtccctctggctctctgatggatcaatgggatttggccaggagtccgacgtggcattcgcagagggcgatataatttacggcagggtgatggtcgatcccgtgcaaaacctcggcgattccttttattgctctatcgagaaagtgttcctatgtacaggggctgatgggtatgtacccaaatattctcccatgaatgccgaatatggctgcctggctgattcgccttccctgctgtaccgcttcaaaatcgtcgacaaggcgcagcctgaaactcaagcaacatcgttcggcaatgttttgttcaacgccaagctggccgtggatgatcctgaagcaatcctcctagtgaaccaaccaggaagtgatggatttaaagttgattcgactccactctttcaagtcgcactgggcagggaatggtatatccatactatatataccgtgcggagcaaggacaatgcaaatagggggatcggtaagcggagtgttgaataccacagtctcgtgagccaagggaaaccacaatcaaccaccaagagccgtaagaagcgtgagatccgatccacaccctcccttgcatgggaaatcggggctgaaaatagtagaggtaccaacatccagcacatcgccctggatcgtaccaagcgacagattcctcacggtcgggcaccccctgacggaatactgccttgggagctgaatagcccctcatctgccgtgtcgctggtcacggtggtgggtggcaccacagttggcctgctcacaatttgtctcactgtaatcgcggtgctcatgtgcagaggaaaagagagctttagaggcaaggacgcgccaaaaggatcctcatccagcgagccaatggtgccacctcagagtcatcataatgacagtagcgaagtttag

SEQ ID NO: 223676 - DNA, 12039 bp, synthetic construct
  misc_feature 1..12039: note = Description of Artificial Sequence: Synthetic coding sequence
  source 1..12039: mol_type = other DNA
atgggagtgctgaaagtgtggttaggattagccctagcattggccgagttcgcagtgctcccacaccacagcgagggagcttgcgtatatcaggattctctcctggccgacgccaccatctggaaaccggacagctgccagagttgtaggtgccacggagacattgtaatatgcaaacctgccgtttgtcggaaccctcagtgtgcctttgaaaagggcgaggttctgcagatcgctgcgaaccagtgttgcccagaatgcgtgctccgtacaccaggctcatgtcaccacgagaagaagattcacgagcatgggaccgagtgggcatcatctccctgcagcgtgtgttcatgcaaccatggcgaagtacggtgcacgccccaaccctgcccccctctgtcttgcggccatcaggagcttgccttcatcccagaaggcagctgttgccctgtgtgcgtcggccttggaaagccctgcagttatgaaggccatgtgtttcaggatggggaagactggcggttgtcgcggtgcgcgaaatgcctgtgcagaaatggcgtcgcccaatgtttcactgcccagtgtcagcccttgttctgtaaccaagatgaaaccgtagtgagagttcccggaaagtgttgcccgcaatgcagcgcccgttcatgttctgccgcaggccaagtgtacgaacacggcgaacagtggagtgagaatgcatgcaccacttgcatttgtgatcgcggagaggtgaggtgccacaagcaggcttgcctgcctctgcggtgcgggaaaggccagtcgagagcccgacgccacggtcagtgctgtgaggaatgcgtcagccccgctggatcttgctcgtacgatggcgttgtgagatatcaagacgaaatgtggaagggaagcgcgtgcgagttttgtatgtgcgaccacggccaggtaacctgccagacaggtgaatgtgctaaagttgagtgcgccagggacgaagaactgatccacctggacggcaagtgctgtccagagtgtattagtagaaacggttactgtgtgtacgaagagaccggcgagtttatgtctagcaacgcctccgaggtgaagaggattcctgaaggcgaaaaatgggaggatggtccttgtaaagtgtgcgaatgcagaggcgctcaggttacctgttatgaaccatcctgcccaccatgtcctgtgggcacattggcccttgaggtgaagggccaatgttgccctgactgcacatccgtgcattgtcaccctgactgtctgacctgctcccagtccccagatcattgcgatctgtgtcaggaccccacaaaactgttacagaacgggtggtgcgtccacagttgtggcctaggtttttaccaggctggatcactgtgtctcgcatgtcagccacaatgctccacatgtaccagcggactggagtgttctagctgccaaccacctctgctgatgagacacgggcagtgcgttcccacctgcggggacggattttatcaggaccgacactcttgcgctgtttgtcatgagtcctgcgctgggtgctgggggcctacggagaaacattgcctggcatgccgggatcccttgcatgtgctgcgtgatggcggatgcgaaagcagctgcggcaagggattttacaaccgacagggaacttgttctgcatgcgatcagtcttgtgactcttgtggaccctccagccctcggtgtcttacatgtactgagaagactgtcctgcacgacggaaaatgtatgagtgagtgtcctgggggatattacgctgacgcgacaggtcgttgcaaggtctgccacaattcttgcgcctcatgtagcggtcctaccccctcacactgcacggcctgctcaccacctaaggcactgcgacagggccactgcctaccccgatgcggagaggggttttattcagatcatggagtgtgcaaggcgtgtcatagttcatgcctcgcttgtatggggcctgccccttcacactgcactggttgtaaaaagcccgaagaaggccttcaggtggagcagctttcagatgtcggaatcccaagcggcgagtgcttggcacagtgtagggcccatttctatctagagagtactggcatttgcgaggcatgtcatcagagctgctttcgctgcgccggtaaaagtccccataactgtacggattgcgggccttcccatgtgctactcgatggccaatgcctgtctcagtgcccagatggatacttccaccaggaaggtagttgcactgagtgccatcctacttgccggcagtgtcacggcccacttgaatctgattgcatttcttgttatccacacatttctctcacaaacggcaactgcaggaccagctgtagggaagagcaatttttaaacctggtcggatactgtgcagattgtcaccatctttgccagcattgtgctgccgatttgcacaatacaggaagcatttgccttagatgtcagaatgcgcattacctactgctgggggatcattgcgtgcccgactgtccgagcggctattacgccgagaggggtgcctgcaagaagtgtcatagtagctgccggacctgtcagggtcggggacccttctcttgtagctcatgcgatactaacctcgtgctctcccacacagggacatgttccaccacttgctttcctggccactatttagacgacaatcacgtgtgccagccttgcaatacacactgtggttcttgcgactcacaagctagttgtacttcctgtcgtgatcctaataaggtcctcctgtttggtgagtgccagtatgagagctgcgccccacaatactatctcgatttttctacgaatacatgcaaagagtgcgactggtcttgctcagcatgctcagggccactcaagacggactgcttacaatgcatggatgggtatgtcctgcaggacggcgcatgtgtcgaacagtgcctgagctccttctatcaggacagtggtttatgcaagaactgcgactcctactgcctccagtgtcagggtccccacgagtgtacccgctgcaagggtccgtttctgctgttggaagcacagtgcgtgcaggagtgtggcaagggatattttgctgaccacgccaagcacaagtgcaccgcctgccctcaaggctgtcttcagtgctcgcaccgcgatagatgtcatctgtgcgatcacggcttttttttgaaatctggtctgtgtgtgtataactgcgttccgggtttttccgtacacacttctaacgaaacatgctctgggaaaattcataccccctctttgcacgtaaatggatcccttatcttgccaatcgggtccataaagccactggacttctcattgctcaacgtgcaggatcaggaggggcgtgtggaagacctcctgtttcacgttgtctctacccctaccaacggtcagctcgtgctttcgcggaatgggaaggaggtacagttagataaagcagggcgtttttcctggaaagacgtgaatgaaaaaaaggtaaggtttgttcattctaaagagaagctgagaaaaggctacctgtttctcaagatctcagatcagcagtttttctccgaacctcagttaattaacatccaggccttctctacccaggccccatacgtcctaaggaacgaagttttgcacatttctaggggagaaagggccacaatcacgactcagatgcttgacatccgggatgatgacaatccccaggacgttgtgatcgaaattatcgatccacctctccacggacagctcctgcagactctgcaatccccagctaccccaatctatcagtttcagctggatgaattgtcccggggactgctgcactacgcacacgatggctctgactcaacttcggatgtcgcggtgctccaggctaatgacggacactctttccacaacatcctgttccaggtcaagacagtcccacagaacgacagaggcctccagttggtggctaattctatggtgtgggtgcccgaaggtggcatgctgcagattacaaacagaattctgcaggctgaagcaccaggtgcaagtgccgaagagatcatttacaagatcacacaggattacccccagttcggggaagtggtgcttcttgtgaatatgccagccgactcccctgccgacgaggggcagcacctgccagacgggcgaacagctactcccacctccacattcacccagcaggacatcaacgagggtatcgtctggtatcgccattctggcgctcctgcccagtcagactccttcaggttcgaagtctcatcagcttcaaatgcacaaacgcgactcgagtcccacatgtttaatatcgcgattcttccccagactcctgaagcaccaaaggtgtccctggaggccagcctgcatatgaccgcgagagaagatggtctcaccgtcatccagccccactccctgtcttttataaacagcgaaaagccatccgggaagattgtctataatatcactttgccactgcatcctaaccagggcatcatagagcaccgggaccacccccactcccctattcgctactttacccaagaggacatcaatcagggcaaagtcatgtacaggccccctccagcagccccacatcttcaggaactgatggccttctccttcgctggtcttccagaaagcgtgaagttccactttaccgtcagtgatggtgagcatacctctccagaaatggtgctgaccattcatctcttgccgtcagaccaacagctgcctgtcttccaggtgactgcccctaggctggctgtttcaccaggaggcagcacttcagttgggctgcaggtcgttgttcgcgatgcggaaactgccccaaaagagctgttttttgaactgaggagacctcctcaacatggagtattgcttaagcacacagccgaatttcgaagacctatggctacaggggacactttcacttatgaggacgtggagaagaatgctttgcagtatattcatgatgggtcttcaacacgggaggacagcatggaaatatcagtgacagacggtttgacagttaccatgttggaggtgcgcgttgaagtatctctgtccgaagatagggggcctcggctggcggcagggtcatccctcagcataaccgtggcatcaaagagtacggctatcatcacccgctcacacctggcttatgtggacgatagtagccctgatcctgagatctggatccagctgaactaccttcccagctacggaacactcctgagaataagtggctcagaagtggaggagctctcagaggtaagcaactttacgatggaagatatcaataataaaaaaattagatatagcgctgtgttcgaaaccgatggacacctggtcacagactctttctacttttctgtgtcggatatggaccataatcatctcgataatcaaatctttactatcatgataacaccagcagagaacccgcctcctgtcattgctttcgcagacctgattactgtggacgaaggcggtagggcccctctgtcttttcaccatttttttgccaccgacgacgacgataacctacagagagacgctatcatcaagctgtcagcactcccaaaatacgggtgtatcgagaacactggaaccggcgacaggttcgggcctgagacggcttccgatcttgaggcctcctttcctatccaagacgtgctggaaaattacatatactactttcagagtgtgcatgagtccatcgaacccactcacgatatattttccttctatgttagtgacggcacctctcggtctgagattcattctatcaacataacaattgagagaaaaaacgacgaacctccacggatgaccttgcagcctctgagggttcagttgtcctcgggggtggtcatttctaatagttccttgtccttacaggacctggatacccctgacaacgagctcattttcgtgctcacaaaaaagcccgaccacggccatgtgctgtggcgccagactgccagtgagccgctagagaacggacgtgtgctcgtgcaaggctccacatttacatatcaggacatactcgccggactagtcgggtacgtcccaagcgttcccggaatggttgtcgacgaattccagttctcactcaccgacggtcttcacgtggacacggggcgtatgaaaatctacactgagcttcccgcaagcgacaccccacacttagcaatcaaccaggggctgcagctgagcgcaggaagcgttgcccgtataaccgaacagcacctgaaagtcacggatattgactccgatgatcaccaagtgatgtacatcatgaaagaggatccaggggcagggcgactccaaatgatgaaacatggcaacctggagcagatttctattaagggtcccattcgttcctttacgcaagccgatatcagtcaaggtcacgttgagtattcgcacgggaccggtgagcctggcggttcttttgcattcaagtttgatgtcgtagacggagaaggaaaccgcttaatcgacaaaagcttctccattagtatcctggaggacaagtcccctccagtcattactacaaataagggacttgttctggatgaaaatagtgtaaagaaaatcaccaccctgcaactaagtgcaaccgaccaggactccggccctactgagcttatctaccgtatcacccgtcagcctcaactgggacacttagagcacgcagcctcccctggcatccagatttctagcttcacccaggctgacctcaccagccgcaatgtccagtacgttcatagttctgaggctgagaagcatagtgatgccttttcattcacactctccgacggagtgagtgaagtgacccagaccttccatattactcttcaccccgtggacgattcactccccgtggttcaaaacttgggcatgcgcgtacaggagggtatgagaaagaccattacggaatttgaactcaaggcagtggacgccgataccgaagcagagagcgtgactttcacgatcgtgcagccaccaaggcatgggaccatcgagaggacatccaatggacagcatttccacttgacatcgacttttacgatgaaggatatctaccagaatcgcgtcagttacagccacgacggatcaaactctctcaaagacagattcactttcacagtgtcggatgggaccaatcctttcttcatcatcgaagaggggggtaaggagatcatgactgcagcaccccagccttttagggtggatattctccctgtcgatgacggtacgcctcgaatcgtgaccaatctgggcctgcagtggctggagtatatggacgggaaagcaacgaatctgattactaaaaaggagttactgactatggacccagataccgaggatgctcagctggtctatgaaataacaaccggccctaagcacggctttgtggagaataaattgcagcctggacgcgcagcagccacctttacgcaggaggatgttaatctcgggctgattaggtatgtgctgcacaaggaaaaaattagagagatgatggacagttttcagttccttgttaaagactccaaacctaacgtggtgtctgacaacgtttttcacatccagtggtccctaattagcttcaaatacacgtcctacaacgtgagcgagaaggcgggatctgtgagcgtgaccgtgcaaaggacgggaaacttgaaccaatacgccatcgttctctgtaggactgaacaggggaccgcgtccagtagttcccgggtgagtagccaacccggacagcaagattacgtggaatacgctggtcaagtgcagttcgatgaacgcgaagataccaaatcctgcaccattgttatcaacgatgatgatgtttttgagaatgtggagtccttcaccgttgaactgtcgatgcctgcctatgcactgttgggcgagtttacccaggccaaagttattattaatgataccgaggacgagccaactcttgaatttgacaaaaaaatctactgggttaacgagtccgccggatttctgttcgccccaatcgagcgcaagggtgatgctagctcaatcgtaagtgccatctgttacaccgtaccaaaatctgccatgggctcttctttgtatgcgttggaaagtggatcggatttcaagtccagaggcatgagcgccgcttcacgcgtcatttttgggcctggtgtgacaatgtctacgtgcgatgtgatgttaattgacgatagcgaatacgaagaggaggaggaattcgaaatcgcgctcgcagatgcgtccgataacgcccgaatcggcagggttgcaaccgccaaagtgctgatcagcggacccaatgacgccagcactgtttcactgggtaacaccgccttcactgttagcgaagacgcaggcaccgttaaaattccagtgattagacatggaactgacttgtctacattcgcatctgtctggtgtgccacaagacccagtgaccccgcatccgcgacccctggggtggactacgttccgagctctcggaaagtggagttcgggccaggagttatcgaacagtattgcactttaactattctggatgatacgcagtatccagtcattgaaggccttgaaacctttgtggtcttcctaagctctgctcagggagcagagcttaccaagccgtttcaggccgtgatcgctattaacgacacatttcaagacgtaccctctatgcagtttgccaaggacctcttgcttgttaaagaaaaggagggagtgctgcacgtccctattacacgttctggggacttatcttacgagtcttctgtaaggtgttatacacagagtcattcagctcaggtgatggaggactttgaggagcggcagaatgccgactcttccagaatcacttttctgaagggtgataaggtgaagaactgcacagtgtacatacacgacgatagcatgttcgagcccgaagagcagtttagagtctacctcgggttaccgctggggaaccactggagcggggctaggataggcaagaacaacatggctaccatcaccattagcaatgacgaggacgctccaaccatcgagtttgaagaggcggcttaccaggtgcgtgaacccgctggccctgacgcaatcgccatccttaatataaaagtaatccgtagaggcgaccagaatcgtacctccaaagttcggtgcagtactagggatggatccgcacagtctggggttgattactaccctaaaagtcgggtgctaaaattttcccctggcgtcgatcacattttcttcaaggtagaaatattgtctaatgaagacagagaatggcatgaatccttctccctcgtcttggggccagacgatccagtggaagccgtgctgggcgatgttaccaccgctacagtgaccatcctcgaccaggaggcggctggaagcctcatcctccctgctccccctatagttgtgacgctggctgattacgaccacgtagaggaagtgaccaaggaaggcgtgaaaaagtctccaagcccagggtatccattggtctgtgtgacaccatgtgatccccactttcctagatacgcagtgatgaaggaaaggtgtagcgaggccggaattaatcagacatctgtgcagttttcctgggaggtggcggctcctaccgacgggaacggcgctaggtccccctttgagacgataactgataacaccccctttactagtgtaaaccacatggtgttagattcaatctatttcagtaggagattccacgtgcgctgtgtggcgaaagcagtagataaagtaggacacgtagggaccccactcagatctaatattgtgacaattggaacagacagtgctatctgccacacccctgtggtggcgggaacctctagaggtttccaggcccaatcctttatcgcaactctgaagtatttggatgttaaacacaaggaacatcctaatcgtatccacatttctgtccagataccacaccaggacggtatgctaccgcttatatctacgatgccattgcacaatctgcattttcttctgtccgaaagcatttataggcaccaacacgtttgcagcaatctagtcactacttatgacctccggggaataagcgaggccggtttcctagacgatgtggtgtacgattccactgccttagggcctggatacgatcgcccattccagtttgatcccagcgtgcgcgagcccaaaaccatacaattatacaagcaccttaatctgaaaagctgcgtctggacctttgatgcgtactatgacatgaccgaactgatagatgtgtgtggcggttccgtaaccgcggacttccaagtccgtgattcagcccagtctttcctgacagtccatgtacccctctacgtgtcctacatctacgtcacagctcccagggggtgggcatcattggagcaccacacggagatggagttcagttttttttacgacacggttctttggcgcacaggcatccagaccgacagcgtactgtctgctcggctccagattattcggatctacataagggaagatggcaggctggtgatcgaatttaagactcacgccaagttcagaggccagtttgtcatggaacatcatacactccctgaggtgaagtcttttgtcctgacccctgaccacctcgggggaatagagtttgatctacagttgttatggtcagctcagactttcgactcaccacaccagctgtggagggctacttcatcttataacagaaaggactattcaggagaatacaccatatacctgatcccatgcacagtccagccaactcagccttgggttgaccctggcgaaaagcctttagcttgcaccgcacacgcacccgagaggttcttaatccctatcgccttccagcaaactaatcggcctgtgcccgtcgtatattccttgaacactgagttccagctgtgtaacaatgagaaagtgttccttatggatcccaacacttccgatatgagcctggccgagatggattacaagggtgcattctctaagggtcagattctgtatggcagagtgctgtggaatccggagcagaacctgaattcggcctataagcttcagcttgaaaaggtttacctgtgcaccggaaaagatggatatgtgccattcttcgatccaacagggaccatctataacgaggggcctcagtatgggtgtattcagcccaacaaacacctcaaacatcgatttttgcttctcgatcggaatcagccagaagtaacagataagtattttcacgatgtgccgttcgaagcacatttcgcttctgagttgccagacttccatgtagtctccaacatgcccggagtagacggtttcactctgaaagtagatgctctgtataaagtggaagctgggcatcagtggtatctgcaggtcatctacattattggacccgacacgatttctgggccacgcgtccagaggagtttgaccgcccctctacgtagaaataggagggaccttgtagagccagacggccagcttatactcgatgattcccttatttacgataacgaaggcgaccaggtgaagaatgggaccaacatgaaatcgctcaacctagagatgcaagaactggccgtggctgcctcactgtcacagaccggtgcttccattggatctgctcttgctgccataatgctgttacttctggtcttcctcgtggcttgttttattaacaggaaatgccaaaagcagaggaagaagaaacccgcagaggatatcctggaagaataccctctgaataccaaagtcgaagttccaaagcggcatcccgaccgggtggagaaaaatgttaaccgccactactgcaccgtgaggaacgtgaacatcttaagtgaaccagaagctgcctatacttttaagggtgccaaggtgaagaggctgaacctggaagtccgagtacataacaatttgcaggacggaaccgaagtgtag

SEQ ID NO: 223677 - DNA, 2214 bp, synthetic construct
  misc_feature 1..2214: note = Description of Artificial Sequence: Synthetic coding sequence
  source 1..2214: mol_type = other DNA
atgggagtgctgaaggtgtggctcggactcgctttggccttggccgagttcgctgtcctgcctcatcattcggagggcgcttgcgtgtatcaggacagcctgctggccgacgcaactatttggaagccagattcttgtcagagttgcagatgccacggtgacattgtgatatgtaagcctgccgtctgtcgtaaccctcaatgcgcgtttgagaaaggagaggtgctgcaaatcgccgcaaaccagtgttgccctgagtgcgtcctgcgcaccccgggtagttgtcaccacgaaaaaaaaatacatgaacacggaaccgaatgggctagctcaccgtgctctgtctgcagctgtaaccacggagaagtgcgttgtacgccacagccatgccctcccctgagttgcggtcaccaggaactcgccttcatacccgaaggctcgtgttgccctgtgtgtgtgggattgggcaaaccctgctcgtatgagggccatgtttttcaggacggagaggactggaggctgagtcgatgcgcaaagtgtctatgccggaacggtgtggcccagtgtttcacggcccagtgccagccccttttctgtaatcaggacgagaccgtggttcgagtgcctggaaaatgctgtcctcagtgtagcgctcggagctgtagcgctgccggacaagtttacgaacacggcgaacagtggtcagaaaatgcctgtactacatgcatctgtgatcggggagaggtgcgctgccataagcaagcgtgccttccgctgagatgcggtaaaggacagtctcgggctcggagacacggtcaatgttgcgaagaatgtgtaagccccgctggcagctgctcttacgatggagtagtaagataccaggatgaaatgtggaaagggtctgcttgcgaattctgtatgtgtgaccatggacaggtcacatgtcagaccggcgagtgtgctaaggtagagtgcgcgcgtgacgaggagctgattcatctagatggcaaatgttgccctgagtgcatatcaaggaacgggtattgcgtatatgaggagaccggagagtttatgtcttcaaatgcttcggaggtgaaacgtatccctgaaggagaaaagtgggaggacggcccttgcaaggtctgcgaatgtcgaggcgctcaggtgacatgttacgagccatcgtgtccaccttgccctgtcggcaccctggcccttgaggtgaagggccagtgttgcccagactgtacatctgtgcactgccaccccgattgcttgacctgttcccagtctcccgatcactgtgatctgtgccaggatccgaccaagctactccagaacgggtggtgcgtacacagctgtggactgggtttctaccaagctggaagcctttgccttgcctgccagcctcagtgttcaacttgtaccagcggactcgagtgctccagttgccagcctccgcttctcatgcgccatgggcaatgtgtgcctacctgcggtgacgggttttaccaggacaggcattcatgtgctgtttgccacgagagctgcgctgggtgctggggccctaccgagaagcattgcctggcctgcagagaccctctgcatgtgcttcgcgacgggggatgcgaaagctcttgtggcaagggcttctataaccgacagggtacatgctcggcatgtgaccagtcgtgcgactcctgcggtccaagctctcctaggtgcctgacctgcaccgaaaagaccgtcctccacgacggtaagtgcatgtcagagtgccctggaggctattacgcagatgcgaccggtcggtgcaaggtctgtcacaactcctgcgcttcttgttctggacccacgccatcacactgcacagcatgctcccctcctaaggctctgagacaggggcattgcttacctcggtgcggcgaaggcttttactcggaccatggggtgtgcaaggcctgtcatagcagctgcttagcctgtatggggccagccccaagccattgcacagggtgtaaaaagcctgaggagggcctgcaggtggagcagctttcagacgttggtattccaagtggcgaatgtctggctcagtgccgagcccacttctacctcgagtcaaccgggatttgcgagggtcaaaacctggacttctgccagaacttagaagtgatcagcgcagtgtgtctcggaatctcaagcactgagaactag

SEQ ID NO: 223678 - DNA, 954 bp, synthetic construct
  misc_feature 1..954: note = Description of Artificial Sequence: Synthetic coding sequence
  source 1..954: mol_type = other DNA
atgggcgttcttaaggtttggctgggtttggccctggctctggctgaatttgccgtgctgccacatcattctgagggtgcctgtgtgtatcaggatagcttgcttgccgacgccacgatctggaaaccagacagctgccaaagctgtagatgtcatggcgacatcgtgatttgcaaacccgcagtctgcagaaacccacagtgtgcattcgagaagggggaagtgctgcaaatcgctgcgaaccaatgttgccctgaatgcgtactgaggacacctgggagttgtcatcacgaaaagaagatccacgagcacggtactgaatgggcttcctctccctgctcagtgtgctcctgtaatcacggagaagttcggtgtacaccacagccctgccctcccctgtcttgcggccaccaggaactggctttcattcccgagggcagttgttgtcccgtgtgcgtaggtctgggcaagccctgctcttacgaagggcacgtattccaggacggagaggattggaggttgtctcgctgtgctaagtgcctctgccggaatggagtggcccagtgctttaccgctcagtgtcagcccttgttttgcaaccaagacgagaccgtagtccgggtccctggtaaatgttgtcctcagtgtagcgccaggtcttgttcagccgctggtcaagtgtacgaacatggggaacagtggtccgagaatgcttgtaccacgtgtatatgtgatcggggagaagtccggtgtcataaacaggcctgtttgcccctacggtgcgggaagggacagagcagagctagaaggcacggacagtgctgtgaggagtgtgttagcccggctctggcctcgcagtcagtgggaattactggaatgtctcaccatgcccaaagtctgcttgggccattcttaacccaaattaaaaaaccgcactttagctgcctggaatag

SEQ ID NO: 223679 - DNA, 6725 bp, synthetic construct
  misc_feature 1..6725: note = Description of Artificial Sequence: Synthetic coding sequence
  source 1..6725: mol_type = other DNA
tgatccgaggtttctaatttcactatggaggatatcaacaacaaaaaaatacgatactctgccgtctttgagacagacggccacttggtcaccgactccttttatttctcagtgtccgatatggatcataaccatctggataaccaaatctttaccattatgatcacccctgctgaaaatccacctcctgttattgcatttgccgaccttatcaccgttgatgaggggggacgggcaccactgagcttccaccactttttcgctactgatgacgacgataatctccagcgcgatgcaatcattaagctgtccgccctgcctaaatacggttgcatcgagaacaccggcaccggagacagattcggacctgagacagcaagtgatctcgaagcaagcttccccatccaggacgtgttagagaattacatctactattttcagtccgtgcatgaatccatagaaccaacccatgacatcttcagcttctacgtttcggatgggacatctcgcagcgagatccacagcatcaacatcaccatcgaacgtaagaacgacgagccacctcgaatgactttacagcccctccgcgttcaactgagctctggcgtggtcatatctaattcctctttgtcccttcaggatctggacacacctgataacgaattgatcttcgtgctcacaaaaaagcccgatcacgggcacgtgctgtggcgccaaactgcatccgaacctctggagaatggtcgggtactggtgcaagggtccacatttacctatcaggatattctggccggattggttggttatgtgccatcagtccctggaatggtcgttgacgaattccagttttctctgaccgacggactgcacgtggataccggcagaatgaaaatctatacggagttgccagcctctgacaccccgcatctggcgatcaaccaaggcctgcagctgtcagcgggaagtgtggcgagaataaccgagcaacacctgaaggtgaccgacattgattcggatgaccaccaggttatgtacataatgaaggaggaccccggagcagggagactgcaaatgatgaagcatggcaacttggaacaaattagcatcaagggcccaatacgatcgtttacccaggctgatatctcccagggtcacgtcgagtattctcatgggacaggcgagcctgggggaagtttcgcctttaagtttgacgtggtggacggagagggaaatagacttatagataagagtttttccatttctattctggaggataagagtccacccgtaatcactacaaacaagggcttagtactggacgaaaatagcgttaagaagataaccacattacagcttagcgccacagatcaggatagtggtcctaccgagttgatctacaggatcacaagacagcctcagctgggccatttagaacatgcggcaagtcctggtatccagattagctcctttacacaggctgacttaacaagcaggaatgtccagtacgtgcacagctccgaagctgagaagcactctgacgcgttctcgttcactctttccgacggagtgtcagaggtgacccagacctttcacattacgttacaccccgtggatgacagcctccctgtggtgcagaacctgggcatgagagtccaggagggaatgcgcaagacgattacagaatttgagttaaaggccgtggatgcagataccgaggcagagtctgtcacattcaccatcgtccagccccctcggcatgggactattgagcgaacttccaacggccaacactttcacctaacctcgacatttaccatgaaggatatctatcagaaccgagtgagctattcccacgacgggtcaaactcactgaaggataggtttacatttaccgtaagtgacgggaccaacccattttttataattgaagaagggggtaaagaaatcatgacagctgccccacaaccatttagagtggatatcctccctgtcgacgacggtacgccccgaattgtgaccaatctgggactgcagtggttagaatacatggacggaaaggccacaaacctgatcaccaaaaaagagcttcttacaatggaccccgatacagaggacgcacagctcgtgtatgagatcaccaccgggccaaagcatgggttcgttgaaaacaagctgcagccagggcgagccgctgcgaccttcacccaggaggatgtcaacttaggtctcatcaggtacgttctgcacaaggagaagatcagggaaatgatggattctttccagttccttgtgaaggacagtaaacccaacgtcgttagcgataacgtgttccatattcagtggagccttatctcttttaaatacacatcctataatgttagtgaaaaggctggatccgttagcgtgaccgtgcaaagaacggggaacttgaatcagtatgctattgtgctatgcagaacagaacaaggcacagccagttctagctcaagagtgagctctcagccgggacagcaggactacgtggagtatgcgggtcaggtacagtttgacgagagggaggacactaagagttgtacgattgtaataaatgatgacgatgtgtttgagaacgtagagtctttcaccgtagagctgtccatgcctgcctacgccctgctgggtgagtttacgcaggctaaggtgattattaacgatacggaggatgagccgactctggagtttgacaagaaaatctactgggtgaatgaatccgctggctttctcttcgcacccattgagcggaagggagacgcctcctccatcgtctccgccatttgctatacagtacccaaaagcgccatgggctcatctttgtatgctctagagagtggctccgattttaagagccggggaatgtccgccgcatctagggtaatcttcgggcctggagtgacgatgtcaacctgcgacgtgatgctaattgacgacagtgagtatgaagaggaagaagaattcgaaattgcactagcagacgcatctgataatgccaggatcggaagagtggcaacggcaaaggttttgatctccggcccaaatgatgcctctacagtgtctctgggaaatactgccttcacagtgagtgaagacgccggaactgtgaagattcccgtcattcgccatgggacagacctgtccacttttgccagcgtgtggtgcgccacacgcccttccgaccctgcttcagccaccccaggtgtagattatgttccctcctcaagaaaagtcgagtttggccctggtgtcatagagcagtactgtacgctgacgatcctggatgacacacaatatcccgtgatcgagggcctggaaacctttgtagtgtttcttagcagtgcccagggagccgaacttaccaagcccttccaggcagtaatcgcaatcaatgacacattccaagacgttccaagtatgcagtttgcaaaagaccttctcctggtgaaggagaaggagggagtgttgcatgtacctatcactcggtctggtgacctgtcttatgagtcgtctgttaggtgttacactcagtcccactcggctcaagtgatggaagacttcgaggagcgacagaacgccgattcaagccgcatcacatttttgaaaggtgataaagtcaagaactgtactgtgtacattcatgacgacagtatgttcgaaccagaggaacaatttcgagtatatctgggactgcccttaggaaaccattggagtggtgcgagaatcggcaagaataacatggcgaccatcacgatttctaacgacgaggacgctcctacgattgagttcgaggaggccgcttatcaggtgcgtgagcccgctggccctgacgcaatcgcgattctcaacattaaggtcattcggaggggcgaccaaaatcggacttccaaagttaggtgcagcacaagagatggcagcgcgcaaagtggggtggattactaccctaaatcaagagttctgaagtttagccccggagtggaccacatcttttttaaggtggaaattctctctaacgaagatcgggagtggcatgagtcattcagcctcgtcctgggacccgacgatccagttgaggccgtgcttggggatgtgacgactgctacggtgacgatcctggaccaggaggcagcaggatccctcatcctgccggctcctcctatcgtggtgacactggccgattacgaccacgtcgaagaagtgaccaaggagggcgtgaagaagtcgccgagccccggatatccactggtttgcgtcactccttgtgatccacacttccctaggtatgccgtgatgaaagagagatgctcagaggcgggtatcaaccaaacaagcgtacagttcagttgggaagtagccgctcccaccgatggcaatggggctcgttcaccatttgagacaattaccgacaatactccatttaccagcgtgaaccacatggtactcgatagcatctatttctcgcgacgctttcatgtccgatgtgtagccaaagccgtggacaaggtgggccacgtgggcaccccactgcgctcaaacatcgttacgatcggcaccgatagtgccatctgtcatacaccagtagtcgcaggtacaagtagaggatttcaagcgcagagcttcatcgctaccctgaagtatctggacgtgaaacacaaggaacatcctaacagaatacatatttctgtccagatcccgcatcaggacggcatgctgccactgatttctactatgccgctgcataatcttcacttcctgctcagcgaaagtatctatcgccatcagcacgtgtgcagtaatctcgtgaccacctatgacctgcgtggtatctccgaggccggttttttagatgatgtagtgtatgacagtaccgccttggggccaggctatgatcgaccctttcaattcgatccatctgtcagagaacctaagaccattcagctgtataaacacttaaacctcaaaagctgcgtttggacgttcgatgcctactatgatatgacggagctgatcgacgtgtgcggtggtagcgtcacggccgacttccaggtgagagattccgcacaaagtttccttaccgtgcacgttccactgtacgttagttatatctatgttactgctcctcgagggtgggcatcgttggagcaccataccgagatggagtttagcttcttttacgatactgtcctttggcgcacaggcattcagactgactctgtgctgtccgcacgcctgcagatcatacgcatctatattcgcgaggacgggagacttgttatcgaatttaagacgcatgccaagtttagaggccaatttgtaatggagcatcacaccctccccgaggtaaagtcctttgtactaaccccagaccatttaggaggtatcgagtttgaccttcaactactctggtctgcccagacatttgactcccctcaccagctttggcgggctacctcttcatataaccggaaagactactcaggtgagtatacaatctaccttattccatgtaccgttcagcccacacagccgtgggtggacccgggtgagaagccgctcgcctgcacagctcacgcgccagagcgttttctgatacccattgcttttcagcagacaaatcgacccgtgcccgttgtctactccctgaacactgagtttcagttgtgtaataacgagaaggtgttcctcatggacccgaataccagcgacatgagtctggctgagatggattataagggtgccttcagtaaagggcagatattatatggaagggtcttatggaaccccgaacagaacctgaacagcgcatataagcttcagctggagaaggtctacctctgcacaggaaaggacggttatgtaccattttttgacccgaccggaactatctataatgagggtcctcagtacggatgcatccagccaaataagcacctcaagcataggtttttgctgctggaccgaaaccagcctgaggtgaccgataaatactttcatgacgtcccattcgaggcacacttcgcttctgaattgcctgattttcatgtagtgtctaacatgcctggagtggacggcttcacgcttaaagtagatgccctgtataaggtcgaggccggacatcaatggtacctgcaagtgatttacattatcggtcccgacacaatcagcggtccccgtgtacagagaagcttaacagctccgttacgtaggaacagaagggacctggtggagcccgacggacagcttatcctggacgattcgttaatctatgataacgaaggcgaccaggtgaaaaatggtaccaatatgaaatccctaaatctggaaatgcaggagctggcagtggctgcatcactctctcagactggggcatctatcggctcggcactggccgcaatcatgctactgctacttgtgttcctggtggcgtgctttataaatcgaaaatgtcaaaaacaaaggaagaaaaagcctgccgaagatattctcgaagagtacccattgaacacaaaggtggaagtgcctaagaggcatcctgaccgggtggagaaaaacgtcaataggcattactgcactgttcggaacgttaatatcctgtcagagccagaggctgcctatactttcaagggggctaaagtgaagcgtctgaacctggaggtgagggttcataacaacctgcaggatggtacagaagtcta

SEQ ID NO: 223680 - DNA, 768 bp, synthetic construct
  misc_feature 1..768: note = Description of Artificial Sequence: Synthetic coding sequence
  source 1..768: mol_type = other DNA
gagcgccagggccagagtcgggcacgcagacacgggcagtgctgcgaagagtgtgtctcccccgcaggctcctgctcttatgatggcgtcgttcggtaccaggatgaaatgtggaaaggttccgcctgcgaattctgcatgtgcgatcacggtcaggttacatgccaaaccggcgaatgcgccaaagtcgaatgcgctagggatgaggagttaattcacctagatggcaagtgttgcccggagtgtatttcccgcaacggctactgcgtgtacgaagagaccggggagtttatgagctccaacgccagtgaagtgaaacggattccagagggcgaaaaatgggaagatggcccatgtaaagtgtgcgaatgccgtggagcacaggtgacttgctacgagcctagttgccccccatgtcccgtggggacccttgcactcgaagtgaagggccagtgctgtcccgattgtaccagcgtacactgccaccctgactgtctcacttgtagccaatccccagaccactgcgacctgtgccaggatcctaccaagctgctgcagaatgggtggtgtgttcactcctgtgggctcggcttctaccaggcgggttccctgtgcctcgacgacgggttcagtctcccagcacccgttctccacgtgtaccagtgggcaggcgtgttgatccttccagcttctccggctgacgccgctcgcgctgtgtgcgcatacctgtggggcaggctcctcccaaggtctccctttctgtgctag

SEQ ID NO: 223681 - DNA, 840 bp, synthetic construct
  misc_feature 1..840: note = Description of Artificial Sequence: Synthetic coding sequence
  source 1..840: mol_type = other DNA
atggtactgaccatccacctactgccttcagatcagcagttaccggtgtttcaggtgaccgctccgaggctggctgtatcacccggaggctcaacgagcgtcggactccaggtcgtggttcgcgacgcagagactgccccaaaggaactgttcttcgaactgcgccgaccgccacagcacggagtgctgctgaagcatactgctgagtttcgccgacccatggccacgggtgacacctttacctatgaagatgttgaaaagaacgcattacagtacatacacgatggcagctctactcgggaggattctatggagattagcgtcactgatggcttgacggtcaccatgctcgaggtgcgtgtcgaggtatctttaagcgaggacaggggaccaagattggctgcgggatcaagcctgtccattacagtggcatctaagtcaacagcaattatcacaaggagccacttggcctacgttgacgacagctctcccgacccagaaatttggatccagctgaactatctcccttcatatggcacccttctgcgcatctcaggttccgaagttgaagagctgtctgaggtgagcaatttcacaatggaggatataaataataaaaagattcgatactcggccgtgttcgagaccgacggtcatctggttaccgattcattctacttcagtgtttccgatatggatcacaatcatctcgacaatcagatctttacaataatgattacacccgcagagaacccacctcccgtcatcgcatttgccgatctgattacagtggacgagggcggtagggcgcctttgtcttttcaccacttttgctactag

SEQ ID NO: 223682 - DNA, 5930 bp, synthetic construct
  misc_feature 1..5930: note = Description of Artificial Sequence: Synthetic coding sequence
  source 1..5930: mol_type = other DNA
atgggtgtgcttaaagtgtggctcggcctggccttggctctagccgaatttgccgtgcttccacatcatagcgagggcgcatgcgtctatcaggacagtctcttggctgacgctaccatctggaaacccgactcgtgccagtcttgccgctgccacggggacatcgttatctgtaaacccgctgtgtgcaggaatccacagtgtgctttcgagaaaggggaagtcttacagatcgccgctaaccagtgttgtcccgaatgtgtactgcggactcccggatcttgtcatcacgagaagaagatccacgagcatggcacggaatgggcttcatcgccctgcagcgtctgttcttgcaaccacggggaggtgagatgcaccccccaaccctgcccacctctatcctgcggacatcaggaactggcctttatccccgaaggaagctgctgtcccgtatgtgtaggactcggcaagccctgcagctatgaggggcacgtgtttcaggacggagaagattggagactctctcgctgcgccaaatgcttatgtcgtaatggagtcgcacagtgttttacagcacaatgccagcctctcttctgcaaccaggacgaaaccgtcgttagagtacctgggaaatgttgcccccagtgttctgctcgaagctgtagtgccgcaggacaggtgtacgaacatggggagcagtggagtgaaaatgcctgcacaacgtgtatttgtgaccgcggtgaggtgcgttgtcacaagcaggcctgcctgccacttaggtgcggcaaaggccaatctcgtgccagacggcacggtcagtgctgtgaggagtgcgtgtctcctgccggatcctgctcgtacgatggggtagtccgataccaagacgagatgtggaaaggcagcgcatgtgagttctgtatgtgtgaccatggccaggtgacatgtcaaaccggggagtgcgctaaagtggagtgcgcgagggatgaggagctcatccacctcgatggaaagtgttgtcccgaatgtatcagcaggaacggttactgcgtctatgaagaaaccggagaattcatgagctccaatgcgagtgaagtgaaacgaattccggaaggggagaaatgggaggatggcccttgtaaagtttgcgaatgtcggggagctcaggtgacttgctacgagccttcatgccccccttgtcccgtgggcacactggccctggaagtcaagggtcagtgctgtcccgactgcacgtccgtccactgccaccctgactgtctcacgtgctcccagagtccagatcactgcgatctctgccaagacccaacgaaactcctacagaatggctggtgcgtgcactcctgcggcctgggattttatcaggcaggctcactgtgtctggcatgccagccccagtgcagcacatgtaccagcggtttggaatgctcatcctgccagcctcccttgctaatgcgccacggacagtgtgtcccaacctgcggtgatgggttctatcaggatagacattcttgtgcagtgtgtcacgagagctgcgccggatgttggggtccaaccgagaagcactgcctggcgtgcagagacccattacacgtcctccgggacggagggtgcgaatcctcttgcggtaaaggcttttataatcggcagggtacatgctcagcatgtgatcaatcttgcgatagctgtggtccatcaagccctcgctgccttacctgcacggaaaaaacagtcctgcatgatgggaagtgcatgtccgaatgcccaggagggtattacgcggatgctaccggccgatgcaaggtatgccacaattcttgtgctagctgttctggcccaaccccctcccattgtaccgcctgttcaccgcctaaggcattacgacagggccattgcctccccagatgcggagaaggattctatagtgaccatggcgtctgtaaagcttgtcactccagttgtctggcatgtatgggaccagctccgtcccactgcactggttgtaaaaaacccgaggaaggcctacaggtggaacagctgtctgacgtcggcatcccttctggagagtgcctggcacaatgcagagctcatttctatctggagtccacaggcatctgcgaggcatgccatcagagctgcttccgctgcgccggtaaaagtccccacaattgtaccgactgtggtccatctcatgtgttattagatggccagtgcctatcacagtgcccagacggctatttccatcaggaggggtcctgtactgaatgtcatcccacttgtcgacagtgccatgggcctcttgagtccgattgtatttcatgttatcctcatataagtttgaccaatgggaattgcaggacgtcatgcagggaggagcagtttctcaaccttgtgggttactgtgccgattgccatcacttgtgccagcattgcgctgccgacctccataatacaggatctatctgtctcaggtgccagaatgctcactaccttctgttaggggatcactgcgtcccagattgccctagcgggtattacgctgagaggggcgcttgtaaaaagtgccattccagctgtaggacatgccaaggaagagggcctttcagctgtagctcctgcgataccaacctcgtgttgagccacaccggtacgtgtagtaccacttgtttcccaggtcactacctggatgacaatcatgtgtgccaaccctgtaatactcactgcggctcttgtgacagccaagcaagttgtacctcatgcagggacccaaataaagtgctgctgtttggcgaatgtcaatatgagagctgcgccccacaatactacctggacttctcaaccaacacctgtaaggagtgtgattggtcgtgctcggcatgcagcggtccactcaaaaccgattgtttacagtgtatggacgggtatgtattgcaggacggtgcctgtgtggagcaatgtctgtcatctttctaccaggactccggactgtgtaagaactgcgattcatactgtctgcagtgccaggggcctcatgagtgcaccaggtgcaaagggcctttcttgttgctggaagcccagtgcgtgcaagagtgtggcaaaggctacttcgctgatcacgccaagcataagtgcacggcctgtccccaaggctgcctacagtgtagtcaccgtgacagatgtcacctttgcgatcacggtttttttttgaagtccgggctgtgtgtctataactgcgtgccaggattctcggtgcacacatctaacgagacctgcagcggcaagattcacacacccagcctccatgtgaacggatctctgattctacctatcgggagtataaaacccctggactttagtctgctgaacgtgcaagatcaggaaggacgggttgaggatcttctgttccacgtggtgtccacaccgaccaatggtcagctggtcctctccagaaatgggaaagaggtccaactggataaagctggtcgcttcagctggaaagacgtgaatgagaaaaaagtccggttcgtgcactcaaaggagaagctgaggaaagggtacctgtttttgaagatctcagaccagcagtttttctccgaaccgcaactgatcaacatacaggcattcagtacacaggctccgtacgtgctgcggaatgaggttcttcacataagtcggggtgaacgagccacgattaccactcaaatgttggatataagggatgacgataacccacaggatgtggtgatcgagatcatagatcctcccctgcacggccaactgctccagacactgcaatcaccagccacacccatttaccagttccagttagacgagctgagccgcggactgctgcattacgctcacgacgggagcgatagtacctctgacgtcgccgtcctgcaggccaacgacggacacagtttccataacattttgtttcaggtgaagactgtgccccaaaacgatcggggtctgcaactcgtcgctaattccatggtgtgggtaccggaggggggaatgctgcagatcacaaaccggatcctgcaggctgaagcccctggggcatctgccgaagaaattatctacaagatcactcaggattacccgcagttcggcgaagtggtgttgctggtcaacatgccagctgactcacccgctgatgaaggtcagcaccttccagacggacgtacagccactcccacctcgacttttacccagcaggatatcaatgaaggaattgtctggtaccgacacagtggcgcaccggctcagagcgatagcttccggtttgaggtgtcttcagcctctaatgcccagacaagactggaatctcatatgttcaatattgcaatcttaccccagacccctgaagcacctaaagtctcactggaggctagcctgcatatgaccgcccgtgaagacgggctaaccgtgatccaaccacacagtctgtcctttatcaacagcgagaagcccagcgggaaaatagtatacaacattaccctgccattgcaccctaaccagggcattattgaacacagggatcatccccacagcccaatcaggtatttcacacaggaagatattaatcagggaaaagtaatgtaccgacctcctccagctgcccctcacctgcaggaattgatggcctttagcttcgctggcctgccagaaagtgttaaattccacttcactgtcagcgacggggaacatacatcccccgaaatggtgcttacaatccacttactcccctctgaccagcagctgcctgtgttccaggtgactgccccaaggctggcagtgtcacccggtggctctacctccgtcggtctgcaggtcgtggtgagagatgccgagacggccccaaaggagctcttctttgaactgagaaggcctcctcagcatggagtcctgctgaaacatactgccgagtttaggcgacctatggccaccggagacacattcacatacgaagatgtggagaaaaacgccctccagtacatacatgatgggagctccacacgcgaagacagtatggagatcagcgtgactgatggcctgaccgttaccatgctggaagttcgtgtggaagttagtctgtcagaggatcgaggacctcggctcgccgcaggctcctcactgtcaataaccgttgcgtcaaaaagtacagctattatcaccagatctcacctggcgtacgttgatgatagtagccccgatcccgaaatttggatacagctgaattatttgccttcctatgggactctattgagaatttctgggtcagaagtggaggaactgtcggaggtgagtaatttcactatggaggacatcaataacaaaaagatccgctattcagccgtgtttgagacagacggccacctcgtaacagactcgttctacttctccgtgtctgatatggaccacaaccatctcgataatcaaatcttcaccattatgatcacccccgcagagaatcccccaccggtgatcgccttcgccgacctgataaccgtcgacgaggggggaagagcccctctctcctttcaccactttttcgccacagacgacgacgacaatctgcagcgcgatgctatcataaagctctcagctctgccaaagtatggctgcatagaaaacactggcactggcgatcgtttcgggccagagactgcatctgatctggaagcctcattcccaattcaggacgtcctcgagaattatatctattatttccagtccgtccacgagtcaatcgaacctacccatgatatcttcagcttttatgtgagtgatggcaccagtcgaagcgaaatccatagcattaacatcacgattgaggtgaaaacactagaagttggcaaagttgagccactcactactatttttcacaccatcagggaattgtccctgta

SEQ ID NO: 223683 - DNA, 633 bp, synthetic construct
  misc_feature 1..633: note = Description of Artificial Sequence: Synthetic coding sequence
  source 1..633: mol_type = other DNA
atgtggactttagggagaagagcagtggccggtctgctcgcgagcccaagcccggctcaggcgcagaccttgacgcgcgttcctcgacctgccgagctcgcaccactttgcggaagacgcggtctgcgaaccgacattgacgctacgtgcacccccagaagggcgagtagcaatcagcggggactcaaccagatctggaatgttaagaaacagagcgtgtatctgatgaatctcagaaagagcggtacactggggcatccgggatccctggatgaaacaacatacgagcgcctggcagaagagaccttggattcactggccgaatttttcgaggacctcgccgacaagccatataccttcgaggactatgatgtctcctttggctccggagtgttgacagttaaattggggggagacttgggaacatatgttattaacaagcagactccaaacaaacagatttggttgtctagccctagctcaggcccaaaaagatatgattggaccggaaaaaattgggtctattcccatgacggcgtgtccctccacgaattgcttgctgccgaacttaccaaagccctgaagacaaagctcgatctttcatctctggcctacagtggaaaagacgcgtag

SEQ ID NO: 223684 - DNA, 516 bp, synthetic construct
  misc_feature 1..516: note = Description of Artificial Sequence: Synthetic coding sequence
  source 1..516: mol_type = other DNA
atgtggacgttgggcagaagggcggtagccggtctattagcgagtccaagcccggctcaagcacagaccctgacccgggtccctaggcccgcagagctcgctcctctctgcggaaggcgcggactgagaacagacatagatgccacatgtactccaaggagagcatcctcgaatcagcggggtctgaatcaaatttggaatgtgaagaagcagtccgtgtacctcatgaacctcagaaagtctggcacgctcggccatcctgggagcctggatgaaacaacgtatgagcgcctggccgaggaaactttggacagtttagccgagtttttcgaagacctggccgacaagccatacaccttcgaggactacgatgtctctttcggcagcggggtcctcactgtcaaacttgggggagaccttggtacctacgtgattaacaaacagaccccaaacaaacagatctggctcagtagcccttctcggctgacctggctcctgtggctatttcatccctag

SEQ ID NO: 223685 - DNA, 591 bp, synthetic construct
  misc_feature 1..591: note = Description of Artificial Sequence: Synthetic coding sequence
  source 1..591: mol_type = other DNA
atgtggaccctcggacggcgagccgttgccggactgcttgcttctccatcccccgctcaggcccagacactgaccagagtgcctcggcctgcggaactggcccctctctgcggtaggaggggtcttagaacagatattgatgctacatgcacaccacggagggcctcctctaatcagcgcggactgaatcagatttggaacgtgaaaaagcagtccgtgtatctcatgaacctgaggaaaagcggcacactgggacatcccggatccctcgatgaaaccacctacgaacgcctcgccgaagagactctagatagcttagccgagttttttgaagacttggcggataagccatacaccttcgaagactacgacgtatcctttggatctggcgtgttgactgttaagctcggcggagatctgggtacctacgtgatcaacaagcagacaccgaacaagcaaatctggcttagctcaccatcacgatatgtggtcgacctcagcgtgatgacaggactgggaaaaaccggctgcactccaaccaccgcctgtccatctatgtcctgttggccacagtcgtcccttaaaccatag

SEQ ID NO: 223686 - DNA, 702 bp, synthetic construct
  misc_feature 1..702: note = Description of Artificial Sequence: Synthetic coding sequence
  source 1..702: mol_type = other DNA
atgccatgtcggcgagaggaagaagaagaagctggtgaagaagcagagggcgaggaggaagaggacgattcattcttgctcctgcagcagagcgtgacactgggctcgtccggggaagtggacagacttgtcgctcaaattggagaaacacttcaactggacgccgctcaggacagccccgcttccccctgtgcccctcctggcgtgcctctgagagcacccggacctttagctgcagccgtgcccgctgacaaagctagacctccagctgttccactgctcctgcccccagcgtccgccgagaccgtgggacccgcaccttcaggcgcattgcggtgcgctctcggcgacagaggcagagtgcgtggccgagccgctccgtattgtgttgccgaggttgccgctggcccaagcgcactcccaggaccctgtaggcggggatggctgagagatgctgtgacgagtcgtaggcttcagcagcggcgatggacccaggccggtgctagggctggagacgacgacccccaccggctactgcagcagctcgtgctcagcggcaacctaataaaagaagccgtgcggcgtctccagcgcgcagtagccgcagttgccgcaactggcccagccagtgcgccagggccagggggaggacggtcgggtcccgatcggattgcactccagccgtcaggctcactgctgtag

SEQ ID NO: 223687 - DNA, 1161 bp, synthetic construct
  misc_feature 1..1161: note = Description of Artificial Sequence: Synthetic coding sequence
  source 1..1161: mol_type = other DNA
atggaggggggtctcgccggtgaaagagccagagaaagcccagtggactgcagtgtcagcaaatgctcaaaactggtgggtggcggagaatccaaccccatgaactacaattcttacatggacgagaaaaatggacctccaccacccaacatgaccaccaacgagcgcagagttatagttccggctgatcctactctttggacacaagaacatgtcaggcagtggctcgagtgggccataaaggaatatagtctgatggaaatagacacatccttcttccagaatatggatgggaaggagctgtgcaagatgaacaaagaggacttcttaagagccactaccctctataacacagaagtgctcttgagccacctgtcttacctgcgggaaagctccctgttggcttacaataccacctctcatacagaccagagctctcgactgagcgtcaaggaagatccctcctacgatagcgtaagaagaggggcttggggaaataatatgaattctggactaaataagtccccccctctcggaggtgcacaaactatttcaaagaacacagagcagcggccacagccggatccctaccagattttggggccaacttcgtcacgattggccaatcctggaagcggccagatacaactgtggcaattcctcctggagctcttgtctgattcggcgaatgctagctgtattacctgggaaggcaccaacggggagtttaaaatgacagaccccgatgaggtcgcacgcaggtggggcgaacgcaagagtaagcccaacatgaactacgacaagctgtccagggcactgagatattattacgataaaaatatcatgacaaaggtgcatggaaaaagatatgcatataaatttgactttcacggcatagcccaagcattgcagccccacccgacagagtcttctatgtacaagtatcctagtgatatctcctacatgccttcctaccacgcacaccagcagaaggtcaattttgtgccaccacacccaagctctatgcctgtcacctccagcagcttctttggcgctgcatcacagtactggacttcccccacaggagggatatacccaaaccccaacgtacctcggcatccaaatacccacgtacctagccacctgggtagttattactag

SEQ ID NO: 223688 - DNA, 1260 bp, synthetic construct
  misc_feature 1..1260: note = Description of Artificial Sequence: Synthetic coding sequence
  source 1..1260: mol_type = other DNA
atgaccgcttcagggagccctgactatggccagcctcacaaaataaatcctcttccgcctcagcaggaatggatcaaccagcccgtgcgtgtgaacgtgaaaagggaatatgaccatatgaatggatcccgcgagtctcccgtggattgctctgttagtaaatgctccaaactcgtgggaggtggagagtcaaaccccatgaactataatagctatatggatgagaagaacggccctcctcccccaaatatgactactaatgagaggcgcgtaatcgtgccggcagatcccaccttgtggactcaggagcatgtgcgacagtggttggaatgggcaattaaagagtattccttgatggaaatagacacttctttcttccaaaacatggatggcaaagaattatgcaagatgaataaggaagatttcttgcgcgcaactactctgtataacacagaggtcctgttgtcccatttgagttatctgcgagaaagctcactgttggcttataataccacctcacacaccgatcagagctccagactgtctgtcaaggaagatccatcttatgatagcgtgcgccgtggagcctggggtaacaacatgaacagcggcttgaacaagagcccccctcttgggggtgcccagacaatctccaaaaacactgagcagcgccctcagcctgatccgtaccaaatcttaggtccaacctcatcacggttagctaatccgggatctggtcaaattcagttgtggcagtttctgcttgagctgctttcggactcagcaaacgctagctgtatcacatgggagggtaccaatggtgagtttaaaatgacagacccagacgaagtcgccaggcgctggggtgagcgaaaatccaagccaaatatgaattatgacaaactcagccgggctctgcggtattactacgataaaaacataatgactaaagttcacggcaagaggtacgcgtacaaattcgactttcatgggatcgcacaggcccttcagccacatcctactgagtcgagtatgtataagtaccctagcgacatctcctacatgccatcttatcacgcgcatcaacagaaggtgaattttgtgccacctcacccatcgagtatgcccgtcacttctagttctttcttcggagcggcttcgcagtattggacgtcacctaccggaggaatctaccctaaccccaatgttcctcggcaccctaacactcatgtgccttcgcacctaggcagctactactag

SEQ ID NO: 223689 - DNA, 1359 bp, synthetic construct
  misc_feature 1..1359: note = Description of Artificial Sequence: Synthetic coding sequence
  source 1..1359: mol_type = other DNA
atggacggcacaatcaaggaagctctgagtgttgtgtccgacgatcagagtctgtttgatagcgcgtatggggctgccgcacatcttcccaaggctgacatgactgccagtggcagccccgactatgggcagcctcacaaaatcaatccgctgccacctcagcaggagtggatcaaccagcctgttcgcgtgaacgtgaaacgtgaatatgaccacatgaacgggtcaagggaatcccccgttgattgctccgtgtctaagtgttccaagctggtggggggaggcgagtccaacccaatgaattacaattcttacatggacgagaaaaacggcccacctcctcccaacatgacaacaaacgagcgacgggtgatcgtgcctgcggaccctaccttatggacacaggagcacgtacggcagtggctcgagtgggctatcaaagagtactccctgatggagattgatacaagtttttttcagaatatggacggaaaggagctgtgtaagatgaataaagaagactttttacgcgcaacgacactgtataacacagaagttctgctctcccacctctcctatctacgagagtcctctttattggcgtacaatactacctcgcataccgaccaaagctcgcgcctatctgtcaaggaagatcctagctacgattccgtgagaagaggtgcctggggcaacaacatgaacagtgggctgaataaatctcctcctctgggtggggctcagaccatctccaaaaatacagaacaaagacctcagcccgatccctatcagatcctcggtcctaccagttcaagactcgcgaatccaggtagcggccagattcagctttggcagttcctgcttgagctgctcagcgactctgcaaacgcatcgtgcattacttgggaaggtaccaatggggagttcaaaatgacagaccccgatgaggtggccagacgctggggtgagcgtaaaagtaaaccgaacatgaattacgacaaactgtccagagcgttgcgatactactatgataagaacatcatgaccaaggttcacggaaagcgctatgcctataaattcgacttccatgggattgcacaggcactgcaacctcaccctactgagtcctcaatgtacaagtatccaagcgatatttcgtatatgcctagttatcacgctcaccagcagaaggtgaacttcgtccctccccacccttcttcaatgcctgtcacatctagttctttctttggggctgccagtcagtattggacatccccaacaggaggtatatatccaaatccaaatgttcctcgccaccctaatactcatgtcccgtcccacctggggtcttattattag

SEQ ID NO: 223690 - DNA, 780 bp, synthetic construct
  misc_feature 1..780: note = Description of Artificial Sequence: Synthetic coding sequence
  source 1..780: mol_type = other DNA
atggacccagggtccctgctggcatacaacacaacaagccatacagatcagtcatctcgtctgagcgtgaaggaggacccttcatatgactcggtgcgcaggggcgcttggggtaacaacatgaattctggtctcaacaaatcccctccacttgggggagcgcagacaattagtaaaaacacggaacaacgccctcagcctgatccctatcagatactgggccctaccagcagccgcttggctaacccaggatctggacaaatccagctgtggcagttcttgctggagctcctctctgatagcgctaacgcctcctgtattacatgggagggcaccaacggcgaattcaaaatgaccgatcccgatgaagtggccagacgttggggggaacgtaaatccaagcccaatatgaattacgataagttgtcccgtgctttgagatactactacgacaagaacatcatgacgaaggtccacggaaaaaggtacgcctacaaatttgactttcacggcatcgcccaggcattgcagcctcaccccacggagtccagtatgtataagtacccctcggacatttcttatatgccgtcctaccatgctcatcagcagaaggtaaattttgtgccaccacatccttcaagtatgccagtgacatctagctctttcttcggggcagctagtcaatattggacctccccgacagggggaatttaccctaatcctaatgttccccgtcatccaaatacccatgtaccgagccatctggggagttattattag

SEQ ID NO: 223691 - DNA, 1944 bp, synthetic construct
  misc_feature 1..1944: note = Description of Artificial Sequence: Synthetic coding sequence
  source 1..1944: mol_type = other DNA
atggccgaagaggaggcacccaagaaatcaagagctgcaggaggtggcgcatcttgggagctctgtgcaggggctctgtcagcccgactggctgaggaaggctcaggtgacgcaggaggcaggaggagacctcccgtggatcctcggagactcgccagacagctgcttctgttgctatggctgctggaagcgccactcctactcggcgttcgcgctcaagctgccggtcaggggccagggcagggcccagggccaggccagcagccccctccaccaccacaacagcaacagtccggccaacagtacaatggcgaacggggaatctccgtacccgaccatggctattgtcagcccatcagtatccctctttgcaccgacatcgcttacaaccagacgataatgccaaacctgctgggccatactaaccaggaggatgcaggtctggaagtgcaccagttttaccccctggtgaaagtccagtgttcggctgagctgaagttctttctttgttccatgtacgcacccgtttgcactgtgcttgagcaagcactacccccttgtcgatccttgtgcgagcgggctcgtcaagggtgtgaagctctgatgaataaatttgggttccagtggcctgataccctgaaatgcgaaaaatttccagtccacggtgcgggagagctctgtgtgggtcagaataccagcgacaagggtacaccaacaccttcccttctaccagaattctggacctctaaccctcagcatggaggcggtgggcatcgcggtggttttccaggaggcgcaggtgccagcgaaagggggaagttcagctgccctagagcactcaaagtgcctagctatctcaattaccatttcctgggagaaaaggactgcggagcaccttgcgaacctactaaggtgtacgggcttatgtatttcgggcctgaggagttgcggtttagcaggacctggataggcatctggtcggtgctttgctgtgcaagtaccctctttacggtccttacttatctggtagacatgaggcggttcagttacccggaacggcctattattttcctgtcggggtgctatacagctgtggcagttgcctatattgccggttttttgctggaagatagggtggtgtgcaacgataaattcgcagaggacggcgctagaaccgttgcccaaggtacgaagaaagagggctgtacaatcttgttcatgatgctctatttcttttcaatggcgtcatctatctggtgggtaatcttgtctctgacatggttcctggccgctggaatgaaatggggccatgaagcaatagaagctaatagccagtacttccaccttgccgcttgggctgtgccagcaatcaaaacgatcaccattctggcattgggccaggttgatggggatgtgttgagcggagtctgtttcgtgggcctcaataatgtggacgcgctgcggggtttcgtcctcgcacctttgtttgtttatttgtttatcgggacaagctttctgctagccggattcgtgtccctgtttcgaatcaggaccatcatgaagcacgatggcactaagactgaaaagctggagaaactgatggtgaggattggggtgttctcggtgttatacactgttcccgctactattgtaatagcatgctacttctacgagcaagcatttagagatcagtgggagcgtagttgggtcgcgcaatcatgcaaatcctatgccatcccttgccctcatcttcaggccggagggggagctccccctcaccctccgatgtcacctgactttactgtgttcatgatcaagtacctgatgactcttattgtgggcatcacatccgggttttggatatggtcaggtaagactttgaactcatggaggaagttttataccaggttaactaattcaaagcagggggaaactaccgtgtag

SEQ ID NO: 223692 - DNA, 1284 bp, synthetic construct
  misc_feature 1..1284: note = Description of Artificial Sequence: Synthetic coding sequence
  source 1..1284: mol_type = other DNA
atggaagcaatggctgcaagcactagcctgcccgatcctggggacttcgacaggaacgtgccacgaatttgtggcgtctgtggcgatcgcgcaactggcttccacttcaacgctatgacctgcgaaggatgcaagggatttttcagaagatcgatgaagaggaaggcgctctttacatgccctttcaatggcgactgcagaatcacaaaggataatcgacgtcactgtcaggcttgtcgactgaagcgatgtgttgatattggcatgatgaaggaattcattcttaccgacgaggaagtacagcgtaagcgcgagatgatcctgaaacggaaagaagaggaggcattgaaggattccttgagaccaaagttgtctgaagaacagcagagaattatcgccattttgttggacgcgcatcataaaacctacgatcctacatactctgatttttgccaatttcggcctcccgtgcgagtaaacgatggcggaggatctcacccttctcgccctaattcgcgacataccccatctttttccggtgactcctcttcctcctgtagtgaccactgtatcacaagtagcgacatgatggattcctctagcttttcaaacctcgacctgagcgaagaagattcggacgacccctccgtcaccctggagctgtctcagcttagtatgttgcctcatctcgccgatctagtgtcctattcgatccagaaggtgattggcttcgccaagatgattcctgggtttagagacctcaccagcgaagaccagattgttctgctaaagtcaagcgctattgaggtgattatgctcaggagcaatgaatcatttaccatggacgatatgtcatggacatgcgggaaccaggattataagtacagagtctccgatgtgaccaaagctggacactccttagagctcattgaacctctgatcaaatttcaggttggattgaagaaactgaatctgcacgaagaagagcatgttctgttaatggctatttgcatagtgagccctgaccgtcccggtgtgcaggatgccgcacttatcgaggcaatccaagatagattgtcgaacaccttacagacatacatcagatgcagacaccctccacctggctctcacctactttacgcgaagatgatccaaaaacttgctgatctgcgctcactgaacgaagaacattcaaagcagtaccgatgcctttccttccagcccgagtgctcgatgaagcttactcctctagttcttgaggtgttcggaaacgagatatcttag

SEQ ID NO: 223693 - DNA, 1365 bp, synthetic construct
  misc_feature 1..1365: note = Description of Artificial Sequence: Synthetic coding sequence
  source 1..1365: mol_type = other DNA
atgccagcccatagggatcctgacgttcaaggccatagattgcagcatgacagctacgctcagccagatgggccacgcgaacctgcacgaggatcccatcctgtggcccgtgtgcgggctgccggtggcgtccggcttcctcgtcctcctcccctgctgcctgtgctggcagttcgcgcagacgtgcatcgggcagggctctatccccatccacggctccctgggcacgtgcgcgcaggtccggctcaggtgctcccagactatggagcagtgcagctgcaggttgctcggctccctggcctccccgagacacctcagcaagagagaccacagctacccgttcacggaggtgctcagcagcggctcggcagggctcacccagggcttggacctgtgccagccgctgtgccggcagccgcagccccacagcgggcaggtgcgccagccgaagggaggggcccacgcgcaaggcggctgcgccagccaggacaggtcccaccccgaggagaagaaagagtggtgcgggctgctctgcacgccaggcgcggacgtgtgctggaaccacgtgggcaggcgctgcgctccggactggccggacacttgggcggagccgtgttactgctacaaaggctgcatcgggcacatctgccacacaggcccggacccttaccactgccgcgagccccacatcatctgcccttgcatgttctgctgcgcttgctccgaggcctccctcaccccccattacggaggcgcagggagcatcggcttagacctggccagcggccagctctgtgtcatcctggtggcactggcgaacaccgcttgcatgcaggcctccccggacctctcctacttcgtcatggacagctggccgtggtgggtgggccacacgcccacttggtacctggacggagacaagaagtaggccctcgtggtcataggagccagcagcaactgctgccccctgggtccttgggtcacccaggcggtgaagaccaccccgatcctggccacgcccaaggcggaggcggaagagcacacaggggactgctgcgcggacagcacggtcggcaacgggctcataggctgagggcacactcgcctgggctgctgccaggacataggcatgtcctgcacccccttggtctccgcggacctgtcccacaccctgaaggcgacgaagatggcagacgggaacacgggcaggccggagaagcgcatggggcatacagagccttactgtgcgccgtacaccgggcaggacatttgtgtgaccggctgctgctgctacggacaccacaacacggcctcctggaggatcctggcggtgcagctcaggtgcagaatgagcagccagattag

SEQ ID NO: 223694 - DNA, 1698 bp, synthetic construct
  misc_feature 1..1698: note = Description of Artificial Sequence: Synthetic coding sequence
  source 1..1698: mol_type = other DNA
atgaggcccaggagtgcgcttccccgtctgttattgcccctgcttcttctgcccgcagccggtccagcccaatttcatggcgaaaaaggtatctcaattcccgatcacgggttctgtcaacccataagcatcccactctgcaccgatatcgcatacaaccagaccataatgcccaatcttcttggacacaccaaccaggaggatgctggcctggaggtacatcaattttacccactggtgaaggtgcagtgttcccccgagctgaggttcttcctatgcagcatgtatgcccctgtctgcacggtcctggaacaggcaattcctccttgtaggagcatatgtgagcgcgctcgacagggatgtgaagcacttatgaacaaatttgggtttcaatggccagagagactgcgctgcgagcatttcccccgacatggggctgagcaaatatgcgtaggtcaaaaccactccgaggacggtgctcctgcgctgctgacaacggcgccaccacctggccttcagcctggggcaggcggaacccctggtgggcctggtggtggcggagcccctccacggtacgcaacactggagcatccgttccattgtcctagagtgctcaaggtgcctagctatctgtcgtataagtttctgggcgagcgggattgtgccgctccatgtgagccagcgaggccagatggatccatgttttttagtcaggaggagaccagatttgcacgcctatggatactgacctggtcagtactctgttgtgcctctactttcttcactgtgaccacctacctggtggatatgcagaggtttaggtatccagagaggccaatcatcttcctttccgggtgttacacgatggtgtcggtcgcttacattgccggattcgtgttgcaggagcgggtggtatgtaacgagcgcttcagcgaagatggatacaggaccgtcgtacagggaacaaagaaggagggctgtaccatcctttttatgatgttgtattttttttctatggcttcctccatctggtgggtaattctgagcctgacctggttcttagcagctggtatgaaatgggggcacgaggccattgaagccaattcccagtatttccacctggccgcttgggcggtgcctgccgtgaaaaccataactatcctagcaatgggccagattgatggcgatctcctatctggcgtgtgcttcgtcgggctgaactctctggaccccctaaggggctttgttctcgccccactgttcgtgtacctctttatcgggacatcttttctgctagcaggatttgtcagtctctttcgcattcggactattatgaagcacgacggaacgaaaaccgagaaactcgagcggctcatggtacggattggagttttcagtgtgctgtacaccgtcccggcaaccatcgtaatcgcatgctatttctacgaacaggcatttagggagcactgggaaagatcctgggtttcccaacactgcaaaagcctggctattccctgcccggctcattacacaccacggatgtcccctgattttaccgtctacatgatcaaatacctgatgacacttatcgttgggataacttccgggttctggatttggtccgggaaaacgttacactcatggcggaaattctacacccggttgaccaactcacgacacggcgagaccacagtgtag

SEQ ID NO: 223695 - DNA, 1926 bp, synthetic construct
  misc_feature 1..1926: note = Description of Artificial Sequence: Synthetic coding sequence
  source 1..1926: mol_type = other DNA
gcacgcggagtgtcagggtgcagcgtgaggcctcggcaggccagcggccaggcgcatcgacccctgcccaggcctgctagcccaactcttaggcccagggtgaagttcgccaaacggagggggcgaagacagcctcagcgtgggggaggcggagaggaggcccagtcaccaggttgggggcgtggtagggggggacgccaaggcgctggatggggagcggctgcgtccatgagacccaggagcgccttgcctaggttgcttctccccctgctcttactgcccgctgcagggcctgcccagttccacggggagaaggggatatccatccctgaccatggtttttgccagcccatttccattcccctttgtaccgacatagcctacaaccaaaccataatgccaaatctgctaggccacacgaaccaagaggacgcaggactcgaggtgcatcagttttatcccctggttaaagtgcagtgttcaccggagttaagattttttctatgttccatgtacgcccctgtgtgcacagtgctggagcaagccatccccccatgtcggagtatttgcgaaagggctagacagggttgtgaagcactgatgaacaagttcggcttccaatggcctgagaggctgcgttgcgaacactttcctagacatggggcagagcaaatctgcgtcggtcaaaaccacagcgaggacggcgctcccgctctgttaacaactgcacccccacccggattgcaaccaggcgcagggggtacaccaggaggacccggaggcggtggggcacctcctaggtatgcaaccctagagcatccgtttcactgcccacgcgtgcttaaggtgcctagttatttgtcttacaagttcctgggtgagcgcgactgtgcagctccatgtgagcctgcgcgtccagacgggagtatgttcttctcacaagaggagacacgctttgcacgcttgtggatactcacttggtccgtcctgtgctgcgcttccacctttttcacagttacgacctaccttgtcgatatgcaacgttttcggtaccctgagcgtcccattattttcctgagcggctgctataccatggtttctgttgcttacatcgctggctttgtcttgcaggagcgcgttgtgtgcaacgaaaggttcagcgaagacggctaccgcactgtggtgcagggcaccaagaaagaggggtgcactatcctgtttatgatgttatactttttttccatggcgtcttccatatggtgggtcatattgagtctaacatggttcctagcggctggtatgaagtgggggcatgaagccatagaggcgaacagccaatactttcatctggccgcatgggccgtgcctgcagtgaagactataaccatcctcgcgatgggccagatagacggcgacttactttccggagtgtgtttcgtcggattaaatagcttagaccccttgcggggtttcgtgttagcccctcttttcgtgtacctcttcatcgggacctccttcctgcttgcaggatttgttagtctattccggatcagaaccataatgaagcacgatggcactaagaccgaaaagctcgaacgtttgatggtgaggatcggggtattttccgttctgtataccgtgcccgcaacaattgtcatcgcatgctacttttatgagcaagccttcagagaacattgggaacggtcttgggtgagccagcactgcaagagtctcgcgatcccttgccctgctcattacactccgcgtatgagtcccgactttaccgtgtatatgatcaaatatctaatgacattaattgtagggatcacttcagggttttggatctggtctggcaagacgctgcacagttggcgcaaattctacacaagactgaccaactcacgacatggagagacaactgtttag

SEQ ID NO: 223696 - DNA, 2001 bp, synthetic construct
  misc_feature 1..2001: note = Description of Artificial Sequence: Synthetic coding sequence
  source 1..2001: mol_type = other DNA
atggcaatgacatggatcgtattctcactctggcctctcacagtttttatgggtcacatcgggggacattctctcttttcttgcgaacccattacactgaggatgtgtcaggacttaccttataacaccacgtttatgccaaacctgctcaatcattatgaccagcaaacggcagcactcgccatggaacccttccaccctatggtgaatcttgactgctcccgggacttccgaccttttctgtgtgcactttacgcccctatctgcatggagtatggaagggtcaccctgccttgccgacgcctgtgccagagagcgtattccgagtgtagcaagctgatggagatgttcggggtcccctggcccgaggacatggaatgctcaagattcccagattgcgacgaaccctatccacgactggtggatttgaatctcgcaggcgaacccacggagggtgccccagtggcagtccagagagactacggtttctggtgtccgcgtgaactgaaaattgatcccgacctcggttactcttttctgcacgtgcgggattgctcacctccatgccccaacatgtactttcgcagggaagagctgtcattcgcacgatatttcattgggctgatctcaattatctgtctgtcggcgacgctgttcacttttctcacctttctcatcgatgttacgcgcttcagataccccgagcgcccaataattttttacgcagtttgttatatgatggtgtccctgatatttttcattggcttcctgctggaggatagggtcgcctgcaacgcatccatccctgcacagtacaaggcctcaaccgtgacccagggctcacacaacaaagcatgtaccatgctcttcatgatactgtacttcttcacaatggctggcagcgtgtggtgggtcatcctgaccattacctggttcttagcggctgtccccaagtggggttccgaagcgatcgagaaaaaagccttgttgttccacgctagtgcttgggggattcccggtacacttaccatcattcttttggccatgaacaagattgagggagataacatcagcggcgtgtgttttgtaggcctctacgacgttgacgcactcaggtatttcgtgcttgcccctctttgcctgtacgtcgtggtgggagtgagtctgctcctagctggtattatcagcctaaatcgtgttcgcatagagatcccgcttgagaaagagaatcaagataagctagtgaaattcatgataagaataggggtgtttagcattttgtatctagtccccctgcttgtggtgatagggtgctacttctacgagcaggcgtatcgaggaatttgggaaacgacttggatacaggaacgctgccgtgagtatcacatcccgtgcccataccaggtaactcagatgtcgcgtcctgacttaatacttttcttaatgaaatacctaatggccctcatcgtaggtattccctctgtgttctgggtcggttctaaaaaaacttgcttcgagtgggcttctttttttcacgggaggcgtaagaaggagatcgtcaacgaaagtcgccaggtgctgcaagaaccagacttcgctcagtcgctcttgagagaccccaatactccaatcattagaaagagcagaggcaccagcacccaggggaccagtacccacgcctcatccacccaactcgcaatggtagatgaccagcgttctaaagccggaagcattcattccaaggtctccagttatcacggttctctgcatcggtctcgtgatgggagatacacaccttgtagctacagaggcatggaggagcggttgcctcatggcagcatgtcccggctaaccgatcactcacggcatagctctagtcacagactgaacgaacagtctcggcacagcagcattcgggatctgtctaacaatccgatgacacacatcacacatggcaccagcatgaaccgcgtcatcgaagaggacggaacgtcagcttag

SEQ ID NO: 223697 - DNA, 108 bp, synthetic construct
  misc_feature 1..108: note = Description of Artificial Sequence: Synthetic coding sequence
  source 1..108: mol_type = other DNA
atggctatgacttggatcgttttctccctgtggccactgaccgtctttatgggccacattggtggtcacagcctgttcagttgcgagccaattacgttgcgcatgtag

SEQ ID NO: 223698 - DNA, 2001 bp, synthetic construct
  misc_feature 1..2001: note = Description of Artificial Sequence: Synthetic coding sequence
  source 1..2001: mol_type = other DNA
atggcaatgacgtggatcgtgttcagcctgtggcccctgaccgtgttcatgggacatatcggcggacacagcctgttctcttgtgaacctattacactgagaatgtgtcaagatctcccatacaatactactttcatgccaaatttgcttaaccattacgatcagcaaacagctgccttggccatggaaccgtttcaccccatggtgaaccttgactgcagccgcgacttccgtccatttttatgtgcgctctacgcccctatctgcatggagtatgggagggtaactttaccatgccggcgtttgtgccagagagcatactcagaatgctcaaaactgatggaaatgttcggcgtcccatggcctgaggatatggagtgttcacgatttcctgactgtgatgagccttatcctaggttggttgatctcaacttagcaggtgagcccaccgaaggcgcacccgtggcagtgcagcgggactatggtttttggtgccctagggagctgaaaatcgatccagacttagggtatagttttttacacgttcgggactgtagcccaccatgtccaaatatgtatttccgccgtgaggagctttcctttgccagatacttcatagggctgatcagcattatatgcctgtccgctaccctgttcacatttctcactttcctcattgatgtgacgaggttccgataccccgagagaccaattatcttttacgctgtatgttatatgatggtttcactgatatttttcattggttttctgctggaagacagggtagcatgcaacgcttcaatccctgcccaatataaggcatccactgttactcagggcagccacaacaaagcttgcaccatgttatttatgattctatatttcttcacaatggccggtagtgtgtggtgggttatcctgacaatcacatggtttttggctgcggtccccaaatggggcagcgaggctatcgagaaaaaagctcttttgttccatgcaagcgcttggggcatcccgggaacactcacaatcatcctcctggccatgaataagattgagggcgataacatcagcggcgtgtgtttcgtcgggctgtacgacgtggacgctctgaggtattttgtcctcgcacccctgtgcctttacgtggtggtcggtgttagcctacttttagcaggtataatcagtctgaaccgcgtgagaatcgagattcctctcgagaaagagaaccaggacaagttagtgaagttcatgatccggattggagtttttagtattctgtatttggttcctctgttggtggtgatcggatgctacttttatgagcaggcatataggggcatctgggagacaacatggattcaggaaagatgtagagaataccatattccatgtccttaccaggttacacagatgagccggccagatctgatattgtttttgatgaagtatttaatggcactaattgtcgggattccgtcagttttctgggttgggtctaagaaaacctgttttgaatgggccagcttcttccacggcaggcggaaaaaggaaatagtaaacgagagcagacaagtcctccaagagccagactttgctcagtctctcttgcgggatcctaacaccccaattattcgaaagtcgcgcggaacctctacccagggcactagtacacacgcctcgagtacccagctggcaatggtggacgaccaaaggtctaaggcaggctccattcactccaaggtgagctcataccacggctccctccatcggtcccgggatggcaggtacacaccatgttcttatcgcggaatggaagaacggctgccacacgggagtatgtccagattaaccgaccattcccgccactctagcagtcaccgtctgaatgagcaatcaagacacagcagcattagggacctcagtaataatcctatgacgcacattacccatggcacgtctatgaacagggtgattgaagaagatgggacctcagcctag

SEQ ID NO: 223699 - DNA, 1614 bp, synthetic construct
  misc_feature 1..1614: note = Description of Artificial Sequence: Synthetic coding sequence
  source 1..1614: mol_type = other DNA
atggcctggcggggtgccggtccatcagtccccggagcacccggtggcgtgggcctctcactgggcctattgttgcagctccttttgttactcgggccagcacgcggattcggagacgaggaggagagacgttgtgatccaattcgcattagtatgtgtcaaaacctgggttataacgtaaccaagatgcctaacctggtaggccacgagcttcagacagatgctgagttacagctaactacctttacgcctctgattcagtacggctgctctagtcagctgcagttctttttgtgcagcgtgtatgtgccaatgtgcaccgaaaagatcaacattccaatcgggccatgtggtggaatgtgtctgagcgtgaagaggcgatgtgagccagttttaaaggaatttggtttcgcctggcctgagagcctcaactgctcgaaatttccgcctcagaatgaccacaaccatatgtgcatggaagggcctggcgacgaagaggtgcctctcccccataagacgcctattcagcctggcgaagagtgccatagtgttggcaccaactcagatcagtacatttgggtcaaacgcagtctgaactgtgttctcaagtgtggttacgatgccggattgtattctcgttctgctaaagagttcaccgatatttggatggctgtttgggcgtccctttgcttcatctctacggccttcaccgtactgacattcctcattgactcctctcgcttctcctaccccgagcggcctatcatcttcctgagtatgtgctacaatatctacagcattgcgtacattgttagactcacggttggcagagaacggatctcctgtgactttgaagaggccgcagaaccagtcctgatacaagaagggcttaaaaacaccggctgcgcgattattttccttctcatgtacttcttcggcatggcctcaagcatctggtgggtcatcctgacacttacttggttcctcgcggcagggctgaagtggggacacgaagccattgagatgcactctagctactttcacattgccgcttgggcaatccctgctgttaaaacaatcgtcatcctgatcatgcgcctagtcgacgctgacgaactgaccgggctgtgttatgtcggcaatcaaaacctggacgcgctgacaggttttgtggtggcacccctgttcacctaccttgtgatcgggaccttattcatcgccgctgggcttgtggctcttttcaagataagaagtaacctacagaaggacggtacgaaaaccgacaaactggagcgactgatggtgaaaatcggcgtgttcagcgtgttgtatactgtgccggcaacctgcgtgattgcatgctatttctacgaaatttctaactgggcgttgttccgctattcggccgacgacagtaatatggctgtagagatgctgaaaatcttcatgagccttctggtgggcattacttccggaatgtggatatggagcgcaaagactctccatacgtggcagaagtgcagcaacaggttggtgaactctggcaaggtgaagagggaaaaacgcggaaatggatgggtgaaacctgggaaggggtcggaaaccgttgtttag

SEQ ID NO: 223700 - DNA, 2121 bp, synthetic construct
  misc_feature 1..2121: note = Description of Artificial Sequence: Synthetic coding sequence
  source 1..2121: mol_type = other DNA
atggagatgttcacctttctcctcacttgcatttttctgccattgctgaggggtcacagtctgtttacctgcgagcccataacggttccccgatgtatgaaaatggcgtataacatgaccttctttccaaacctgatgggacactatgaccagagtatcgctgctgtggaaatggagcacttcctgcccctggccaacttagagtgcagtcccaacattgaaactttcctttgtaaggctttcgtgcccacttgcatcgagcagattcacgttgtgccaccatgccgaaagctctgtgaaaaagtgtattccgattgcaaaaagttgattgataccttcgggatccggtggcctgaggagcttgaatgtgaccgcctgcaatactgcgacgaaaccgtacctgttactttcgatccccataccgagttcctcggccctcaaaagaaaaccgaacaggtgcaaagggacatcggattctggtgtccaagacacctcaagacaagcgggggtcagggttacaagtttctcgggattgaccagtgtgctccaccctgtccaaatatgtacttcaagagcgatgaactcgaattcgctaaaagcttcatcggtaccgtttccattttctgtttgtgcgctactctgtttacctttctgactttccttatcgatgtgagaagattcaggtatccagaacggcctataatttactattcagtgtgctactccatcgtgagcttaatgtactttattggtttcctgctgggggacagtaccgcgtgtaataaagccgacgaaaagctcgaactcggtgatactgtcgtgctgggcagccagaacaaagcttgcacagtgctcttcatgttgctttatttcttcacaatggccggtacggtttggtgggtgattctcacaattacatggttccttgcagcaggacgcaagtggtcctgcgaggcaatcgagcaaaaggccgtctggttccacgctgtggcttggggcacccccggattcctgacggtgatgctgctggcgatgaacaaagtggaaggtgacaatatcagcggagtgtgcttcgtcggcttgtacgatctggacgctagtaggtacttcgtgctactacccttgtgtctgtgcgtctttgtcgggctctccttactcctagcaggcatcattagtcttaatcacgttcggcaagtgatccagcatgacgggagaaaccaggagaagctgaagaaattcatgatacggatcggagtcttctccggtctttatctggtgcctttagtgacccttctcggatgttatgtatatgagcaggtgaatagaatcacctgggagatcacatgggtttccgaccattgccgccagtatcatattccttgtccctaccaagctaaggccaaggctcggccagaactcgccctattcatgattaagtacctgatgacactaattgtcgggatctcagctgtgttttgggtgggtagcaagaaaacttgcactgagtgggcagggttttttaagcgtaaccggaagagggatccgattagcgaatcgcgcagggttctacaggaatcatgcgaattctttttaaagcataacagcaaggtgaaacataagaaaaagcattataaaccttctagccataagctgaaagtcatctctaaatccatgggcacgagcacaggtgcaaccgccaaccacggcacatctgctgttgccataaccagccatgattatctggggcaggagactttaaccgagatacagacaagccccgagaccagcatgagagaggtgaaagcagacggcgcttccacaccccgactacgcgagcaggattgcggagagcccgcaagcccagctgcctccatcagcagactttccggggagcaagttgacggtaaaggtcaagccggatccgtgagcgagtccgcgcgaagcgaaggaagaatctctccgaaatccgacataactgacaccgggctggctcagtccaacaatctccaggtgcctagttcgagcgaaccatccagcttaaaaggctcaacaagtctgctggtgcaccccgtcagtggagtgcgcaaagagcagggagggggttgccattccgacacctag

SEQ ID NO: 223701 - DNA, 2121 bp, synthetic construct
  misc_feature 1..2121: note = Description of Artificial Sequence: Synthetic coding sequence
  source 1..2121: mol_type = other DNA
atggagatgtttacctttcttctgacttgcatttttttgcctttgcttcggggtcactccctatttacgtgcgaaccaatcaccgtccctcgttgtatgaagatggcctacaacatgacttttttccccaatttgatgggacactatgatcagtctattgccgctgtcgagatggaacactttctgcccctggccaatttagaatgtagcccgaatattgagacatttctctgtaaagcatttgtcccaacttgtatcgagcagatacacgtagtgccaccctgcaggaagctgtgcgaaaaggtttacagtgactgcaaaaaacttatcgataccttcggcataagatggcctgaggaactggaatgcgatcgccttcagtactgcgatgagactgtcccagtgactttcgacccgcatactgaattcctcggtccacagaaaaaaaccgagcaggtgcagcgggacatcggattttggtgcccacggcatcttaaaacatcaggcggacaaggctataagttcctaggcattgaccaatgcgcgccaccgtgccccaatatgtatttcaagtctgatgagctagagttcgccaaatcttttatcggcacagtgtcgatattctgtctttgcgctactttgtttaccttcctgaccttccttatagatgtcagacgattccgctaccctgagaggccaataatctattattccgtgtgctattcaattgtttctctcatgtactttatcggatttctgctgggggattccactgcatgtaataaggccgacgagaagctggaattaggagacacagtagtactggggtctcagaacaaggcgtgtacagtgctctttatgctcctttatttttttacaatggcaggcactgtatggtgggtaatattaacaatcacctggtttttagccgcaggcaggaaatggtcctgcgaggctattgaacaaaaagcagtttggtttcatgccgtcgcatggggcacccccggtttcctcaccgtgatgttactggccatgaacaaagttgaaggagacaacataagcggagtctgctttgtagggctgtatgatctggacgcatcacgatatttcgtcctccttcctctgtgtctctgtgtgtttgtcggactgtcccttctgctggcaggcattataagtctgaaccatgttagacaggttattcagcatgacgggaggaaccaggagaagcttaaaaaatttatgataagaataggcgttttcagcggattatacttggttccactggtcacactcctgggttgttacgtctacgagcaggttaaccgcataacctgggaaatcacttgggtgagcgaccactgtagacagtatcatatcccgtgcccttaccaggctaaggcaaaggctcggcctgagctggccctctttatgatcaaatatttaatgacactcatcgtcgggattagcgccgtgttttgggtggggagtaaaaagacatgtacagagtgggccggtttctttaaacgcaatcgaaagcgcgaccccatttccgagagtaggagagttctccaggagtcttgcgagttctttttgaaacacaactccaaggtgaagcacaaaaaaaagcactacaaaccttcttcccacaaattgaaggttattagcaaatcgatgggcacaagcacaggcgcaacagcgaaccatggcacttccgctgtagcaattaccagtcatgattaccttggtcaagaaaccctgaccgaaattcaaacatcacctgaaaccagtatgcgtgaagtgaaggcagacggcgcttccactccacgcctgcgcgagcaggactgtggtgaaccagcttctcctgcagcttcgatcagccggctgagtggggagcaggtggacggtaaaggccaagccggttctgtgagcgaatccgctcggagtgagggacgtatttccccaaagtcagacatcaccgacacgggtctggcccagagtaataacctgcaggtcccgtccagctcagagccaagcagcctgaaggggtctacatctctcctcgttcacccagtgtcaggggtaagaaaggagcaaggaggtggatgccactcagatacttag

SEQ ID NO: 223702 - DNA, 2025 bp, synthetic construct
  misc_feature 1..2025: note = Description of Artificial Sequence: Synthetic coding sequence
  source 1..2025: mol_type = other DNA
atgaaaatggcatacaacatgacgttctttccaaatctgatggggcactacgaccaaagcatcgccgctgtggagatggaacacttcctccctcttgcaaacctggaatgtagccctaacatcgaaacattcctttgtaaagcttttgtacccacatgtatagaacaaatccacgtggtccctccttgcaggaagctgtgcgagaaggtgtactcagactgcaagaaacttattgatacatttggtatacgatggcctgaggagcttgaatgtgacagactgcagtattgtgacgaaacagtccccgtcaccttcgatccacacacggaatttctaggaccacagaagaagacagagcaggtgcagagagacatcgggttctggtgccctcggcacctgaagacgtcaggcggtcaaggatataaattcctagggattgaccaatgtgcacctccttgccccaacatgtacttcaagtctgatgaactggagttcgccaagagcttcatcggaactgtgtccattttttgcctgtgcgctaccctttttacattcttaacttttctgatagacgtacggcgatttcggtacccagagaggcccatcatatactattcagtgtgctacagcattgttagcttaatgtacttcattggattcctcttgggagactccactgcctgcaataaggctgatgagaagctggagttgggcgacaccgtggtcttagggtcacagaataaggcatgcaccgtgctctttatgctgctttatttcttcactatggccggaacagtgtggtgggtcatcctcactattacttggttcctggctgcaggaagaaagtggtcatgtgaagcaatcgaacagaaagccgtttggtttcatgctgtcgcctggggtacccccggatttctgaccgtgatgcttcttgcgatgaacaaagtagaaggcgataatatctctggggtctgcttcgtcggtttgtacgatctggacgcctcccggtatttcgtcctcctgcctctgtgcctttgcgtgttcgtcggcctttctctactcctggccggtatcataagcctgaaccatgttcgacaggtgatccagcacgacgggcgaaaccaggagaaattgaaaaaatttatgattcggataggagtttttagtgggctgtacctggtccccttggtcaccttgctgggatgctacgtctacgagcaggtaaaccggatcacttgggagatcacctgggtctctgaccactgccgccaataccatatcccatgtccctaccaggcgaaggcgaaagctcgcccagaattggccctattcatgattaagtatttaatgactttgatcgttggaatcagcgccgtcttctgggtgggctccaaaaaaacgtgtacggagtgggccggtttctttaagaggaatcgcaagcgggacccaataagtgagtcgaggcgtgtgctccaagagtcgtgtgaattctttctgaagcacaactccaaggttaaacataagaaaaagcattataagccatcttcccataaactcaaggtcattagtaaatctatgggcacgagtacaggagcaactgcaaatcatgggacatcagccgtagccatcacaagccatgactatttaggtcaggaaacccttacagagatccagacttcacctgaaacctccatgagagaggtaaaagctgacggagcaagcaccccacgcctgcgtgagcaggattgtggtgagccagcgagcccagccgcatcaattagcagactgtcaggtgaacaagtggatggcaagggtcaggctgggagtgtcagtgagagcgccaggtcagagggtaggataagtccaaaatctgatattactgacactgggcttgcccagtccaacaacttgcaggttccatcatcgagcgagccctcctctctgaaagggagtacatctcttcttgtgcacccagtgtcaggagtgcgcaaagaacagggcggaggatgccacagcgacacttag

SEQ ID NO: 223703 - DNA, 1956 bp, synthetic construct
  misc_feature 1..1956: note = Description of Artificial Sequence: Synthetic coding sequence
  source 1..1956: mol_type = other DNA
atgctagcccagcactttctacctctggcgaatctggagtgctcccccaatattgaaacatttctgtgtaaggcttttgtgccaacatgcattgagcagattcacgtggtgcccccatgtcgaaagctctgtgagaaagtgtactcagattgtaaaaaactgattgatacattcggaatccgttggccagaggagctcgaatgcgaccgcttgcagtattgtgatgaaacagtgccagtaacctttgatcctcacacagaatttcttggcccacagaaaaaaacggagcaggtccaacgggacattgggttttggtgtcccaggcatctgaaaactagcggtgggcaaggttataaatttttgggtattgaccaatgcgctccaccttgccctaacatgtacttcaagtccgacgagctagagtttgctaaatccttcataggaacagtgagtattttctgtctgtgtgctaccttgtttacattcttaacatttttaatcgatgtcagacgctttagatacccagagcgccctatcatctattattccgtctgctacagtatagtgagcctcatgtactttatagggttcttgttaggagacagtaccgcgtgtaataaggctgacgagaaactggaactcggagatactgtggtcctgggctcacagaacaaagcctgcaccgtgcttttcatgctcctctattttttcacaatggccggaactgtttggtgggttatattgaccatcacctggttcctggcagccggtaggaagtggtcttgcgaagccattgagcaaaaagccgtctggtttcacgcggtagcatggggcactccaggctttttgactgtgatgctgttagcgatgaacaaggtcgagggggataatatttctggggtctgctttgtgggcctgtacgatctcgacgcgagcagatacttcgtactgctgcctctgtgcctgtgtgtgtttgttggcctgtcattattactcgctggtatcataagccttaatcatgttagacaggtgatccagcacgacggtcgcaatcaagagaaattgaagaagttcatgataagaatcggggtgttttctggcctttacctagtgccactagtgacgcttctcggctgctatgtttatgagcaagtcaatcgaatcacgtgggagatcacgtgggtgtcagatcattgcaggcagtaccacattccttgcccctaccaggctaaagcaaaggcaaggccagagctggccctgttcatgatcaagtaccttatgactctgattgttggcatttcagccgtcttctgggttggtagcaagaaaacttgtactgagtgggcaggctttttcaagaggaatcgcaaacgggatccaataagtgagtccagaagggtcttacaggaaagttgtgaattttttctgaagcataattcaaaggtcaaacataaaaaaaaacactataaaccctccagtcacaagctgaaagtgatatcaaaaagtatgggcacctcaacaggagccaccgcaaaccatggcacttccgctgtagccattacatcgcatgactatttgggtcaggagaccctgacagaaattcagaccagtcctgagactagtatgcgggaagtgaaggctgacggcgcttccacgccgcgattaagggagcaagattgcggagaaccggcttcaccggcagcctcaatctctcgcctttcgggcgaacaggtggacggtaagggccaggccggaagcgtgagtgaatcggcaaggtctgaaggcaggatcagtccaaaatcagacatcactgacaccggacttgcacaatccaacaacctccaggtaccgagctccagtgagcccagcagtttaaaaggctctactagcctgctggttcacccagtcagcggcgtgcggaaggaacagggcggtgggtgccacagcgatacctag

SEQ ID NO: 223704 - DNA, 1206 bp, synthetic construct
  misc_feature 1..1206: note = Description of Artificial Sequence: Synthetic coding sequence
  source 1..1206: mol_type = other DNA
atgacacgggtgttgcctcgctggaagtggagctgcgaggccattgagcagaaggctgtgtggtttcacgcagttgcttgggggacacccggattccttactgtgatgctgctggcaatgaataaggttgagggggataacatctctggagtgtgtttcgtcggattatatgacttggacgcttcaaggtattttgtgcttctccctctgtgcctttgtgtgtttgttgggctgtccctgctgttggcaggcatcatctcacttaatcatgtgcgccaggtgatccagcacgatggtcgcaatcaggaaaaactgaagaaatttatgatccgcatcggcgtgttctctggcctttatctggttcctctggtcactctgctcggatgctatgtgtacgaacaggtaaaccgcatcacatgggagataacgtgggtgtcagaccattgcagacagtaccacatcccatgcccatatcaggcaaaggcaaaagctcggccagagcttgccctgtttatgattaagtacctgatgactcttatcgttggaatcagcgcagttttctgggtgggcagtaagaaaacatgcaccgaatgggcgggattttttaaacgcaacaggaaaagagacccgatctccgagtcccggagggtcctgcaggagagctgcgaattttttttgaaacataattccaaagtgaaacataaaaagaaacattacaaaccctctagtcacaaactgaaagttatcagcaaaagcatgggcacatctaccggtgccaccgccaaccacggcacatcagcagtcgccattacttcacatgattacttgggacaagaaacattgacagaaattcagacctctccggagacgtctatgcgagaggtgaaagctgatggggctagtacacccagactccgggaacaagattgtggagagcccgcaagcccggctgcctcaattagccggctgagtggtgagcaggtggacggaaagggacaagctggaagcgtgtccgaaagcgcgaggtccgagggacggataagcccgaagtcggacatcaccgacacgggactggctcaaagcaataatttacaggttcctagctccagcgaaccatcatccctgaagggctctactagccttctggtgcacccagttagtggagtaaggaaagagcagggtgggggatgccattcagatacctag

SEQ ID NO: 223705 - DNA, 2085 bp, synthetic construct
  misc_feature 1..2085: note = Description of Artificial Sequence: Synthetic coding sequence
  source 1..2085: mol_type = other DNA
atggaatggggatatttgctggaggtcaccagcctgctcgcagctctggccctcttacagcggtcctcgggagcggcagcggcaagcgcgaaggaactggcatgtcaggaaatcacggtgcccctttgtaagggcatcggatataattacacctatatgcctaatcaatttaaccacgatacccaggacgaggcaggacttgaagtccaccagttctggccattagtggaaatacaatgctctccagatctaaaatttttcctttgttcgatgtatacccccatctgccttgaagactacaaaaaacctcttcctccttgcagaagcgtttgcgagcgggcaaaggccggatgtgcacccttgatgcgacagtacgggtttgcttggccagatcgcatgaggtgcgatcgcctgcccgagcaaggcaatccagatactttatgtatggattacaatcggactgacctgacaaccgccgcaccgtcccctcctcggcgactgccccctccccctcccggagaacagccaccttcaggaagcggccacggcagacccccaggagccagaccccctcaccgtggcggaggtcgtggagggggagggggtgatgcagctgctccccctgcaagggggggaggcggagggggaaaagcgcgtccgccagggggaggggctgcaccatgcgaaccagggtgtcagtgcagagcccctatggtgtccgtttctagcgaaagacatcctctctataatcgggtgaaaacaggacaaatcgctaactgtgcgctcccttgccataatcctttcttctcacaggacgagagagccttcaccgtattttggatcggactgtggagtgtactctgctttgtgtccacattcgctacagtgtccactttcctgatagatatggagaggtttaaatatccagagagaccaatcatctttctgtccgcctgttatctgttcgtcagtgtcggttacctggtgcgtctggtagccggtcatgaaaaagtcgcatgctctggcggagcaccaggggcaggcggtgccggaggggctggaggggctgctgccggtgctggagcagctggtgccggagcaggagggcctggcggtcgcggtgaatacgaagagctgggtgcagtggaacagcacgtccggtatgagacaaccggaccagcgctgtgtaccgttgttttcttactggtttatttttttggaatggcatcctccatttggtgggtcatcctgtcacttacttggttcctcgcggcaggcatgaagtgggggaatgaagcaatcgcaggctactctcagtactttcatctcgcagcatggctggtgccatcagtgaaaagtatcgccgttttagctctgagctcagtagatggtgaccctgtcgccggaatttgttatgtgggcaatcagtctttagacaacctaaggggcttcgtattagccccactagtcatctatctgttcattggaaccatgtttctcctggccggatttgtgtctctattcaggatacggtccgtgattaagcaacaggacggcccaactaaaactcacaaattggagaagctgatgatacgactcgggctcttcacggtcctctatacggtgccagctgcagtggtggtagcctgcctgttttacgaacagcacaaccgccctagatgggaggctacacacaactgcccctgcctgcgggatctgcagcctgaccaggctcgacgcccagactacgctgtgttcatgttgaaatatttcatgtgccttgtcgtgggcattacatctggggtctgggtgtggtcgggaaagaccctagaatcctggcggtcactgtgtacgagatgctgttgggcaagtaagggcgctgcagtgggaggtggtgctggtgcaacggccgctgggggtggaggtggacctggcggtgggggaggtggaggacctggcggtggcggaggtccgggaggaggcggtgggagcctgtactctgacgtgtctaccggccttacgtggcgatccggaaccgcctcctcagttagttacccgaaacagatgcctctgtcgcaggtgtag

SEQ ID NO: 223706 - DNA, 1776 bp, synthetic construct
  misc_feature 1..1776: note = Description of Artificial Sequence: Synthetic coding sequence
  source 1..1776: mol_type = other DNA
atggccgtcgcgccattgagaggcgcactcctactgtggcagctgctggcggctgggggagccgctcttgagataggtaggttcgacccggagagagggagaggcgctgccccttgccaagcggtcgagattccgatgtgccggggtatcggctataatctgactcgtatgcccaatctgttaggacacaccagccaaggggaggccgctgctgagctagctgagttcgcgccattagtgcagtatgggtgtcattcccatctacgcttttttctctgcagcctgtatgctcctatgtgtacagatcaggtttctaccccgattcccgcatgtagacccatgtgcgagcaggctagattacgatgtgccccaattatggagcagttcaacttcggctggccagatagcctcgattgcgccagactgccaacccgcaacgatcctcacgccttatgcatggaggcccctgagaatgctacagcgggacccgctgagccacataagggcctaggtatgctcccagtggctccacggcctgctcgcccaccaggcgaccttggacctggcgctggcggatcgggaacatgcgagaatccagagaagttccaatacgtagagaagtcacgctcttgtgctccgagatgtgggcctggagtggaagtgttttggtctaggcgcgataaggattttgcactggtgtggatggccgtgtggtcagccctgtgtttcttctcaacggctttcacagtgctgactttcctgctcgagccccaccgatttcagtaccccgagcgacccatcattttcctgtctatgtgctataacgtgtatagcctggctttcttgatccgggcagtagctggggcacaatctgtcgcatgtgatcaggaagccggagctttgtacgtcattcaagaagggctggaaaacaccgggtgtacgttggtatttctcctgctttattactttgggatggcttcttctctgtggtgggtcgtgctgaccttgacctggttcctcgctgccggtaagaagtggggacatgaggctatagaggcacacggcagctatttccacatggcggcttggggcctccctgccctgaaaaccattgtcattctcacactgaggaaagtcgcaggcgatgagctgacagggctgtgttacgtggctagtactgacgccgctgccctcaccggctttgttcttgttcccctgtccggttacctggtgctgggtagctctttccttctgacgggattcgttgccttgtttcatattagaaagattatgaagacagggggaaccaacactgaaaagctggagaaattgatggttaaaatcggcgtttttagcatcctctacacagtgccggctacctgcgttatagtatgctatgtgtacgagcggctgaatatggacttttggagactaagagccactgaacagccttgcgctgcggctgccggtcctgggggtaggcgagactgtagtttaccaggaggaagcgtgcccacagtggccgtgttcatgctgaaaatctttatgagcctggtggtcggaattacctctggggtgtgggtctggtcctcaaaaacattccagacttggcagagcctgtgctaccgcaagattgcggctgggcgtgctagagctaaagcgtgcagggccccaggcagctatgggagaggaacccattgccactataaggccccaaccgtcgtgctgcatatgactaagacagatccctctttggagaaccccacacacctgtag

SEQ ID NO: 223707 - DNA, 978 bp, synthetic construct
  misc_feature 1..978: note = Description of Artificial Sequence: Synthetic coding sequence
  source 1..978: mol_type = other DNA
atggtttgtggtagccccggtgggatgttattactccgcgctggcctgctcgctctcgcagcgctgtgtcttctgcgcgtcccaggcgcaagagccgctgcctgtgagccggttcggattccgctttgtaagtcactcccttggaacatgactaagatgcccaaccatctccatcactctacgcaagcaaatgccatacttgctatcgagcagtttgagggacttcttggcacacactgctctccagatctcctgttcttcctgtgcgctatgtacgcacccatttgcactatagattttcagcatgagcctatcaagccctgcaagtccgtctgtgagcgcgctcgccaaggctgcgaacctattcttatcaagtacagacacagctggcctgaaaatttggcctgcgaggagctgcccgtgtacgatcgcggtgtgtgcatcagtcccgaagctattgtgacagccgacggcgctgatttcccgatggactcctccaatggaaactgccgcggtgcatcatcagagcgttgcaagtgcaagccaatcagagccacccagaagacttatttcagaaataactacaactacgtgattagggcaaaggtcaaagaaatcaaaaccaaatgccatgacgtgactgctgtagttgaggtgaaggaaatactaaagagcagcctggtgaatatcccacgagacaccgttaatctttatacttcatctgggtgtttgtgcccaccccttaacgtgaatgaggagtatattatcatgggctacgaggatgaggagaggtctcgcctcctcctggtcgaaggcagcattgctgagaaatggaaggaccggctcggcaagaaggtgaaacgttgggacatgaagctccggcacctgggcctgagtaagagcgacagtagcaacagcgattcaactcagagtcagaagtccggtaggaactccaacccgaggcaggcgcgaaactag

SEQ ID NO: 223708 - DNA, 930 bp, synthetic construct
  misc_feature 1..930: note = Description of Artificial Sequence: Synthetic coding sequence
  source 1..930: mol_type = other DNA
atggaagaactgctaaggagagaattggggtgcagtagtgttcgggcaaccggccattcaggcggaggctgtatctctcagggaaggagttacgatacagaccagggtagggtgtttgtcaaggttaaccctaaagccgaggcaaggcgcatgtttgaaggcgagatggcatccctaacagcaatattgaagaccaatacagttaaagtccccaagcccattaaggttctagatgccccaggtggtgggagcgtgctagtaatggagcatatggatatgcggcacttgtcgtcccacgcggctaagttgggcgctcaattagccgacctgcacttagacaacaagaagttaggtgaaatgcgtcttaaggaagccggaaccgttggaagggggggtggccaggaggaacgcccattcgttgctaggttcggcttcgatgttgtgacatgctgcggttacctgccccaggtcaatgattggcaggaggactgggtcgtgttctatgcaaggcagaggatccaaccccagatggacatggtggaaaaagagagcggagaccgagaggcactccagctctggtccgcactgcagttgaagatccctgatctgtttagagacctcgagatcattcccgctttgctccatggcgatttgtggggaggtaatgtggcggaggatagttcaggccctgtaattttcgacccagcaagtttctatggacacagcgagtatgagcttgcgattgccggaatgttcggaggcttttcttcctctttttactccgcctatcacggaaagatccctaaagcacccggtttcgaaaagagacttcagctgtatcagttgtttcattacttgaaccattggaatcactttggcagtggttacaggggatcgtccctaaacattatgagaaatcttgttaaatag

SEQ ID NO: 223709 - DNA, 780 bp, synthetic construct
  misc_feature 1..780: note = Description of Artificial Sequence: Synthetic coding sequence
  source 1..780: mol_type = other DNA
atgttcgagggtgaaatggcatcgctcactgcaattctgaaaactaacactgtaaaggttcctaaaccaatcaaagtactggacgcccctggaggaggatccgtccttgtgatggagcatatggatatgaggcatctatcatcccacgctgcaaaacttggggctcagctcgcggatcttcatctcgacaataagaaacttggcgaaatgcgcctgaaagaggcaggcacagtcggcaggggaggtggccaggaagagcgtccattcgtagcgagatttggtttcgacgtcgtgacatgctgcgggtatctgcctcaagtgaatgattggcaggaggactgggtagtattctatgccaggcagaggattcaacctcaaatggatatggtggagaaagagtccggagacagagaagccctgcaactgtggagcgccttacaactcaagatccctgatctgttccgcgatttggagattatccctgctttgttacatggcgacctgtggggaggaaacgtagcggaagactcctcggggccagtcatttttgatcccgcaagcttctatggccactccgaatatgaattagccatcgcaggcatgttcggagggtttagctcctctttctacagtgcatatcatggaaagatccctaaggcccctggttttgaaaagaggctacagttgtaccagttgttccattacctaaaccattggaaccactttgggtccggctaccgtggatctagcctcaatataatgcgcaatctcgtgaagtag

SEQ ID NO: 223710 - DNA, 1017 bp, synthetic construct
  misc_feature 1..1017: note = Description of Artificial Sequence: Synthetic coding sequence
  source 1..1017: mol_type = other DNA
atggccgatcaagcccctttcgatacggacgtaaataccttgacacggttcgtcatggaggaaggtcgcaaggctcggggaactggcgagctgactcagctcctgaatagtctgtgtacggccgtgaaagctattagctccgctgtccgcaaagctggcattgcccacctgtatggaatcgccggttccaccaatgtgacaggggaccaggtgaagaaactggatgttctctctaacgatctcgtgatgaatatgttaaagagctctttcgcaacttgcgtgctggtgagcgaggaagataagcatgctattatagtggaaccagagaaaagaggtaaatatgttgtttgttttgaccccctggacggttcctccaacatcgactgtctggtttccgtgggtacgatctttggcatttatcggaagaagtcaacagacgagccctctgagaaggatgccttacagccaggtcggaacctggtggctgctgggtacgccttgtacggctctgcaacaatgctggtacttgctatggactgcggcgtgaactgctttatgctcgacccggcaattggcgagtttatccttgttgataaggacgtgaagatcaagaagaaaggaaagatctacagtctgaacgagggctatgcacgcgatttcgatcctgcagtgaccgagtacattcaacgaaagaagtttccaccagataacagtgcgccatacggcgctcgatacgtgggctccatggtcgccgatgtacaccggaccttagtgtacgggggaatttttctttaccccgcaaacaagaagtcccctaacggcaagctccggctgctgtacgagtgtaaccccatggcctacgtaatggagaaggctggcggaatggccactacaggcaaggaagccgtgctggacgtgatcccaacagacatccaccagagagcccctgtcattttaggctctcccgatgacgtactggagtttctaaaagtttacgaaaagcactctgcccagtag

SEQ ID NO: 223711 - DNA, 456 bp, synthetic construct
  misc_feature 1..456: note = Description of Artificial Sequence: Synthetic coding sequence
  source 1..456: mol_type = other DNA
atgctgaagagttcttttgctacctgcgtgctggtttccgaagaggacaaacatgcaatcatcgttgaacccgagaaacgaggaaagtacgtggtgtgtttcgaccctctcgacggatcttccaacatcgattgtttggtttccgtgggcactatatttggaatttataggaagaagagtacggatgagccatctgagaaagacgcgttacagccagggaggaacctggtggcggctggctatgccctttacggcagcgctactatgctggtgctcgcaatggactgtggcgtgaactgttttatgcttgatcctgcaattggggagtttatattagtcgataaggatgtcaagatcaaaaagaaaggaaagatttacagtctaaacgaagggtatgcgcgtgactttgaccctgcagtgaccgaatatatccagaggaaaaaattccctccctag

SEQ ID NO: 223712 - DNA, 1017 bp, synthetic construct
  misc_feature 1..1017: note = Description of Artificial Sequence: Synthetic coding sequence
  source 1..1017: mol_type = other DNA
atggctgaccaagccccttttgatacagatgtgaatacactgacccggttcgtgatggaagagggcaggaaagcaaggggaaccggtgaacttacacagttgctgaattcactatgcactgccgtcaaggccatctccagtgcggtccggaaagcgggaattgcccacctgtatgggatagccggaagcacgaatgtaaccggggaccaagtgaagaaactggatgtactctctaatgatctagtaatgaatatgttgaaaagttcttttgccacatgtgtgctcgtgtctgaggaggacaagcacgctattatagtcgagccagaaaaacggggaaaatatgtggtctgttttgatcccctcgacgggtcctccaacattgattgcctggtgagcgttggaactatattcggaatatatcggaagaaatctaccgacgagccgtccgagaaggacgctctgcagccaggcagaaatttggtggccgctggctatgctctgtacggatctgcaaccatgctggttctcgccatggactgcggggtgaactgcttcatgctcgatccagctataggggaattcattttggtggataaggatgtaaaaataaaaaagaaaggcaaaatttattcactgaacgagggctatgcccgagacttcgacccggcagtgaccgagtacatccagaggaaaaagttccctcctgacaattccgcaccctacggagccaggtacgtgggctcaatggtggccgacgttcacaggaccttggtgtacggaggcatcttcttatacccagctaataagaagtccccaaatggaaaattgaggttattgtatgaatgcaacccaatggcgtacgtgatggaaaaggcaggcggaatggccaccacgggcaaggaagccgtattggacgtgattcctacagacatccaccagcgtgctccggtgatcctggggtctcctgacgacgtgcttgagtttctgaaggtctatgagaaacattctgctcagtag

SEQ ID NO: 223713 - DNA, 1020 bp, synthetic construct
  misc_feature 1..1020: note = Description of Artificial Sequence: Synthetic coding sequence
  source 1..1020: mol_type = other DNA
atgacagacagatctccctttgagaccgatatgctgactttaacacgatatgtcatggagaaaggcaggcaggcaaaggggacaggcgagctgacccagctgctgaacagcatgctaacggcgattaaagccatcagcagtgccgtgcggaaagcaggattggcacatttatacggcatagccggatctgtcaatgttacaggggatgaggtgaagaagctagatgtcctctctaatagcctggttatcaatatggtgcagtcgtcctactccacctgcgtgcttgtgtccgaggaaaataaggacgccatcataaccgctaaggaaaagaggggcaagtacgtggtgtgttttgatccactcgatggatcttccaacatcgactgtcttgctagtatcgggacaatcttcgccatttacaggaaaacaagcgaggatgaacctagtgaaaaggatgccttacaatgcggacgcaacatcgtagcagctgggtatgcactgtacggcagcgcaactttggtggccctgtctactggacagggcgtcgacctatttatgctcgacccagctctaggagagttcgtacttgtggagaaagacgtgaaaatcaagaagaagggcaaaatttattctctaaatgaaggatacgcaaagtacttcgatgcagctactaccgaatatgtgcagaaaaagaaattcccagaggacggttctgctccttatggagcaaggtacgtgggctcaatggtggccgatgtgcaccgaaccttggtgtatggcggtatattcttatatcccgcaaatcagaagtcgccgaaaggcaaattacggctactgtacgaatgtaaccctgtagcatacattatcgagcaagccggtggcttggcgactacaggcactcagcccgttctcgatgtgaagccagaggctattcatcagcgtgttcctctgatcctgggatcccccgaagacgtacaggaatacctcacgtgcgtccaaaagaatcaagcagggtcctag

SEQ ID NO: 223714 - DNA, 837 bp, synthetic construct
  misc_feature 1..837: note = Description of Artificial Sequence: Synthetic coding sequence
  source 1..837: mol_type = other DNA
atgggaaaaggcaatgaagattcagatctgcactgttctagcattcagtgctctaccgaccagccaccattccagcagatttctttcactgagaaaggaagcgacgagaagaaaccgtttaaagagaaagggaaaacagctttctcgcacagctcagagaagcacatccagcggcaggggtctgaacctaatccaaacaaagaaaatagcgaagaaactaaactcaaagcaggaaattctacagccggtagcgaaccagagtcgtcaagctatcgggagaactgccggaagcggaagatgagctcaaaggatagttgtcaggataccgcaggcaattgccccgagaaggaatgtagcctatccttgaacaaaaagagtcgctcgagtaccgccgtacataatagcgaaatccaagaaacctgcgatgcccatcataggggtcacagtagagcctgcaccggccactcaaagcgtcaccggtcaagggctctgggcgttcaaacacccagcatacgcaagagcctggtgacatccgtcagggccatgagcgaggctgtataccaggatctggcccaggtatgggcacagcagatccacagtcccctgacatgcgaacaactgaccctgttgacccgcttgagaggccctctctgcgcacaggtgcagacgctgtatagtatggcgacccaggcagcgtacgtgtttccagccgaaagttggctcgtgcctgctacgctgcccggtcccggtgagagtgctctcgacagggaagcacacccattccctgggcaagagataacggagacagtgtccggctccgatgaagcgaagctttag

SEQ ID NO: 223715 - DNA, 984 bp, synthetic construct
  misc_feature 1..984: note = Description of Artificial Sequence: Synthetic coding sequence
  source 1..984: mol_type = other DNA
atgggaagaacgagcaaagacaaacgcgacgtttactaccggctggccaaggaaaatggttggcgggctcgttccgcatttaagttgctgcaattggacaaggagttccagctgttccagggcgttactcgcgctgttgatttatgtgccgcacccggaagctggagccaggttctgagtcagaaaatagggggtcagggctccgggcacgtggtggcagtggatcttcaggctatggcaccgctgcctggagtggttcagatccaaggggacatcacccagctttccacagccaaagagatcattcagcactttaagggttgtcccgctgacctagtggtatgtgacggagcaccagatgtgacgggcctccacgacgttgacgagtatatgcaggcccaactgttgcttgccgcactgaacatcgctacacatgtgttgaagcccggtggctgcttcgtcgccaagatcttcagggggagggatgtcacactcctatattctcaattgcaagtgtttttctctagcgtgttatgtgctaagccacgaagtagccgaaacagttcaatcgaggcatttgcagtgtgtcagggatatgaccccccagaagggttcatcccggatctgtctaagccccttcttgatcactcctacgatttcaaccagctggatggtcccacacgaataatcgtcccatttgtaacttgtggagacctgagctcatacgactctgaccggtcctatccactggatctagaaggagggagcgaatacaagtacacaccacctacgcagcctcctataagtcctccttatcaggaggcatgcactctgaaacggaaaggacaattagcgaaggagataagacctcaggactgtccaatttcacgcgtcgatacctttccccaaccactcgccgctccccagtgtcatacactgctcgcccctgagatggaggataacgagatgtcctgctctccctag

SEQ ID NO: 223716 - DNA, 990 bp, synthetic construct
  misc_feature 1..990: note = Description of Artificial Sequence: Synthetic coding sequence
  source 1..990: mol_type = other DNA
atgggccgaacgtccaaggacaagcgggacgtttactaccggctggctaaagagaacggttggagagcacgcagtgcctttaagctgctccagctcgacaaggagtttcagctcttccagggcgttacgcgtgctgtggacctttgtgccgctcccggaagctggtcgcaagtcctgtcccagaaaataggtggacagggttctggccatgtggtggccgtggatctccaggcaatggctccattgccgggtgtggtccagattcaaggcgacattacccaactatccacggctaaggaaatcattcagcattttaaaggctgcccggctgacctggtggtgtgcgatggagccccagacgtgactggcctacacgatgtggacgagtacatgcaggcacaactactgctggcagcactgaacattgcaacacacgttttgaaacccggaggctgctttgttgcaaagattttccgtggccgtgacgtgacccttctgtatagccaactgcaggttttcttttccagcgtgctttgcgctaaacccagatcatcccgcaatagctctatcgaagcctttgcagtctgtcaaggatatgacccaccagaaggctttattcccgacttgagtaagcctctgctggaccattcatacgacccagatttcaatcagctagacggaccaactagaattattgttccattcgtaacgtgcggcgatctgtctagctatgattccgacagaagttatcctctagacctcgaagggggttctgaatataagtataccccccctacccagccgccaattagtccgccttatcaggaagcctgcactctgaagcgaaagggtcagttggcgaaagaaatacgtcctcaagactgccctatctccagagttgatacctttccgcagccactcgctgctcctcaatgccacaccttgctagctcctgagatggaggacaacgagatgagctgttccccctag

SEQ ID NO: 223717 - DNA, 579 bp, synthetic construct
  misc_feature 1..579: note = Description of Artificial Sequence: Synthetic coding sequence
  source 1..579: mol_type = other DNA
atggccttgaatattgcaactcacgtactgaaacctgggggttgtttcgtcgcaaagatcttccgaggtcgcgacgttaccctgctatactcgcagctgcaggtattcttcagtagtgtactatgtgcgaagccccgtagctcacggaactcatcaattgaggctttcgctgtttgtcaggggtatgaccccccagagggtttcatacctgacctgtctaagcccctgctcgaccactcctatgaccccgatttcaatcaactggacggacctactagaataatcgtgcccttcgtgacatgcggcgatctgtcttcctacgacagtgacaggagctatccccttgacttggagggaggaagcgaatataagtatactcctcccacccaaccccctataagcccaccataccaagaagcatgcactctcaagcggaagggacaactggctaaagagatacggccacaggattgtccaattagccgcgtcgacacatttcctcaaccccttgcagctccccagtgtcataccctgttggcgcctgagatggaggataacgaaatgagttgcagcccttag

SEQ ID NO: 223718 - DNA, 984 bp, synthetic construct
  misc_feature 1..984: note = Description of Artificial Sequence: Synthetic coding sequence
  source 1..984: mol_type = other DNA
atggggcgtacttcaaaggataagcgcgatgtgtactatagactcgccaaagagaacgggtggcgtgctcgaagcgcattcaaactgctacagctggacaaggagttccagctcttccagggagtgaccagggcagtggacctgtgtgccgcacctggatcctggtcgcaagtcctttcccagaaaattgggggacaaggatctgggcacgtggtggccgtggacctgcaagcaatggcccctcttccaggagtagtgcagatccagggcgatattactcaactttctaccgcaaaggaaatcatacaacacttcaaagggtgccctgccgaccttgtggtatgtgatggtgctcccgatgtaacggggttacatgacgttgacgagtatatgcaagcccagttactccttgccgctttgaatatcgccactcacgtccttaagcctgggggatgctttgttgcgaagattttccgaggcagggacgtaacccttttgtactcacagctccaggtgtttttctcaagcgtattatgtgccaaacctagaagctctaggaattcttcaatagaagccttcgcagtgtgccagggatacgatcctcctgagggtttcataccggacttgtctaaaccacttctggatcactcttatgattttaaccaactggacggccctacgaggatcattgtgcctttcgttacatgcggggacctatcgtcatacgattccgataggagctatccactcgacctcgagggcggatctgaatataagtatacacctcccacccagcctccaatatcccccccatatcaagaagcttgcacactgaagagaaagggtcagctggcgaaggagatccgaccacaagattgtcctatctcacgtgtggacaccttcccgcagcccttggcggcacctcaatgccatactctccttgccccagagatggaagataacgaaatgagttgttccccttag

SEQ ID NO: 223719 - DNA, 741 bp, synthetic construct
  misc_feature 1..741: note = Description of Artificial Sequence: Synthetic coding sequence
  source 1..741: mol_type = other DNA
atggctgggtacctgaagctcgtgtgcgtgagcttccagcggcagggattccacacggtcggctcaaggtgtaaaaataggacaggtgcggaacacctctggttgaccaggcacctgagggacccatttgtgaaagcagccaaggtggaatcctaccgttgcaggtcagccttcaaactactggaagtcaacgagcgccatcagattttgcggccaggtttacgagtcctggactgcggcgctgctcctggcgcttggagccaggtggcggtgcaaaaagtaaatgccgctggcacagaccctagttcaccagtcggatttgtactcggcgtggacctcctccatattttccccctagagggcgctaccttcctctgccccgcagacgtgacagatcctaggacgagccagagaatcctcgaagtattgcccggtaggagagccgacgtgatcctctccgacatggccccaaatgcaacagggttccgcgacctggatcatgacagacttattagcctatgtcttacactgctctcagtgactcccgacatcctccagcccggagggaccttcctgtgcaaaacctgggctggatcccagagcaggagacttcagagacgccttacggaggagtttcaaaatgtaaggattattaagcccgaagcaagtagaaaggaatcatcagaagtttacttcttggctactcagtatcacggtcgaaagggcaccgtgaaacagtag

SEQ ID NO: 223720 - DNA, 438 bp, synthetic construct
  misc_feature 1..438: note = Description of Artificial Sequence: Synthetic coding sequence
  source 1..438: mol_type = other DNA
atggccggatacttaaagctcgtgtgtgtgtccttccagcgccaaggatttcatacagtggggtcccggtgtaaaaacagaaccggcgcagagcacctatggctgaccaggcacttgagggatccctttgtaaaagctgccaaggtcgaatcttatcgctgccgatccgcatttaagctgctcgaagtcaacgagaggcatcagatcctgcggcctggcctgcgagttctggactgcggagccgcacctggcgcatggagtcaagttgccgtccaaaaggttaatgccgctggcactgacggtgtatccctgctgcctaggttgcaatgtaatggcgtgatttctgcccattgtaacctatgcttgcctggcagcagcgactcacccgctagtgcaagccaaattccggcacttctgctggcatcttgcctcgggtag

SEQ ID NO: 223721 - DNA, 768 bp, synthetic construct
  misc_feature 1..768: note = Description of Artificial Sequence: Synthetic coding sequence
  source 1..768: mol_type = other DNA
atgcctgagctttacgatttggtgaacagttacaaacccgatcttatttggtctgacggagagtgggagtgtcccgatacgtactggaacagcacgaacttcctatcttggctgtataacgacagccccgttaaagatgaagtcgtggtcaacgatcggtggggacagaactgctcctgccatcacggtggttattataactgcgaagataaatttaaaccacagagtctgcccgatcacaagtgggagatgtgcacatcaatcgacaagttcagttgggggtaccgcagggacatggccctgtctgacgtaacggaggaatccgaaattatctccgagctggtgcagaccgtctctctaggtgggaattatctgctgaacatcggacccacaaaggacgggctgattgtgccaatttttcaggagcgcctactggccgtcggcaagtggcttagcattaacggcgaagctatttatgccagcaaaccgtggagggtgcagtgggaaaagaacacaacatcagtttggtacacctcgaaaggttcagccgtttacgccattttcctgcattggcctgaaaatggcgtgcttaacctggagagtccgatcacaaccagtacaactaagataaccatgctgggcatacaaggtgaccttaagtggagcacagaccctgataaagggctgttcatcagcctgccacagcttcctccaagtgctgttccggcagaatttgcttggacgataaaactgaccggagtcaagtag

SEQ ID NO: 223722 - DNA, 1401 bp, synthetic construct
  misc_feature 1..1401: note = Description of Artificial Sequence: Synthetic coding sequence
  source 1..1401: mol_type = other DNA
atgagagcaccaggcatgaggtcccgccctgccggacccgctctgctgcttttattactgttcctcggggcagctgaaagcgttcgacgcgcacagcctccaaggagatatacacccgattggccttccctagatagccgacccttaccagcgtggttcgacgaagcgaaattcggcgtgttcattcactggggtgtgttctccgtgccagcttggggctctgagtggttttggtggcattggcaaggagagggacggcctcagtaccaaagatttatgcgcgataattacccacccggattttcttatgctgacttcggtcctcagtttacagcccgtttttttcatcccgaggaatgggccgatttgttccaggccgcaggcgctaaatatgtcgttctgacgaccaagcatcacgagggattcacaaactggccgtcccccgtatcttggaattggaattcgaaagatgttgggcctcaccgcgatctggtgggcgaattgggaactgccctgcgaaagcgaaatatacggtacgggctataccacagcttgctggaatggttccaccctttgtatctcttggacaagaagaacggcttcaagactcaacactttgtgtcggctaagacgatgcctgaactgtacgacctggtgaacagttacaagccggatcttatatggtcagatggcgagtgggagtgtcctgatacctactggaattcgacaaattttctttcctggttgtacaatgacagtccggttaaggacgaagtggttgtaaatgatcggtgggggcagaactgcagctgccatcatgggggttactacaattgcgaagataagtttaagccacagagtctcccagaccataagtgggagatgtgcacaagtattgataaattttcttggggataccgcagggatatggccctttctgatgtgactgaggaatcagagattatctccgagcttgttcagaccgtctctttaggtggaaactacctgctcaatattggaccgactaaagacggactgatcgtaccgatcttccaagagcgtctcctcgctgtgggtaaatggctgagtataaacggtgaggcaatttacgcatctaaaccttggcgcgtccagtgggagaagaacacaacatctgtgtggtatacatccaaggggagtgctgtgtacgctatcttccttcactggcctgagaacggcgtgctgaatcttgagagccctatcaccacatctacgacaaagattactatgctggggattcaaggcgacctgaaatggagtacggacccagataaagggttgttcataagcttgccacaactgcccccttctgcagtcccagctgagttcgcctggacaattaagctgaccggggtgaagtag

SEQ ID NO: 223723 - DNA, 1404 bp, synthetic construct
  misc_feature 1..1404: note = Description of Artificial Sequence: Synthetic coding sequence
  source 1..1404: mol_type = other DNA
atgcggccacaggagctgccgcgactggcgttccccctgctgcttctcctgctgttgctcctgccacccccaccctgccccgcacactctgcgactcgatttgaccctacatgggaatcccttgacgccaggcaactgccagcatggttcgatcaggcgaagtttggcattttcatccactggggcgtgtttagtgttcctagcttcggatcggagtggttctggtggtactggcaaaaagaaaagatcccaaagtacgtagagtttatgaaggataactaccctccgagttttaaatacgaggacttcggcccacttttcaccgcgaaatttttcaatgcaaatcagtgggccgacatcttccaggcttcaggagcgaagtacatcgtgctgaccagcaaacatcatgaaggattcaccctgtgggggagcgagtattcctggaattggaatgcaatcgacgaaggccctaaacgcgacatcgtgaaggaactggaggtagccatcaggaataggactgatctgcggtttggcctgtactattcccttttcgagtggtttcaccccttgtttctggaggacgagtcctcttctttccataaacgacagttcccagtttctaaaactctgccagaactgtacgagctggtgaacaactaccagcccgaggtgctttggtccgatggagatgggggagctcctgatcagtattggaacagcaccggattcctggcctggctatacaatgaaagtcccgtgcggggaactgtggtaacaaatgataggtggggagctggctcaatttgcaaacacggtggtttctacacatgtagcgatcgatataaccccggacatctgttgccccacaaatgggagaattgtatgactatcgataaactctcttgggggtatagacgggaggccggtattagtgattacctgacgatcgaggaactggtaaagcagctcgtggaaaccgtttcctgtggcggaaatctccttatgaatatcgggcctacactggatggcacaattagcgtggtgttcgaggaaaggctccgccaaatgggcagttggctgaaggttaacggtgaagccatatatgaaacccatacatggaggtctcagaatgacaccgttacacccgatgtgtggtatacgagcaagcccaaggagaagctggtgtatgcaatctttctgaagtggcctacctcaggtcagttgtttctcggacacccaaaagctatcctgggtgccaccgaggtgaagctgcttggccatggacagccgttgaattggatcagcttggaacaaaacggaattatggttgagcttccacaattgacaatccaccagatgccctgcaagtggggctgggcccttgccctgactaatgtcatatag

SEQ ID NO: 223724 - DNA, 498 bp, synthetic construct
  misc_feature 1..498: note = Description of Artificial Sequence: Synthetic coding sequence
  source 1..498: mol_type = other DNA
atgaggccccaggagctgccgagactggcctttccccttctgctgctgctgctgttgctgttgccacctccaccctgtcccgcacactccgctactcgctttgaccctacgtgggagtcactggatgccaggcagttgcccgcatggttcgaccaggccaagttcgggatcttcatccattggggcgtttttagcgtgccatcctttggatccgaatggttctggtggtattggcagaaggagaaaattccaaaatacgtggagtttatgaaggataattatcctccgtcctttaagtacgaagattttggcccattgttcaccgccaagtttttcaacgcaaaccaatgggccgacatatttcaggcctcaggagccaaatatatagtgctaacctccaagcaccacgaagcaacttgcagagattctttcatgtggcgaaaaagcttcgacgaatattgggcacacacaaggtggcatcatttctgttcgttctag

SEQ ID NO: 223725 - DNA, 498 bp, synthetic construct
  misc_feature 1..498: note = Description of Artificial Sequence: Synthetic coding sequence
  source 1..498: mol_type = other DNA
atgcgcccacaggaactcccacgcctcgccttcccgttgctcctactgctgctgctgctattgccaccccctccgtgcccagctcacagcgctacccgtttcgacccgacttgggaatcactggacgcgagacagttacccgcatggttcgaccaggccaagttcggtatcttcattcactggggcgtcttcagcgtcccgtcttttgggagcgagtggttctggtggtattggcagaaggagaagatcccaaagtatgtagaatttatgaaagataattatccacccagctttaaatacgaggatttcggcccactgttcactgcaaagtttttcaacgcgaaccagtgggcagatatctttcaagcctctggggctaaatatattgttctaacttcgaaacatcacgaagccacctgcagagactcctttatgtggagaaaaagtttcgacgagtactgggcacatacaagatggcatcacttctgcagtttctag

SEQ ID NO: 223726 - DNA, 330 bp, synthetic construct
  misc_feature 1..330: note = Description of Artificial Sequence: Synthetic coding sequence
  source 1..330: mol_type = other DNA
caactggttgaaactgtgtcttgcgggggaaatcttttgatgaatattggccctactctggatggaacaattagtgttgtcttcgaggagcgcctgaggcagatgggcagctggcttaaagtaaacggagaagccatctatgaaacccacacatggcgatctcaaaatgacaccgtgacaccagatgtctggtatacgtctaaaccaaaggagaagctggtgtatgccatcttcctgaaatggccaactagcggccagttatttcttggacatcccaaagccattctgggggcaaccgaagttagaggcaacttcacgcttttcttatag

SEQ ID NO: 223727 - DNA, 1098 bp, synthetic construct
  misc_feature 1..1098: note = Description of Artificial Sequence: Synthetic coding sequence
  source 1..1098: mol_type = other DNA
atgtggctgcgatctcaccgccagctctgcctggcatttctcttagtttgcgtattgtccgttatctttttcctacatattcaccaggacagcttcccccatggattgggcctctcaatcttgtgtcctgacagacgactggtcacgccacccgttgccatattttgcttacccggtaccgccatgggccctaatgccagctcgagctgccctcaacaccctgcctcattgagtggcacctggaccgtctaccccaatgggaggtttggcaatcagatgggacagtacgccactctcttggcactggcccagctcaatggcagaagggcgtttattttaccggcaatgcacgccgctctcgccccagtgttcagaataactctgccagtgctggccccagaagtcgattcccggacgccgtggcgcgaactgcagctgcacgactggatgtccgaagaatatgctgacctcagagatccctttctgaagctgtccgggttcccctgttcctggactttcttccaccacctgagggaacagattagacgagagtttacgcttcacgaccatctccgagaggaggcccagagtgttctgggccagctccgactgggacggacaggagacaggccccgtacttttgttggggttcacgtgagacgcggtgattacctccaggtcatgcctcaacgctggaaaggtgtggtcggagattcggcctatctgaggcaggccatggattggtttcgggcaaggcacgaggctcccgtgtttgtggtcacatcaaacggtatggaatggtgcaaggaaaacatcgacacgtcccagggagacgtgacatttgcaggtgatggtcaggaggccaccccctggaaggatttcgctctgcttacgcaatgtaaccacacaatcatgaccattggtactttcggcttctgggctgcatacctggcaggcggtgacacggtctacctggccaactttaccctgcccgattcagaatttctcaaaatcttcaagcccgaagctgcttttctgcccgagtgggtcggaatcaacgctgatctgtctcccctgtggacactcgccaaaccatag

SEQ ID NO: 223728 - DNA, 1068 bp, synthetic construct
  misc_feature 1..1068: note = Description of Artificial Sequence: Synthetic coding sequence
  source 1..1068: mol_type = other DNA
atgtggctgcgtagtcaccggcagctgtgcctggccttcctccttgtttgtgtgctgtctgttatattttttcttcacattcatcaggactcctttccacacgggctgggcctgagtatactttgtcccgatagacggctagtcactccccctgtggctatcttttgcctccctggtacggctatgggcccaaacgcctcttcaagctgcccccagcaccctgccagcttgagcgggacatggactgtgtatcccaatgggaggtttggaaaccagatgggacagtacgccaccttacttgcacttgcacaactgaacggcagacgagcttttatcctgccggctatgcatgctgccctggcaccccctgaggtggactcgcgaacgccttggcgtgaactgcagctccatgactggatgtcagaagagtatgccgacctgcgggacccatttctgaaattaagtggcttcccctgttcttggactttctttcaccatctgcgcgaacagatccgacgtgagtttacacttcacgaccacctgcgggaggaggcccagtcagttctgggacagctgcggctcgggagaaccggcgaccgcccaagaacctttgtcggggtccatgttaggcggggagactatctgcaggtgatgccccagaggtggaaaggggtggtgggcgattcagcctacctgaggcaagccatggattggtttcgtgcccgtcacgaagcacctgtcttcgtggtaacttccaacgggatggaatggtgcaaggagaacatcgacacatcacagggggatgtgactttcgctggcgacggacaggaagcgacaccctggaaagattttgcgttgctgacacaatgcaatcataccatcatgacaatcggcaccttcgggttttgggctgcttacctcgctggtggggataccgtgtatcttgccaactttacacttcccgactccgaatttctgaagatttttaaacctgaggccgcattcctgcctgagtgggtgggaatcaacgcagacctgtctcccctgtggacactcgccaaaccttag

SEQ ID NO: 223729 - DNA, 1032 bp, synthetic construct
  misc_feature 1..1032: note = Description of Artificial Sequence: Synthetic coding sequence
  source 1..1032: mol_type = other DNA
atgctcgtagtgcagatgccttttagctttcccatggctcactttattctttttgtttttaccgtgagcacgatttttcacgttcagcaacgcttggcaaaaattcaggccatgtgggagctccctgtgcagattccagtcctggcctccacctcaaaagcactgggcccttcccagctgcgtgggatgtggacgatcaatgccatcgggcgactgggcaaccagatgggcgagtacgcaactttgtatgcactggccaagatgaacggccgaccagcctttatacctgcccagatgcattccactttagcccctatatttcggatcactctgccagtactacacagcgctaccgcgagccgtattccttggcaaaattaccacttgaacgactggatggaggaagagtacaggcacattccaggtgaatatgtcaggttcaccgggtatccctgtagctggactttttaccaccacctgcgtcaggagattctgcaggaattcaccctgcatgaccacgtgagagaggaggctcagaaattcttgcggggtttgcaggtaaacggctccaggccaggcaccttcgttggagtgcacgtccgcaggggcgactacgtgcacgttatgcctaaggtgtggaagggggtggttgccgatagaaggtacctccagcaggccctggactggttccgcgctagatactcttctctgatcttcgtcgtcacatccaatggaatggcgtggtgtcgcgagaacatagacactagccatggggatgttgtcttcgcgggagacggtatagagggcagtcccgctaaggattttgccctcctcacccagtgcaaccacacaatcatgactataggaactttcggcatttgggcagcatacttaacgggaggcgatacgatctacctggccaactatactctcccggactcccctttcctcaaaatcttcaagcctgaggctgcgttccttcccgagtggaccggtattgccgcagatttgtctccacttctaaaacactag

SEQ ID NO: 223730 - DNA, 1032 bp, synthetic construct
  misc_feature 1..1032: note = Description of Artificial Sequence: Synthetic coding sequence
  source 1..1032: mol_type = other DNA
atgcttgtggtacaaatgcctttctcattccctatggcacactttatcctgtttgtgtttaccgtatccacaatatttcacgtgcagcagcggttggccaagatacaggccatgtgggagctgcccgtacaaattcctgtgctggcgagtacctcaaaagctctgggtccctcccagctccgaggcatgtggacaatcaatgcaataggtcgcctgggaaatcagatgggtgaatacgcgacactctacgctttagccaaaatgaacggaaggcctgcctttattccagctcagatgcattcaaccctggccccaattttcagaatcaccttaccagtgcttcattctgctactgcctcccgaatcccatggcagaactaccatctgaatgactggatggaggaggaatacagacacattccaggcgaatacgtgcggttcactgggtacccttgttcatggacattttaccatcacctcagacaagagatactgcaggaatttactctgcacgaccatgtgcgggaggaagcccagaagttcctcagaggacttcaggtcaatggatcaaggcccggtacattcgtgggtgttcacgtcaggcggggagactatgtgcacgtaatgccgaaagtttggaagggtgttgtggcggatcgtcgatatttgcagcaagcattggattggtttagggctcgatactcatcactgattttcgtagtaacatctaacggtatggcttggtgccgcgagaatatagacaccagtcacggcgacgttgtgtttgccggtgatggcatagaaggatcccctgccaaggatttcgccctcctgactcagtgcaatcataccataatgaccatcggaacttttgggatatgggccgcataccttactggaggcgatactatctaccttgcgaattacaccttgcctgatagccccttcctgaaaatattcaagcctgaggctgcatttctgcctgaatggactggaatcgctgcggatctgtctccgctcttgaagcactag

SEQ ID NO: 223731 - DNA, 663 bp, synthetic construct
  misc_feature 1..663: note = Description of Artificial Sequence: Synthetic coding sequence
  source 1..663: mol_type = other DNA
atgttggtcgtgcagatgcccttctcttttccgatggcccactttatccttttcgtattcactgtgtccaccatttttcacgttcagcagcgccttgcgaagattcaggccatgtgggaattgccagttcagatccctgttcttgccagcacctctaaggcactgggaccatcacaactgaggggaatgtggactatcaatgcaattggaagactggggaaccagatgggtgagtacgcaactctttatgcattagcaaagatgaatggcaggcctgcttttatacctgcacaaatgcactctaccctggcacccatcttccggattaccctcccagtcctgcacagcgccacggcgtcgagaattccatggcagaactaccacctcaatgactggatggaggaggagtatagacatattccaggcgagtacgtgagatttactgggtatccatgtagctggactttctatcatcatctcagacaggaaatactccaagagttcaccctgcatgatcatgttcgtgaagaggcccagaagttccttagagggcttcaggtcaatggaagcagaccgggaacatttgtgggcgtgcacgtgcggagaggcgactatgtgcacgtgatgcccaaggtttggaaaggcgtggtggcagaccggtag

SEQ ID NO: 223732 - DNA, 1086 bp, synthetic construct
  misc_feature 1..1086: note = Description of Artificial Sequence: Synthetic coding sequence
  source 1..1086: mol_type = other DNA
atggaccccctaggggctgccaagccacagtggccttggagaaggtgtctggccgcactcttattccaactactagtggccgtgtgtttcttttcttacttgagggtgagccgggatgatgcaaccggttctcccagggctcccagcggatcctctcggcaggacaccacgccaactagacctacactgttgattctattacgcacctggcctttccatattccagtggctctgtctcgctgctccgaaatggtcccgggaacagctgactgccacatcacagcggatagaaaggtttatccacaggcggatatggtgatcgtccatcactgggacataatgtccaatccaaaaagccgtctcccacccagtcccagaccccagggccagaggtggatctggtttaacttggaaccaccgccaaattgccagcacctggaagccctggaccgttacttcaatctcaccatgagctatcgaagcgattctgatattttcacaccgtacgggtggctggaaccatggagcggacagccggctcacccaccactcaacctgagtgctaaaactgaactggtagcttgggccgtgagcaattggaagccagacagcgccagagtacgatattaccaatccctgcaggcacacctcaaagtggatgtgtatggtagaagtcacaagccgttacccaagggaactatgatggaaaccctgtctagatacaagttctatcttgctttcgagaactcactccacccggactatatcacagaaaagctctggcggaacgccctcgaagcctgggcggtgccggtagtgctcggaccctcgcgctccaactatgagcgattcttgccacccgatgccttcatccacgtggatgacttccagtcccctaaggatctggcaaggtatctccaggaattggataaagaccacgctagatatttatcttacttccggtggcgtgaaaccctacgtccccgaagttttagctgggccctcgacttttgtaaggcttgctggaaattacagcaagagtctagatatcaaaccgtgcgctctatagccgcatggttcacttag

SEQ ID NO: 223733 - DNA, 1086 bp, synthetic construct
  misc_feature 1..1086: note = Description of Artificial Sequence: Synthetic coding sequence
  source 1..1086: mol_type = other DNA
atggatcctctgggagctgctaagccacagtggccgtggcgacgttgtctagcggctttactgttccaactcctggtcgctgtctgtttctttagttatctgcgagtgtctcgagacgacgcaacaggaagccctcgggctccgtccgggagcagtcgacaggatacgacccccacaagacctaccctcctcattctcttacggacctggcccttccacatccccgttgctctgtcacggtgctccgagatggtgcctgggaccgccgattgtcatataaccgcagaccggaaggtgtaccctcaggcagatatggttatcgtacaccactgggatattatgtcaaatcctaagagcagattgccaccctcccctcgtccgcaagggcaaagatggatatggtttaacctggaaccaccaccgaattgccagcatctggaggctttagacaggtatttcaacttaactatgagctacaggtcagactctgacatctttaccccctacggatggcttgagccgtggtcaggccagcctgcgcaccccccactcaatctctcagcgaagacagagctggtcgcttgggctgtgtcaaactggaagcctgactccgcaagagtgcggtactaccagtccctgcaagcccatcttaaggtggatgtctatgggagatctcacaaaccactccccaagggaaccatgatggagacactctccagatataagttttatctcgcatttgagaatagtctgcaccctgattacatcacggagaaactgtggcgcaacgcactggaggcctgggccgtccccgtggtgttgggcccatctcgttctaactacgagcggttcctaccacctgacgccttcattcatgtggacgatttccagtctccgaaggaccttgcccgatatctgcaagaactcgataaggaccacgccagatacctcagttattttagatggcgcgaaactctgaggcccagatcatttagctgggccttagacttttgtaaggcgtgttggaaactgcaacaggagagtcgctaccagacggtgcggtcaattgccgcatggttcacctag

SEQ ID NO: 223734 - DNA, 1086 bp, synthetic construct
  misc_feature 1..1086: note = Description of Artificial Sequence: Synthetic coding sequence
  source 1..1086: mol_type = other DNA
atggatcccctgggggctgcaaagccacagtggccatggcgccgatgcctagccgcactcctgttccagctgttagtagcggtgtgcttcttcagctacttaagagtgtctagagacgatgccaccggctctcctcgtgccccaagtggctcgtcccggcaggacacaacacccacccggccaacgcttttgattttactcagaacttggccattccacatcccagtggctttgagtagatgcagcgagatggtgcccggaaccgccgattgccatataactgcggataggaaggtatatccccaagccgacatggtgattgttcatcactgggacataatgtcaaaccctaaatctaggctgccgccaagcccccgaccacagggccaacgctggatatggttcaatctggaacccccacccaactgccaacatctggaagccctggacaggtactttaacttgacaatgtcgtaccgaagtgacagcgacattttcacaccatacgggtggctcgaaccttggtcaggtcaacctgcccacccccctctgaacctttctgcgaaaactgaactagtggcctgggccgtgtcaaattggaaacccgattccgcacgtgtgcggtactaccagtcacttcaggcgcatctcaaggttgatgtttacggcaggtcacataagccactccctaagggaactatgatggaaactctatcccgctacaaattttacctggcttttgaaaattccctccacccggactacataaccgagaaactttggcgcaacgctttggaggcatgggccgttcccgtggtgttgggtccctctcgcagcaactacgagaggtttctgcctccagacgcctttatacacgtcgatgactttcaatccccaaaagatctggcgaggtatttgcaggagttggacaaggaccacgctaggtatctgagttatttcagatggagggaaactcttagacctaggtcgttctcatgggccctggacttttgcaaagcttgctggaagttgcagcaggaatctaggtaccaaaccgtccggagtattgctgcatggttcacttag

SEQ ID NO: 223735 - DNA, 1086 bp, synthetic construct
  misc_feature 1..1086: note = Description of Artificial Sequence: Synthetic coding sequence
  source 1..1086: mol_type = other DNA
atggatcccttaggtgctgccaaacctcagtggccatggagaagatgcctggcagccctgctcttccagttgctagtggctgtatgctttttttcttacctgcgagtgtcaagggatgacgcaacaggaagtcctagagcaccttctggctcgtcacgtcaagatactacaccaacccgccctactcttctgattctcctgcgcacgtggccgtttcacataccggttgctttatctagatgctccgaaatggttcccggaacagctgattgccatataacagctgataggaaagtctatccacaggccgatatggtcattgtccaccactgggatattatgtctaaccccaaatctcggctccccccttcaccaagacctcaagggcagcgctggatatggttcaaccttgaaccaccaccgaattgtcagcacctggaagctctagataggtacttcaacctcacaatgagttacagatctgattcagacattttcaccccgtatggttggctcgagccctggtcaggccagcccgcacatcctccgctgaatctgagcgcaaaaacggagctcgtggcttgggccgtttcaaattggaagccagacagtgcccgtgtcagatactatcaatcactgcaagcccacctgaaagtagacgtctacggcaggagtcataaacccctaccgaagggcactatgatggagaccctgtccaggtacaaattttatctggcgttcgaaaattcattgcaccccgactatatcactgaaaagttatggagaaacgccctcgaggcctgggctgttcccgttgtgctgggaccgtcacgctccaattacgagcgcttcctgcccccagatgcattcatccatgtcgatgattttcaatctcccaaggatctcgcaagatacctgcaggagctcgataaggaccacgccagatatctttcttattttcgctggagagaaaccctgcgtccaaggtcattctcctgggccctcgatttttgtaaggcatgctggaagttacagcaggaaagcaggtaccagacagtacggtcaattgcagcctggttcacctag

SEQ ID NO: 223736 - DNA, 1593 bp, synthetic construct
  misc_feature 1..1593: note = Description of Artificial Sequence: Synthetic coding sequence
  source 1..1593: mol_type = other DNA
atgaggagactctggggggctgctagaaaaccctcaggtgccggatgggagaaggagtgggccgaagcacctcaagaagcgcctggcgcttggtctggaagactaggcccaggaagatcagggagaaaaggaagagctgtcccagggtgggcttcctggcccgctcacctcgctctggcagctcgtcccgctcgacacctcggaggggctggacaggggccaaggcccttgcactctggcacagctccattccactctcgggcaagcggcgagcgccagcgaagactggagccccaactgcagcatgagtcccggtgccgatcttccactccggcagacgcttggcgcgcagaagctgcgcttccggtcagagcgatgggggctccctggggtagccctactgctgcagcgggagggagacggggatggcggaggggccgtggtctcccatggactgtgtgtgtcctggctgctgctggcttaacatgcacagccctgataacatatgcttgttgggggcaacttcctcctctgccttgggcctctcccacaccctcgaggcctgtcggtgtcttgctatggtgggaacctttcggaggcagggacagcgcacctcgaccgcctcccgattgccgtctgaggttcaacatttccggatgtaggctgttgactgaccgtgcctcttacggagaggcccaggccgttttgtttcaccaccgggacctcgtgaaggggcctccagattggccacctccctgggggattcaggcgcacaccgcagaagaagtggacctgcgggtactcgattatgaagaagccgctgccgcagccgaggcactcgccacctcaagcccaaggccaccgggtcagcggtgggtttggatgaactttgagtctccctcccactcgccaggactacgctcactcgcctctaacctgtttaactggacgctgtcttatagagccgactccgacgtctttgtcccctacggctatctctacccgagatctcatccaggagaccccccatccggactggcacctcctttgtctcggaaacaggggttagtcgcctgggtggtgtctcattgggatgagagacaagcgagggtccgctactatcaccaactgtcgcagcatgtgacagtggacgtgtttggtcggggaggtccagggcaacctgtacccgagataggcctgctgcacacagttgccaggtacaaattctatctggcttttgagaattcacagcatctcgactacattaccgagaagttgtggcgcaatgccttgctggctggagctgtgcccgtggtcttaggtccagatagagcgaactacgaaagattcgtacctcgaggtgcctttattcacgtcgatgattttcctagtgcttcctcactggcgtcatacctattgtttctggaccgtaacccggctgtctataggcgctactttcactggcggcgtagctatgcagtccacataactagtttctgggacgagccatggtgtagagtgtgccaagcggtccagcgcgctggtgaccgcccaaaatccattaggaacctggccagctggtttgagcggtag

SEQ ID NO: 223737 - DNA, 1125 bp, synthetic construct
  misc_feature 1..1125: note = Description of Artificial Sequence: Synthetic coding sequence
  source 1..1125: mol_type = other DNA
atggacccccttggacctgccaaaccccagtggctgtggcgtcggtgccttgcaggcctcttgttccagctgctagtcgctgtgtgcttcttcagctacctgagggtcagccgagacgacgccaccggcagtccccgaccagggctgatggctgtggaacccgtgaccggtgcacccaatgggtcaagatgtcaggattcaatggccactccagcacaccctacactgttgattctcctatggacatggccatttaacacgcccgtggccctaccccgatgtagtgagatggtgccaggggcagcagattgtaacattactgccgatagctccgtctatccccaagccgacgccgttattgtccaccactgggatatcatgtataaccctagcgcaaacttgccaccccctactaggccacaagggcagcggtggatttggttcagcatggaaagcccatcaaactgccgacacttagaggccctggacggctacttcaatctgactatgagttatagaagcgactcagatatatttactccttacgggtggctggaaccatggtcaggccaaccggctcatcccccattgaatcttagcgctaagacggagttagtagcctgggctgtgagcaactggaagccagactccgctagagtgaggtactaccaatcattacaggctcatctgaaggtggatgtgtatggacgcagtcacaagccacttccaaaggggactatgatggaaactttgtctagatacaagttctacctggcctttgaaaattctctgcatcctgactacatcaccgaaaaactctggcgaaatgcccttgaggcatgggccgtcccggtggtactaggtccatctcgatctaattatgaacggttcctgccgcctgacgctttcatccacgtggacgatttccaaagccccaaggatcttgccagatatctccaagagcttgataaagatcacgcacgctacttaagttacttccactggagggaaacactgagacctcgctcttttagctgggcgcttgcattctgcaaggcgtgttggaagctgcagcaagaatctcgctatcagactgttcgcagcatagcggcatggtttacctag

SEQ ID NO: 223738 - DNA, 1125 bp, synthetic construct
  misc_feature 1..1125: note = Description of Artificial Sequence: Synthetic coding sequence
  source 1..1125: mol_type = other DNA
atggaccctcttgggccagctaaaccccagtggctgtggagaagatgcctcgcagggctcctgttccaattgctggtcgcggtttgttttttcagctacttgcgcgtcagccgggatgacgccactggtagcccaagacccggactaatggctgtagagcccgtgaccggcgcaccgaacggtagccggtgccaggacagtatggcaacacctgcacatccaaccctgctcatcttactgtggacctggccctttaatacccctgttgccctccccaggtgcagcgagatggtcccaggtgccgctgactgtaacataactgccgacagctccgtgtatcctcaggccgatgccgtcatcgtccaccactgggacataatgtataatccgtctgctaaccttcccccacccacacgcccacaagggcagcgctggatctggttcagtatggagagcccgagcaattgccggcacctggaagccctggacggctattttaatctaactatgtcataccgttctgatagcgacatctttaccccctacggctggctcgagccatggtctggccaacctgcccacccccctttgaacttgtccgcaaagacagaactggttgcatgggcagtttcaaattggaagcctgacagtgcacgcgttcggtattatcagtcactccaggctcacctcaaggttgacgtttacggaagatcacacaagcctcttccaaaggggacaatgatggagacgctttccagatataagttctatttggccttcgaaaacagccttcaccccgattacatcacggagaagttatggagaaatgccctggaggcttgggctgtgccggtggtcctcggtccttctcgtagtaactacgagcggttcctccctccagatgctttcatccatgtggacgactttcaaagccccaaagatctagctaggtacctacaggaactggacaaagaccacgcacgctatctctcctattttcactggagagaaactctgcggcctagatctttcagttgggccctcgcattttgtaaagcctgttggaaactgcagcaggagagccggtatcagaccgtgaggtccatcgccgcttggttcacatag

SEQ ID NO: 223739 - DNA, 1080 bp, synthetic construct
  misc_feature 1..1080: note = Description of Artificial Sequence: Synthetic coding sequence
  source 1..1080: mol_type = other DNA
atggaccccctggggccagccaaaccccaatggtcctggagatgttgtctcacaacactgctgttccaactgctgatggccgtgtgttttttctcatatctccgtgtgtcacaagacgatcccacagtataccctaatggaagtcgtttcccagactccacaggtacccccgctcactcaatccccctgattttgctgtggacctggccattcaataagcccatcgcgctgccacgatgctctgagatggtgccaggcacggcagactgcaatatcacagctgacagaaaagtgtacccacaggccgacgcagtgatagtccatcacagggaggtgatgtacaacccctcagcacagctgcctagatccccccgacgccagggccagcgttggatctggttttccatggagtctccctcgcattgttggcagctgaaagcaatggatggctattttaacctaaccatgagttataggtctgattctgacatcttcacgccgtatggatggctggaaccttggtcaggacaaccagcacaccctccgttgaatctgagcgcgaaaaccgaattagtggcttgggccgtgtcgaactggggcccaaacagcgccagggtaagatattatcagtccctgcaggcccacctgaaggtcgatgtctatgggagatcccacaaacccctcccccagggtaccatgatggaaactttaagtaggtacaaattctatcttgcttttgagaactccctccatcccgactatattactgaaaagctgtggagaaacgcgctcgaagcctgggcggtgcctgtggtgctggggccaagtcggagcaattacgaacgttttctgcccccagacgcttttatccatgtcgacgactttcagtctccgaaggatctagcacggtacctccaggagctcgacaaggatcatgcgaggtacttatcctatttccgctggcgcgagactctcagaccccgaagtttttcctgggcattggcgttctgcaaggcctgctggaagctccaggaagagtctcgttaccagaccagaggcattgccgcatggttcacctag

SEQ ID NO: 223740 - DNA, 1080 bp, synthetic construct
  misc_feature 1..1080: note = Description of Artificial Sequence: Synthetic coding sequence
  source 1..1080: mol_type = other DNA
atggatccccttgggcctgctaaaccccagtggagttggaggtgttgcttaacaacactgctttttcaactgctcatggctgtttgcttcttctcatacctgcgggtctctcaggacgaccctactgtttatccaaacggtagccgatttcccgactccacaggtacgcccgcacacagcattcccctgatactgctgtggacgtggccctttaacaaacctatagccctgcctaggtgtagtgaaatggtcccaggcaccgctgactgtaacatcacggcggatagaaaggtctatccgcaggccgatgcagtgatagttcaccaccgcgaggtaatgtacaatccatccgcccagctccccagatcaccacgaaggcagggccagagatggatttggtttagcatggaaagcccgtctcattgttggcagctaaaggctatggatggatactttaaccttactatgtcctaccggagcgactctgatatttttacaccctacggttggctggagccctggagtgggcagcctgcccacccaccactgaatttgagcgccaagacagaactagtggcctgggcggtctccaactgggggccaaattccgctagagttaggtactaccaatctctgcaggcacatctgaaagtcgatgtgtatggtcggtcacacaagccattgccacaagggaccatgatggagaccctgagccgatacaagttttatctggcttttgagaattctctgcacccggactatattaccgagaaattgtggaggaatgcactggaagcctgggctgtccctgtggtcctgggaccctcacggtccaattacgagcgcttcctccctccggatgcattcattcatgtggatgactttcagagtcccaaggatctcgccagatacttgcaagaactggacaaggatcacgctaggtacctatcatatttccgctggcgcgagacacttcggcctaggagtttctcttgggccttggccttctgtaaggcttgctggaaactgcaagaggagagcagatatcagactcgtgggattgccgcttggttcacatag

SEQ ID NO: 223741 - DNA, 1098 bp, synthetic construct
  misc_feature 1..1098: note = Description of Artificial Sequence: Synthetic coding sequence
  source 1..1098: mol_type = other DNA
atggatccactgggcccagcaaagccacagtggtcttggcgctgttgccttacaactttgttatttcaacttctgatggccgtgtgtttctttagctatcttagagtgagccaggatgatccaaccgtatatccaaacggctctaggtttccagatagcacaggcacaccggctcacagcatccctttgattttgctgtggacatggcccttcaataagccaatagcgttaccacgctgtagtgaaatggtcccaggaaccgcggattgtaatatcacggccgatagaaaggtctatccccaggctgatgccgttatcgtgcaccatcgcgaggtcatgtacaatccctctgcccaactgccacgaagtccaagaagacagggtcagagatggatttggtttagcatggaatcacctagccactgctggcagctgaaagcaatggatggctactttaatcttactatgtcttatcggtcggacagcgacatattcactccgtacggatggctggagccatggagtggtcagccagcccaccctccactcaatctgtcagccaagacggaactcgtcgcctgggcagtgagcaattggggtccaaactcggctagggttcgctactatcaaagccttcaagctcacctgaaagtggatgtttacggcagatcacataagcctctgcctcaaggaaccatgatggagaccctgtccaggtacaagttctatctggcgtttgagaactcactccatcccgattacataactgagaaactttggcgaaacgcgttggaggcctgggccgtgcctgtagtccttgggccttcccgctctaattacgaacgctttctacctcccgacgcctttattcatgtagatgacttccagtcccctaaagatctggcacgctatctccaggagctggataaagatcacgcaagatatctaagttatttcagatggagagagaccctgagaccgaggagctttagctgggccctggctttctgtaaggcttgctggaaattgcaggaggagagtaggagtgggggacttatatatttgcgtaccaggttgcctgaagcaagcccagcatag

SEQ ID NO: 223742 - DNA, 1080 bp, synthetic construct
  misc_feature 1..1080: note = Description of Artificial Sequence: Synthetic coding sequence
  source 1..1080: mol_type = other DNA
atggatcctttagggcctgccaaaccccaatggtcttggcgttgttgtctgaccaccctgctttttcaacttttgatggccgtgtgctttttttcgtacttacgcgtgagtcaagatgatccgacagtttaccccaacggttcgaggtttccagactctacagggacaccggcacacagcatacccttaattctgctctggacctggccctttaataagccaatcgcgctgcctcggtgcagtgagatggtgccaggcactgctgactgtaatataacagccgacaggaaagtttacccccaggccgatgctgtgatagtccatcaccgggaggtgatgtacaacccctccgctcagctccccagaagccctcgacgacagggtcagcgttggatatggttttccatggaatcaccttctcattgttggcagcttaaggccatggacggttactttaacctaacaatgtcctacaggagtgatagtgatatcttcaccccctacggatggctggagccatggagtgggcaacccgcacatccgcctctgaatctcagcgcaaaaactgagctggtggcatgggccgttagcaattggggacctaacagcgccagggtgaggtattaccaatccctccaggctcacctcaaagtggatgtttacggccgttcccataagcctctcccccaagggaccatgatggagactctaagccggtataagttttatctggcttttgagaattcgctgcacccggactacattacagagaagctgtggcggaacgccctggaagcttgggctgtgcctgtggtcctcggcccttctaggtcgaactatgagaggtttcttcccccagatgcattcatccatgtcgacgacttccaatcgcctaaggatctggccaggtacctgcaagagctagataaggaccacgctagatatttgtcctactttcggtggagggaaacactccggccacgctcattctcgtgggctctggctttttgtaaagcatgttggaaattacaggaagagtcccgataccaaactcggggaatagctgcatggttcacctag

SEQ ID NO: 223743 - DNA, 1080 bp, synthetic construct
  misc_feature 1..1080: note = Description of Artificial Sequence: Synthetic coding sequence
  source 1..1080: mol_type = other DNA
atggaccccctcggtccggctaaaccacaatggtcgtggcgatgttgtctgactaccctcctctttcagctgcttatggcagtgtgtttcttttcttacctcagggtcagtcaggacgatcctacggtatacccaaatgggtcccgtttccctgactccactggtacccctgctcactcaatccctctgatcctgctctggacctggcctttcaacaaacctattgctttgccaaggtgctcggagatggtgcctgggaccgccgactgcaatatcacggccgatcggaaggtatatccacaggccgatgccgttattgtacaccacagagaggtgatgtacaacccatctgcacagctcccgcgtagccctcggcgacagggccagcgctggatctggttttcaatggaatctccctctcactgctggcaactgaaggcaatggatggatatttcaacttaacaatgagctatcgctctgattccgatatctttacaccttatggttggttggaaccgtggtctgggcagccagcgcaccctccccttaacctaagcgcaaagactgaactggtggcctgggcagtctcaaactggggcccaaactccgctcgcgtgaggtattatcagtctctgcaggcacatctcaaggtcgacgtgtacggcagatcacacaagccactgcctcagggcacaatgatggagactttatctcgttataaattctatctggcctttgaaaactccctgcatcctgattatattacagaaaaattgtggcgaaatgcattagaggcctgggcagtgcctgtcgtattaggcccatccaggagcaactatgaaaggttcttaccacccgacgccttcatccacgtagatgactttcagtcgccaaaagatctggcccgttacctccaagagttagataaggatcacgctcgctacctgtcctattttagatggcgagaaaccctcagacccagatcctttagttgggccttggcgttctgtaaagcatgttggaagctgcaggaggaaagtcggtaccagacccggggaatagcggcatggttcacttag

SEQ ID NO: 223744 - DNA, 93 bp, synthetic construct
  misc_feature 1..93: note = Description of Artificial Sequence: Synthetic coding sequence
  source 1..93: mol_type = other DNA
atggatccgctcggacctgccaaacctcagtggtcttggcgctgctgtctgactactctgctatttcagctgctcatggctgtttgtttttag

SEQ ID NO: 223745 - DNA, 414 bp, synthetic construct
  misc_feature 1..414: note = Description of Artificial Sequence: Synthetic coding sequence
  source 1..414: mol_type = other DNA
atggatcctctcgggccagccaaaccacagtggtcatggagatgctgtctcactactttactgtttcagttattaatggcagtgtgcttttttagttatcttcgcgtctctcaggacgatccgacagtatacccaaacggttcccgctttcccgacagcaccggtactccggcacactccatccccctaatccttctctggacgtggcccttcaataagcccattgcgctgcccaggtgctcagagatggtgcccggaaccgccgactgtaatatcactgcagataggaaagtatatccccaagctgatgctgtgattgtgcaccatagggaggtgatgtataatccttctgcgcagcttccgaggtctcccagaagacaggggcagaggtggatttggtttagcatggaatag

SEQ ID NO: 223746 - DNA, 210 bp, synthetic construct
  misc_feature 1..210: note = Description of Artificial Sequence: Synthetic coding sequence
  source 1..210: mol_type = other DNA
atggatccgctcggaccagccaagccccaatggagttggaggtgctgtctcactacacttctgttccagctgctgatggccgtctgctttttctcctaccttagagtgtcccaggatgacccgaccgtatacccgaacgggtcgaggttccccgacagtacggggactcccgctcacagcattccactcatcctgctttggacatggtag

SEQ ID NO: 223747 - DNA, 201 bp, synthetic construct
  misc_feature 1..201: note = Description of Artificial Sequence: Synthetic coding sequence
  source 1..201: mol_type = other DNA
atggatccgttaggaccagctaaaccacagtggagctggcgttgctgcctcaccactctactattccagttgcttatggccgtgtgcttcttttcctacctccgggtgtcacaggacgaccccactgtgtatcctaatgggtctcggtttccggactccacaggcacccccgctcattcaattccactaatcctgctttag

SEQ ID NO: 223748 - DNA, 138 bp, synthetic construct
  misc_feature 1..138: note = Description of Artificial Sequence: Synthetic coding sequence
  source 1..138: mol_type = other DNA
atggatcccctaggtcctgcgaagccacaatggagttggaggtgctgtctaaccacactgctgttccagctgctgatggccgtatgttttttttcgtacttgagagtcagtcaggatgaccctaccgtgtatccttag

SEQ ID NO: 223749 - DNA, 1029 bp, synthetic construct
  misc_feature 1..1029: note = Description of Artificial Sequence: Synthetic coding sequence
  source 1..1029: mol_type = other DNA
atgaataatgcaggtcacgggccaacccgtcgcttgagaggactcggggttctggccggagtcgccctgctggctgctctctggctgctgtggctgcttgggtcagcacctcgcggtacccctgcaccgcagcctacaatcactatcctcgtttggcattggcccttcactgatcagccccctgaactgcccagcgacacctgcacacgctatggaatagcacgatgccacctgtcagccaaccgttctttgttagcttccgctgatgccgtggtgttccaccacagagagttgcagacgagacgctcccatttgccgctcgctcagaggcctcggggacagccatgggtctgggccagtatggagtccccctctcacacacacggtctttctcacctgcgaggcatatttaactgggtgttatcttatcgacgtgactccgacatcttcgtgccatacggacgcctggaaccgcactggggaccgagtccccctttgccagcaaaatccagagtcgccgcatgggtcgtctcaaacttccaggagcgccaactacgggcacgcttgtaccgccaactcgccccacatctgcgcgtggacgtcttcggcagggctaatgggcgtcccctatgcgcctcttgcctagtgcccacagtagctcaataccgattctatctttccttcgaaaacagtcagcacagggactatattactgagaaattctggcggaacgccttggttgccggaaccgtgccagtggtgctgggtcctcccagggccacttatgaggccttcgtgcccgctgacgctttcgtgcatgtggatgatttcggcagcgccagggagctcgccgcattcctgacgggcatgaacgagtcgcgctaccaacgctttttcgcctggcgcgaccggctccgcgtgaggcttttcactgactggagggaaaggttttgcgcaatatgcgaccggtatccacacctgcctaggtctcaggtgtatgaggacctggaaggctggtttcaggcctag

SEQ ID NO: 223750 - DNA, 1728 bp, synthetic construct
  misc_feature 1..1728: note = Description of Artificial Sequence: Synthetic coding sequence
  source 1..1728: mol_type = other DNA
atgaggccatggacaggcagttggcgctggatcatgttaattctatttgcatggggcaccctgttgttctatattggcggacacctcgttcgtgacaacgatcaccccgaccattccagtagggaactgagtaagatactggccaagctggaacgcctgaaacagcagaatgaggaccttcggagaatggcagagagtctgaggatccccgagggcccaattgatcagggtcctgccatagggcgagtccgtgtgctggaggagcaactggtgaaagctaaggagcagattgagaactacaagaagcaaaccagaaatggattagggaaggaccatgaaatccttagaagacgcatcgaaaatggggcaaaagagttatggtttttcttgcagtctgagttgaaaaaattaaagaatcttgaaggaaatgaacttcaaagacacgcagacgagtttctactggatttggggcatcacgaacggagcatcatgaccgacctgtattacctttctcagaccgatggcgctggcgattggcgggagaaggaggctaaggatctgacggaattggtgcagcggagaatcacgtatttacagaaccccaaggactgctctaaggccaagaagttagtttgtaacatcaataaagggtgcggatacggatgccagctacaccacgtcgtgtactgctttatgattgcatacggaacacagcgaacgctcatcctggagtcacagaactggcgatacgcgaccggagggtgggaaaccgtatttcggccagtcagcgagacttgcactgatcgctcaggtatttccactggacactggtcaggggaggttaaggacaaaaacgtccaggtcgtcgaactgcctatcgtcgacagcctgcatcctaggcccccatatctgccactcgccgttcccgaagacctggctgacaggttggtacgtgtgcacggagaccctgccgtctggtgggtaagccaattcgtcaagtatctgatcagacctcagccatggctcgagaaggagattgaagaggcaaccaaaaagttgggcttcaaacaccccgtaattggggtccatgtccgaaggaccgataaggtgggaacagaagccgcattccatccaattgaagagtacatggtgcacgtcgaagaacactttcagctgctggcccgtagaatgcaggtcgataagaaaagagtgtatctggctaccgacgatccctctttgctaaaggaggccaaaacaaaatatccgaactacgaattcatatccgacaattccatctcctggtccgctggtctgcacaatcgatatacagagaattcgctgcgtggagttattctggacatccactttctctcacaagccgatttcctcgtttgcacattctccagccaggtgtgtcgggtcgcatacgaaatcatgcagacgttgcatcccgacgcttccgctaacttccacagtttggatgacatctattattttggtgggcagaatgcccacaatcaaattgccatctacgcccaccagcctaggacagccgatgagattcccatggagcctggcgatatcattggcgtcgccggaaaccactgggatgggtatagcaaaggcgtgaaccgcaaactggggcgaacggggctctacccatcttataaagttagggagaagatcgagaccgtgaagtaccctacctatcccgaggcagagaagtag

SEQ ID NO: 223751 - DNA, 1728 bp, synthetic construct
  misc_feature 1..1728: note = Description of Artificial Sequence: Synthetic coding sequence
  source 1..1728: mol_type = other DNA
atgcgcccttggacaggctcctggcggtggatcatgctaattctgtttgcatggggaaccttgctgttttacatcgggggtcacctcgtgagggataacgaccatcctgatcattccagccgcgaattatctaaaattctggccaaactggaaagacttaagcaacagaacgaggacctgcggagaatggccgaatccctgagaattccagagggccctattgaccaggggccagctattggcagagtgagagtgttagaggagcagctggtaaaagccaaagagcagatcgagaactataagaaacagacaaggaatggcctgggcaaggaccatgagatcttacgacggagaatagaaaatggagctaaagagttgtggtttttcctgcagagcgagctgaaaaagctgaaaaatcttgaaggcaacgaacttcaaaggcacgctgatgagtttttgttggatttgggccaccacgaacgaagtataatgaccgatctttactatctgtcacaaacggacggtgccggagactggagagaaaaggaggccaaggatctgaccgaactggtgcagagaaggatcacttatctccagaacccgaaggattgtagcaaagccaagaaactcgtatgtaatatcaataagggatgcggctacgggtgccagctccatcatgtggtatattgctttatgattgcctacgggactcagcgcaccctgattctagagagccaaaactggcgatacgcaacaggaggatgggaaaccgttttcagacctgtgtcagagacatgcactgacagatccgggatcagcaccgggcattggtccggcgaagtcaaggacaaaaacgtccaggtggtcgaactccccatcgtggatagcctccacccacgccctccttatctgcctttggccgttccagaggatcttgctgatcgactcgttcgggtgcatggagacccagcggtatggtgggtttctcagtttgtgaaatacttaataagaccgcagccgtggttagaaaaggagatcgaagaggctactaagaagctgggttttaagcaccctgtcatcggcgtgcatgtgcggcgtactgacaaagtgggaacagaagctgcttttcacccaatcgaagaatacatggtgcacgtcgaagaacacttccagctgctcgcgagaaggatgcaggtagataagaagcgcgtttatttggctacggacgatccatctctcttaaaggaagccaaaacgaagtacccaaattacgagttcatttctgataatagcattagctggtccgcaggcctccacaaccgttacaccgaaaactcgcttagaggcgtcatcctcgacattcactttctgagtcaagctgacttcctggtttgcacctttagtagccaggtatgtcgtgttgcatatgaaattatgcagaccttacacccggacgcctcggccaacttccactccttggatgacatttactacttcgggggacaaaacgctcacaaccaaatagcgatctatgctcatcagccaagaaccgccgacgaaatcccaatggagcctggagacatcatcggcgtcgcagggaatcattgggatggatattcaaaaggggtgaataggaagctgggccgtaccggcttgtatccgtcgtacaaagtaagagaaaaaatcgagaccgtgaagtacccgacgtaccccgaggcagagaaatag

SEQ ID NO: 223752 - DNA, 1728 bp, synthetic construct
  misc_feature 1..1728: note = Description of Artificial Sequence: Synthetic coding sequence
  source 1..1728: mol_type = other DNA
atgcgaccttggactggtagttggcggtggattatgctgatcttgtttgcatggggcaccctcctcttttacattggaggccatctcgtgcgggacaacgatcatcccgaccattcctcccgcgagttgagcaagatcctcgctaaactggagaggctgaagcaacaaaacgaagaccttcggcgaatggctgagtcactgcgcattcccgagggcccaatagatcagggtcccgcaatcggcagggtacgggtccttgaagaacagctggtgaaggccaaagagcaaattgaaaactataaaaagcaaaccaggaacggtctgggtaaagaccatgagatcctgaggcggagaattgagaatggcgcaaaggagctgtggtttttcctgcagtcggagttaaagaagctgaaaaatcttgaagggaatgagttgcaacggcacgcagacgagtttctgctggaccttggccaccatgagcgttcaatcatgacagacctgtactatcttagccagaccgacggcgcaggagactggcgcgagaaggaagccaaggacctgacggagctagtgcagcggcgtatcacgtacctgcagaacccaaaggattgcagcaaggctaaaaaactggtgtgcaacatcaataaggggtgtgggtacggatgccagcttcaccacgtagtgtattgcttcatgatagcatatggcacacagagaaccctgatcctggagagccagaattggcgatatgcgaccggcggatgggagacagtgtttagacctgtgagtgaaacatgcacagataggagcgggatttcaaccggccactggagtggggaagtcaaagataaaaatgttcaagtggtggagcttccaattgtcgatagcttgcaccctcggccaccatacttaccacttgcagtcccggaagacttggccgatagactcgtccgggtgcacggggatcccgctgtgtggtgggtgtctcagtttgtcaaatatcttattcgtccacagccttggctggaaaaggagatcgaagaggccacaaaaaaactgggcttcaaacaccctgtgatcggagtgcacgttagacgtaccgacaaggtggggacggaggctgcattccacccaatcgaggaatatatggtgcacgttgaggaacattttcagttgttggctaggcggatgcaggtcgacaagaaacgcgtatatcttgcgactgatgatccctccctgcttaaagaagccaaaacgaagtatcccaattatgagtttattagtgacaattcgatttcttggtccgctggccttcacaacagatacaccgagaacagcctgcgcggtgtgatccttgatatccacttcctgagtcaggctgatttcttggtatgcacattttctagccaggtatgtagagtcgcttacgaaataatgcagacccttcaccctgacgcatctgctaatttccactcgctagatgatatttactacttcggcggacaaaatgcccataaccaaattgccatatacgctcaccaacctaggactgcggacgaaattcctatggaacccggagacattataggcgtcgcgggaaatcattgggatgggtattctaaaggcgttaacagaaaattggggcgaaccggcctatacccatcctacaaggttagagagaaaattgaaaccgtgaagtatcctacatatcccgaggccgaaaaatag

SEQ ID NO: 223753 - DNA, 510 bp, synthetic construct
  misc_feature 1..510: note = Description of Artificial Sequence: Synthetic coding sequence
  source 1..510: mol_type = other DNA
atgcaccggcaaatctggcatttgcattggactctggtgagatacccaaattacgaatttataagcgataattctatttcttggtctgccggacttcacaatagatataccgagaactcactcagaggcgtcatccttgacattcacttcctctcacaggcagatttcctggtctgcactttctctagccaagtctgccgggtggcctacgagatcatgcagacattacatccagacgctagcgcaaactttcattctctagacgacatttactatttcggaggtcagaacgcccacaaccagatcgcgatttacgcccaccaaccacggaccgccgatgagatcccaatggaacccggtgacatcatcggggtggctggaaatcactgggatgggtactctaaaggtgtaaatcgcaaactgggaagaactggactgtaccctagttataaagtcagggagaagatcgagacggtcaagtacccgacataccctgaggcagagaaatag

SEQ ID NO: 223754 - DNA, 48 bp, synthetic construct
  misc_feature 1..48: note = Description of Artificial Sequence: Synthetic coding sequence
  source 1..48: mol_type = other DNA
atgaggccctggacaggatcctggaggtggatcatgcttatcttgtag

SEQ ID NO: 223755 - DNA, 135 bp, synthetic construct
  misc_feature 1..135: note = Description of Artificial Sequence: Synthetic coding sequence
  source 1..135: mol_type = other DNA
atgagaccatggacaggatcctggaggtggattatgctgattttattcgcctggggtaccctgctgttctatattggcggacacctggttcgcgacaatgaccaccctgatcactccagccgcgaactgtcctag

SEQ ID NO: 223756 - DNA, 141 bp, synthetic construct
  misc_feature 1..141: note = Description of Artificial Sequence: Synthetic coding sequence
  source 1..141: mol_type = other DNA
atgaggccctggacgggttcatggaggtggatcatgcttattctgtttgcctggggtaccctgctattttacattggagggcacctagtgcgtgataatgaccaccccgaccattcttcccgtgagttatcaaaaatatag

SEQ ID NO: 223757 - DNA, 126 bp, synthetic construct
  misc_feature 1..126: note = Description of Artificial Sequence: Synthetic coding sequence
  source 1..126: mol_type = other DNA
atgaggccttggacagggtcctggcgctggatcatgcttatcctgtttgcctggggcacactgctgttttacatcggtggtcatctagtacgggacaatgaccatccagatcattcctcccggtag

SEQ ID NO: 223758 - DNA, 93 bp, synthetic construct
  misc_feature 1..93: note = Description of Artificial Sequence: Synthetic coding sequence
  source 1..93: mol_type = other DNA
atgagaccgtggaccggttcttggcggtggatcatgctgatcctgttcgcttggggcacccttctcttctacatcggagggcatttggtttag

SEQ ID NO: 223759 - DNA, 1239 bp, synthetic construct
  misc_feature 1..1239: note = Description of Artificial Sequence: Synthetic coding sequence
  source 1..1239: mol_type = other DNA
atgacagatctgtactacctgagccagactgacggcgcaggggattggagggagaaagaggcaaaggacctgactgagttagtgcagcgccgtattacttaccttcagaatcccaaagactgctctaaagcgaagaagcttgtgtgtaacattaataaaggttgcggatacggatgtcaactgcaccatgtggtgtattgttttatgatcgcctacggaactcaaaggaccctgatcctcgagtcccaaaactggcgctatgcaactggaggatgggaaacggtgttcaggcctgtttcagagacttgtacagatcgctccggtattagcaccgggcactggtcaggggaagtgaaggataagaacgtacaagtggttgagttgccaatcgtcgatagcttgcaccctcgaccaccttaccttccattagcggtacctgaagacttggccgaccgattagttagggttcacggtgatccagcagtctggtgggtctcacagttcgtgaaatacctgattaggccccagccgtggctggagaaggaaattgaggaagcaacaaaaaaactgggttttaagcacccggtaattggtgtgcatgtgcgacggaccgataaagttggcacagaggctgcgtttcatcccatagaggaatacatggtgcacgtagaggaacacttccaacttttggccaggagaatgcaagtagataaaaagagggtctatctggctaccgacgatccctctctactcaaagaagccaagacaaaataccccaactatgaattcatctctgataattctatcagctggtccgcagggctgcacaacagatacactgaaaattcgctccggggagttattttggacatacatttcctgtcccaggctgactttctggtgtgtacgttcagctcacaagtttgtcgtgtagcatacgagatcatgcaaacactgcacccagatgcttccgcgaattttcacagtctggacgatatatactatttcggcggacagaacgcccacaatcagatagctatttacgcgcaccaacctagaacggctgatgagataccaatggagcccggagatatcatcggcgttgccggaaatcattgggacgggtatagcaagggagtcaataggaaacttggcagaaccggtctgtaccccagttataaagtaagggagaagattgaaactgtaaagtatcccacctatccagaggctgaaaagtag

SEQ ID NO: 223760 - DNA, 153 bp, synthetic construct
  misc_feature 1..153: note = Description of Artificial Sequence: Synthetic coding sequence
  source 1..153: mol_type = other DNA
atgcgcccttggacgggctcctggagatggattatgctaattcttttcgcttggggtactttattgttctatatcgggggacatctggtccgagataatgaccaccccgatcactccagtagggaacttagtaaaattctggccaagctgtag

SEQ ID NO: 223761 - DNA, 1080 bp, synthetic construct
  misc_feature 1..1080: note = Description of Artificial Sequence: Synthetic coding sequence
  source 1..1080: mol_type = other DNA
atgacttcaacttcaaaagggattttacgtccctttctgattgtctgtataatccttgggtgcttcatggcctgtttgttaatttatataaaaccgacgaattcgtggatattttcgccaatggagtccgcatcctcagtactgaagatgaaaaactttttttcgactaaaactgactacttcaatgagaccacaattctagtctgggtttggccctttggccagaccttcgacctaacctcttgccaagcaatgtttaatatacagggatgtcatttgaccacagatcgctctctgtataataagtcgcacgcagtcctcattcaccaccgggacatcagctgggatttaacaaacctgccacagcaggctaggccaccttttcagaaatggatctggatgaatttagagtcccctacacacacacctcaaaaaagtgggatcgagcacttgttcaatctcaccctgacatatagacgcgatagtgatatacaggtgccctacggctttctgaccgtctcgaccaatcctttcgtgtttgaagtgccatccaaagagaaactggtttgttgggtggtgtcaaattggaatcccgagcacgccagagtgaaatactacaacgagctaagcaagtccattgaaatccacacttacgggcaggcgtttggcgagtatgtcaacgataaaaaccttattcctacaattagcacttgcaaattctacttgtccttcgagaacagtatccacaaagactatattaccgaaaaactctacaacgcctttttggctggctcggtcccagtggtgcttggaccaagccgggaaaattatgagaactatatccctgccgactccttcattcacgtggaggactataactcaccctctgaacttgccaaatacctgaaggaggtggacaagaacaacaaactgtacctgagctattttaactggcgcaaagattttacagtgaacctccctaggttctgggaaagccacgcttgtctggcatgcgatcacgtcaaacggcaccaggagtataaatccgtgggtaacctggagaaatggttctggaattag

SEQ ID NO: 223762 - DNA, 660 bp, synthetic construct
  misc_feature 1..660: note = Description of Artificial Sequence: Synthetic coding sequence
  source 1..660: mol_type = other DNA
atgaaccgtctgtttggtaaggctaagcctaaagcacctcccccaagcctgactgactgcatcgggaccgtcgattcaagggctgaatccatcgacaagaagatatcaaggctcgatgcggagttggttaaatataaggatcaaatcaaaaagatgagggagggaccagctaaaaacatggtaaagcagaaggctcttagagtgctgaaacagaagaggatgtatgagcaacagcgggacaacctggctcaacaatcttttaatatggaacaggcaaattacaccatccaatctcttaaagacactaagacgacagttgacgctatgaaattgggagtgaaagagatgaagaaggcctacaagcaggtgaaaatcgaccagatagaggacttacaggatcagctggaggatatgatggaggatgccaacgaaatccaggaggctctgtctcgaagctacggaacgcctgagctcgacgaagacgatttggaagctgaattggacgcccttggtgacgagcttttggccgatgaggattcaagctacttagacgaggctgcctccgcccctgccattcctgagggcgttccgaccgacaccaagaataaggacggagtattagtcgatgagtttggcctgcctcagatcccggcaagctag

SEQ ID NO: 223763 - DNA, 1293 bp, synthetic construct
  misc_feature 1..1293: note = Description of Artificial Sequence: Synthetic coding sequence
  source 1..1293: mol_type = other DNA
atgagccggattaacaagaacgtggtcttagcactgttgacgcttacgtcctctgccttccttctgttccagctatactattacaagcactacctgagtaccaagaatggcgcaggactcagcaaaagtaaaggctcacgcattggctttgattcaacacagtggagggccgtaaagaaatttatcatgcttactagcaaccaaaatgtgccagtcttccttattgacccactgatcctcgagctcatcaataagaattttgagcaagtgaagaatacatctcacggctcaacatcacagtgcaagttcttttgtgtgcctcgagacttcacggcgtttgcacttcagtatcatctttggaagaatgaagagggctggttccggatcgctgagaatatgggcttccaatgcctgaaaatcgaaagcaaggacccacgcctcgatggaattgacagtctctctgggacagagatacctctgcattatatttgtaagcttgctacacatgcgatccatctggtcgtgttccacgaacgcagtggaaactatctgtggcatggccacctccggctgaaagagcacatcgatagaaagtttgtgccgttccgaaaactgcaattcgggagatatcccggagctttcgaccggccagaactccagcaggttacagtagacggactggaggtcttaatacctaaggacccaatgcatttcgtcgaagaggtgccacacagtcgctttatcgaatgcaggtataaagaagctcgggctttttttcagcaatacctggacgataatactgttgaagcggtcgcttttcggaagtctgccaaggaactgttgcagctcgccgctaagacactcaacaaattgggggtgcccttttggctatccagtggcacatgccttggctggtacaggcagtgtaacataattccctattccaaagacgtggacctgggcatctttatccaggactataagagcgacattatcctggcctttcaggatgccggtctgccactgaaacacaagttcggaaaagtggaagatagcctggagttgtcttttcagggaaaggacgacgttaaacttgacgtgttcttcttttatgaagagacagaccacatgtggaatggcggaactcaggccaagaccgggaagaaatttaagtacctgttcccaaagttcaccctgtgctggaccgagtttgttgacatgaaggtgcacgtgccctgcgagacactggaatatatcgaggccaactatggaaagaaccagcagggagcatag

SEQ ID NO: 223764 - DNA, 708 bp, synthetic construct
  misc_feature 1..708: note = Description of Artificial Sequence: Synthetic coding sequence
  source 1..708: mol_type = other DNA
atgatcctggaggtgggcgagaataacggattttttagtaagagcctgctcccccgatatgcatccaagaagttgaaatcttcgctccctcatagccgtgccgtcaagaaattcatcatgttgacaagtaaccaaaacgtgcctgtgttcctgatcgaccctctcatcctggagctgatcaataaaaatttcgaacaggtcaaaaatacatcgcatggctcgacctcacagtgtaaattcttttgtgtgcctcgtgattttacagcctttgcattgcagtatcacctatggaagaacgaggaagggtggtttcgcatcgctgagaatatgggattccaatgcttgaaaattgagtcaaaggatccgagactggatgggatcgatagcctgtccggcactgaaataccactgcattatatctgcaaactcgcaacacacgctatccacctagtggttttccatgagcgttctggtaattacctctggcacggtcacctccgccttaaggaacacattgataggaagttcgtgccatttcgcaaacttcagttcgggagatacccgggagcatttgaccggccagaactccaacaggtgaccgtcgatgggctagaggtcctgatacccaaagacccgatgcacttcgtggaggaggtgccccactcaagattcatcgagtgtcggtataaagaagctcgcgcattctag

SEQ ID NO: 223765 - DNA, 552 bp, synthetic construct
  misc_feature 1..552: note = Description of Artificial Sequence: Synthetic coding sequence
  source 1..552: mol_type = other DNA
atgtcccggattaacaagaacgtcgtgctggcccttttgacgcttacgtcatctgccttcctgctatttcagctatattactacaaacactatctgtcaaccaagaatggagctggactgtccaagtcgaaggggtctagaataggcttcgatagtacacagtggcgcgcagtgaagaagttcattatgctgacctctaaccaaaatgtgccagtgttccttatagaccccttaatactagagctaattaataagaatttcgagcaagtcaagaatacgagtcacggctctacgtcccagtgcaagtttttctgtgtaccgagagattttacagccttcgccctgcaataccacctgtggaaaaatgaggaggggtggtttagaatagctgagaacatgggttttcagtgcttgaaaatcgagtcaaaagatcccagactcgatggtattgactccctaagcggaactgaaattcctctgcattacatttgtaagttagccacacacgctatccacctagtggttttccatgagagaagtggcaattactag

SEQ ID NO: 223766 - DNA, 483 bp, synthetic construct
  misc_feature 1..483: note = Description of Artificial Sequence: Synthetic coding sequence
  source 1..483: mol_type = other DNA
tgatggtataggcagtgtaatatcataccctattcaaaagatgtcgacctgggaatcttcatacaggactataagtcggacatcattctcgcattccaggacgccggacttccactgaagcataaattcggcaaggtggaagacagtctggaattgtcgtttcaggggaaagacgacgtgaaacttgacgtgtttttcttctatgaagagaccgaccatatgtggaacggcggaacacaggcgaaaacaggaaagaaattcaagtacctgtttcctaaatttactttgtgttggactgagtttgtggatatgaaagtacatgtcccttgcgagacactcgagtatattgaggcgaactacggcaaagaggctgaatcttatatcctttcaatgctcttcaggacaactttctggtccctcgccgactttccactgactccggaaaacaactcgagcttgaagaacggaaatctcaacgtgtag

SEQ ID NO: 223767 - DNA, 816 bp, synthetic construct
  misc_feature 1..816: note = Description of Artificial Sequence: Synthetic coding sequence
  source 1..816: mol_type = other DNA
atgagtagaattaacaagaacgttgtactggccctgctgactcttacttcttccgcattcttgctctttcaactctattattataagcactatttaagcacaaagaacggcgcaggccttagcaagtcaaaaggctcaagaattggattcgactccacccaatggcgggctgtaaagaaattcatcatgcttaccagtaaccaaaatgtgcctgtcttcctgatagaccctcttatattggagctgataaataaaaacttcgagcaagtcaaaaacactagccacgggagcacctcacagtgcaagttcttctgcgtacccagagacttcaccgccttcgccctccaatatcatctgtggaagaatgaagaaggctggtttcgaattgccgaaaatatgggattccagtgcctgaagatcgaatccaaagaccctaggctcgacggcattgactcactttccgggacagaaataccactgcactacatttgcaaactggcaacccatgccatccacctggtggttttccatgagcggtccggaaattacctgtggcatggacacttgcggctgaaagaacacattgatcgtaagtttgtaccattcagaaagctgcaattcgggcgttaccctggggctttcgacagacctgagctccagcaggtgaccgtagatggcctggaagtcctgattccaaaagaccctatgcatttcgtggaagaggtccctcactcccggttcatagagtgtcgctataaagaggccagagctttttttcaaatcccagtgtcagaggtctatacagtgttggattag

SEQ ID NO: 223768 - DNA, 1488 bp, synthetic construct
  misc_feature 1..1488: note = Description of Artificial Sequence: Synthetic coding sequence
  source 1..1488: mol_type = other DNA
atgcgcctcacccggtgtcaggccgcattggccgctgccattaccctgaacctgctcgttcttttttatgtgtcttggctccagcaccaacctcggaattcgagagcaagaggcccaagacgagccagcgccgcagggccaagagtgactgtgctcgttagagaattcgaggcattcgataatgctgtgccagaacttgtcgattctttcctgcaacaggatccagctcagcccgtggtcgtggcagcggacaccctgccgtatccaccactcgctctgcctagaataccgaatgtgaggttagctctcctgcagcctgcgctggatagacccgcagcagcctcaagaccggaaacatatgttgccaccgagttcgtcgcacttgtgccggatggtgcccgagcagaggctcctggtctcttagagcggatggttgaggccttgcgagctggctcagccaggttggtcgccgcacctgttgccaccgctaatcccgctcgatgccttgcactgaatgtcagcctgcgggaatggacagccaggtatggcgcagcccctgccgcaccaaggtgcgacgcgctggacggtgatgcagttgtgttgctgcgggctagggacttgtttaacctgtcggctcctctggcccgacccgtgggcacttccctgttcctgcagaccgccctaagaggctgggctgttcagctgctcgaccttactttcgccgcagccagacagccccctctggcaaccgcacacgcgagatggaaagcggagcgcgagggccgtgccagacgcgctgcgctgttgagggccttagggattcgcctggtatcatgggaggggggaaggctcgagtggttcggatgcaacaaagagaccaccaggtgtttcggaaccgtcgtcggcgacacacctgcctacttgtatgaggagaggtggaccccgccttgttgtctccgggcactcagagagacagctcggtacgtagtgggggtgctggaagcggctggggtgcgatattggcttgagggcggttcactcttgggggcagcaagacacggggacatcattccttgggattacgacgttgacttagggatctatttagaagacgtgggcaattgtgagcagctgaggggcgcagaagctggttctgtcgtcgacgaacggggttttgtgtgggagaaggcagtagagggcgatttcttcagagtacaatattcagagtcaaatcacttgcacgtggacctttggccattctaccctcgaaatggcgtcatgacgaaggacacctggttggatcaccgccaggatgtcgagttccccgagcactttctgcagcctctggtgcccttacctttcgccggatttgtggctcaagccccaaacaactaccgcagatttctcgaattaaaatttggacctggggtcatcgagaacccccagtaccccaaccctgccctgctttctctgaccggatccggatag

SEQ ID NO: 223769 - DNA, 1488 bp, synthetic construct
  misc_feature 1..1488: note = Description of Artificial Sequence: Synthetic coding sequence
  source 1..1488: mol_type = other DNA
atgcgactgactcgatgtcaggcggctctggccgctgcaatcaccttgaacttacttgttttgttctatgtgtcatggttgcagcatcagcctagaaattcccgcgctagaggaccaagacgggcaagcgccgcagggccaagagttacagtactggtccgcgaatttgaagccttcgacaacgcagtccccgagctggtcgattcattcctgcagcaggaccccgctcaacctgtggttgtagccgcagataccttaccctacccaccactggcactgcccagaattccaaacgtgagactagctctcctccagccagcactggatagaccggcagcagcttcacggcctgagacgtacgtagccacggaatttgtcgcgctggtgcctgatggagctagagccgaagccccaggtcttcttgagcggatggtcgaagccctgcgggctgggagcgccaggctagttgccgctccggtggcaacagccaacccagccaggtgtttggcccttaatgtctccctgcgcgagtggactgcccgttacggagcagcccctgcggctccccgatgtgatgctcttgacggtgacgccgttgtgttactgagagccagggacttattcaacttgtctgctcccctggcaaggccggttgggacatcactctttttacaaactgctttaagaggatgggccgttcagctcctggatcttacctttgcagctgccagacagcctccactggccactgcacacgctcgctggaaagccgagcgggagggaagggctaggcgcgcagccttgctacgcgctttagggatacggctagtaagttgggaagggggacgcctggagtggttcgggtgcaacaaagagactacccgctgtttcggtactgtggtcggcgatacccccgcttacctctacgaagagcggtggacgcctccttgctgcctgagagcactgagagagacggcacggtacgtggtgggagtcctggaagctgccggagttcgctactggctcgagggaggatctttgttgggggcagcgaggcatggcgatattattccttgggactacgacgtcgacttggggatctacctggaggacgtgggcaactgcgaacagttgagaggcgcagaggcagggtctgtagtggatgagcggggattcgtgtgggaaaaggccgtcgagggagacttcttccgggtacagtactccgagtcgaaccacttacatgtggacctatggccattttacccaagaaacggggtaatgaccaaggatacctggctggatcaccggcaggacgtagagttccccgagcattttcttcagccgctcgttcccctccccttcgcaggctttgtcgcccaggcccctaacaactataggcgtttcctggaactgaaatttggtcccggagtcatcgagaacccccagtatcccaatccggcactacttagcttgaccggatctgggtag

SEQ ID NO: 223770 - DNA, 2385 bp, synthetic construct
  misc_feature 1..2385: note = Description of Artificial Sequence: Synthetic coding sequence
  source 1..2385: mol_type = other DNA
atggagcttagaccctggctcctttgggtggttgccgctactgggactttagtgctgctggccgcagatgcgcagggccagaaagtcttcaccaatacctgggccgtgagaatccccggtggacctgccgtcgcaaattccgtcgccagaaaacatggatttcttaacctaggccagatctttggggattattaccatttctggcataggggagttactaagcgtagtctcagcccccatcgaccgcgacattcccgactgcaacgtgaaccacaggtccagtggctggaacaacaggtagctaagcgacgaacaaagagagacgtctatcaggaacctacagatccgaaatttccacagcaatggtacttatcgggagtgacccagagggatctgaatgtcaaagctgcctgggctcagggatacaccgggcacgggattgtagtatctatcctggacgacggcatcgagaaaaatcaccctgatttggctgggaactacgatccaggtgcatcctttgatgttaatgaccaagaccccgaccctcagcccagatacacccagatgaacgataaccgccatggtacgcgctgcgctggcgaagtggcagcagtcgctaataatggagtttgtggagtgggggtggcgtacaatgctaggattggtggagtgcgtatgctggacggagaagtcactgatgcagtggaagcaagatccctgggattaaaccctaatcatatccacatatactccgcatcttggggccctgaagacgacggcaagacagtggatggtcctgctcgtttggccgaagaggcatttttcaggggtgtgtcgcaggggaggggcggattaggcagtatattcgtgtgggcttcgggcaatggcggtagggagcatgacagttgtaactgtgacgggtacaccaattcgatttacacgctgagcattagcagcgctactcagttcggaaatgtcccatggtattccgaggcctgctccagtaccctcgcaaccacatactcttccggaaaccaaaacgaaaagcagatcgtgacaaccgacctgcgtcagaagtgcacagagagccatacggggacttcagccagcgccccattggcggcaggcatcatcgcactgacacttgaggccaacaaaaacttgacgtggagggatatgcagcatcttgtggtgcagacctctaaacccgcacatctcaacgccaacgactgggctaccaacggagtcggcaggaaagttagccacagttacggctacggtctactggatgctggagctatggttgcacttgcccaaaactggacaaccgttgctcctcagaggaagtgcattatcgatatactgacagaacccaaggacattggtaaacgtctggaagtccggaagaccgtcacagcatgtctgggcgagccaaaccacattactaggctggagcacgcacaagctaggctgaccctgtcctataaccgcagaggggacctggctatccacctcgtgtctcccatgggcaccaggtcgacgctgttagctgccaggcctcacgattactccgccgacggattcaatgattgggcgttcatgactacgcacagctgggacgaggacccttcaggcgagtgggttttagagatcgagaacaccagtgaggctaacaattacggcacccttacgaagtttactctggttttatatggaaccgccccagaaggtctgcccgtgccgcctgagtcatccggctgtaaaacgctgaccagtagtcaggcctgtgtggtttgcgaagaaggcttctccctccatcagaaaagctgcgtgcagcattgtccgccaggatttgcaccccaggtgctggatacccattattccactgaaaatgatgttgagactatcagagcgtctgtgtgcgcaccatgtcatgcatcctgcgccacttgccaggggccagcccttacagactgcttatcttgtccttcgcatgcttccctcgatccggtcgagcagacatgcagtcgtcaatcccaatctagtagggagtcccctccacagcagcagccccctagactgccacccgaggtggaagccggacagagactgcgcgctgggctgctgccttcacatctgccagaagtggtagccggtctttcttgtgcctttatagtgcttgttttcgtgactgtgtttttggtcttgcagctccgatcaggattctcctttaggggcgttaaggtttacaccatggacaggggactgatctcctataagggcctgcccccagaggcttggcaggaggagtgtcccagcgacagcgaagaagatgaaggccgtggggagagaacagcttttatcaaggatcagtctgctctttag

SEQ ID NO: 223771 - DNA, 210 bp, synthetic construct
  misc_feature 1..210: note = Description of Artificial Sequence: Synthetic coding sequence
  source 1..210: mol_type = other DNA
aagcctgctcacctgaacgctaacgactgggctactaacggagtggggaggaaggtgtcccactcgtatggatatggattgtggacccaagcaccctggtggccctggccaaggatcggacctcagtggcccccttccgggtctgcctcttctacaagtagcccgagtccgaagaccagcggcaacggctcaagatgcggccgaccctag

SEQ ID NO: 223772 - DNA, 210 bp, synthetic construct
  misc_feature 1..210: note = Description of Artificial Sequence: Synthetic coding sequence
  source 1..210: mol_type = other DNA
atggaactacgtccatggctcctttgggtggttgcggcaaccggtactttggttcttctggccgcagacgcccagggacaaaaggtgtttacgaacacgtgggctgtgagaatccccggaggccctgccgtcgccaactctgtcgccagaaaacatggatttctcaatctgggccagatttttggcgattattatcacttctggcattag

SEQ ID NO: 223773 - DNA, 1581 bp, synthetic construct
  misc_feature 1..1581: note = Description of Artificial Sequence: Synthetic coding sequence
  source 1..1581: mol_type = other DNA
atggcttccaacgattacacgcaacaggccacacagtcatatggcgcatatcccacccagcccggtcaaggatacagccagcaatccagtcagccttacgggcagcagagttattctggctactcccagtctactgacacctccggctacggacagagttcctacagctcttacgggcagtctcagaataccgggtacggtacgcagtctacgccacagggctacggatctacggggggatacggctctagtcagtcaagccagtcttcctacggacaacagagctcataccctggctatggacagcagcccgctcctagtagcacttccggcagttatgggtccagcagccagtctagcagttatggacagccacagagtgggtcctactcacagcagccttcatacggtgggcagcagcagtcttatggtcagcagcagtcttacaaccctccccaggggtatggtcagcagaaccagtacaattcaagtagcgggggaggaggaggcggtgggggaggcggaaattacggccaggatcagtcttcgatgagctccggcggtggatccggaggaggttacggtaaccaggatcaaagcggaggcggtggatcaggtggatacggacaacaggatcggggtggacgcggacgagggggatcgggtgggggtggtggtggcggaggcggaggatacaacagatcctcaggtggctacgaacctagagggaggggtggagggagggggggacgcggtggaatgggtgggagtgaccggggtgggttcaacaagttcggcggtcccagggaccaggggtcaaggcacgactcagaacaggacaatagcgacaataatacgatctttgtgcagggcctaggtgaaaacgtgactatcgaatctgtggccgattattttaaacagattggtatcattaaaaccaacaagaagaccggacagccaatgattaacttatacacagaccgagagaccgggaaactgaagggggaagcaacagtgtcattcgacgatccaccttcagccaaagccgctattgattggtttgatggcaaggagttttcgggcaatcccatcaaggtgagcttcgcaaccaggcgggctgattttaaccgtggcggtggtaacggaagagggggacgcggacggggtggccctatgggcaggggtggatatgggggtggcggatctgggggtgggggaagaggtgggtttccgtctggcggaggaggtggtggcggacagcagcgtgccggtgattggaagtgcccaaatccgacatgcgaaaatatgaacttcagctggcgcaacgaatgtaaccagtgcaaggctccaaagcccgatgggcctgggggaggacccggaggcagtcacatgggcggaaactatggcgacgaccggagaggagggcgaggtggctatgacagaggaggttatcgcggacggggtggcgacagaggcggattcagagggggacgcggtggcggagataggggcggtttcggtccaggcaagatggactctcggggagaacacagacaggatagacgggaaaggccatattag

SEQ ID NO: 223774 - DNA, 456 bp, synthetic construct
  misc_feature 1..456: note = Description of Artificial Sequence: Synthetic coding sequence
  source 1..456: mol_type = other DNA
atgaaccctgaagtggtggaggtggctgtcgaggcagaggttgcttgggcagaagtgaccgtggttgcctccattaacctcgtagccttaggcactaaggatcatgtcatgacacctacaaataagaagactggacagccaatgattaatctgtacaccgaccgcgagacgggaaaactgaagggggaagccacagtttcatttgatgacccccctagtgccaaggcagccattgattggtttgacggcaaggaattctcgggaaaccctataaaagtgtcctttgccacaaggagagctgactttaacaggggtggaggcaatggcagaggtggacggggacgtggtgggcctatggggcgaggcggatacggcggaggagggtctggtggcggaggccgaggcggttttccctccggcggtggaggcggtgggggtcagcagcgggcaggctag

SEQ ID NO: 223775 - DNA, 1290 bp, synthetic construct
  misc_feature 1..1290: note = Description of Artificial Sequence: Synthetic coding sequence
  source 1..1290: mol_type = other DNA
atggctagtaatgactacactcaacaagctacccagtcctatggagcatatcctactcaaccgggacagggttatagccagcaaagtagtcaaccatacgggcagcagtcttatagtggctactcccagtctacggatacctccggctatggccagtcttcatactcctcttacggccagtctcaaaacacaggatacggtacccaatcgactccacagggttatgggagtacaggcggttatggttcgagtcaaagcagtcagtcatcctacggacagcagtccagctaccctggctacggacaacagccggcaccctcatctacatccgggtcctacggctccagtagccagtcttcctcttatggacaaccacagtccggtagctatagccagcaaccgagttacggaggacaacagcagtcctatggtcagcaacagtcttacaacccacctcaaggatacggtcaacagaaccagtacaacagttctagtggtggatacgagcccagagggaggggcggaggaaggggtggacggggtggaatgggcggatccgatcgcggtggattcaataaattcggcggacctagagaccaaggcagtagacacgactccgaacaggataacagcgacaacaacaccatttttgtgcagggactgggcgagaacgtgacgatagagtctgtcgctgactatttcaagcaaattggaataatcaagacaaacaaaaaaaccggacagccgatgataaacttatatactgatagggaaactggaaagctcaaaggcgaggcgaccgtgtcctttgacgatccccctagcgctaaggctgcaatagactggttcgatggtaaggaattcagcgggaatcccataaaagtgagttttgcaaccaggcgggctgattttaatcggggaggaggaaacgggcgaggcggacgcggaagaggaggccctatggggcgaggcggttatggcggtggaggatcaggagggggaggacgtggagggtttccctccggaggcggaggcggaggcggacagcagagggcgggagattggaagtgccccaatcccacatgcgaaaacatgaatttctcttggcggaacgaatgtaaccagtgtaaggcacccaaacctgacgggccagggggaggtcctggaggctcgcacatgggcggaaactacggagatgacagacggggaggagacagaggcggattcggacccggaaagatggatagccgaggtgagcatcgccaggatcgcagggagcgcccttactag

SEQ ID NO: 223776 - DNA, 1257 bp, synthetic construct
  misc_feature 1..1257: note = Description of Artificial Sequence: Synthetic coding sequence
  source 1..1257: mol_type = other DNA
atgggagaggagggcacaggcggtactgtccatttgctgtgcttggctgccagctccggcgtgcctctgttctgccggtccagccggggaggagcaccagctcgtcagcaactgcccttttctgtcattgggtccctgaacggagtacatatgtttggacagaatcttgaggtgcaattatcctctgcacgtactgagaacactacagtggtgtggaagtcatttcacgactctatcacactgatcgtcttgtcaagtgaggtggggatctctgaactaagacttgagagactgttacagatggtatttggcgcaatggtgctacttgtcggcctggaggaactgactaatatccggaacgtcgagcggctgaagaaggacctgcgggcatcctactgtcttatcgattccttcctgggcgatagtgagttgatcggcgacttgacacagtgcgtggattgcgtgattccacctgaaggaagccttctacaagaggccctttctggctttgccgaggccgcaggcacaaccttcgtgtcactcgtggtttccggtcgggtggtagctgccactgagggctggtggcggctgggaaccccggaggcagttcttctgccttggttagtcgggagtctaccaccccaaacggccagggactaccccgtctacctgcctcatggatctccaaccgtgcctcatcgactgctcacgttgacactgttacctagtctggagttgtgtctgctgtgcggcccttctccacccttaagtcagctgtacccccaactgctggagcgttggtggcaaccacttctggacccgctccgggcttgtcttccattggggccacgggctctacccagcggttttccgctccacacagacattcttggactcttgctgctccacctcgagctcaagcggtgtctgttcactgtcgaacccttgggcgataaggagccctcacccgaacagagacgaaggttgctgaggaacttttatactctggttacctctacccacttcccgccagaacccggtccccctgagaagaccgaggatgaagtctatcaggcacagctccccagggcatgctacctggtgctggggaccgaggagcctggaaccggggtgagactcgtggcattgcagctggggttgcgaagactcctgctgctgttaagtccccagtcccccacgcatggattacgttcccttgccacacacaccctgcacgcccttactcctctcttgtag

SEQ ID NO: 223777 - DNA, 711 bp, synthetic construct
  misc_feature 1..711: note = Description of Artificial Sequence: Synthetic coding sequence
  source 1..711: mol_type = other DNA
atgggcgaagagggcactggcggtacggtccatcttctctgtctcgccgcttcctctggagtgccattattttgtaggtcttcaaggggcggtgccccagccaggcagcagctgccattttctgtcatcggtagtctgaatggagtgcatatgttcgggcaaaacctggaagtacagctgtcctcagcgagaacagaaaacaccaccgtggtttggaagagtttccatgatagtataacattgatagtcctgagctccgaggttgggattagcgagcttaggctggagcgcctactgcagatggtgtttggcgctatggtgttactggtcggcttagaggaacttacaaacatccgaaacgtggagagactgaagaaagacctgcgcgctagttattgcctcattgattcttttttaggcgacagcgagctgattggggacctgacgcagtgcgttgactgtgtaattcccccagaggggtctttattgcaagttctgggaatgttgtggaaactgctgcacctgttctgctggccttggctgtcgcctcacccactgtcaagcggacctctgagccagcctccccctatattgtctgcctcaagcccgattcctacctggagtcagaagaatctattctcattcttcttttcattcctctctttgtctttcctgttctccttcctcagcctctttctgttcgagacttag

SEQ ID NO: 223778 - DNA, 1164 bp, synthetic construct
  misc_feature 1..1164: note = Description of Artificial Sequence: Synthetic coding sequence
  source 1..1164: mol_type = other DNA
atgggggaggaaggaacaggcggaacagttcatctcctttgccttgcagcttctagtggtgttcccctcttctgccggagttcacgtgggggtgcaccagcgaggcagcaactacctttttctgtcatagggtccctaaacggagttcacatgtttggtcaaaacttagaggtgcagctctcctcagccaggaccgagaacacaaccgtcgtttggaaaagttttcacgactcgattacattgatcgtcttgtcttctgaggtgggaatatcagagctccggctagaacgcctcctccagatggtgtttggggctatggtgctgctcgtgggactggaagagctcacaaatattcgtaatgtcgaacggttgaagaaagatctgcgcgctagctactgtctcatcgactcgttcctgggggactccgaactgatcggagacctaacgcaatgtgtggattgcgttattcctcccgagggatccttactccaggaggccttgtccggttttgccgaggccgcagggaccacatttgtgtcacttgtggtaagcggcagagtggtagctgcgacagagggctggtggaggttaggcactccggaagcggttctacttccatggttggttggctcccttcctccacagactgcccgagattacccagtttatctgccccacggctcacctacagtgccccaccgcctcctcacactgaccttgctccctagcctcgaattgtgtcttttgtgtggaccctctccccctctctcgcagttgtatccccagcttctagagcgctggtggcagcccctattggacccgttgagagcctgtctgcccctgggaccgagagctctgcccagtggtttcccacttcacactgatatcctgggactactgcttctgcatttagaacttaagcgctgcctcttcaccgtggagcctctcggagataaggagcctagccctgagcagcggaggcgacttctgcgcaacttctataccttagtgactagtacccacttccccccagaaccgggacctccagagaaaactgaagacgaagtgtaccaggcccaattgccacgcgcatgctacctggtaatgggcgacggccaccggcacggggctgtgtccgttagccttttcattcgcagccagtag

SEQ ID NO: 223779 - DNA, 1149 bp, synthetic construct
  misc_feature 1..1149: note = Description of Artificial Sequence: Synthetic coding sequence
  source 1..1149: mol_type = other DNA
atgggggaggagggtacgggcggaaccgtgcacctgctctgtctggcggctagttccggcgtgccccttttctgtagatctagcagagggggagccccagcccgacagcagttacccttcagtgttattggcagcctgaacggcgtccatatgtttggacagaacttggaggtgcagctatcatctgcaaggaccgagaacacaaccgtggtactattagtgggtctcgaggagctgacaaacatccgtaacgttgagcgcttaaaaaaggatctccgcgcttcctactgtcttatagactcatttctgggtgactctgagctgatcggagaccttacacagtgtgtcgactgcgttatacctccagaaggctcactgttacaggaagcactctccggcttcgccgaggctgctggtaccacctttgtgtcgctcgttgtttctggcagagttgtcgctgccactgaaggatggtggaggctcggtacgcctgaggccgtcttgctgccatggctcgtgggttccctccctccccagacagctcgcgattacccagtgtacctcccacacggctcccccaccgtccctcataggctgcttacactgacactcttgccatccctggaactctgcctgctgtgcgggcctagcccaccattgagccaactctatccgcaactcctggagaggtggtggcagccactgctcgaccccctgagggcatgcctgccacttggacctcgggcactgccatccggtttccctctgcatacggatatcctgggcctgctgcttctccacctggagttaaaaagatgcttatttactgtagaacctctgggagacaaagaaccaagccccgagcaacggcgtaggctcctgcggaacttctatactctcgtcacgagcacacactttccgcctgaacccggaccgccagagaaaacagaggatgaggtataccaggcgcaactaccaagagcgtgttacctggtgctgggcactgaagagccaggcacgggggtgaggttggtcgccctgcaattggggctcaggcggctcttgctgttgcttagtccccagagtccgacccatgggttacgctctctggccacccataccctgcacgcactgactccattgctgtag

SEQ ID NO: 223780 - DNA, 279 bp, synthetic construct
  misc_feature 1..279: note = Description of Artificial Sequence: Synthetic coding sequence
  source 1..279: mol_type = other DNA
atggcctctctgggccacattctcgtgttttgtgtaggactcttaactatggcaaaggcggagagtccaaaagagcatgatccctttacctatgactaccagtcactccagattggcggactggtcatcgccggtattttattcattctcggtatcttgattgtcctgagcaggcggtgccgctgcaaattcaatcagcaacaacggacgggtgagcccgacgaagaggagggtacctttagaagctctattagaaggctgtccacccggcgtcggtag

SEQ ID NO: 223781 - DNA, 279 bp, synthetic construct
  misc_feature 1..279: note = Description of Artificial Sequence: Synthetic coding sequence
  source 1..279: mol_type = other DNA
atggccagcttagggcatattctggtattctgtgtgggcctgctcactatggccaaggccgagtctccaaaagagcatgacccgttcacctatgattaccagagcctgcagatcggaggactggtcattgcaggcatacttttcattctgggtatcctcattgttctgtctaggaggtgccggtgcaagtttaatcagcaacagcgcacaggtgagcccgacgaggaagaggggacctttcgctcttccatacgacggctgtccacccggagacggtag

SEQ ID NO: 223782 - DNA, 195 bp, synthetic construct
  misc_feature 1..195: note = Description of Artificial Sequence: Synthetic coding sequence
  source 1..195: mol_type = other DNA
atggatcgatggtacctgggaggttcaccaaagggggacgtggatcccttttattatgattatgagacggtccgtaatggtgggctgatctttgctggcctggcattcatcgtaggcctgctcatactgttgagtagaaggttccgatgcggaggaaataaaaaacgacggcagattaacgaagatgagccttag

SEQ ID NO: 223783 - DNA, 201 bp, synthetic construct
  misc_feature 1..201: note = Description of Artificial Sequence: Synthetic coding sequence
  source 1..201: mol_type = other DNA
atgaccgggctgtcgatggatggcggagggtcacctaagggggatgtggaccctttctattacgattatgaaacagtgcgtaacggtggactgatctttgctgggctcgcatttatcgtggggctcctgatcttgctcagtcgcagattcaggtgtggaggtaacaagaagcgtagacagattaacgaggatgagccgtag

SEQ ID NO: 223784 - DNA, 195 bp, synthetic construct
  misc_feature 1..195: note = Description of Artificial Sequence: Synthetic coding sequence
  source 1..195: mol_type = other DNA
atggacaggtggtatctgggaggtagtccaaagggagacgtggacccattctactacgattacgaaactgtacgtaatggcggattgatattcgctggactggcgttcatcgtagggttgctgattcttttgtctcgcaggtttaggtgcggaggcaacaagaaaaggaggcagataaacgaggatgagccatag

SEQ ID NO: 223785 - DNA, 264 bp, synthetic construct
  misc_feature 1..264: note = Description of Artificial Sequence: Synthetic coding sequence
  source 1..264: mol_type = other DNA
atgcagaaggtgaccctgggcttgctggtgttcctggcagggttccctgtcttagatgcaaacgacttggaggacaagaactcccctttctactacgactggcactcgctccaagtgggaggacttatatgcgccggagttctctgcgctatgggaatcatcattgtaatgagcgcgaagtgtaagtgtaaatttggtcagaaatctggacatcatcctggcgagacacctccgctcatcacccctgggtcggctcagtcatag

SEQ ID NO: 223786 - DNA, 342 bp, synthetic construct
  misc_feature 1..342: note = Description of Artificial Sequence: Synthetic coding sequence
  source 1..342: mol_type = other DNA
atgcagaaagttactctagggctgctcgtgttccttgccggattcccagtgctagacgctaacgatcttgaggacaagaatagcccattctattatgactggcacagcctgcaggttggtggattaatttgcgctggggtgctgtgcgccatgggcattattattgtaatgagcgaatggcgcagttccggggaacaggcagggaggggatggggatctccacctctgaccacgcaactgagccccacaggcgctaagtgcaaatgtaaattcgggcaaaagtcaggtcatcatcctggtgagactccaccattaataactcctggttccgcccaaagttag

SEQ ID NO: 223787 - DNA, 291 bp, synthetic construct
  misc_feature 1..291: note = Description of Artificial Sequence: Synthetic coding sequence
  source 1..291: mol_type = other DNA
atgcagaaagtgacattgggtctattagtgtttctggccggatttcccgtcctagatgcaaatgacctggaggacaaaaacagcccattttattatgactggcacagtctccaggtagggggacttatttgtgcgggtgtactgtgtgctatggggattattatcgtcatgtccgagtggcgaagtagcggagaacaggcagggcgtggttggggatcacctccccttaccacacagctatccccgactggagcaaaatgcaaatgtaagtttggccaaaagtctggatag

SEQ ID NO: 223788 - DNA, 264 bp, synthetic construct
  misc_feature 1..264: note = Description of Artificial Sequence: Synthetic coding sequence
  source 1..264: mol_type = other DNA
atgcagaaagtcaccctgggactgctggtttttctggcagggtttcctgtcctcgacgctaacgacctcgaggataaaaacagtccgttctactatgactggcactccctgcaggtaggcggtcttatctgtgccggtgtcttatgcgccatggggatcatcattgtaatgagcgcaaagtgcaagtgcaagttcggccaaaaatcagggcatcaccccggagagacccctcccttgattacacccggttcagcgcagtcctag

SEQ ID NO: 223789 - DNA, 435 bp, synthetic construct
  misc_feature 1..435: note = Description of Artificial Sequence: Synthetic coding sequence
  source 1..435: mol_type = other DNA
atgggtagggggtattctggtgctctccaggctaggggaggcctcgaggagcccctggagcggggactgagaggtccatcattcacacagtcccctctgcatggcgcagccgctgcatatctgtccgcacagcgcgacgcatcattgccagtgcccggtcagagatctgacatgcagaaagtcacactgggactcctcgtgtttctggccggattcccagttctcgacgctaacgacttggaggataagaattcccctttctactacgattggcactccctgcaggtgggaggtctgatctgtgctggcgttttatgcgcgatgggtataataatagtgatgtctgctaaatgcaaatgtaaattcggccagaagtccggccaccatccgggtgagacacctcccctcatcacacctggctctgctcaatcctag

SEQ ID NO: 223790 - DNA, 186 bp, synthetic construct
  misc_feature 1..186: note = Description of Artificial Sequence: Synthetic coding sequence
  source 1..186: mol_type = other DNA
atgcagaaggtcaccttggggctgttggtttttctggccggatttccagtgcttgacgctaacgacttggaggacaaaaacagcccgttctactacggtgaaagcccctgtcctctgagtcccccacataaccccacctattgtctggtgcctcgtgtgcctatacagggctggggcctgacatag

SEQ ID NO: 223791 - DNA, 435 bp, synthetic construct
  misc_feature 1..435: note = Description of Artificial Sequence: Synthetic coding sequence
  source 1..435: mol_type = other DNA
atgggccgaggctattctggcgcactgcaggctcggggaggcctggaggaacccctcgaacggggattaagaggcccatcttttacccagtctcccctgcacggggctgcggctgcatacctctcagcgcaacgtgatgcatccctccctgtgcccggtcagcggtccgacatgcagaaggtaaccttgggactgctcgttttccttgccggtttcccagtgctggacgcaaacgacctggaagataaaaactcacccttctactacgattggcacagcctgcaggtgggcggtctgatctgcgcaggtgtgctctgcgccatgggtatcatcatagtaatgtcggccaagtgcaagtgcaagttcggccaaaaatccgggcaccatccaggagagactccgcctctgatcacaccaggttccgcccagagctag

SEQ ID NO: 223792 - DNA, 288 bp, synthetic construct
  misc_feature 1..288: note = Description of Artificial Sequence: Synthetic coding sequence
  source 1..288: mol_type = other DNA
atggaactggtactggtgtttctatgttcccttttggcacccatggtactggccagtgctgcggagaaagagaaagagatggatccattccactacgactaccagaccctcagaatcggaggtcttgtgttcgcagttgtgctcttcagcgtgggcatcttgttgattctgtccagacgttgcaagtgtagtttcaatcagaaaccccgtgcgcctggtgacgaggaggcgcaggttgaaaatctcattacggcgaacgccacagagcctcagaaggcagagaactag

SEQ ID NO: 223793 - DNA, 288 bp, synthetic construct
  misc_feature 1..288: note = Description of Artificial Sequence: Synthetic coding sequence
  source 1..288: mol_type = other DNA
atggagctcgtgcttgtgttcttatgttcccttctggctcctatggtcctcgcgtccgccgctgaaaaagaaaaagagatggatccgtttcattatgactatcaaactctgcgaataggtggcctagtgttcgccgtagtattgttcagtgtgggaattctgcttatcctgtcaagaaggtgcaagtgctccttcaatcagaaaccgcgagcccctggggatgaggaggctcaggtggaaaatctcataacagctaatgctacagaacctcagaaggctgagaattag

SEQ ID NO: 223794 - DNA, 288 bp, synthetic construct
  misc_feature 1..288: note = Description of Artificial Sequence: Synthetic coding sequence
  source 1..288: mol_type = other DNA
atggagctcgtactagtgtttctttgcagtctactggcacccatggtcctggcaagcgccgctgagaaggaaaaggagatggacccgttccactatgactaccagactctccggattggcggtctggtgttcgccgtcgtcctgtttagcgtggggattctgctgatattgagtcgtcgctgtaagtgtagctttaaccagaagccgagagctcctggcgacgaggaggctcaggtagagaatttgataaccgctaatgctaccgagccacagaaggccgaaaattag

SEQ ID NO: 223795 - DNA, 288 bp, synthetic construct
  misc_feature 1..288: note = Description of Artificial Sequence: Synthetic coding sequence
  source 1..288: mol_type = other DNA
atggagctggtgctcgtgttcctgtgttccctcttagcacctatggttttagccagcgccgcagaaaaggagaaagaaatggacccctttcattatgactaccaaacactccggataggagggctcgtgttcgcagtagtcctatttagcgtgggaattctgctgatcctatcacgcaggtgcaaatgctccttcaaccagaagccaagggcgccaggagatgaggaggcgcaggtcgaaaacctgatcaccgccaacgccaccgagccccagaaagcagagaattag

SEQ ID NO: 223796 - DNA, 288 bp, synthetic construct
  misc_feature 1..288: note = Description of Artificial Sequence: Synthetic coding sequence
  source 1..288: mol_type = other DNA
atggagttagtcctggtctttctgtgctcactgcttgccccaatggtgctggcatcggcagccgaaaaggagaaagagatggatccttttcattatgattatcaaaccttaaggatcggtggcctggtgtttgcagtagtgctgttttctgtgggtatactcctgatcctctctcggagatgtaaatgcagtttcaaccagaagcccagggccccaggagatgaagaggctcaagtggaaaatttgattaccgcaaacgcaactgagcctcagaaagctgaaaattag

SEQ ID NO: 223797 - DNA, 288 bp, synthetic construct
  misc_feature 1..288: note = Description of Artificial Sequence: Synthetic coding sequence
  source 1..288: mol_type = other DNA
atggagctggttctcgtgtttttgtgctctttactggccccaatggttctcgcaagtgccgcagagaaagagaaggagatggacccgttccactatgattaccagaccttgaggattggtggactggtattcgccgtggttctttttagtgtgggtattctgctgattctttcacggcgatgtaagtgttctttcaatcagaagccaagggctccaggagatgaggaagcgcaggtagagaacctgatcacagcaaacgccaccgagccacagaaagctgagaattag

SEQ ID NO: 223798 - DNA, 243 bp, synthetic construct
  misc_feature 1..243: note = Description of Artificial Sequence: Synthetic coding sequence
  source 1..243: mol_type = other DNA
atggccacccctacacaaacccccacaaaagcccctgaagaacctgatcctttttattacgattataatacggtgcagaccgtagggatgacccttgctaccatcctcttcctgctggggattctgatagtgatctccaagaaggtgaaatgccgcaaggccgactcgaggagcgaaagcccgacgtgcaaaagctgtaagtccgagctgcctagttcggccccagggggtgggggagtgtag

SEQ ID NO: 223799 - DNA, 402 bp, synthetic construct
  misc_feature 1..402: note = Description of Artificial Sequence: Synthetic coding sequence
  source 1..402: mol_type = other DNA
atggtgtcagttggattcggagacagagccggacttggaagttcctgcagatgttcccaaatcacacccgatatggctagtgcggtggccactagatacgtacttggccactggcctcgcgaccatatctgcggatgtggctctcatcaactctcctcatggcgagcagaaccagatggcggtgtgggcatgccccacacattgtctgagcccccttccggccttaccggcatctgggctggtgccttggtaagcccggaaaaacagatgaaggaaaacctccgatctaacgactcagaaccaaggcttcctggcttcgaatcatgcctaattcattctttagccgtctggccatgggcatccaattttgcaagtctgggcccttcggtaaacaagggatag

SEQ ID NO: 223800 - DNA, 882 bp, synthetic construct
  misc_feature 1..882: note = Description of Artificial Sequence: Synthetic coding sequence
  source 1..882: mol_type = other DNA
atgtatttcctaacaccgatcttggtggcaattctttgtatcctggtcgtttggatattcaagaatgctgacagatccatggagaagaagaaaggagaacccagaacaagagctgaagctaggccatgggtggatgaggacctaaaagattcctctgaccttcaccaggcagaggaagatgccgatgaatggcaggagagcgaagaaaacgtggagcacattccgttttcccataaccactatccagagaaggaaatggttaaacgtagccaggagttctacgaactcctgaacaagcggagaagcgtaagattcatttctaatgagcaggtacccatggaggtgatcgacaacgtgatccgcacagcgggaactgctcccagcggcgctcacaccgaaccgtggacctttgttgtcgtgaaggatcctgatgttaagcacaaaatccgaaagattattgaggaggaggaagagatcaattacatgaagaggatgggtcacagatgggtgaccgacttaaaaaaactgagaacgaactggattaaggaatacctcgacacggctccaatcctgatcctcattttcaaacaggtgcatggattcgcagctaatgggaagaagaaagttcactattataatgagatatcggtgagtattgcatgcggcatcttgctggccgctctgcaggtgaataatggcattacaatgaggcaccagaccgctcgacacaggcatctgattgagggccctgggaggtcctccgaagcatgctctaagctctcctctcagggctgtccggaatgtagatccggtgactgccactaccattcttcacagttatggccaagtactgaaggcgctcccggaccaccaaggacctag

SEQ ID NO: 223801 - DNA, 1458 bp, synthetic construct
  misc_feature 1..1458: note = Description of Artificial Sequence: Synthetic coding sequence
  source 1..1458: mol_type = other DNA
atgggctgcgtgcagtgcaaggacaaggaagcaaccaagctgaccgaagagcgggacggaagcctcaatcagagcagtggttacaggtacgggactgacccaactcctcagcattatccttcttttggcgtgacctccatcccaaactataataactttcatgcagccggagggcagggcttaactgtattcgggggtgtgaattccagcagtcacactggtaccctgcgaacgcggggtgggacaggagttactctctttgttgccctgtatgattatgaagcccgtactgaggagtggtatttcggtaagctgggacgcaaagatgctgaaaggcagctgctctccttcggtaatccacggggtacctttcttatccgggagtctgagaccaccaagggtgcctatagcttgtcgatccgcgactgggacgacatgaagggcgaccacgttaaacattacaaaataaggaagctggacaacgggggttactatattacgacaagagcccagtttgaaaccctccagcagttggtgcagcactattcggaaaaggctgacggcctgtgcttcaatctgacagtcatcgcttcatcctgcactccccagacctcaggcctcgcaaaggacgcatgggaagtcgccagaaggtccctgtgcctggagaagaagttgggtcaagggtgctttgcagaagtctggctcggtacatggaacggaaacaccaaggtcgccatcaaaaccctcaagcctggcaccatgagtccagaaagttttctggaggaggcccagattatgaagaagcttaagcatgacaagctcgtgcagctctatgcagttgtgtcagaagaaccaatttacatcgttaccgaatacatgaataaaggctcgcttctcgactttctcaaagacggagagggaagagctctcaaactgcctaacttagtcgatatggccgctcaggtggctgccggtatggcatatattgagcgaatgaattacatacatcgagatttgcgtagtgcaaatatccttgttggcaacgggctcatatgcaagatagccgatttcgggctcgcaaggctaatagaggataatgagtacaccgctcgccagggcgctaagttccccatcaagtggacagcacctgaagctgcattgtacggccgttttaccatcaagagtgatgtgtggtcatttggaatcctgttgaccgagctagtcactaaaggaagggtgccctatcctggaatgaataaccgcgaagtcctcgaacaggtcgaaaggggataccggatgccctgtccacaagattgccctatttctctccatgagcttatgattcactgttggaaaaaagacccggaggagcgtcctacatttgagtacctccagagctttctggaggactatttcaccgcaaccgagccacagtaccagcctggagagaacctgtag

SEQ ID NO: 223802 - DNA, 1614 bp, synthetic construct
  misc_feature 1..1614: note = Description of Artificial Sequence: Synthetic coding sequence
  source 1..1614: mol_type = other DNA
atgggctgcgtgcagtgtaaagacaaggaggccactaaattgacagaagagcgggatggctcactaaatcagagttcaggatatcgttacgggaccgatcccacgccacagcactacccaagttttggcgtgacctccatccctaactacaacaactttcatgctgccggtgggcagggcctaaccgtctttggcggagtcaattcatcatcccatactgggacactgcgaacccgtggagggaccggcgtgaccctgtttgttgccttgtatgactatgaggctcgtaccgaggatgacctatcttttcacaaaggcgagaagtttcagattctgaacagctccgagggggactggtgggaagcccgatcactgaccaccggcgaaaccgggtacatccccagtaactatgtcgcgccagtcgactctatccaggctgaggaatggtacttcgggaagcttggaaggaaagatgcggagcgacagcttctctccttcggaaatccccgaggtacgttccttattcgtgagagcgagaccacgaaaggcgcatactcactgagcatccgcgactgggacgacatgaagggcgatcacgtaaaacactacaaaatcaggaagctggacaatggaggctattatatcaccacaagggcccagtttgaaacattacaacagttagttcaacactattccgaaagagccgcaggcctctgctgccggctcgttgtgccttgccacaagggcatgcccaggttgaccgacctgtcagtgaagaccaaggacgtctgggagattcccagggaatccttgcaactcattaagcgcctgggaaatgggcagtttggggaagtttggatgggtacttggaacggaaataccaaagtagcgatcaagactcttaaaccaggcacaatgtcccctgaatccttcctcgaggaggcccagatcatgaaaaagttaaagcacgataaattagttcaactttatgcggtggttagcgaagagcccatctatatagtgacggagtatatgaacaagggttcactgcttgacttccttaaggacggggaaggcagagctcttaaactcccgaacctggtggacatggctgcccaggtggcagccggaatggcctacatcgaacggatgaactacattcacagggatctgagatctgcaaacatcctggtcggaaacgggctgatctgcaaaattgctgacttcgggctggccagactgattgaagataatgagtatacagctaggcagggcgcaaaatttcctattaagtggacagctcccgaagccgctctctacggcaggttcacaatcaagtctgatgtttggagttttgggatcttgctgacagaactcgtgacgaagggaagagtgccctaccctgggatgaataaccgggaagtgctggagcaagttgagcgcggatatcgaatgccctgccctcaggactgccccataagccttcacgagctgatgattcattgctggaagaaagatcccgaggagcggccaacattcgaatatcttcaatccttccttgaggactacttcaccgcaaccgagccgcagtatcagcccggagaaaacctgtag

SEQ ID NO: 223803 - DNA, 1449 bp, synthetic construct
  misc_feature 1..1449: note = Description of Artificial Sequence: Synthetic coding sequence
  source 1..1449: mol_type = other DNA
atgggttgcgtgcagtgtaaagacaaagaggccactaaactcacggaagaacgtgacggaagcctgaatcagtcatccggctatcgctatggtacagacccaaccccacaacattatccaagtttcggggtgaccagtatcccaaattacaacaacttccacgcagctggtggtcagggactgaccgtgttcggcggagttaactcaagcagtcacaccggtactctgcgtacacgcggtggaacgggcgtcacccttttcgttgcactttatgactatgaggctcgcacagaagacgacctctcattccacaaaggcgagaagttccaaattctgaattcttctgaaggggattggtgggaggctagaagccttactacaggcgaaactggttacatccccagtaattatgtggcgcctgtggatagcattcaagcggaagagtggtattttggcaaattggggagaaaagatgccgagagacagttactatctttcggaaacccacgagggactttcctgataagagagtccgagacaacgaagggggcttatagcttatccatcagggattgggatgacatgaaaggagatcacgtgaaacattacaagattcggaaactcgataatggcggatattacattactacccgcgcacagtttgagaccttgcagcagctggtccaacattactctggcacttggaacggcaacaccaaggtggccatcaaaaccctaaaacccggtactatgtccccagagtcattcctggaggaggctcagatcatgaagaaactcaaacacgataagctggtgcagctatatgccgtggtctcggaagaacccatctatattgtgaccgagtacatgaacaaagggtccctgctggatttcctgaaagatggagaaggccgagctctgaagctgcccaatctagtcgatatggcagcacaggtggctgcagggatggcctatatcgagcgaatgaattacattcatagggatttgcgatccgctaacatcctcgtaggtaacggcctgatttgcaaaattgcagattttggccttgctagactgattgaagataacgaatacaccgccaggcaaggagcaaaattcccaattaagtggacggctcctgaggccgcactatacgggcgtttcacaattaagtccgacgtgtggagctttggaattctgctcacagaactggtgacaaagggacgcgtgccctatcccggaatgaacaatagggaggttctcgagcaggtggaaaggggatacaggatgccatgccctcaggactgccccatctcactgcacgaactgatgatccattgttggaagaaagacccagaggagaggcccacttttgagtatctgcagagctttctggaagattactttactgctaccgaaccccagtatcagcctggcgaaaacctttag

SEQ ID NO: 223804 - DNA, 1614 bp, synthetic construct
  misc_feature 1..1614: note = Description of Artificial Sequence: Synthetic coding sequence
  source 1..1614: mol_type = other DNA
atgggatgtgtgcagtgcaaagacaaggaagctaccaagcttacggaagagagggacgggagtcttaatcagagttcaggttatcgctacgggacagaccccacaccccagcattacccctcgtttggggtgacgagcataccaaactacaataacttccatgccgctggaggccagggcctgactgtgttcgggggagtcaactcttctagtcacaccggcactctcagaactcgtggcggaacgggcgtgacactttttgtcgccctctatgactatgaggcccgtaccgaggatgacctgtcctttcacaagggggagaaatttcagatccttaatagtagtgaaggtgactggtgggaggccaggtccctgaccaccggggagactggatacatccctagtaattatgtagctcctgtcgattctatccaggcggaggaatggtattttggtaagctagggcgaaaagatgcagaacgccagcttctctctttcggcaacccgaggggaacattcttgataagggagtctgaaaccacgaagggcgcatatagcttgagtattagagactgggacgacatgaagggcgaccacgtgaaacattataagatccggaaactggacaatggcggatactatattaccactagggcacaattcgagaccctgcagcaactcgttcagcattatagtgagcgcgctgcaggcctgtgttgtagacttgttgtcccttgtcataaaggaatgcctaggctcactgatctgtcagttaagacaaaggacgtatgggagataccgcgtgaatccctccagctgattaaaagactggggaacgggcagttcggcgaggtgtggatgggcacttggaacggaaatactaaggttgccatcaagaccctcaaaccaggaaccatgtctccagaatcgtttctcgaggaggctcaaatcatgaaaaagcttaagcatgacaagctggtgcagctatatgcagtggtcagcgaagagcccatttacattgtgacagaatacatgaataaagggtccctactggacttcctcaaggatggcgaaggccgagcactcaaactgcccaatctggtggacatggccgcacaagttgcagccggtatggcttacattgagagaatgaactatattcatagggatctgcggtctgccaacattcttgtcggcaacggccttatttgcaaaatcgcggacttcggtctcgctcggttgattgaggacaacgaatatacagctagacaaggcgcaaaatttcccatcaagtggaccgctcctgaagccgctttgtatggccgtttcaccataaaaagcgatgtgtggagtttcgggattcttctgaccgagctcgtaaccaagggacgtgtcccctatcctggcatgaacaacagggaggtgctggaacaggtggagcgcggttaccgaatgccatgccctcaggattgtccaatctccctgcatgaactcatgatccactgctggaagaaggatccggaggaaaggcctacttttgaatacctgcagtcttttctggaggattactttaccgctaccgagcctcaatatcagccaggagagaacctctag

SEQ ID NO: 223805 - DNA, 1605 bp, synthetic construct
  misc_feature 1..1605: note = Description of Artificial Sequence: Synthetic coding sequence
  source 1..1605: mol_type = other DNA
atgggatgtgtgcaatgtaaggacaaggaggcgacgaagctgactgaggaacgggacgggagtctcaatcagagctctgggtacaggtacggtaccgatcctaccccccagcactatccgagtttcggggtgaccagcatcccaaattataacaacttccacgcagcgggaggacaagggctgactgtgtttggaggcgttaatagttcatcacataccgggactctgcggaccagagggggtacgggagtgaccttatttgtggccctctatgactatgaggccagaacagaagacgatctttctttccataagggcgagaagttccagattcttaactccagcgagggggattggtgggaagccagatctctgactaccggcgagactggctacattccatctaactacgtggcgccagtggactcaatacaggctgaagagtggtacttcgggaagcttggaaggaaggatgccgagagacagctgttatcgttcggaaaccctaggggaacatttctcatccgggagagtgagacaaccaagggcgcttattctctcagtatacgcgactgggatgacatgaagggggatcacgttaagcattataagattagaaagttggataatgggggttactatatcaccacaagggcccagtttgagacactgcagcagttggtccaacactattctgagaaagcagatggactatgtttcaacctaactgtaatcgcctcctcttgcactccacagactagcgggctggcaaaggatgcctgggaggtggcacgcagaagcctgtgtttggaaaagaagctcgggcaggggtgtttcgccgaggtgtggctaggcacgtggaatggcaatactaaggtggcaattaaaaccttaaagcccggaactatgagccccgagagctttctggaagaagcacagatcatgaagaaactgaagcacgacaaactggtccagctgtatgcagtggtgagtgaagagccaatatacatcgtgacagagtacatgaataaaggttcactactggacttcttgaaagatggcgaggggagagctctgaagctgcccaatctggtcgatatggccgcacaggttgctgctggaatggcttatattgagcgcatgaactatatccaccgggacctcagaagtgcaaatatcctcgttggaaacggcttgatctgcaaaattgctgatttcggtttagcaagacttatagaggataacgagtataccgccaggcagggggcaaagttccctattaaatggacagctccagaagcggcactgtacggccgattcactatcaaaagcgatgtctggagttttggaatcctccttacagagttagtgacaaaaggaagggtgccataccccggaatgaacaatagagaagtcctggaacaagttgagcgcggataccggatgccgtgtccccaggattgccccattagtttacatgagttgatgattcattgctggaaaaaagaccccgaggaaagacccacctttgaatacctccagtcttttctggaagactacttcacagcaactgaaccccagtatcaacctggtgaaaatttgtag

SEQ ID NO: 223806 - DNA, 1605 bp, synthetic construct
  misc_feature 1..1605: note = Description of Artificial Sequence: Synthetic coding sequence
  source 1..1605: mol_type = other DNA
atgggctgtgtgcagtgtaaagataaggaggccacaaaactaactgaggagagagacgggtctctcaaccagtcctccggataccgatatggcactgatccaaccccccaacactatccctcattcggcgttacatccatccccaattataataacttccacgcggcaggaggtcagggccttacagtgtttggcggagtgaatagttcatcccacaccggaaccctgcgtaccaggggaggaaccggcgtgacgctattcgtcgctctgtacgattatgaagccaggaccgaggacgacctgtcattccacaaaggggaaaagttccaaatcctcaattcaagcgaaggggactggtgggaggcacggtcacttaccaccggcgaaacgggctacattccttcgaattacgtagcccctgtggacagtatacaggccgaagagtggtatttcggcaaattggggagaaaagacgccgagaggcagctgcttagttttggaaacccgcgaggcacttttctcattagggagtctgaaacaactaagggggcttattcactttctatccgggactgggatgacatgaagggagatcatgtaaaacactacaaaatcagaaaacttgataatggcggatactacataacgacccgtgcccagtttgagaccttacagcaactggtccagcattattctgaaaaagccgacggcttatgtttcaatctgaccgtcatcgccagctcttgtaccccccaaacttcaggactcgccaaggacgcctgggaagtcgcccgaagaagtctctgcctagagaaaaagctgggtcaagggtgtttcgcagaggtctggctaggcacgtggaacggcaacaccaaggttgcgatcaagaccctcaagccaggcaccatgtcaccagaaagttttctggaggaggctcaaatcatgaaaaaactgaaacatgataagctcgttcagctgtatgccgtggtatctgaggagccgatttatattgtcacagagtacatgaataaaggttctttactggattttctgaaggacggcgaaggaagggcattaaagctcccgaatctagtagacatggctgctcaggtcgcagctggcatggcctatattgagagaatgaattacatccaccgcgaccttcggagtgccaatatcctggttggaaacggccttatctgtaagatagcagacttcggtttggcaagactcatcgaggacaatgagtacactgcaaggcagggggcaaaatttcccataaaatggactgccccagaagccgctctgtatgggagatttacgatcaaatccgacgtttggtctttcggcattctcttgacagagcttgtgaccaagggcagggtgccgtaccctggaatgaacaatcgggaggttctagaacaagtggaacggggatatcgtatgccctgtcctcaagattgccccattagtctgcacgagttaatgatccactgctggaaaaaagatcccgaggagcgcccaaccttcgagtacttgcagtctttcttagaggactattttaccgcgactgaaccccagtaccagccaggagagaatctctag

SEQ ID NO: 223807 - DNA, 363 bp, synthetic construct
  misc_feature 1..363: note = Description of Artificial Sequence: Synthetic coding sequence
  source 1..363: mol_type = other DNA
atggggtgcgtgcaatgtaaggataaagaggcgactaagctcactgaggaaagggacggatcattgaaccagagctcagggtatcgctacggaacagacccaacccctcaacactacccaagctttggagtcaccagcatcccaaactataataattttcacgccgctggagggcaaggcctaacagttttcggcggtgtgaactccagctcacataccggaactctccgtactcgagggggaacaggtgttacccttttcgtcgcgctgtatgactacgaggcccgaactgaggatgatctgagcttccataagggcgagaaatttcaaattctcaacagcagcgagggggattggtggtag

SEQ ID NO: 223808 - DNA, 699 bp, synthetic construct
  misc_feature 1..699: note = Description of Artificial Sequence: Synthetic coding sequence
  source 1..699: mol_type = other DNA
atggggtgcgtgcagtgcaaagataaggaagcaaccaagctcactgaggaaagagacggttctctaaaccagtccagtggatatagatacggtacagatcccaccccccagcactaccctagcttcggagtcacttcaataccaaactataataacttccacgcagcaggtggacagggcctgactgtgttcgggggtgtcaactccagttctcatactggcaccctgagaacaaggggcggtacaggcgtaaccctattcgttgcactctatgactacgaggctaggactgaggacgacttgtcatttcacaaaggggaaaaattccagattcttaatagttcggagggagattggtgggaagcacgaagtctgactacgggagagacagggtacataccttcaaactatgtagcgcctgtggactctatccaggccgaggaatggtactttggaaaactgggacgtaaggacgccgaacgacaactgttaagtttcggtaacccacgcggaacctttctgattagggagagcgagacaactaagggcgcttattctttatccattcgcgattgggacgacatgaagggagaccacgtgaagcactacaaaattaggaagcttgacaacggaggttactacatcaccacaagagcccagtttgagacactgcagcagttggttcagcattattcctag

SEQ ID NO: 223809 - DNA, 321 bp, synthetic construct
  misc_feature 1..321: note = Description of Artificial Sequence: Synthetic coding sequence
  source 1..321: mol_type = other DNA
atgggatgcgtccaatgcaaagacaaagaagctactaaactcactgaagaaagagatggctccctcaatcagagctccggttacagatacggaactgaccctaccccacagcactatccctcatttggcgtgacttccatccctaattacaacaactttcatgcagcaggtggacagggtctgaccgtgtttggcggagtgaatagctcttctcacactgggacactgagaacccggggaggaacaggagttacacttttcgtagccctctatgattatgaggccaggactgaggacgatttatcctttcacaaagggtag

SEQ ID NO: 223810 - DNA, 198 bp, synthetic construct
  misc_feature 1..198: note = Description of Artificial Sequence: Synthetic coding sequence
  source 1..198: mol_type = other DNA
atgggctgtgtacagtgtaaagataaagaggccaccaagttaaccgaggagcgcgatggatcgctcaatcagagttctggctacagatacggcacagatccaaccccgcaacattacccctccttcggcgtgacttccatacccaattacaacaattttcatgccgcaggaggacagggcctgactgtcttcgggtag

SEQ ID NO: 223811 - DNA, 528 bp, synthetic construct
  misc_feature 1..528: note = Description of Artificial Sequence: Synthetic coding sequence
  source 1..528: mol_type = other DNA
atgggttgtgtgcaatgtaaggataaagaggctaccaagctcacagaagagcgagatgggtcacttaatcaaagctctgggtatagatatggcaccgatcccacaccacagcactaccccagctttggtgtcacctccatcccaaactacaataactttcacgcggcaggagggcagggattgaccgtttttggcggtgtgaacagctcatctcacacgggaaccttgcggacccgaggtggaacgggagtaacactgttcgtagcgctctacgattatgaagccaggacagaggatgacctgtctttccataaaggtgaaaaatttcagatcctgaactcttctgagggggattggtgggaagccaggtctctgaccactggcgagacggggtatatccccagcaattacgttgcacctgtggatagcatccaagctgaggagtggtactttggaaagcttggtcgtaaggacgcggagcggcaattgctctcctttggtaacccacggggaacgtttctgatatag

SEQ ID NO: 223812 - DNA, 462 bp, synthetic construct
  misc_feature 1..462: note = Description of Artificial Sequence: Synthetic coding sequence
  source 1..462: mol_type = other DNA
atgggctgcgtgcagtgtaaggataaagaggccactaagctgaccgaggaacgagacggaagcttaaaccagagctctgggtacaggtacggaactgatcctacgccccaacattaccctagctttggtgttacaagcatccctaattataacaatttccacgccgcagggggacaaggcctgacagtgtttggtggggtgaatagctccagccataccggtaccctaaggaccagggggggaaccggcgttacgctgttcgtcgccttgtacgactacgaagctaggacagaggatgacctgtcttttcacaagggtgagaaattccagatcctaaacagcagcgagggagattggtgggaggcgagaagcttaacaacaggggagactgggtatataccatcaaactatgtcgctccggttgacagcatccaagctgaagaatggtacttcgggaagtag

SEQ ID NO: 223813 - DNA, 357 bp, synthetic construct
  misc_feature 1..357: note = Description of Artificial Sequence: Synthetic coding sequence
  source 1..357: mol_type = other DNA
atgggctgtgttcagtgtaaagacaaagaggccaccaagctgactgaagagcgggatgggtcactgaaccaatcttcagggtatagatatggaactgaccccactccccagcattatccttccttcggcgtcacatccatccccaactataacaactttcacgccgcaggcggtcagggcctgacagtgttcggaggggtgaattcctctagtcacaccggcacgctgcgcactcggggtggtacaggcgtcaccctctttgtggccctgtacgattacgaggctcgtacggaagatgatctgtcctttcacaagggggagaaatttcagatcctcaattcatccgaaggagattag

SEQ ID NO: 223814 - DNA, 561 bp, synthetic construct
  misc_feature 1..561: note = Description of Artificial Sequence: Synthetic coding sequence
  source 1..561: mol_type = other DNA
atgggttgtgtgcagtgcaaggataaagaggccacaaagttgaccgaagagagggatggatctctaaaccagtctagtggatacagatatgggacggatccgactccccagcactatcccagttttggggtcactagcatccccaattacaacaactttcatgctgccggaggccaaggcttaactgtatttgggggagtcaattcctccagccacactgggacactccgcaccagggggggaaccggtgtgacactctttgtggcattgtacgactatgaagcgcgtaccgaggatgacttgagtttccacaaaggagagaaatttcagatcctgaatagtagcgaaggcgactggtgggaagcacgtagtctcaccaccggggaaactggatacataccctccaattatgtcgcgccagtcgactctattcaggctgaggagtggtactttggcaaactggggagaaaggacgcagaacgccagctgctctcattcggaaaccccagggggacgttcctgattcgcgagtccgagactaccaaaggcgcatactcttag

SEQ ID NO: 223815 - DNA, 312 bp, synthetic construct
  misc_feature 1..312: note = Description of Artificial Sequence: Synthetic coding sequence
  source 1..312: mol_type = other DNA
atgggctgcgtgcagtgtaaagacaaggaggccacaaaactgactgaggagcgggatggaagcctgaatcagtcatctggatatagatacggcaccgacccgaccccacagcactatccctccttcggggttaccagcattcccaattacaacaattttcacgccgctggaggtcaggggctgacagtatttgggggagtcaatagcagctctcacacaggcactttgcggacaagaggaggtaccggggtaacgctctttgtggccctgtacgactacgaggcgcgaacagaggatgatctttcattctag

SEQ ID NO: 223816 - DNA, 459 bp, synthetic construct
  misc_feature 1..459: note = Description of Artificial Sequence: Synthetic coding sequence
  source 1..459: mol_type = other DNA
atgggttgcgtgcagtgcaaggataaagaagctaccaaacttaccgaggagagggacggctcattgaatcagtcatccggatatcggtacgggacggacccgacaccacagcattacccaagtttcggcgtgacttctatacccaactacaataacttccatgccgctggcggtcagggactgactgtgtttggcggtgtcaatagttcctctcatacaggcactctgagaacccgtggtggaactggcgtgacacttttcgttgccctgtatgactatgaggccaggactgaggacgatctcagtttccacaagggagagaaatttcagatcctcaactcgagtgaaggcgactggtgggaagcacggtctctaaccaccggagagacagggtatatcccaagtaactatgtcgctcctgtggacagcattcaggcggaggaatggtatttcggatag

SEQ ID NO: 223817 - DNA, 351 bp, synthetic construct
  misc_feature 1..351: note = Description of Artificial Sequence: Synthetic coding sequence
  source 1..351: mol_type = other DNA
atgggatgcgtgcagtgtaaagataaggaggcaaccaagctgacagaggagcgggatggctccttgaaccagagctcaggataccgctatgggactgacccaacgccccaacattaccctagttttggtgtgactagcatccctaattataataatttccatgctgcgggagggcaaggcctgaccgtgtttggtggggtgaattcatccagtcacacaggcactttgcgaacgagaggcggtacaggagttacactgttcgtcgccctctacgattatgaggccaggactgaggacgacctttcctttcataagggtgaaaagtttcaaattctcaattcttccgaatag

SEQ ID NO: 223818 - DNA, 423 bp, synthetic construct
  misc_feature 1..423: note = Description of Artificial Sequence: Synthetic coding sequence
  source 1..423: mol_type = other DNA
atgggttgcgttcaatgcaaagataaggaagccacaaagctgacagaggaaagggacgggtctttgaatcaaagcagcggatacaggtacgggaccgatccaaccccacaacactacccaagcttcggggtcacatccatacctaactacaataactttcatgccgcaggcggacaaggcttgaccgtctttgggggagtaaattcttcttctcacaccggcactctgcggactaggggaggtacaggcgtcaccttatttgttgcattgtatgattatgaggctcggacggaagacgatctcagctttcacaagggcgagaaatttcagattctcaactctagcgagggtgactggtgggaagcaaggagcctgacaacaggcgagacaggctacataccgtccaattacgtcgccccttag

SEQ ID NO: 223819 - DNA, 438 bp, synthetic construct
  misc_feature 1..438: note = Description of Artificial Sequence: Synthetic coding sequence
  source 1..438: mol_type = other DNA
atgggatgtgtgcagtgcaaggacaaagaggctactaagctcactgaagagcgggatggtagtctgaaccagtcaagcggttacaggtatggcacagacccaactcctcagcattatccttcttttggcgttacctctatcccaaactacaataactttcacgctgctgggggtcagggtctgacagtctttgggggagtcaattccagcagccataccggaaccctgagaacccgaggcggtactggcgttaccttgtttgtggccctgtatgactacgaggccagaacagaagatgacctgtccttccataaaggagagaagtttcagattcttaatagtagtgagggcgactggtgggaggcaaggagccttactacgggcgagacaggctacattccttcaaactacgtcgcccctgttgactcaatccagtag

SEQ ID NO: 223820 - DNA, 1605 bp, synthetic construct
  misc_feature 1..1605: note = Description of Artificial Sequence: Synthetic coding sequence
  source 1..1605: mol_type = other DNA
atgggatgtgtgcagtgcaaggataaggaggctacgaaactgaccgaagagagggacgggagcctcaaccagtcatctggctaccgttacggcaccgaccccacaccccagcattacccctctttcggggtgactagcatccctaactataataattttcatgcggcaggcggacagggcctgacagtgtttggcggagtgaatagcagcagccacaccggcactctacgcactcggggagggacgggcgtaaccctttttgtcgccctgtacgactacgaggcccgaactgaagatgacctctctttccataagggagagaagtttcagatcctgaacagttccgagggtgactggtgggaagcccgatccctgacgactggagaaacagggtacatcccctccaactatgtggcaccggtagatagtatccaggctgaggaatggtatttcggcaagttggggagaaaggacgctgagaggcagctgctttcctttggcaatccccgtggaaccttcctgatccgcgagagtgaaactacaaaaggggcatacagtctgtcgattcgggactgggacgatatgaagggagaccacgttaaacattacaagatacgtaagctggataacggtggctattatattacgaccagagctcagtttgagacactccagcagctggtccagcactatagcgagaaggctgatggcctctgcttcaatctgacggttattgcctcaagctgtacaccccagaccagcggtctcgctaaggatgcatgggaggtggcacgcaggagtttgtgcttggagaaaaagttaggtcaggggtgcttcgccgaagtatggctgggcacctggaatgggaacactaaggttgccatcaagacgttaaagcccggaactatgtctcccgagtcattcctcgaagaagcccaaattatgaagaagctaaaacacgacaaattagtccagttatatgcagtggtctccgaggaacctatctacatcgtgaccgagtacatgaacaaaggatctctgctagacttcctcaaggatggggaaggcagggccctgaagttgccaaaccttgtggacatggccgctcaagtcgccgctgggatggcctacattgagcgcatgaattatatccaccgagacttaaggagtgcgaatatccttgtggggaacggtctaatttgcaagattgccgactttggcctggctcggctaatcgaagacaacgaatatacagcaagacagggggctaaatttccaattaagtggaccgcgcctgaagccgcactgtatggaagattcacaatcaagtccgatgtgtggtcctttggaatcctgctgacggaactggttaccaaaggacgcgtgccttaccccggtatgaataatcgcgaagtattagaacaagtggagcgtgggtatcggatgccttgtccacaggattgtcccatcagccttcacgaattaatgatacactgctggaaaaaggaccccgaagagagaccaacattcgagtacctgcagtccttcctggaggactatttcaccgcaaccgagccgcagtatcagcctggtgaaaatctgtag

SEQ ID NO: 223821 - DNA, 1458 bp, synthetic construct
  misc_feature 1..1458: note = Description of Artificial Sequence: Synthetic coding sequence
  source 1..1458: mol_type = other DNA
atgggatgcgtccagtgcaaagacaaagaagccactaagctgaccgaagaaagagacggcagtttaaaccagtcctctggatacaggtatggcaccgaccccacaccacagcactatccctcgtttggagtgacctcgatccccaattataataatttccatgcagctgggggtcagggactgactgtgtttggaggggtcaattcaagcagccatacaggcacactgcggacgagaggtggtacgggtgtaacgttgtttgttgcattatatgattatgaagctcaagctgaggagtggtactttgggaaactgggccgaaaggatgcagaaagacagctgctgtcgtttggcaatccgagggggaccttcctgattcgtgaatcagagacaactaaaggggcttatagtctcagcattcgcgattgggacgatatgaagggggaccacgtgaagcattataagattcgcaaattagacaatggtggatattacatcactacccgagctcagttcgaaactttgcaacagcttgtgcagcactactcagaaaaagccgatgggctgtgtttcaatttgactgtgatagcctcttcgtgcaccccacagacaagcgggctcgcgaaagacgcttgggaggtggccagacggtccctttgtctggagaagaagttggggcagggctgtttcgccgaggtttggctgggtacttggaacgggaacacaaaagtagccatcaagactctcaagccaggtaccatgtccccagagagcttcctggaggaagcgcaaatcatgaagaagctgaaacacgacaagctagtgcaattatatgcagtggtatcagaggaaccaatatacatcgtcaccgaatacatgaacaaaggctctttactcgacttccttaaggatggcgaagggagggcacttaagcttcctaacctcgtagacatggcagcacaggtcgctgcaggcatggcatacatagaacggatgaactatatccatagggacctgagaagtgcgaacattctagttggaaacggactgatttgcaaaatcgctgatttcggattggcacgcctaattgaggacaacgagtacacagcccgtcagggagccaaattcccaattaaatggaccgccccagaggcagctctgtatggcaggtttaccataaagtccgatgtgtggagcttcgggatacttctgactgaactagtgaccaagggccgtgtcccatatccgggaatgaacaaccgggaagtgttggaacaggtcgaacgcggatatagaatgccgtgcccgcaggactgtcctataagcctgcacgaactgatgatacactgctggaagaaggaccctgaggagaggcctacttttgagtatctgcagtcattcctggaggactactttaccgcaactgagccacagtaccagccaggcgagaacctgtag

SEQ ID NO: 223822 - DNA, 4437 bp, synthetic construct
  misc_feature 1..4437: note = Description of Artificial Sequence: Synthetic coding sequence
  source 1..4437: mol_type = other DNA
atggcatctacaaacgccgagtcccagttacagcgtataatacgcgacctccaggatgctgtcacggaactctcaaaagagttccaggaggcaggcgagcctattacggatgacagcacgagcctgcataagtttagctataaactggagtatctgctccagttcgaccaaaaagaaaaagccaccttactcggtaacaaaaaagattactgggattacttctgtgcgtgcttagctaaggttaagggtgcaaacgacggcatccggttcgtgaagtcaatttccgaactgcgcacgtcgcttggtaaagggagagcctttatccgatattccctggtgcaccagaggcttgccgatacactccaacagtgcttcatgaacacaaaggtcactagtgactggtattatgctcggagtcctttcctgcagcccaagctttcatctgacatcgtcgggcagctatatgaactgaccgaggtacaatttgatctcgcctcaagagggttcgaccttgatgccgcatggccaacgtttgccagacgcaccctgactacaggctcctcagcttatctttggaagccccctagccgatcatcttcgatgtcttctctggtaagttcttatttacagacccaggagatggtctctaacttcgacctgaacagtccgctgaataacgaagctctggaaggcttcgacgaaatgaggctggagctcgatcagctcgaagtgcgagagaaacaacttagggagcgcatgcagcagctggacagggagaaccaagagctgcgggctgctgtatctcagcagggcgaacagctgcagaccgagcgcgagaggggcagaaccgccgcagaagacaacgttagattaacttgcctcgtggccgaacttcagaagcagtgggaagtcacacaagccacgcagaacacagtgaaagaactacaaacctgcctgcaaggcctcgaactgggagcagccgaaaaggaagaagattaccacacggcacttaggagactcgagtccatgctgcaacccctcgctcaagaacttgaagctacgcgcgattcactcgacaaaaaaaaccagcacctggcgtccttcccgggatggcttgcgatggctcagcaaaaggccgataccgcttccgatactaaaggacgccaagagcccattccttccgatgcagcgcaggaaatgcaggagcttggagaaaagctccaggccctggaacgggagagaacgaaggttgaagaggtgaatcggcagcaatccgcacagctggagcagctggtcaaagaactccaactgaaggaggatgccagagccagtcttgagcgcctggtgaaggagatggcaccattacaagaggaactgtcaggaaaagggcaggaggcagaccagctgtggcggaggctgcaagaactactggcacatacttctagttgggaagaagaattggccgaactgcgacgtgagaaaaagcagcaacaggaagagaaggaacttcttgaacaggaagtgaggtcattaaccaggcaacttcaatttctggagacacagcttgcccaggtaagccagcacgttagcgacctcgaagagcagaagaagcagcttatacaagacaaggaccatctgtcccagcaggtggggatgttggaaagactggcaggtcccccagggcctgaattacccgtggcaggcgaaaagaatgaagccttagtccccgtgaactcaagtctccaggaggcctggggaaaacctgaggaggagcagcgtgggctccaggaggcccagctcgatgacaccaaggtgcaggaaggaagtcaagaggaggaattgaggcaggcaaaccgcgagttagagaaggaactccagaatgtcgtaggtagaaaccaacttctggagggaaaactacaggcactgcaggccgattatcaggctctccagcagcgagagagcgctattcagggcagtttggcctcactggaggccgaacaggcgagcattcgtcatctaggagaccagatggaggcttctctgctggcagtacgcaaagccaaagaggcgatgaaagcacagatggcagagaaggaagccattcttcagagcaaggagggtgagtgccagcagctgagagaggaggtggagcagtgtcagcagctggctgaagcgagacaccgagaactgcgcgctctggagtcacaatgccagcaacagacacaactcatcgaagtcctgactgctgagaagggccaacagggagtgggaccgcctacagataacgaggctcgcgagctggccgctcaactggccctcagccaggctcagcttgaagtgcaccagggggaggtgcagcggctacaagctcaggtggtggatctgcaggccaagatgcgcgcagccttggacgaccaggataaggtacagagccagctgtctatggcggaagcagtgctccgtgaacacaaaacccttgtgcagcagctgaaagaacagaacgaggccttaaaccgcgctcacgtacaggaactgctgcaatgttcagaacgcgagggagcactacaggaagagcgagcagacgaagcccagcaaagggaggaggaactcagagcgcttcaggaggaacttagtcaggctaagtgctctagcgaggaggcacagctggagcatgcggagctgcaagagcagttgcaccgggctaatactgataccgccgaacttggtatccaggtgtgcgcactgacagttgaaaaagaaagggtggaagaggccctggcctgtgccgtgcaggagttgcaagatgctaaagaagctgcgtctagggaaagagaaggcctcgaacggcaggtggcaggcctccagcaggagaaggagtctcttcaagaaaagctcaaggccgctaaagctgctgccggttcccttcctggtctacaggcccagcttgcccaggcagaacagcgagcccaatccttgcaggaggctgcccatcaagagctaaacactctcaagttccagctttcggccgaaatcatggactatcagtctcgactgaaaaacgcgggagaagagtgcaagtccctgcgagggcagttggaggaacaggggaggcagcttcaggccgctgaggaggctgtcgagaaactgaaggccactcaagccgacatgggggagaaactttcctgcacctccaatcacctggccgagtgtcaggcagccatgctgaggaaagacaaggagggtgctgcactaagagaggatctcgagcggactcagaaagagcttgagaaagccaccactaaaatccaggagtattacaataagctgtgccaggaggtgaccaaccgggagcgcaatgaccagaaaatgctggccgatctggatgacctgaatagaacaaaaaagtatcttgaagagaggttaattgaattactgcgggataaagatgccttatggcagaagtccgacgctttagagttccaacaaaagctaagcgccgaagagcgttggctgggcgataccgaggcaaaccattgtttagattgtaagcgggaattttcatggatggtgcgacggcatcattgccgaatctgcggtagaatcttctgttattattgctgtaacaactacgtcctcagtaagcacggcggtaagaaggaacggtgttgcagagcttgttttcaaaaactgtccgagggtccgggatcacctgactcctccggctcggggaccagtcagggtgagccatcccctgccctgtcccccgctagccctggaccacaagctaccggtggacaaggggcaaacaccgattataggccacctgacgatgcagtattcgatattatcaccgatgaagagctctgccaaatccaggagtctggatctagtttgcccgaaactcctactgaaaccgattcacttgatccaaatgccgcagagcaagacactacatctacaagcctgaccccagaggacacagaggatatgcccgttgggcaggacagtgagatttgcctcttaaaatccggtgagctcatgatcaaggtgcccttaacagttgacgagatcgcctcgttcggtgagggatctcgggagctcttcgtcaggtcaagcacctactcactgatccctatcacagttgcagaggctggtctcacaatcagttgggtgttctctagtgatcctaagtctatcagtttcagtgtggtgtttcaggaagcagaagacacacccctagatcaatgcaaggtgcttataccaacgactcggtgcaacagtcacaaagaaaacatccaggggcagttaaaggttcggactccaggcatttatatgctgatcttcgacaataccttcagccggtttgtttctaagaaggtcttctatcatcttacagtagatcgaccagttatctacgacggcagcgacttcctgtag

SEQ ID NO: 223823 - DNA, 804 bp, synthetic construct
  misc_feature 1..804: note = Description of Artificial Sequence: Synthetic coding sequence
  source 1..804: mol_type = other DNA
tgatccaagcacggtggcaagaaggagcgttgttgtcgcgcttgttttcagaaactgtccgagggccctggatcacccgactcatctgggagtggcacatcccaaggagagccatctccggctttgagcccagcaagccccggacctcaggctaccgggggacaaggagcgaacaccgattatcggccaccagacgacgccgtttttgacatcatcacagacgaggagttgtgccaaattcaagaatccggctcctcattaccagagacacccactgaaacagattcgcttgacccgaacgccgcagagcaggacaccacatctacaagtctgacaccggaagacaccgaggatatgccggtgggtcaagattctgaaatttgtctccttaaaagtggtgagttgatgataaaggtacccttgactgtagacgagatcgctagctttggcgagggctcccgtgaactttttgttcggagctctacttattccctcattcctatcactgttgccgaagcaggccttaccatcagttgggtttttagcagtgaccctaagagcatttcctttagtgttgtcttccaagaggcagaggacacccccttggaccagtgtaaggttctgattcccacaacgcgttgtaactcacataaggaaaatatacagggccagctgaaggtaaggacacccggtatctatatgttaattttcgacaataccttctcccgcttcgtcagcaagaaggtcttctaccatctgaccgttgaccgcccagtgatctatgatggctcagacttcctgtag

SEQ ID NO: 223824 - DNA, 4497 bp, synthetic construct
  misc_feature 1..4497: note = Description of Artificial Sequence: Synthetic coding sequence
  source 1..4497: mol_type = other DNA
atggccagtacaaacgctgagtcccagctacagcggattattcgcgaccttcaggacgccgttactgagctttcaaaagaatttcaggaggccggagaacccatcaccgatgattcaacctccttacacaagttttcctacaaactggagtatttactccagttcgaccagaaggagaaagccaccctattgggtaataagaaggactactgggactacttctgtgcctgcctagctaaagtgaagggagccaacgatggcatcagattcgtcaaaagcatttctgagcttaggacctccttggggaaaggaagggccttcataagatactctctagtgcaccagcgtctggcagacacgcttcaacagtgtttcatgaacaccaaggtgacttcagactggtactatgcgagatccccatttctccagccgaagctatcatccgacatcgtggggcaattgtacgagcttacagaggtgcaattcgacctggcctctcgcggattcgacctggacgctgcatggcctacttttgcccgaagaactttgaccacaggttcgtctgcatacttgtggaagccgccatcaagatcctccagcatgtcatctctggtgtcaagttatctgcagacacaggaaatggtgtcaaatttcgacttgaattcaccattgaataatgaagcgcttgagggctttgacgaaatgcgactggaacttgaccagctcgaggtcagggagaagcagttgcgggagagaatgcagcagcttgatagggaaaatcaagagctgagagccgctgtgagtcagcagggcgaacagctgcaaactgaacgcgaacgcggtcgaacagctgcagaggacaatgtacgacttacctgtttggtggcagagttacaaaagcagtgggaagtcacacaggccactcagaatactgtgaaagaactgcagacgtgcctccagggccttgagctgggagcagccgaaaaagaggaggactaccatactgccctgcgccgactggaatcaatgctgcagcccttggcacaagaacttgaagctacaagggattcactggataagaaaaaccagcacctggcttcatttcctggctggctcgctatggcccaacaaaaagccgacaccgcctcagatacgaagggtcgacaggaacccatcccttccgatgcagcccaagagatgcaggagttaggagaaaaactgcaagccctagagagagagcgaactaaggtcgaagaggtgaaccgccagcaatccgcacagttggagcaactggtaaaagaactgcagctcaaggaggacgccagagccagcctggagcgcttagttaaagagatggctcccctgcaggaggagcttagcggtaaggggcaagaagctgatcagctctggcgacggttgcaggagttgctggcccacactagctcctgggaggaagaacttgccgagctgcgtcgcgagaaaaagcagcagcaagaggagaaagaactgctcgagcaggaagtgcgcagcctgacacggcagctccagttccttgaaactcaacttgctcaggtgagtcagcacgtgagcgatctcgaggagcagaagaaacagctgattcaggacaaagaccacttatcccaacaggtaggcatgctggaacgcctggcgggacccccaggaccagaactccctgtggcaggagaaaaaaacgaagcgttagtgcccgtcaattcatccctgcaagaggcttggggtaaacccgaggaagaacaacgcggtctccaggaggcccagctggatgatacaaaggtccaagagggcagtcaggaagaagaactcagacaggcaaacagagagctcgaaaaggagctccaaaacgtggtgggtcgcaaccagctgctggagggcaaactccaggctctgcaggcagattaccaggccctccaacaacgcgaatccgccattcaaggtagcctggcaagcttggaggccgagcaggcctccatcaggcacttaggcgatcaaatggaagcatcactcttggcagttaggaaagcgaaagaggcaatgaaagctcaaatggcggaaaaagaagcgatcctgcaatcaaaagagggggaatgccagcagctgagggaagaggtcgagcagtgtcagcagctagctgaggcgaggcacagggagctgcgagcattggagagtcaatgtcaacaacaaacacaactcattgaagtcctgaccgccgagaaggggcagcaaggagtcggcccaccgacggataacgaagcgagagagcttgctgctcagctggccctgtcacaggcccagttggaggtgcatcagggcgaggttcagcgcctgcaggcacaagtagtggacttgcaggcaaagatgagggcagcgctggacgaccaggacaaagttcagtcccaactgagcatggctgaggcggttctgagagagcataaaacactcgttcagcagctcaaggagcagaacgaggccctcaaccgtgcccacgttcaggagcttttacagtgctccgagagggagggagcccttcaagaagagagggccgatgaggcccagcagagggaggaggagctgagagcactgcaggaggaactcagccaggccaaatgctcaagcgaagaagcccagttagaacacgccgaacttcaggaacagttacaccgcgctaatacagatacagccgagttaggaattcaggtgtgcgccctaactgttgaaaaggaaagggtggaagaggcactagcatgtgctgtccaggagttgcaggatgccaaagaggccgcttctagggagcgagaagggctggagcgacaggtggcagggctgcaacaggagaaagagtctttgcaagagaagctgaaggccgcaaaagctgctgcagggagcctgcctgggctccaggcacagctggctcaggctgaacaaagggcccagtctcttcaggaagcagcccatcaggaactgaataccttgaagttccagctctccgccgaaattatggactatcagagcaggttaaagaatgccggagaggagtgtaagtcattgagaggtcagttagaggaacagggcaggcagctccaggctgccgaagaagcggtcgaaaagctgaaggccacgcaggccgatatgggtgagaaactttcatgcacctctaaccacttggcggagtgccaagccgctatgctgaggaaggataaagaaggtgctgcgctgagggaagacctggagagaacacagaaggaactggagaaagcaacaacaaagattcaagagtattacaataaactatgtcaggaggtgaccaatagagagagaaacgaccagaagatgctagccgatttggatgatcttaacaggaccaagaagtacttagaagaaaggctaatcgagctgctacgcgacaaagacgctctctggcagaagtcagacgccctggaatttcagcagaagctaagcgccgaagaaaggtggctgggcgatactgaggctaaccattgccttgactgtaagcgtgaattcagttggatggtgcgcagacaccactgtcggatctgcggccgtatcttttgttactactgctgcaataactacgtgttgagtaaacacggaggaaagaaggaaaggtgttgccgcgcttgtttccagaagctgtcagaagggcctggctcccccgactctagcgggtccggcacttcccagggggagccaagccccgcactctcgcccgcttctccaggccctcaggccacaggagggcagggagcgaacaccgattatcgacccccagacgacgccgtcttcgatattataactgatgaagagctttgtcaaattcaggaaagcggttccagcctgccagagacccctacagagactgattcactcgatcctaatgctgctgaacaggcctccgtcggcgctagtaagggacttggaaacctactgtgcgaaagctcagcgtgccgagacaccacaagcacatccctaaccccagaggataccgaggatatgccggtgggccaagacagcgagatatgcctccttaagagcggggaattaatgattaaagtgccgctcaccgtggacgaaatcgcgagttttggagagggtagtagagagttgttcgttcgttcctctacttattccctcattcccattacagtcgccgaggcgggtctgaccatctcttgggttttttcaagcgatccaaagagcatttccttttccgttgtgttccaggaagcagaagacactcctcttgaccagtgtaaagtgctcattccaacaacgaggtgtaactcacataaagagaacattcagggtcaacttaaggttcggaccccaggaatatacatgcttatctttgacaatacatttagcagattcgttagcaagaaggtgttctatcacctcacggtggacagaccagtgatttatgacggctccgatttcctgtag

SEQ ID NO: 223825 - DNA, 2886 bp, synthetic construct
  misc_feature 1..2886: note = Description of Artificial Sequence: Synthetic coding sequence
  source 1..2886: mol_type = other DNA
atgcatgggcatcgcgcacctgggggagctggcccaagcgaacctgagcaccctgcaaccaatccgccaggcgctgctcctcctgcatgtgccgatagcgatcccggtgctagtgaacccggactccttgcccgtcggggttctggctccgcactgggtggccctttagatccacaattcgtgggaccgtctgatactagcctaggggctgcacccggacatagggtgttgccttgcggcccttcccctcaacaccaccgtgctctccgctttagctaccatttagagggaagccagccgcgtcccggactgcatcagggcaaccgcatcctggtcaaatcgctgtcattggaccccggtcagtccctagaaccacatcccgaaggtccacagagactccggagcgaccccggacctccaacagaaacgccaagccagcgtcccagccctctgaaacgggctcccggacctaaaccccaagtcccaccgaaacccagttacctccagatgcccaggatgccaccacctctggagccaatcccccctcctccctcgcgacccctccccgctgatccgagggtggccaagggtttggcacccagggctgaagctagtccatcaagtgccgctgtttcttccctcattgagaagttcgagcgagagcccgtgattgtcgctagtgaccgtcctgtccctggcccatccccaggaccgcctgaacctgtgatgctgccacaaccgacaagccaaccccctgtaccccagctcccggaaggagaagcgagtagatgcctgtttcttctagcccctggccctcgagatggcgagaaagtgccaaatcgcgattcgggaatcgatagcatctcgagcccaagtaattctgaggaaacctgtttcgtgtcggatgacggcccacccagccattcattgtgcccaggacctcctgctctggcatctgttccggtcgctttagctgatccacatcgcccaggatcacaggaggtagactctgatcttgaggaggaggacgacgaggaggaggaggaggaaaaagatcgggaaatcccagtcccattaatggagcgtcaagaaagtgtcgagcttaccgtgcaacaaaaagtgtttcacatcgccaacgaactcttacaaacagagaaagcatacgtgagtaggctgcatcttctcgatcaggtgttctgcgctagactgctggaggaggccagaaaccgctcctctttcccagcagacgtggtgcatggaatattctccaatatctgttccatctattgtttccaccagcagttcctactgcccgaattggagaagaggatggaagaatgggacaggtatcctaggataggagatattctccagaagttagcacctttcctcaagatgtatggagagtacgtgaagaattttgatcgcgctgtcgagctcgtaaatacatggacagagcgctcgacgcaatttaaggtgataatccatgaagtccagaaagaggaggcgtgcggaaatttgacactacagcaccacatgctcgagccagtgcagcggatcccaagatatgagctcctgctcaaggattatctgctgaagttaccccatgggagccccgactccaaagacgcccaaaagtcattggaactgattgcgaccgcagcagagcactccaatgccgctattcggaagatggaacgaatgcataagttgcttaaggtttatgaactcttaggaggggaggaggacattgtctcccctacaaaagagttgattaaagaggggcatatcttgaaattgtcagccaagaacgggactacgcaggaccgctacctcatacttttcaacgatagacttctatattgcgtgcccaggttgcggcttctcggtcagaaattctccgtgcgagcgcgaattgacgtagatggtatggagttaaaggagagttcgaacctcaatctccctcgaacatttctcgtgagtggaaaacagcggtcactggaactgcaagcccgaaccgaggaagagaagaaggattgggtccaagctatcaattcgaccttattgaagcatgagcagacattggaaacctttaaactcttaaattctacaaatagagaagacgaagacacaccaccgaacagccctaatgtcgacttaggaaagagggccccaacaccgattagggaaaaagaggttacgatgtgcatgagatgccaagaaccctttaattccatcactaagcggaggcatcattgtaaagcctgtggtcacgtggtatgcggcaagtgtagcgaatttcgggcaaggctggtgtatgacaacaatcggtctaatagggtctgcacggactgttatgtagccctccatggggtgcccggaagcagcccagcctgttcgcagcatacccctcagagaaggaggtcaattcttgaaaagcaggcctctgtcgcagcagagaatagtgttatttgttcttttctccactatatggagaaaggaggaaagggatggcataaagcttggtttgtggtgcctgagaacgaacctcttgtgctatatatctacggagctcctcaggatgtgaaagctcagcggtctcttcccctcataggatttgaagttgggccacccgaggcgggagaacggccagataggcgacacgtcttcaagattacacagtcacacctgtcctggtatttctcacctgaaaccgaggaactccagagaagatggatggcagtactggggagagccggtcgaggcgacaccttttgccccggacccacactgagcgaagatcgtgagatggaggaggcccctgtggctgcacttggggctactgccgagccaccggagtcgccacagacacgtgataagacctag

SEQ ID NO: 223826 - DNA, 1968 bp, synthetic construct
  misc_feature 1..1968: note = Description of Artificial Sequence: Synthetic coding sequence
  source 1..1968: mol_type = other DNA
atgaagggggcttctgaggagaaactcgcctcagtttctaacttggtcactgtcttcgagaattctaggaccccggaagccgctccaagaggtcaaagactggaagacgtccaccatcgaccagagtgtagacctccggagagcccaggccctcgggaaaagactaatgtgggagaagctgttgggtccgagccgaggaccgtgagcaggaggtatctgaattcattaaagaataagctgtcctccgaggcctggcgcaaatcctgccaacctgtcaccctctctggcagcggaacccaggagcccgagaaaaaaatagtacaggagctattggagactgagcaagcatacgtggccagattacaccttctggatcaggtgttttttcaggagctgctgaagactgccagatcatccaaggccttccccgaagatgtcgtccgggttatcttctctaacattagtagcatttatcaatttcacagtcagttctttctgcccgagctccaaaggagattagacgattggacagccaacccgagaattggtgacgtaatccaaaagctggccccattcctgaaaatgtacagtgagtacgtaaagaatttcgagagagcagctgagctgttggcaacctggacagacaagtcgccccttttccaggaagtgctcacaagaatacagtcatcagaagcatccggcagcctcactcttcagcaccacatgcttgaacccgtgcaacggatccctcgctacgagctgcttcttaaagaatacattcagaaactaccggctcaggcacctgaccaggccgatgcacagaaggcccttgatatgatatttagcgcagctcagcattccaatgcggcaattacagagatggagaggctgcaggatctatgggaggtgtatcagcgattaggcctggaggacgatatagtggatccgtctaatactttgctgagagagggaccagtgctgaagattagcttccgccgtaacgaccccatggagcgttatctattcctgtttaacaacatgttgctgtactgcgtgcctcgcgtgatacaggtgggagcccagttccaggtgcggactaggatcgatgtggccggtatgaaggtaagagaactcatggacgcagagttcccccactcatttcttgtaagcgggaagcaaagaactctggagctacaggcacgctcacaagaagagatgatttcatggatgcaagctttccaggccgctatcgatcaaatcgagaagcgcaatgagacattcaaagcagcagctcagggcccagagggcgatatccaagaacaggagctacagagcgaggagctgggcctcagggcacctcagtgggtgcgcgacaagatggtcacaatgtgtatgcggtgtcaagaaccattcaatgccctgacgcgccgtcggcaccactgccgggcatgcggttatgttgtctgcgcacggtgctccgactaccgggctgaactgaagtacgatgacaaccgcccaaacagggtctgcctgcattgttatgcctttttgaccgggaacgtgctcccagaggcaaaagaagacaaacgaagaggcatcctagaaaaggggtccagtgctactcctgaccaatcactcatgtgcagctttcttcagctgatcggggacaaatgggggaaatccggtcctcgcggatggtgcgtgatccccagggacgatcccctggtcttgtatgtttatgcagctccccaggacatgagagcacatacctctatccctctccttggatatcaggtcaccgtcgggccacagggcgaccctcgagtattccaattacagcagagtggacaactgtatactttcaaggccgagaccgaagaactcaagggtcgttgggtgaaagccatggagagggccgcttccggatggtcaccaagttggcccaatgacggtgacctgagcgactag

SEQ ID NO: 223827 - DNA, 852 bp, synthetic construct
  misc_feature 1..852: note = Description of Artificial Sequence: Synthetic coding sequence
  source 1..852: mol_type = other DNA
atgaaagtccgagaactcatggatgctgaatttccccatagttttcttgtgagcgggaaacagaggactttagaattacaggcaaggagtcaggaggaaatgataagctggatgcaagccttccaagcagcaattgaccaaattgagaagcggaatgaaactttcaaagctgccgctcagggtcccgaaggggatatccaggagcaggaactccagtctgaggagcttggtttgcgcgcacctcaatgggtccgggataaaatggttactatgtgtatgcgctgccaggaaccctttaacgcgctgacaagacgtagacatcactgtagagcgtgtgggtacgtggtgtgcgcgcgttgttcggattaccgcgcagagctcaagtatgacgataatcggcctaaccgggtttgtctgcattgttatgccttcctcaccgggaacgtgctccctgaggcaaaagaagataaacggaggggaatcctggagaagggctctagtgccacccccgatcagagtttgatgtgcagcttcctgcagttaatcggcgataaatgggggaagagcggcccacgtggatggtgcgtcatacctagagacgaccccctggtgctctacgtgtatgccgcaccacaggacatgcgggctcacacttcaatccccttgttaggataccaggtgacagttggccctcaaggcgacccgagagtctttcagcttcaacagagtggccagctgtacacgttcaaagctgagacggaggagctgaaaggcaggtgggtaaaagccatggagcgcgctgcctctgggtggagtccatcatggccaaacgatggagatctttcagattag

SEQ ID NO: 223828 - DNA, 2178 bp, synthetic construct
  misc_feature 1..2178: note = Description of Artificial Sequence: Synthetic coding sequence
  source 1..2178: mol_type = other DNA
atggagtccggccgaggaagctctactccacctggccctatcgccgcacttggaatgcccgacaccgggcctggtagcagcagcctgggtaagctgcaggcattgccagtgggccctagagctcattgtggcgatccagttagcctcgccgcagctggcgacgggtcccccgacatcggaccgactggcgaattgtcaggatctcttaaaatccctaacagggactctggaatcgatagtcctagtagcagtgtggccggtgaaaatttcccttgtgaggaagggcttgaagcgggtccaagtccaacagtgcttggggcacatgctgagatggctcttgactcccaggtgccgaaagtgacacctcaggaggaggcagactctgacgttggcgaggaacctgactccgagaataccccccaaaaggcagacaaagatgctgggctggctcagcattcaggccctcagaaactcttgcacattgcccaggagttgctccacacagaagagacctatgtcaagcgtctccatttgcttgatcaggttttttgcacccgcttgaccgatgcaggaatcccacccgaagtcattatgggcatcttctcaaatatctccagcatacatcgcttccacggccaattcttgctgccagaactgaagacacgaatcaccgaggaatgggacacgaaccccagacttggggatattctccagaaactggcacctttcctcaaaatgtatggagagtatgttaaaaacttcgatagggccgttgggctcgtctctacttggacccaacgctctcccctgttcaaggatgtggtccacagtatccaaaagcaagaggtgtgtgggaaccttactctgcaacatcacatgctggaacctgtgcaaagagtccctcgatatgaactcttactgaaggactacctgaagcggttaccccaagacgcaccagataggaaagatgccgaacggagtctggagttgatttccaccgctgccaaccacagtaacgcagcaatcagaaaggtggaaaagatgcacaagctgctagaagtgtatgaacagcttggcggtgaggaagacatagttaaccccgcaaacgaattaatcaaggagggacagatacaaaaactttctgctaaaaacggtactccccaagacagacatctgtttttatttaacagtatgatactgtactgcgtcccaaagctgaggcttatgggtcagaagttttcggtgcgagagaagatggatatttctggactgcaagtgcaggatattgtcaagcccaataccgcacacaccttcattattactggcaggaagcgctcattagagctgcagacccgcacagaagaagagaaaaaggaatggatccagataattcaagcgacaatcgagaagcacaagcagaactccgagacatttaaggctttcgggggtgccttttctcaggacgaggatccgtctctgtctcccgatatgcccatcacctctacctctccggtcgagcccgtcgtcactaccgaggggtccagcggggcagccggtctagagccacgcaagcttagcagcaagacccgcagagataaggaaaagcagtcgtgcaagagttgtggggagaccttcaacagcatcactaaaagaaggcatcactgcaagctgtgtggggctgtgatctgtggaaagtgcagcgagttcaaagccgagaactcacgtcaatcgcgggtttgtcgcgattgcttcctcacgcaaccagttgcccctgagagtaccgagaagacccctactgccgacccccaaccatcgctcctctgcggacccctgcgcttgtctgaaagcggtgaaacctggtcagaggtctgggccgctatcccaatgtctgacccacaggtcctccatttacaggggggtagccaagatggaaggctgccgaggactattccactgcccagttgcaaactgtccgtccctgacccggaggagcgcctcgactctgggcatgtgtggaagttgcaatgggctaagcaaagttggtatttgtctgcttcttcggccgaactgcagcaacagtggctggaaacgctaagtaccgctgctcacggggatacagcccaagatagcccaggggctttacagcttcaggtgccaatgggcgctgcggctccttag

SEQ ID NO: 223829 - DNA, 2178 bp, synthetic construct
  misc_feature 1..2178: note = Description of Artificial Sequence: Synthetic coding sequence
  source 1..2178: mol_type = other DNA
atggagtccggcagagggtccagcactccacccggtcccatcgctgccctgggtatgccagatacggggcctggcagtagtagtctcggcaaactacaggccctcccagttggacccagagctcactgtggcgaccccgtgtccctcgcagctgccggagacgggagccccgacataggcccaacgggagaattgtcagggtctctgaagatcccaaacagggatagcggaatagatagtccctcttcctcagtggcgggagagaacttcccgtgcgaagagggcctcgaggcaggaccgtccccgaccgtgctgggcgcacatgctgagatggcactggactcccaagtgccaaaggtcacaccgcaggaggaagcagattcagatgtaggggaggaaccagattcagagaataccccacaaaaagccgacaaggacgccggtctggcccagcacagcggaccgcagaagttgctgcacattgcccaggagttacttcacactgaggagacttatgttaagcggttgcatctgttagaccaggtattttgtacacgcctgaccgacgctggcattcctccggaagtgattatggggatcttcagcaacatttcaagtatccaccggttccatggacagttcctccttcccgaactcaaaacaagaattaccgaggagtgggacactaacccgaggctaggcgatattctccagaagttggccccttttctcaaaatgtatggagaatatgttaagaatttcgaccgagctgtcggcctcgtcagcacttggacccaacggtcccctctgttcaaagatgtggtgcattctattcagaagcaggaggtatgcggcaatttgactctccagcatcatatgttggagcctgtacagagggttcccaggtatgagctcctgctgaaggactatctaaaacggctcccccaggatgctcccgataggaaggacgctgagcgatcactggagctgatctctaccgcggcaaatcactccaacgccgctatcagaaaagtggagaaaatgcataagctcctggaagtctatgaacagctgggtggagaagaggatatcgttaaccctgcaaacgaactcattaaggaaggccagatccagaaactgtctgctaaaaacggcacccctcaggaccgacacttatttcttttcaactccatgattttgtactgtgtgccaaaactgcggctgatggggcaaaagttctccgttagagagaagatggacatctccggcctgcaggtccaggacattgtgaaaccaaatactgctcatacttttatcattactggacgcaagcgctcgcttgaacttcagactagaactgaagaggagaagaaagagtggatccagatcattcaggccactattgaaaagcacaagcaaaacagcgaaacatttaaagcatttggtggcgctttcagccaggatgaggatccgagcctgagccctgatatgcccatcacttccacaagtcctgtagagcccgtggttaccaccgagggttcctccggagccgctggtctggagccacgtaagctgtcctcgaagaccagacgagacaaagagaaacagagttgtaagtcatgcggagagacttttaattcaattaccaagcgtagacaccactgcaagctgtgcggcgctgtaatttgcggcaagtgttcagagtttaaggcagaaaatagtcgccagtctagggtatgccgcgattgcttcctgacacagcccgtggccccagagtcgactgagaaaacccccactgccgatccccaaccgtcactgttgtgcggtccactgaggctctccgaatcaggtgagacatggtcggaagtctgggctgcgatcccaatgagtgatcctcaggtgctgcatctgcaaggcggtagtcaggatggcagactcccgagaactattccgctgccttcctgtaaacttagtgtgccggaccccgaggaacgacttgacagcggtcacgtttggaaacttcagtgggcgaaacaaagctggtatctctctgcctcctctgcagaattacagcagcagtggcttgaaacgttatcgaccgcagcccatggagatacggcacaggactctcctggcgcactacaactccaagttcctatgggtgctgctgcaccatag

SEQ ID NO: 223830 - DNA, 2175 bp, synthetic construct
  misc_feature 1..2175: note = Description of Artificial Sequence: Synthetic coding sequence
  source 1..2175: mol_type = other DNA
atggaaagcgggagaggcagctccactcctcccggacctatagccgctttgggtatgccagacaccggacccggttcctccagcctggggaaattacaggcccttccagtggggccaagagctcactgtggggaccctgtctctctggcagccgctggcgatggcagccctgacatcggaccaacgggagaattaagcggttcactgaaaattcccaacagagacagtggtattgattctccgtcctcttccgtggctggagaaaacttcccctgtgaagagggtctggaggccggaccctctcccacagtgctcggcgctcatgccgagatggccttggacagtcaggtgccaaaagtgactccacaggaggaggctgacagcgacgtgggcgaggagcccgatagtgagaacacgccacagaaggctgataaggatgcaggtctggcccagcactctggccctcagaagttattgcatattgcgcaggagctgctgcacactgaagagacttacgttaagaggctccacctgctcgatcaggtgttttgcactcgcctgactgatgccggtataccccctgaggtgattatgggcatcttttctaacatctctagtatccaccgattccatggccagtttctgctgccagagttgaaaactcgtatcacggaggaatgggacactaacccgaggctcggagacatactgcaaaagttggccccattcctaaagatgtatggagaatatgtgaagaacttcgatcgcgcagtgggcctagtcagtacatggacacagcgaagccctttgttcaaagacgtggttcactcaatccaaaagcaagaggtgtgtgggaatctgactctgcagcaccatatgcttgagccggtgcagcgtgtgccaagatacgaactcctcctcaaagattacttgaaacgacttccccaggatgccccagatagaaaagatgcagaaaggtctctggaacttatcagcaccgcagccaaccattccaacgccgcaatccggaaagtggagaaaatgcacaaattattggaggtctatgagcagctgggaggagaggaggacattgtgaatccagccaatgagctgataaaagaggggcagatccagaagctgagcgctaaaaatggtacacctcaggatcgtcatctattcttgttcaattcgatgattctgtactgtgtgccgaaacttcggttaatgggccaaaagttcagcgttcgagaaaaaatggatatctccggtctgcaggtccaagatatcgtgaaacctaatacagcccatacctttattattacaggcaggaagcgttccctggagctgcaaacaaggacagaagaagagaagaaagaatggatccaaataatacaggccacaattgaaaaacataagcaaaattctgaaactttcaaagcttttggcggtgcctttagccaggacgaagatcctagtctgtcccctgacatgccaatcacatccacctctcccgtagagccagtcgtgactaccgaaggctccagtggcgctgccggtctggaacctcgcaagctgtcctcaaaaacccgcagggacaaagagaaacaatcctgtaagagttgcggcgaaacctttaacagcattacaaaaaggagacaccactgcaaactgtgtggagcagtgatctgcgggaaatgcagcgagttcaaagccgagaacagcaggcaatctcgcgtctgtcgagattgtttcttaacacagccggtggctcctgagtctacagagacccccaccgcagacccacagcccagcttactttgcgggccactcagacttagtgagagcggagaaacttggtccgaagtgtgggctgctatacctatgagcgatccacaggtgctccatttacaaggtggaagccaggacggcaggcttcccagaaccatccccctcccttcctgcaagctaagcgtgcctgatccagaggagagactagatagcggacatgtttggaagctgcagtgggccaagcagagctggtacctcagcgcaagctcggccgaactgcaacaacagtggttggaaacattgagcacagccgctcacggggatactgcccaggactccccaggcgctctgcagctgcaagtgcccatgggagctgcagcgccttag

SEQ ID NO: 223831 - DNA, 987 bp, synthetic construct
  misc_feature 1..987: note = Description of Artificial Sequence: Synthetic coding sequence
  source 1..987: mol_type = other DNA
atgatcctgtactgtgtccccaagttacggctcatggggcagaaatttagcgtcagagagaagatggatatatccggcttacaggtgcaggacatcgtcaagcctaacaccgcccacacattcattataacaggaagaaagcggagcctcgagctccaaacgcgcaccgaagaggaaaaaaaggaatggatccaaatcattcaggccacgattgagaaacataaacagaatagcgagacattcaaagccttcgggggtgcattcagccaggacgaggacccctccctttcccctgatatgccgataacctcaacctctcctgtcgagcctgtcgttaccactgaaggcagttccggcgctgccggattggagccaaggaagttgtcgagcaaaaccagacgcgataaggaaaaacagagttgcaaaagttgcggagagacgtttaatagtatcaccaagcgcagacatcattgtaagctctgcggggctgtgatctgcgggaagtgcagtgagttcaaggccgaaaactcccggcaatcacgagtgtgcagggattgcttcttaacccagccagtagcgccagagtctaccgaaaaaacccctactgccgatcctcagccctccttgttgtgcggacccttacggttgtctgaaagcggcgagacttggagcgaggtctgggctgcgattccaatgtccgaccctcaggtcctgcacctgcaggggggatctcaagatggccgtctcccacggaccatccctctgccaagctgtaagctcagcgtgccggaccctgaagagcggttggactccgggcatgtgtggaaactgcagtgggctaagcagagctggtatctgtccgcctcctctgccgagctccagcagcaatggctcgagacactaagcactgcagcccacggagacaccgcacaggactcgcctggcgcacttcaattgcaggttccaatgggagccgctgccccttag

SEQ ID NO: 223832 - DNA, 1416 bp, synthetic construct
  misc_feature 1..1416: note = Description of Artificial Sequence: Synthetic coding sequence
  source 1..1416: mol_type = other DNA
atggtgaataagatcttctcaaatatttctagtatcaatgccttccatagcaagttccttttgccagaactggagaagcggatgcaggagtgggagactacgccgaggatcggggacatccttcagaagctggcccctttcctgaaaatgtacggcgagtacgtgaaaggattcgacaacgctatggagcttgtaaagaacatgaccgaacgtattcctcagtttaaaagcgtggtcgaagaaatccagaaacagaaaatctgcggtagcctgacgctgcaacatcacatgttggaaccagtccagcggataccaaggtatgagatgctcctaaaagactacctccgaaaattgccacctgactccctagactggaacgacgccaaaaaatctctagaaattatcagcacggcggcttcccactcaaatagcgcgatacgcaaaatggagaatctcaaaaagctgctggagatctatgagatgctaggagaggaagaggatattgtgaatccatctaacgagctgattaaagagggacaaattcttaaactggctgcacgtaacacctctgcccaggaacggtacctatttctgttcaacaacatgttgttatattgcgtcccgaagtttagcctggtgggaagtaaatttactgttcggacacgcgtggggattgatgggatgaaaatcgtcgagacccagaacgaggagtacccacatacatttcaagtctccggtaaggagagaaccctggaactgcaggccagcagcgcacaggataaggaagagtggatcaaggctttgcaggaaactatcgacgcttttcaccaacggcacgagactttccgcaatgctatcgccaaagataatgacattcactcggaggtcagcacagccgagctgggaaagcgggcaccaaggtggattcgcgataatgaggtcacaatgtgtatgaagtgcaaagaaccgttcaacgccttgaccaggcgacgccaccactgcagagcctgcggttacgtggtctgttggaagtgcagcgattataaagcacagctagaatacgatggtgggaagctcagcaaggtatgtaaagactgttatcaaataataagcggcttcaccgacagcgaagaaaagaagaggaaggggatcttggagatcgaatccgccgaagtcagtggcaattcagtcgtctgcagtttcctgcagtatatggagaagtccaaaccgtggcagaaagcctggtgtgtgatcccaaaacaggacccactggtgttgtacatgtacggagcaccccaagtgtccaagccgcatctcagcgaagggaccgacgccctgggtggaaaaggaaagcgggtagatagcggcctgaaaatctgtcgcacacgggtacaagcagtctccctgtttcattag

SEQ ID NO: 223833 - DNA, 843 bp, synthetic construct
  misc_feature 1..843: note = Description of Artificial Sequence: Synthetic coding sequence
  source 1..843: mol_type = other DNA
atggtgaacaaaattttcagcaacattagttcgattaacgcttttcactctaaatttctgctcccagagctcgagaaaagaatgcaggaatgggaaaccactcccaggattggcgatattttgcagaagctcgctcccttcttgaagatgtatggcgagtatgttaagggatttgacaacgccatggagttagtgaagaatatgacagagagaataccccagtttaagtcggtcgtggaggaaatccaaaaacagaagatatgcggctccctgacgttacaacatcacatgctggaacccgtgcagagaattccccgatacgagatgttgctcaaagactacctccgcaaattgccacctgattccctcgactggaatgacgccaagaagagtctggagattatttcaaccgccgcatctcacagcaatagcgccattcgaaaaatggagaatctcaaaaaactgcttgaaatctacgaaatgctgggcgaggaggaggacattgttaacccatccaatgaactgatcaaggagggtcaaatattaaaactcgccgctaggaacacgtcagcacaagagagatatttgtttctatttaataatatgttgttgtattgtgtgcccaagttcagcctcgtgggaagtaagtttaccgtgagaactagggttgggatagacggcatgaagattgtggaaactcaaaacgaagaatacccgcatacttttcaggtgtctggcaaggaaagaactcttgaacttcaggccagctcagcccaagataaggaggagtggatcaagagacgcggttttgctatgttaccgcgactgatctctaattcttag

SEQ ID NO: 223834 - DNA, 567 bp, synthetic construct
  misc_feature 1..567: note = Description of Artificial Sequence: Synthetic coding sequence
  source 1..567: mol_type = other DNA
atgttcagctgcttcctttgcatcctgagcttttcctctctcagtaattattccgacctcaagaaggagagcgcagtcaatctgaacgcccctcgcactcctggccgacacggcttgacgacaacgccacaacagaaactcctcagccagcatttacctcaaaggcagggaaacgacaccgacaaaacccagggggctcaaacctgcgtggctaatggcgtgatggccgcacaaaaccagatggagtgtgaagaggagaaagcagccacactctcgagcgatacaagcatccaggccagcgagcctctcctggacacccacatcgtgaatggcgagcgggatgagacagctacagctcccgctagcccgacaacagactcttgtgatggaaacgcatctgattcttcctaccggacacccggtatcggacccgtgctgcccctggaagaacggggagcagagactgagacaaaggtgcaggagagagagaatggggagtcaccacttgaacttgaacagcttgaccagcaccacgagatgaaggtcgagcacgaaacatcctcctag

SEQ ID NO: 223835 - DNA, 2301 bp, synthetic construct
  misc_feature 1..2301: note = Description of Artificial Sequence: Synthetic coding sequence
  source 1..2301: mol_type = other DNA
atggaagagatcaagcctgcatccgctagctgtgtctctaaagaaaaaccatcaaaggttagcgatctgatctctcggttcgaaggaggatccagcctatcgaattattctgacctgaagaaagagtcagcggttaacctcaacgctcctaggacccccggacgccatggcttaacaaccacaccccagcagaaactgctcagtcagcacctgccccaacgtcagggaaacgataccgacaagacacagggcgctcagacttgtgttgcgaacggcgtgatggctgcacagaaccagatggaatgtgaggaagagaaagcggcaacactgtcttctgacacttcaatccaagctagcgagcctctgctcgatacccatatcgttaatggggagagagacgagaccgcaaccgccccagctagtcccacaactgactcttgcgacgggaatgcaagcgacagtagctatcgaacccctggcatcggtcctgtgttacctctcgaagagcgcggagccgagaccgaaaccaaggtacaggaaagagaaaatggcgaaagtccactagagttagaacagttggatcagcatcatgagatgaaagagaccaatgagcagaaactgcacaaaattgcaaatgagttgctgcttacagagagggcatatgtgaacagactcgatctactagaccaagtattttactgtaagctacttgaggaggccaatagggggtctttcccggcagagatggtaaacaaaatattttcaaacatctccagtatcaacgccttccattcgaaattcctactgcccgagctggagaagcgcatgcaggagtgggagaccacgcccaggattggagacatcctccagaaactagcacccttcctcaaaatgtacggagaatacgttaaggggtttgataatgccatggaactggtaaagaacatgacagagcgtatccctcagtttaagagtgttgttgaggaaattcagaaacaaaaaatttgcggctccttgaccttacagcaccacatgctggaaccagtgcagaggattcccagatacgaaatgctcctgaaggactatcttagaaagctcccacccgactccctggactggaacgacgccaagaagtccttagaaatcatctccaccgctgcctcgcacagtaactccgcaatccggaagatggagaatctaaaaaagctactggaaatttatgagatgctcggggaagaagaagatattgtgaacccatcaaatgaacttatcaaggaaggtcagatcctgaagttggcagctaggaatacatccgctcaggagcgttatctgttcctgttcaataacatgttgctgtattgcgtgcccaaattctctcttgtcggttccaaattcaccgtcagaactagagtgggcatagacgggatgaagatcgtggaaacccagaacgaggaatatccacatacctttcaggtgtctggcaaagaaaggacactagagttacaggcctctagcgcccaagacaaagaagaatggattaaagccctgcaggagactatcgatgccttccatcagcgacacgaaacattcagaaacgcgatcgccaaggataacgacattcattcagaagtcagcacagcggaactcggcaagagagcccctcgctggatcagagacaacgaggtgacgatgtgcatgaagtgcaaggagccctttaacgccctgacccgtcgacggcaccactgtcgggcatgtggatatgtggtgtgttggaaatgttctgactataaggcccaactcgagtacgacggtggcaagctatccaaagtatgcaaggactgttaccagattatcagcggttttacggacagtgaggaaaaaaagcgcaagggcattctggagattgagagtgcagaagtgtccgggaattcagtggtgtgcagctttctacagtacatggaaaaatctaaaccatggcagaaggcttggtgtgtaatccccaagcaggaccccctggttctatatatgtatggggctccccaagacgtcagggcccaggctacaataccactccttggttacgtggtcgacgagatgcccaggtccgctgacctgccacactctttcaaactgacacagtctaaatctgtgcactcctttgccgcagacagcgaagagctcaaacagaaatggttaaaggttatcttgctggcagttactggtgagactccaggcggacccaacgagcaccctgctacgctggacgatcaccccgagcccaaaaagaagagcgagtgctag

SEQ ID NO: 223836 - DNA, 624 bp, synthetic construct
  misc_feature 1..624: note = Description of Artificial Sequence: Synthetic coding sequence
  source 1..624: mol_type = other DNA
atggaagagattaaaccggcttccgcttcatgcgtttctaaggagaagccatccaaagtctccgaccttatttcaagattcgagggcggatccagtcttagtaattatagcgatctaaagaaggaaagcgccgttaatctcaacgcacctagaactccgggacgccacggcctgaccactacaccccaacaaaagctcctgagtcagcacttgcctcagcgacagggaaacgacacagacaagacacagggagctcagacatgcgtcgctaacggcgtcatggccgcacagaaccaaatggaatgtgaggaggaaaaggccgctactctcagctcagataccagcatacaggcttcagagcctctcctagatacacatattgtgaatggcgagagggatgagaccgctacagctccggctagcccaacaacggattcatgtgacgggaacgcttccgactccagttaccgtacgcctggtatcggccctgtcctgcctttagaggagaggggggctgagaccgaaacgaaggttcaggagagggagaatggtgagtcacctctggagctcgagcagctcgaccagcatcacgagatgaaggtggagcacgaaacttcgtcttag

SEQ ID NO: 223837 - DNA, 2637 bp, synthetic construct
  misc_feature 1..2637: note = Description of Artificial Sequence: Synthetic coding sequence
  source 1..2637: mol_type = other DNA
atgaatttcaaacgcgtgaaaccgaacattttcttgctcaaccagtcgcgtctcataatatcaatctgtgagataatgtcaacagaccagggttcctccacctgccccaaaatcgcactcgttccgccttgtagcacatcctctaccacaactttggtcggggagaatgttagcgaagaggaagcacagggcataaatggtaaccgacctgcaaagcattccgctgccagccctaagccccaggtgcctccgaaacctctccacctgcagaacagcccttcatccaatatccaccaaactcctcgccacaaggccctgccttcagccaaacccaggatggaggaaataaagcctgcaagcgcgtcttgtgtgtctaaggagaaaccatcaaaggtgtctgacctgatatcccgctttgagggtgggtcctctctcagcaattactctgacctcaaaaaggagagcgccgttaacttgaacgccccaagaaccccaggcaggcacggcctgacgacgacacctcagcaaaaactgctgagtcagcacctgccacagcgtcagggaaacgacacagacaaaacgcagggagcacagacttgcgttgccaatggtgtgatggccgctcagaatcagatggagtgcgaagaagaaaaagccgctacattgagctctgatacatctatacaggcctcagaacctttattggatacccacattgtgaacggcgaaagggacgagacagctaccgctcccgcttcacccacaacagatagctgtgatggcaatgctagtgattcatcatacagaacaccaggtatcggacctgttttacctctggaagaaagaggagcagagaccgagactaaagtgcaggagcgtgaaaatggggagtctccactggagctggaacagctcgaccaacaccatgagatgaaagaaacgaatgagcaaaaattgcacaagatcgcgaatgagttgctgctgaccgaaagagcctacgtgaataggctcgatctactggaccaggtgttctattgcaagttactagaagaagccaaccggggttcttttcctgctgaaatggtgaacaaaatattctccaatatttcttctatcaatgcttttcactcaaagttcctgttgccagaactagaaaaacgcatgcaagagtgggagaccaccccgcgaattggcgatattctgcaaaaactcgctccatttctcaaaatgtatggagagtacgtcaaaggattcgacaacgccatggaactcgtaaaaaatatgactgagaggattccacagtttaagtcggtggtagaagagattcagaagcaaaagatttgcggcagtctgacactgcagcaccatatgctggagcccgtccagcgcattccccgttacgaaatgcttctgaaagactatctgagaaagctgcccccagatagtctggactggaatgatgcaaagaagtccttagaaatcatcagcactgctgcaagccacagcaactctgctatacggaagatggaaaacctgaagaagctgcttgaaatctacgaaatgctgggggaagaagaggatattgttaatcccagcaacgaactcatcaaagagggtcagatcctcaaacttgctgctcgcaatacatccgctcaggaacgctatctcttcctgttcaacaacatgctgctgtactgcgtcccaaagttcagcctggtcgggagcaaatttacagtccggacaagggtggggatcgacggcatgaaaatcgtcgagacccagaatgaagagtatccccacacgtttcaggttagtgggaaagagcggacgctggaactccaggcctcatcggcccaggataaggaggagtggatcaaagctttacaggagacaatagatgccttccaccaaaggcacgaaacctttagaaacgccattgccaaggacaacgatatacacagcgaggtgtctacggctgagctgggaaaacgcgctcctaggtggattagggataatgaagtaaccatgtgtatgaagtgtaaagagccattcaacgcgcttaccaggagaagacatcattgccgtgcctgcggatatgtggtgtgttggaagtgttctgattacaaagcgcagcttgaatatgacggaggcaagctgtctaaagtctgtaaggactgttaccagatcatatccgggtttacggactccgaagaaaagaagcgcaaaggcattctcgaaattgagtctgcagaggtcagcggcaacagcgtggtgtgtagttttttacaatacatggaaaagtctaagccctggcagaaggcctggtgtgtgattcccaagcaagaccctttagttctgtacatgtatggagctccccaagacgttagggcgcaagctaccattcctctactggggtacgtggttgacgagatgcctagatctgcagatttacctcatagcttcaaactcacacagtcgaaatctgttcattcctttgcagctgactcggaggaactgaagcagaaatggttgaaggtgattctgttggccgtcactggggaaacaccaggaggaccaaatgaacatcctgcgaccctggatgaccacccagagcccaaaaagaagtctgaatgctag

SEQ ID NO: 223838 - DNA, 2556 bp, synthetic construct
  misc_feature 1..2556: note = Description of Artificial Sequence: Synthetic coding sequence
  source 1..2556: mol_type = other DNA
atgggaggatgcagtagcacctgcccgaaaatcgctctggtccctccctgttcaacatccagcactaccacgctggtcggcgagaatgtcagtgaagaagaggcccaggggatcaatggcaatcggccagcaaaacactctgcggcttcccccaagccacaggtgcctccaaaacccttgcacctccagaactccccttcaagtaatattcatcaaactcctagacataaggcgttgcccagtgcaaagcctagaatggaagagatcaaaccagcctcagcatcgtgtgtttcaaaagagaaaccatccaaggtaagcgatttaattagtcgatttgaagggggttcatccctgagcaattattccgatcttaaaaaggagagtgccgtgaatctgaacgcacctagaacccccggtcgccacgggctcacaacaaccccacaacaaaaattattgagtcagcatctgccacagcgccaaggaaatgacacagacaagacacagggtgctcaaacctgcgtggccaacggagtgatggcagctcagaaccaaatggagtgcgaggaagagaaagcagccaccctgtcaagcgacacaagcatccaggcctccgaacctcttctggatacacacattgtgaatggggaaagagacgaaacggcaaccgcccctgcttcgccaacaactgatagttgtgatgggaacgcaagcgactcatcctatcggacacccggaatcggcccagtattgcctctggaagaacgcggagcagaaacagagacaaaggtgcaggagagggagaacggcgaatccccactggagctcgagcagctggaccagcaccatgagatgaaggagacaaatgagcagaaactgcataaaatcgctaacgagctgctcctaaccgaacgggcttatgtcaaccgcctggatttgctggatcaggtcttttactgcaaactgcttgaggaagctaacagaggctcgttccctgcggaaatggtgaacaagatctttagcaacatttcctctatcaacgcgttccacagcaagttcctcctgccagaactggaaaaaaggatgcaggaatgggagaccactcccagaatcggtgatattctgcagaaactggcgccttttttaaaaatgtatggcgaatatgtcaaaggatttgataacgcaatggagttggtcaagaatatgaccgagcgtatccctcagtttaaatcagtggtagaagagatccagaagcagaaaatatgtggaagtctgaccctgcagcaccacatgctcgagcctgtccagcgcattcccagatacgagatgctcctgaaagattacctacggaagctgccgccagattccctagactggaatgacgccaaaaagagtctcgaaattatctctacagcagccagccattccaacagtgcaattagaaagatggaaaacctcaagaaactgctggaaatttatgagatgttgggtgaggaagaagacatagtgaacccctcaaatgagctaataaaagaggggcaaatactgaaactagcagcgagaaatacaagcgcacaagagcgatacctatttttattcaacaatatgcttctgtattgcgttccgaaattctcgctagtggggtcgaagtttactgtgaggacaagagtcggaatcgacggtatgaagattgtggagacccaaaatgaagaataccctcacaccttccaagtatcaggaaaggaacgaactcttgaactgcaggcttcatctgcacaagacaaggaagagtggattaaagcgctgcaggagaccatcgatgcattccaccagaggcatgaaaccttcaggaatgccatcgcaaaggataacgacatccacagcgaggtgtcgacagccgaactgggcaagagggctcccaggtggattcgcgacaacgaagtgacgatgtgtatgaagtgcaaagagccctttaatgccctcacccgacgtcgccatcattgtcgcgcttgcgggtacgtcgtgtgttggaagtgtagcgactacaaggcgcagctggaatatgatggtggcaaactcagcaaagtctgtaaagactgttaccaaataatttcaggatttaccgattccgaagagaaaaagaggaaggggatcctggaaatcgaatctgccgaggtctctgggaattccgtggtgtgcagcttcctgcagtacatggaaaaatctaagccttggcagaaggcgtggtgtgtgatccctaaacaagatccattggttctgtacatgtatggcgcaccacaagacgtccgagcccaagctacaatcccattattaggatacgttgtggacgagatgccacggagtgcagatttaccccattcgtttaagttgacccagagcaagagtgttcactcttttgcagctgactccgaagaactgaagcagaaatggctcaaagtgatcctgctggccgtgacaggggagacccctggcggacccaacgagcaccccgcaaccctggacgatcaccctgagccaaagaaaaagtctgaatgctag

SEQ ID NO: 223839 - DNA, 2712 bp, synthetic construct
  misc_feature 1..2712: note = Description of Artificial Sequence: Synthetic coding sequence
  source 1..2712: mol_type = other DNA
atgtctgacgaaggcggatctaatttcagacgggtggcgattaggcggaaaagcaatccttcctacctgccgccaggcgtgcccaggccttggtctaggccggcttcgcatttgggtcgtgttggcactgccgcatttaaaggacaggtgccctccggcgcaaccggttccagcacttgtcccaagattgccctggttccaccttgttcgacgagtagtactactacgctggtgggagagaacgtgtccgaggaggaggcgcagggtatcaatggcaaccgtccagccaagcactctgccgcatcacctaagccgcaggtgcccccaaagcccctccatttacagaatagtccctcgagcaacatccaccagactcctagacataaggcacttcccagtgccaagcccaggatggaggagatcaagccagcttccgcctcctgtgtgagtaaggagaagccctccaaagtttctgacctgatcagccgcttcgagggtggctccagcctttctaactacagcgatctcaagaaagaaagcgcagtgaacctgaacgcaccccgaactccaggacgccacggactcaccaccacaccacaacagaagttactctcacagcatctgcctcagaggcaaggcaacgacacagacaaaacccagggggcacaaacctgcgtggccaatggggttatggcagctcagaaccaaatggagtgcgaggaggagaaggcggcaacgctctcgtctgatacttctatccaggcttctgagcctctccttgacacccatattgtaaatggagagcgtgatgagactgctaccgccccagcaagtcccactacagacagttgtgacgggaatgcaagcgattcctcctaccgtacgcctgggatcggccctgtgttgcccctcgaggaaagaggagcagaaacggagactaaggtacaggagcgagagaacggggagtccccactggagctggagcaactagaccagcaccacgagatgaaagagacaaatgaacagaaactgcacaaaatcgccaacgagctgcttttgactgagagagcctacgtcaatagactggacctccttgatcaagttttttattgtaaactccttgaagaagccaacaggggctcattccctgcagaaatggtcaacaagatttttagtaacatcagctccattaatgcttttcatagcaagttcctgctgcctgaacttgaaaaaagaatgcaagagtgggaaacaacccccagaatcggagatatcctgcagaaactggcaccttttctgaaaatgtacggggaatacgtcaaaggcttcgataatgctatggagctggtgaaaaatatgaccgagaggatcccacaattcaagtctgtagttgaggaaatccagaaacaaaagatatgcggctctctcactctccagcaccacatgctggaacctgtgcagaggataccccgttacgaaatgcttctgaaagactaccttcgcaaactgccccctgacagcctggattggaatgatgctaaaaaaagcctcgaaataatatccaccgcggcttcccatagcaacagcgcgatacgaaagatggagaatctaaaaaaactcctggagatctatgagatgctgggggaggaggaagatattgtaaaccctagcaacgagctaatcaaggagggccagattctgaagttggccgcaagaaatacctctgctcaggaaaggtacttattcttattcaacaatatgctgctgtactgcgtgcccaaattctccctggtcgggtccaaattcactgtgcggactagagtgggtattgatggaatgaagattgtggagacccaaaatgaagaataccctcataccttccaggtttcaggtaaggaaagaaccctggaacttcaggcatcatccgcccaggataaggaagagtggattaaagccctgcaggaaacgatcgacgctttccaccaacgccatgaaactttccgcaatgcaatcgcaaaagataacgatatccactcagaggtcagcaccgccgagctgggcaagcgcgctccacgctggatcagagacaacgaagtcaccatgtgtatgaagtgtaaggaaccattcaacgcactgactcggcgtcggcaccattgccgagcatgtgggtatgtcgtttgttggaagtgttccgactacaaagctcagctggaatacgacggcggtaagctttccaaagtttgcaaagactgctatcagatcatcagcgggtttactgacagcgaggagaagaaacgcaagggcattcttgaaattgagagtgcagaagtgtctgggaactccgtcgtgtgctctttccttcagtacatggaaaagtccaagccttggcagaaggcttggtgtgtcatcccaaaacaggaccccctcgtgctctacatgtatggagctccccaggacgtccgcgctcaggcaaccatcccacttctgggttatgtcgtagacgagatgccaaggtctgctgatctgccccattcctttaaacttacgcagtctaaaagcgtccatagctttgccgctgacagcgaggaattgaaacaaaaatggctcaaagttatcttgctggccgtcacaggggagaccccgggagggccaaatgaacacccggcaactctagatgaccatcctgaaccaaagaagaagtcagaatgctag

SEQ ID NO: 223840 - DNA, 420 bp, synthetic construct
  misc_feature 1..420: note = Description of Artificial Sequence: Synthetic coding sequence
  source 1..420: mol_type = other DNA
atgtcatggaggggacgatctacctactactggcctcgtccgaggcgttacgttcagcccccagagatgattgggcctatgcggccagagcagttttcagatgaggtcgaaccagctacccccgaggagggcgaacctgcaacccaaaggcaggatcctgcagcggcacaggagggcgaagacgagggagcgtctgcaggacagggtcccaagcctgaagctgatagtcaggagcaagggcatccccagaccggctgcgaatgcgaagatggccctgacggccaagaaatggatccgcctaaccccgaggaggtgaaaacccccgaggaagagatgcgctctcactacgtagcacagactggcatactctggctgctcatgaataactgcttcctgaacctgagcccacgcaagccctag

SEQ ID NO: 223841 - DNA, 351 bp, synthetic construct
  misc_feature 1..351: note = Description of Artificial Sequence: Synthetic coding sequence
  source 1..351: mol_type = other DNA
atgtcctggagaggtagatctacttatcggagcaggcctaggctttatgtggagccaccagaaatgatcggcccaatgctcccagagcagttcagcgacgaggtggagcctgccacacccgaggagggcgaacctgcaacccagaggcaggaccctgccgcagctcaagagggggaggatgaaggcgcatccgctggacaggggcctaaaccagaggccgattcgcaggagcaggtccaccctaaaaccggctgtgaatgtggagatgggccagatggtcaggagatgggtctgcccaaccccgaggaggtgaaaagaccagaggaaggcgaaaagcagagccagtgttag

SEQ ID NO: 223842 - DNA, 354 bp, synthetic construct
  misc_feature 1..354: note = Description of Artificial Sequence: Synthetic coding sequence
  source 1..354: mol_type = other DNA
atgtcttggaggggtaggagcacctactactggcccaggccccgtagatatgtgcagcctcctgaaatgatcggcccaatgcgcccagaacagtttagcgatgaggtcgaacctgctacaccagaggaaggcgagccggcaactcaatgccaggatccggctgcagcacaggagggcgaggatgagggggcatccgctggccaggggccaaagcctgaggcccactcacaggaacaagggcacccacagaccggatgtgagtgtgaggatggccctgatggacaggaaatggatccccctaatcctgaagaagttaaaacacctgaagaaggcgagaaacagagtcagtgctag

SEQ ID NO: 223843 - DNA, 354 bp, synthetic construct
  misc_feature 1..354: note = Description of Artificial Sequence: Synthetic coding sequence
  source 1..354: mol_type = other DNA
atgtcctggcgcggtaggagcacctactactggcctcgccctcgaagatatgtgcagccaccggaaatgattggacccatgcgccctgaacagttctcggatgaagtagagcccgctacacccgaagagggggaacctgctacacagtgtcaggaccccgcagccgcacaggaaggagaagacgagggagcctctgctggtcagggtcctaagccagaagcccattctcaggagcagggccaccctcagaccggatgtgaatgcgaggatggcccagacggtcaggagatggatcccccaaatcccgaggaagttaaaaccccagaagaaggagaaaaacagagtcagtgttag

SEQ ID NO: 223844 - DNA, 354 bp, synthetic construct
  misc_feature 1..354: note = Description of Artificial Sequence: Synthetic coding sequence
  source 1..354: mol_type = other DNA
atgtcttggcggggaagaagtacatactactggcctaggccgaggagatacgtgcagccgcctgaaatgattggccctatgaggcccgaacagtttagcgatgaggtcgagcccgcaactcccgaagagggcgaaccagcaacccagtgtcaagatccagctgctgcccaggaaggcgaagatgagggggcatccgccggacagggccctaagcccgaggcccactcccaggaacagggccacccccagaccggctgcgagtgcgaagacggcccagatggccaggagatggaccctcctaatcctgaggaggtcaagacgccagaagagggtgaaaagcaatcacagtgctag

SEQ ID NO: 223845 - DNA, 354 bp, synthetic construct
  misc_feature 1..354: note = Description of Artificial Sequence: Synthetic coding sequence
  source 1..354: mol_type = other DNA
atgtcctggagaggtcgctctacctactactggccccgacctcgccgatatgtccaaccacctgaaatgatcggaccaatgcgccctgagcagttctctgatgaggtggaaccagcaacgcctgaagagggagagcccgctacccaacgacaagatcccgcagccgctcaggaaggtgaggatgaaggtgcttctgctgggcagggcccaaagccagaggcacactctcaggagcaaggacatccacagaccggatgtgaatgcgaggacggcccagacggccaggaaatggatccacccaacccagaagaggtcaaaacccccgaggaaggagaaaagcagtcccagtgctag

SEQ ID NO: 223846 - DNA, 354 bp, synthetic construct
  misc_feature 1..354: note = Description of Artificial Sequence: Synthetic coding sequence
  source 1..354: mol_type = other DNA
atgagttggcgcggacggtctacctattattggcccaggccacggaggtacgtccagccgcctgaaatgatcgggcctatgcgcccagagcagttcagtgacgaggtagaaccagctaccccggaggaaggcgagccagccactcaacggcaggaccctgctgccgctcaagagggcgaggatgaaggagccagtgctgggcagggccctaaacccgaggcccattctcaagagcaaggccatccacagacaggatgtgagtgcgaggatgggcctgacgggcaagagatggacccccctaacccagaggaagtcaaaacaccagaggagggcgagaaacagagccagtgttag

SEQ ID NO: 223847 - DNA, 354 bp, synthetic construct
  misc_feature 1..354: note = Description of Artificial Sequence: Synthetic coding sequence
  source 1..354: mol_type = other DNA
atgtcttggagagggagatcgacatactattggcctcggccaagacgttacgtgcaaccgccagaaatgataggccctatgcgcccagaacagttttcagacgaagtggaacctgcaacccccgaagaaggcgagcccgcaactcagtgtcaggaccccgcagccgctcagaaaggtgaagatgagggtgcgtcagccggacagggccctaagccagaggcccacagtcaggagcaggggcatccccagaccgggtgtgaatgtgaagatggcccagatggccaggaaatggatccgcctaatcccgaagaggtgaagacacccgaagaaggcgagaagcaatcccagtgctag

SEQ ID NO: 223848 - DNA, 354 bp, synthetic construct
  misc_feature 1..354: note = Description of Artificial Sequence: Synthetic coding sequence
  source 1..354: mol_type = other DNA
atgtcatggaggggcaggtctacttattactggccaagacccaggccttatgtccaaccccctgagatgatcggaccaatgcgcccagagcaattctctgatgaggtggaacctgccacccccgaggagggcgagccagccacccagcgacaggatcccgcagcagcccaagaaggtgaagacgagggggcaagtgcaggtcaaggcccaaagcccgaggccgatagccaggaacaaggacacccgcagacaggatgcgagtgtgaagacgggcctgacggtcaagaaatggatccaccaaaccctgaggaagtcaagacccctgaggaaggcaaaaaacagtctcagtgctag

SEQ ID NO: 223849 - DNA, 354 bp, synthetic construct
  misc_feature 1..354: note = Description of Artificial Sequence: Synthetic coding sequence
  source 1..354: mol_type = other DNA
atgagctggcggggtaggtccacatactatcgccctagaccacgacggtatgtcgagcctcctgagatgatcggcccaatgaggcctgaacaattttcagacgaggtggaaccagccacacccgaagagggggagccagccactcagtgccaagatcccgctgcggctcaggagggtgaagatgaaggcgcttcggcgggacaaggcccaaaacctgaggccgatagtcaggagcagggccatccgcagacgggatgtgagtgcgaggatggcccagatggacaggaaatggatccacctaatcctgaagaagtgaaaacaccagaagagggaaaaaagcagtcacagtgttag

SEQ ID NO: 223850 - DNA, 351 bp, synthetic construct
  misc_feature 1..351: note = Description of Artificial Sequence: Synthetic coding sequence
  source 1..351: mol_type = other DNA
atgtcttggagaggacgaagcacctaccggcctaggccccgacgttatgtggaaccgccagagatgatcgggcctatgaggccagaacagttctcggacgaggtcgaaccagccactcctgaagaaggagagcctgcaactcagagacaggaccccgcagccgctcaggaaggacaggacgaaggagcatctgccggtcagggtccaaaaccggaggctcacagtcaggaacagggacatccccagaccggctgtgagtgcgaagatgggcctgacggccaagaaatggatcccccaaatccagaagaggtgaagaccccagaagaaggagagaaacagagccagtgctag

SEQ ID NO: 223851 - DNA, 351 bp, synthetic construct
  misc_feature 1..351: note = Description of Artificial Sequence: Synthetic coding sequence
  source 1..351: mol_type = other DNA
atgtcctggagaggccgtagcacatataggccacgcccacgtagatatgtcgaaccccctgagatgataggccctatgaggcccgagcagttttcggatgaggtcgaacccgcaactccagaggaaggcgagcctgccacacaacgtcaagatcctgccgctgctcaggagggtgaggatgaaggcgcttcagcaggccaagggcctaaacctgaggcacattcccaggaacagggacatcctcaaacgggctgtgaatgcgaagacgggccagacgggcaggagatggaccctcccaatcctgaggaggttaagacccccgaggaaggggaaaagcagtctcaatgctag

SEQ ID NO: 223852 - DNA, 351 bp, synthetic construct
  misc_feature 1..351: note = Description of Artificial Sequence: Synthetic coding sequence
  source 1..351: mol_type = other DNA
atgtcctggagaggcagatccacttaccgtcccagacctcgtcgctacgtagaacctccagagatgatcgggccaatgcggcctgagcagttctcagacgaggtggaacctgctacacctgaggaaggagagccagctacacaaagacaggacccggctgcggcacaggagggggaggacgaaggtgcttcggccggacaaggtccgaagccggaagcacattcacaggaacaaggccacccccagacaggatgcgagtgtgaggacgggcctgatggacaagagatggacccaccaaatccggaggaagtgaagactcccgaagagggagagaaacagagtcagtgctag

SEQ ID NO: 223853 - DNA, 351 bp, synthetic construct
  misc_feature 1..351: note = Description of Artificial Sequence: Synthetic coding sequence
  source 1..351: mol_type = other DNA
atgagctggcgaggaagatccacctaccgcccaagaccgaggagatacgttgagccaccggaaatgataggaccgatgcggcctgagcagttcagtgatgaagtggagcccgcaaccccggaggagggggagcctgccacccagaggcaagatcccgctgcagcacaggagggggaggatgagggtgcatctgccggtcaggggcctaagcccgaggccgatagtcaagagcagggccaccctcaaactggatgcgagtgcgaggacgggccagacggccaggaaatggatcctccaaacccggaagaggtcaagaccccggaggagggagagaagcagtcccagtgttag

SEQ ID NO: 223854 - DNA, 351 bp, synthetic construct
  misc_feature 1..351: note = Description of Artificial Sequence: Synthetic coding sequence
  source 1..351: mol_type = other DNA
atgagttggcggggtcggagcacatacagaccaaggcccagacgttatgtggaaccacccgaaatgatcggaccaatgcggccagaacaattcagcgacgaagtggagcctgccacaccagaggagggagagcccgctacccagcgccaagacccagcagctgcgcaggaaggcgaagacgaaggtgcttcagcagggcaaggtccgaagcccgaagcagactcacaggaacaagggcatccccagaccgggtgtgagtgcgaagatggcccagacggacaagagatggacccacctaacccggaggaggtaaagacacccgaggagggaaaaaagcaatctcagtgctag

SEQ ID NO: 223855 - DNA, 435 bp, synthetic construct
  misc_feature 1..435: note = Description of Artificial Sequence: Synthetic coding sequence
  source 1..435: mol_type = other DNA
atgttcctggaagagaagattccatctatttcagatcttaaactggccatcaggcgcgctacacttaagaggtctttcacacccgtgttcctggggtcagccctcaaaaataagggggtacagccattgctcgacgctgtgctcgaatacctgcccaacccatccgaggtgcagaattacgcaattctcaataaggaagacgactcaaaagagaagacaaaaatcctcatgaattctagtagggacaattctcatccattcgtaggactggcgttcaagctagaattcctcagtaggagtttttttcgactcactcgtcagaaagaccataggcggcctatccaaagaacaaccctctaccttatcgtgatgtcaccttacgatttactcggctgcaattccttcttggattttccatgcttttcaagagactag

SEQ ID NO: 223856 - DNA, 2256 bp, synthetic construct
  misc_feature 1..2256: note = Description of Artificial Sequence: Synthetic coding sequence
  source 1..2256: mol_type = other DNA
atgcggctgcttggcgcagctgcagttgctgccttggggaggggccgtgcccctgcctctcttggctggcaacggaagcaagtcaactggaaagcctgtaggtggtcttctagcggggtgattcccaatgaaaaaatcagaaacatcggtatttctgcgcacatagatagtgggaagacaacattgacagagagagtcctctactacacaggcagaattgccaagatgcatgaagtaaaggggaaagatggagtcggggctgttatggactccatggagctcgaaaggcagcggggaataacaatacagagtgccgctacgtacactatgtggaaagatgtgaatatcaacatcattgatacccccggtcatgttgatttcacaattgaggtcgaaagggcattgcgcgttttggatggcgctgttctggtcctctgcgccgtggggggagtccagtgtcaaacaatgacagtcaatcgccagatgaaacgatataatgtgccatttcttacttttattaacaagttggatagaatgggaagcaatccggctcgggctctccagcagatgagaagtaaattgaaccataatgccgcatttatgcaaatacccatgggcctggaagggaacttcaagggcatcgtcgacttgattgaagagagagccatttacttcgacggtgattttggccaaattgtgcgttacggggagattcctgccgagctgcgggctgccgctactgatcacaggcaggaactcatagaatgtgtcgccaacagcgatgagcaactcggtgagatgttcctcgaagagaagattccctctatttccgatttgaagctggccatccgcagagccacactcaaacgttcctttacaccggtgtttctggggtccgcccttaaaaataagggggtccaacctttactggacgcggtgttagagtatctgcccaacccatccgaggtacagaactacgctatcctgaataaagaagacgactctaaagaaaagaccaagattctcatgaattctagcagggacaacagtcacccatttgtggggttggcttttaaactggaagtggggcgattcggccaactcacctacgtgcggtcctatcagggcgagctgaaaaagggcgacactatatataatacgcgcaccaggaagaaggtccggcttcagcgcttagcacggatgcacgccgacatgatggaggatgtggaagaagtgtatgcgggtgatatctgtgctttgttcggcattgactgtgcctcaggagacaccttcaccgataaggccaatagcgggctcagtatggaaagtattcacgtacctgatccagtcattagcatcgccatgaagccttctaacaagaacgacttggagaagttctcaaagggcatcggcaggtttacgagagaagacccgacgttcaaggtctacttcgacactgagaacaaggagacagtcatttccggtatgggggaactgcacctggagatctacgcacagcggctggaacgtgaatatggatgcccatgtataacggggaaaccgaaggttgcattccgggaaactattaccgccccagtgccctttgatttcacccacaaaaagcaatccggcggtgccggtcaatatggtaaggtgatcggcgtgctggagccactggatccagaggactatacaaaactggagttctccgatgagacatttggctcaaacattccaaaacagttcgtgcccgcagtggagaagggctttctggacgcctgcgagaagggcccactgagcgggcataagctgagtggtctgagattcgtccttcaagatggagctcaccatatggtggattccaacgaaatttcattcatcagggctggtgaaggcgcactgaagcaagccctcgctaacgctaccctgtgcatccttgaacccattatggccgtcgaagtggttgcccctaacgaatttcaaggccaggtgatcgcaggcattaaccgaagacacggggtgatcacaggtcaagatggggtcgaggactatttcacattatacgccgacgtacccctgaatgatatgttcggttattccacggaactcagaagttgcaccgaggggaagggcgagtacacgatggagtattctcggtaccagccctgtctcccaagcacacaggaggacgtgatcaataagtatctcgaagcgaccggccaactccctgtcaaaaaaggtaaggctaagaactag

SEQ ID NO: 223857 - DNA, 459 bp, synthetic construct
  misc_feature 1..459: note = Description of Artificial Sequence: Synthetic coding sequence
  source 1..459: mol_type = other DNA
atgagtctggttatccctgaaaaattccagcacatcctccgagtcttgaataccaacatcgacgggcgacgtaaaatcgctttcgcaataaccgccattaaaggcgttgggaggaggtatgcccacgtagtgcttcgaaaggctgacatagatctgactaaaagggccggagagctcactgaagacgaggtggagagggtcatcacaatcatgcagaaccctcgacaatataaaatccctgactggttcctgaatcggcagaaagacgtgaaggacggaaaatactcccaggttttggccaatgggttggataataagttacgcgaagacctggaaagactgaagaagattcgtgcgcacaggggactccgccacttctggggtctgcgggtaagaggacagcacacaaagaccacaggcaggcggggacggaccgtcggtgtttccaagaaaaagtag

SEQ ID NO: 223858 - DNA, 1071 bp, synthetic construct
  misc_feature 1..1071: note = Description of Artificial Sequence: Synthetic coding sequence
  source 1..1071: mol_type = other DNA
atgtctagacctctcctcatcacctttacgcccgctactgaccctagcgatctgtggaaggatgggcagcagcagccccaacccgaaaagcctgagtccacgctcgatggcgcagcagcccgagccttctatgaagcactgataggcgacgagagctctgcacccgactcacagaggtctcaaacagagcctgccagggagcgcaaaagaaagaagaggagaattatgaaagcccctgcagctgaagccgtcgccgaaggagcaagtggacggcacggccagggacggagtctggaagctgaggataagatgacacacagaatcctcagagccgctcaggagggagatctacccgagctccggcgactgcttgaaccccacgaggctggaggagccggagggaacatcaacgctcgggatgccttttggtggactccgctgatgtgcgctgcaagagcaggacagggcgctgccgtgtcttatctgctgggtaggggcgctgcttgggtgggcgtctgcgaattgtctggaagggacgccgcacaactcgccgaggaagcagggttccccgaggtggcacggatggtacgcgaatcgcacggggaaacccgtagcccagaaaatagatcccctaccccctccctacaatattgcgagaactgcgatacccactttcaggacagcaatcacaggacgagcacagcgcacttgttatctctgtctcagggaccgcagccacccaatctgccgctgggagtgcctatttcatctcctgggtttaaactcctgcttcgaggcggatgggagccgggtatgggactgggccctcgcggagaggggagagcaaatcccattccgaccgtgctgaagcgagatcaggaaggccttggttacaggagcgcgccacagcccagggtgactcatttccctgcttgggatacaagggccgtggccggtcgggaaaggccaccaagagttgctaccttgtcctggagggaagaacgccgtagggaggagaaagaccgagcctgggaaagagacctgcggacgtatatgaacctagaattctag

SEQ ID NO: 223859 - DNA, 1071 bp, synthetic construct
  misc_feature 1..1071: note = Description of Artificial Sequence: Synthetic coding sequence
  source 1..1071: mol_type = other DNA
atgtcacgtcctctgttgataaccttcactcccgcaaccgatcccagcgacctgtggaaagatggccagcagcaacctcagccagagaagcccgagagcacactagacggcgctgcagctagggcattttacgaggctttgataggcgacgagagttcagctccagatagccagagatctcaaacagaacccgctagagagagaaaacgcaaaaagcgccgaattatgaaggctcccgctgcagaagctgtggctgagggagcctccggccgtcacggccaggggaggtccctggaggcagaggataagatgactcaccgcatactgcgcgcagcccaggaaggtgacttgcctgagctccgccgtctgctggaaccccacgaggccggaggggctggcggtaatatcaatgctagggacgccttttggtggacacctctgatgtgcgccgcaagggcaggtcaaggagctgcggtgtcctatttgttgggtcgcggagccgcttgggtgggggtgtgcgagctcagtggccgagatgccgcacagttagctgaagaagcgggttttccggaagtagccagaatggttcgagaaagccatggggagacgcgatcccctgagaaccgaagcccaacccctagccttcagtactgtgagaattgtgatacacactttcaggactctaaccacaggacatcaacggcacacctgctgtcgctctcacaaggtccacagcctccaaacctgcccctcggcgtccccatctccagcccaggtttcaaactccttctgcggggtggttgggaaccagggatgggattaggaccaagaggagagggacgggcaaacccaatacccacagttctgaaacgagaccaagaggggcttggctatcgtagcgcccctcagcccagggtgacacattttcctgcttgggacacgcgggcagtcgccggacgggaacggccacccagggtggctaccttatcttggcgggaggaaagaagacgcgaggaaaaggaccgtgcctgggaacgcgacctcaggacatacatgaacttagagttttag

SEQ ID NO: 223860 - DNA, 1071 bp, synthetic construct
  misc_feature 1..1071: note = Description of Artificial Sequence: Synthetic coding sequence
  source 1..1071: mol_type = other DNA
atgtccaggccccttctgatcacctttacccctgcgaccgacccatctgacttgtggaaagacggtcaacagcagccacagcctgaaaaacctgaatccaccctggacggtgccgcagcaagagcattttatgaagccctcattggggacgagtcaagcgcgccagactcccagaggtcacagacagagcccgcaagagagagaaaacgtaaaaaacggaggatcatgaaggcccctgctgccgaagcggtggcggagggcgcttcaggtagacatggtcagggacgcagccttgaggctgaggacaagatgacacatcggattttgcgcgctgcccaggagggtgatctgcccgagctgcggcgactgcttgagccccacgaggctggcggagctggaggcaacatcaacgctcgggatgccttttggtggacacctcttatgtgcgccgctagagccggtcagggtgcagctgtatcttatttgctgggccgtggggcagcatgggttggtgtttgtgagttaagtggtagggatgccgctcagttagcggaggaagcaggatttcccgaggttgcgaggatggttagggaaagccacggcgaaacccgcagcccagagaacagatctcccacgcctagcctgcagtactgtgagaactgtgatacccacttccaagatagcaaccacagaacctctactgcccaccttctcagcttgtcacagggcccacaacctccaaacctcccgctaggagtgcccatttccagcccaggtttcaagctgttgctgcggggtggttgggaaccgggaatgggacttggacctcgcggagagggacgtgcgaatccgataccaaccgtcctgaagagggatcaggagggactcggttatcggagtgctccccagcctagagtgacacatttccctgcctgggatacacgggctgttgctgggagagaaagacctcctcgcgtggcaacgctgagttggagagaggaacgcaggcgagaagaaaaggaccgggcatgggaaagggatctgaggacgtacatgaacctggagttctag

SEQ ID NO: 223861 - DNA, 1071 bp, synthetic construct
  misc_feature 1..1071: note = Description of Artificial Sequence: Synthetic coding sequence
  source 1..1071: mol_type = other DNA
atgagccgcccattgctgattacatttaccccggctacagacccctcggacctctggaaggacgggcagcagcaacctcagccagagaagcccgaatcaacattggacggggcagccgcacgagcgttctacgaggctctgatcggggatgagtcttctgcaccggatagccagcggtcgcaaaccgaacccgcaagggaaaggaagcggaagaagaggcggatcatgaaggcacccgcagccgaagccgtggccgagggggctagtggccgtcacggacaggggaggtcccttgaagccgaagataaaatgacccatagaatcctgcgggcagcccaggagggcgaccttcctgagctcaggcggcttctggagcctcacgaggccggaggcgcagggggaaatattaacgcgagggatgccttttggtggaccccattgatgtgcgctgcaagggccggacagggcgctgccgtgtcgtatttattagggcgtggcgcagcttgggtgggcgtctgtgaactgtccggcagggatgccgctcagcttgccgaggaggcgggtttccccgaggtcgccaggatggtcagggaaagtcacggggaaaccaggtcaccagagaacaggagccctacgccgtcacttcagtactgcgagaattgtgacactcattttcaagattctaatcaccggacctcaacggcccaccttctatccctttctcagggtccacagccccctaacctcccactgggtgttcctatttcctcgccgggtttcaaattgctactgagaggcggatgggagcccggaatgggtttaggccctcggggtgaaggcagggccaatccgattccgacagtccttaagagggaccaagagggcctcgggtatcgctccgcgcctcaacctcgggttactcacttccccgcttgggacacacgtgccgtggccggtagggagcggcctcctagagtggcaactctgagctggagggaagaacgtcgcagagaggagaaagacagggcatgggaacgggacctgcgaacttatatgaatttggaattttag

SEQ ID NO: 223862 - DNA, 1071 bp, synthetic construct
  misc_feature 1..1071: note = Description of Artificial Sequence: Synthetic coding sequence
  source 1..1071: mol_type = other DNA
atgtcccggcctctcctgatcacctttacccctgcgaccgatcctagtgatctttggaaggacggtcaacaacagccgcaaccagagaaacctgaaagtacactggacggcgctgccgctcgggcattctatgaggcactgatcggagacgaaagttcagcacctgatagtcaaagatcccagaccgaacctgccagggaacgtaaaagaaagaaacgcaggataatgaaagcaccagctgctgaggcggtcgccgagggcgcatccggcaggcacgggcagggacgtagcctagaagccgaagacaagatgactcacaggatactacgggctgcgcaggagggcgacctgcctgaacttagaagactactcgaaccacacgaagccggaggggctgggggaaacattaacgctagagatgcgttttggtggacccccctgatgtgcgcggcacgggcaggccagggagcggctgtgtcctacttactaggccgaggggctgcttgggtgggcgtgtgcgagttaagtggacgcgatgctgctcagttagccgaggaggccggattcccagaagtggcaagaatggtgagggaatcacacggggaaacacgaagcccagagaaccgctctccgacgccatctctccaatactgcgaaaactgtgatactcattttcaggatagcaatcaccgcaccagcactgcccatcttcttagtctttctcaaggcccacagccccctaatttacctctcggtgtccccatatcatcaccagggtttaagcttctcttgcggggaggatgggagcctggcatgggactcgggccaagaggcgagggaagagcgaacccaataccaaccgtgttgaagagagatcaggaggggttgggatatagaagtgctccccagccccgagttacccatttcccagcttgggataccagagcggtcgccggacgcgagagaccaccaagagttgccacactgagttggagggaggaacgcaggcgggaggaaaaggaccgggcatgggagcgcgacctccgtacgtatatgaatctcgagttctag

SEQ ID NO: 223863 - DNA, 1071 bp, synthetic construct
  misc_feature 1..1071: note = Description of Artificial Sequence: Synthetic coding sequence
  source 1..1071: mol_type = other DNA
atgtcacgtccactccttattacattcacccccgctacagacccctctgacttgtggaaagatgggcaacagcagccacagcccgagaagcccgaatcgaccctcgatggcgcagccgcactcgccttttatgaggcattgatcggcgacgagtcctccgctcccgactcacaacgttcccagactgaacccgcacgggaaagaaagcgaaaaaaacgcaggatcatgaaagcaccagccgcagaggctgttgccgagggagcctctggccgacacgggcaaggtcgaagcctcgaggcagaggataagatgacgcaccgaatcctgcgtgcggctcaagagggagacctgcccgagctgcggagactgctcgaaccccacgaggctggcggtgcaggtggaaacatcaacgcgagggatgctttctggtggacgcccctgatgtgtgccgcaagagcgggtcagggcgctgccgtgtcctacttgttgggccgaggagccgcttgggtcggtgtctgtgagctgtcgggccgtgacgctgcgcagttggcagaagaggctgggtttccagaggtcgctcggatggttcgggagtcccatggtgaaacacgctctcctgagaacaggtctcctactccaagcctccagtattgcgaaaattgcgatacccactttcaggacagcaatcacagaacatcgaccgcccatttactgagcttgagccaaggcccacagcctcccaacttgcctctgggtgtgccaatcagcagccccggttttaaactcctgctgcgcggaggttgggaacccggaatgggactgggccctcgcggagagggacgtgctaaccctatccccacagtcctaaagagggaccaggagggactgggatatcggagcgcccctcagcccagggtcacacacttcccggcttgggacacccgcgctgttgcaggcagagagaggccgccacgcgtggcaacactgagctggagggaagagcgcagaagggaagaaaaggaccgggcttgggagcgggaccttcgcacatacatgaacttggaattttag

SEQ ID NO: 223864 - DNA, 1071 bp, synthetic construct
  misc_feature 1..1071: note = Description of Artificial Sequence: Synthetic coding sequence
  source 1..1071: mol_type = other DNA
atgtccagacctctgcttatcacattcactcccgctacagatcctagcgacttatggaaggatgggcagcagcaaccacagcctgaaaagcctgagtctaccttagacggcgcagccgctctggctttctacgaagcactgattggtgacgaaagctcagcaccggattcccaacgctcccagacggaaccagccagggaaaggaaaaggaagaagcggcgtatcatgaaggctcccgcagcggaggcggttgctgagggcgctagtgggagacatggccagggacgcagtctcgaagccgaggacaaaatgactcacaggatcctgcgggctgcccaggaaggggatcttcctgagttgaggcggctgttagagccgcacgaagctggtggagccggaggaaatatcaacgcacgagacgctttctggtggacacctttaatgtgcgccgcaagggcgggacagggagcggctgtctcttacttactgggacggggagctgcgtgggtcggtgtttgcgagttgagcggaagagacgcagctcagctggcagaagaagctgggtttccggaggtggcaaggatggttagagagtcccacggcgagacacgatcccccgagaaccggagcccaacacccagcctgcaatactgcgagaactgcgacacccattttcaggacagcaaccacaggacgtccactgcccatctgctttcgctttcccaggggcctcaacctcccaaccttccgttaggtgtgcctatatcctcacctgggttcaagctgcttctgagggggggatgggagcctggaatgggtttgggccctcgcggagaaggcagggccaacccaatccctacagtacttaaaagagaccaggaaggactgggctatcgcagtgcaccccagccgagagtaacacatttccctgcttgggacactcgcgcagtagctggccgtgagaggccaccacgtgttgccacgctttcttggcgggaagaaagacggcgagaagagaaggatcgggcatgggaacgcgacctgcgcacttatatgaacctcgaattttag

SEQ ID NO: 223865 - DNA, 1071 bp, synthetic construct
  misc_feature 1..1071: note = Description of Artificial Sequence: Synthetic coding sequence
  source 1..1071: mol_type = other DNA
atgagccgccctctcttgattaccttcactccagccacggatccatcagacctgtggaaagacggacaacagcagcctcagcctgagaagcccgaatccactcttgacggcgctgcagccctcgccttctacgaggccctgattggagatgagagtagcgcccctgattctcagagatcgcagaccgaaccagcaagggagaggaaaaggaagaaaagaaggattatgaaggctccggctgccgaagctgtggccgagggcgcatctgggaggcacgggcagggcagaagcctagaggcggaagacaaaatgacgcatcggattctgcgtgctgctcaagaaggggacttgcccgagttgcgacgtctgcttgagccacacgaggctgggggtgcagggggaaacataaacgctagagatgccttctggtggacgccactgatgtgtgccgcacgggctggccagggcgctgcagtgtcatacctccttggacgaggcgcagcttgggtgggcgtgtgcgagttaagcggacgcgatgcagctcagctggccgaagaagccggtttcccagaagttgcaaggatggtgcgagagtcccatggagagacacgttctcccgagaataggagtccaaccccaagcctgcagtactgcgagaattgtgatacccattttcaggactcaaaccacaggacatcaacggcgcatcttctctccctgagtcagggaccccaaccccctaacctaccactaggcgtgcctattagctcaccaggattcaaactgctcttgagaggaggatgggagccagggatgggcctaggtcccagaggtgaaggtcgtgccaaccccatacctacagtcctgaagagggatcaagagggactgggatacagaagtgcccctcaaccacgagtgacccattttcccgcatgggatacaagagctgtggccggtcgggaaagacccccaagagtcgctacactgagttggagagaggagagacgccgagaggagaaggaccgggcatgggaaagggacctgcgcacctatatgaacttggaattctag

SEQ ID NO: 223866 - DNA, 1071 bp, synthetic construct
  misc_feature 1..1071: note = Description of Artificial Sequence: Synthetic coding sequence
  source 1..1071: mol_type = other DNA
atgtcgcgaccccttctgatcacatttacccccgctactgacccgagcgatctttggaaagatggccagcaacagcctcagcctgaaaagccagaaagcactctggacggagcagctgccctcgccttctatgaggctctcattggcgatgagtcaagtgcgcctgacagccagaggagtcagacagaacctgcacgcgaaaggaagagaaaaaaacgcaggattatgaaggccccagctgccgaggccgtggctgagggcgctagcggtagacatgggcaaggcaggtccctagaagctgaagataaaatgacacatagaatactgagggcagcgcaggaaggcgacctgccagagctgcgtaggctgttggaaccccacgaggctggcggagccggaggaaatattaacgccagggacgcgttctggtggacgccgttgatgtgtgctgctcgggctggacaaggagccgcagtcagttaccttctgggaaggggcgctgcctgggtcggagtatgtgaattatcaggtcgcgacgcagcccaactggcagaagaagccggattcccagaggttgccaggatggttcgtgaatcccacggagaaacacggtcccctgaaaacaggtcccccactccttccctacagtactgcgagaactgcgacacgcactttcaggatagcaatcatcgcacatccaccgcccatctgctaagcctcagtcaggggcctcagccccctaatctccccctcggcgtgcctatctccagcccgggatttaaactccttctgcgtggcggatgggagcctggaatggggctcggccctcgcggagaggggcgtgcaaatccgatacccaccgtattgaagagggatcaggagggattggggtaccgttctgcacctcagccaagagttacccattttccagcctgggacacacgcgctgtcgccggaagggagcgaccacccagggtcgccacactttcatggcgagaggagcgaagaagagaggagaaagaccgcgcatgggagcgggacctcaggacttacatgaatctcgagttctag

SEQ ID NO: 223867 - DNA, 1071 bp, synthetic construct
  misc_feature 1..1071: note = Description of Artificial Sequence: Synthetic coding sequence
  source 1..1071: mol_type = other DNA
atgtctcggccactcctgattacgtttacaccagctacggacccatcagacctgtggaaggacgggcagcagcagcctcaaccagagaaacccgagtcgaccctcgacggggctgctgcgctggcgttttacgaggcattaattggggatgagtccagcgctccagactcccagcgcagccagacggaacctgcgcgtgaaaggaagcggaaaaaaagacgcatcatgaaggcccctgccgctgaagcggtcgccgaaggggcaagtggacggcatgggcaggggcgttctctggaggccgaggataaaatgacacaccgcattcttcgggcagcacaggagggcgacctccctgagctgagacgcctcctggagccacacgaggccggaggcgcaggcggaaatatcaatgccagggacgctttctggtggacaccgcttatgtgtgcggcacgcgcaggtcagggagctgcagtttcgtacttgttggggagaggcgcagcctgggttggagtctgtgaactgtcgggccgagacgccgctcaacttgccgaggaggcagggttcccagaggtggccagaatggtgagggagtcacacggagagacgagatcccccgagaatagatccccaactccctctctgcaatactgcgagaattgtgatactcattttcaagattccaaccaccgcactagcaccgcccatctgctctcactgagtcaggggccacaacccccaaatctgccactgggagtgccgatttcaagcccaggcttcaaactgctgctccgaggcggatgggagcccggaatggggctgggtcctcgtggcgagggaagagccaaccccatccccacggtgctaaaacgtgatcaggagggattgggatatcgatccgcccctcaaccacgggttacccactttccggcatgggacacccgggctgtcgcagggagagaacgaccccctagggtcgccacactgtcctggcgcgaggagagacgtcgggaggagaaagaccgggcttgggagcgtgacctgagaacgtacatgaacctcgagttctag

SEQ ID NO: 223868 - DNA, 498 bp, synthetic construct
  misc_feature 1..498: note = Description of Artificial Sequence: Synthetic coding sequence
  source 1..498: mol_type = other DNA
atgtctagaccgctgctcattacatttacaccagccaccgatccaagcgacctctggaaggacggacagcagcagcctcagcccgaaaaacccgaaagtaccctggacggagctgccgcacgggctttctatgaggccctgattggtgatgagtccagcgctccagactctcaaaggtcccaaaccgagccagcaagggaacgtaagagaaagaaaaggcgtatcatgaaggcaccagccgcagaggctgttgccgagggagccagcggaaggcatgggcagggccgttctctggaagctgaagataagatgacacacaggatccttcgggcagcacaggagggcgatttgcccgaattacggcgacttctcgagcctcacgaagccggaggggctggaggaaatatcaatgccagagacgctttttggtggacgcccctgatgtgcgcagccagggccggacagggcgctgccgtgagttatcttctgggtaggtag

SEQ ID NO: 223869 - DNA, 459 bp, synthetic construct
  misc_feature 1..459: note = Description of Artificial Sequence: Synthetic coding sequence
  source 1..459: mol_type = other DNA
atgtcgcggcctcttttaattacgttcaccccagccacggaccctagcgacctgtggaaggacggccagcagcaaccccagcctgagaagcccgagagcaccctggacggcgcagcagccctggccttttacgaggccctcatcggggatgaaagctcggccccagatagtcaacgctcccagacagaacccgctcgggagcgcaagcgtaaaaagcgcagaattatgaaagctcctgctgctgaggctgtggcagagggggcttccggtcggcatggtcagggcagaagcctcgaagctgaggacaaaatgacccacaggattctccgggctgcacaggaaggcgatctcccagaactccgcagacttcttgaaccacatgaagccggaggtgctgggggtaacattaacgctagagatgcattttggtggaccccactgatgtgtgccgctcgctag

SEQ ID NO: 223870 - DNA, 1071 bp, synthetic construct
  misc_feature 1..1071: note = Description of Artificial Sequence: Synthetic coding sequence
  source 1..1071: mol_type = other DNA
atgtctcgacctctgctaatcacctttaccccagccacggacccatccgatctttggaaggatggtcagcagcagccccagcctgagaagccagaatccacactggatggcgctgcagccctagccttctatgaagccctgattggagatgaaagctccgcccctgactctcagaggagtcagacagagccagctagggagcgtaagaggaagaagagaaggattatgaaggcgccagctgccgaagcggtcgccgaaggcgcatcaggccgacacgggcagggaaggtcgctggaggcagaggataagatgacacacaggatattacgggctgcccaggagggcgacctgccagaattgcgtcgattgctggagccccatgaggcaggtggagcaggcggaaatatcaatgccagggatgctttttggtggacaccacttatgtgtgcagcaagagcgggtcaaggcgcagctgttagctacctgttgggtaggggagccgcatgggtaggagtatgcgagctatccggcagggacgccgcacagctggcagaggaggccggatttccggaagtggccaggatggtacgcgaatcgcacggagagactaggtcccccgagaatcgctctcctactccctctctccagtattgtgagaattgcgatacgcacttccaggacagcaatcacaggacatcaacagcccacctcctctcactaagccagggaccacagccaccgaacctgcctctgggcgtgcccatcagttcacccggattcaagttgttgctgcggggtggctgggagccaggtatgggattgggtcccaggggcgaaggtcgcgctaaccccatcccgactgtgttgaagcgggatcaggagggtttaggctaccgctccgcccctcagcccagggtcacccacttccctgcatgggacacacgagccgtggcaggcagagaacgacccccaagggtcgccactctgtcatggcgcgaggaacgcagacgtgaagagaaggacagggcctgggagcgggatctgcgcacctacatgaatctggaattttag

SEQ ID NO: 223871 - DNA, 459 bp, synthetic construct
  misc_feature 1..459: note = Description of Artificial Sequence: Synthetic coding sequence
  source 1..459: mol_type = other DNA
atgtcccggccactgttaatcacctttaccccagctactgacccctccgacctctggaaagatggtcagcagcagccacaaccagaaaagcctgaatctactttagacggagctgccgcacgggctttttacgaggctcttataggagacgaaagcagtgccccagactcccaacgttcccagacagaaccggctcgagagaggaagcgaaagaagcggcgaatcatgaaagcccctgctgcagaggccgtcgcggagggcgcatccggccgtcacgggcagggacggagcctggaagcagaagataaaatgacccatagaatcctccgcgcagcacaggagggagatctccccgagttaagaagacttctggagccccatgaggccggaggagcaggcggaaatatcaatgccagagacgccttctggtggacacctctcatgtgcgccgctcgttag

SEQ ID NO: 223872 - DNA, 498 bp, synthetic construct
  misc_feature 1..498: note = Description of Artificial Sequence: Synthetic coding sequence
  source 1..498: mol_type = other DNA
atgtcccgacccctgttaatcacatttacaccagcaaccgatccaagcgatctctggaaggatggacaacagcaaccccagcccgaaaaaccggaaagtacgctggatggggcagctgctctggctttctatgaagcccttataggggacgagtcaagcgcgcctgacagccagcgtagccagacagagcccgcacgtgagcggaagaggaagaagcgccgaataatgaaagcccctgccgctgaagccgtggccgagggcgcttccggcagacatgggcaggggcgaagcttggaggctgaggacaagatgacccaccgcattttgcgagctgcacaggaaggcgacctacctgagttgcggcgactcttagaaccacacgaagccggaggagctggcggtaacattaatgcaagggacgccttctggtggactcccctgatgtgtgccgctcgcgcaggccagggtgcagcagtgagttacctattgggccgatag

SEQ ID NO: 223873 - DNA, 273 bp, synthetic construct
  misc_feature 1..273: note = Description of Artificial Sequence: Synthetic coding sequence
  source 1..273: mol_type = other DNA
atgtctaggccgctattgattaccttcacccccgcaaccgatcctagtgacctctggaaagacggtcagcagcagccacagccggagaagccagagagcacgctggacggggctgccgcactggcattttatgaggcccttatcggggacgagtcgagcgcgcctgacagccaacgtagtcagacggagcctgcacgcgaaaggaaaaggaagaaaagacggattatgaaggccccagccgctgaggccgtggccgagggagctagcggatag

SEQ ID NO: 223874 - DNA, 1071 bp, synthetic construct
  misc_feature 1..1071: note = Description of Artificial Sequence: Synthetic coding sequence
  source 1..1071: mol_type = other DNA
atgagccggccactgctgatcacatttacaccggctacagatccttccgatctatggaaagacgggcagcagcagccccagccagagaagccggaaagtacccttgacggcgctgccgctagggccttttacgaagccctgattggcgatgaaagtagcgcccctgattctcagcgctcccagactgagcccgctagggaacggaagcggaaaaaaagacggatcatgaaggctccagcggctgaggctgttgcagaaggggcaagcggacgtcacggtcaggggaggagtctggaagccgaggataaaatgacccaccggatcctgcgagccgctcaggagggtgacctgcctgagcttcggcgactgcttgaacctcacgaagctggtggcgcaggtggcaatattaatgccagggatgctttctggtggacgcctctgatgtgcgcagctagggctggccaaggtgcagcagtgtcctatctccttggacggggagcagcatgggtgggggtctgcgagctgagtggcagggatgcggctcagctggcggaggaagcgggattccctgaggtcgccaggatggttcgcgagtctcacggagagacgagatctcccgaaaaccgcagcccaacaccatcacttcagtactgtgaaaactgtgatactcactttcaggacagtaaccacagaaccagtacggcccaccttctcagcttgagccagggcccacagccacccaacctgccactcggcgtgccgatcagcagtcctggcttcaagctcctactgcgaggcggatgggagcccggtatgggcctgggacctcggggagagggcagggcgaaccctattcctacagtgctgaaaagggatcaggaaggtctgggctaccgctctgctccacaacctcgggtcacccacttcccagcttgggatactcgcgctgtggccggacgggaacgccctcctagagttgccacactcagttggcgggaggagcgaagaagagaagaaaaagatagggcttgggagagagatctgcgaacctacatgaatctcgagttctag

SEQ ID NO: 223875 - DNA, 1071 bp, synthetic construct
  misc_feature 1..1071: note = Description of Artificial Sequence: Synthetic coding sequence
  source 1..1071: mol_type = other DNA
atgagtagacccctgctgatcactttcacaccagctaccgacccaagcgatctctggaaggatggacagcaacaaccccaaccggaaaagccagaatccaccctcgatggggcagctgcaagggctttctacgaagcccttatcggcgatgagtcctcagccccagatagtcagaggagccagaccgaacctgccagggagcgaaaacgcaaaaagcgcaggataatgaaggcaccggctgcagaggccgtcgctgagggtgcatccggtagacatggccagggaagaagcttggaagccgaagacaagatgacacatcgtatacttcgagcggcacaagaaggggatctacctgaattgcggaggctccttgagccccatgaagccggaggcgcaggcggaaatatcaatgctagagacgctttttggtggacccccttaatgtgtgccgctagggcaggccaaggggcagctgtcagctatctcttaggacgcggagcagcctgggtaggggtgtgcgagctgtccggaagagatgccgctcagctcgctgaggaggcgggttttcccgaggttgcaagaatggtgagagaaagtcatggcgaaactagatcgcctgaaaaccggagtcccacaccatcacttcagtactgcgagaattgcgacactcactttcaggattccaatcacagaaccagtaccgcccatctgctgtccttgtcgcagggccctcagcctcccaatttgccattgggagtgccaatctcttcaccaggattcaaactactgctgagaggcggatgggagccagggatggggctgggtccacggggagagggaagagctaaccccatccctacagtactgaagagggaccaggaggggttaggataccgttcagctccccaaccccgagtgacacattttccggcatgggatacccgggcagtggccggtcgcgaacgcccaccgagagtagccactctctcctggcgggaagagcgcaggagggaagaaaaagaccgcgcttgggaaagggacctgcggacgtatatgaacctggagttttag

SEQ ID NO: 223876 - DNA, 324 bp, synthetic construct
  misc_feature 1..324: note = Description of Artificial Sequence: Synthetic coding sequence
  source 1..324: mol_type = other DNA
atgtccagaccactgctaatcacttttaccccagcaaccgatccttccgatctgtggaaggacggtcagcagcagccccagccggaaaagcccgagagcaccttagacggagctgccgcacgggctttctacgaggccctcatcggggatgagagttccgccccagattctcagcgatctcagaccgaacctgcccgtgagcggaaacggaagaagaggagaatcatgaaagccccagcagccgaagcggtcgccgagggagcctctggaaggcacggtcagggcagatcactggaagctgaagataaaatgacccaccgatag

SEQ ID NO: 223877 - DNA, 324 bp, synthetic construct
  misc_feature 1..324: note = Description of Artificial Sequence: Synthetic coding sequence
  source 1..324: mol_type = other DNA
atgtcacgtcccttgctaattactttcactccagctactgatcctagtgatctctggaaagatggccagcagcagccccagcccgagaagccagagtccacactggacggggctgctgccctagccttctatgaggccttgatcggtgacgagtccagcgcacccgactctcagaggagccaaaccgagccagcccgtgagaggaaaaggaagaagcgcaggataatgaaagctccagcagcagaggccgtggcagaaggggctagtggacgccacggccagggccgtagcctggaagcagaagataaaatgacacacagatag

SEQ ID NO: 223878 - DNA, 1071 bp, synthetic construct
  misc_feature 1..1071: note = Description of Artificial Sequence: Synthetic coding sequence
  source 1..1071: mol_type = other DNA
atgtcaaggccgcttctgatcactttcactccggctaccgatccctcggacctgtggaaggacggacagcagcagccacaaccagagaagccagagtcgacgttggacggagccgcagcccgtgcattctatgaagccctgatcggggacgaatcttctgcaccagactcgcagcgctcccagactgaacccgctagagagcgcaagcgtaaaaagcgacgtataatgaaggcaccagccgctgaggctgtggcagagggcgcatccggcaggcatggccaaggaagatccctggaagccgaagacaagatgacccacaggattctgagagccgcacaagagggagatttacccgagctccgtaggttgcttgaaccccacgaagcgggtggagctggcggtaacatcaacgctagggatgctttctggtggactcctttgatgtgcgccgctagggccggacaaggagcagccgtgagctatttgcttggcagaggagccgcttgggtgggggtatgtgagcttagtgggagagacgccgcacagttggccgaagaggcaggctttcccgaggtggccagaatggtccgcgagagccatggtgagacacgctcgccggaaaacaggtctccgaccccaagtttgcagtactgtgagaattgtgacacgcatttccaggactccaaccacagaacgtctacagctcaccttctgtcgctgtcccagggtcctcagcctcctaacctgcccttgggcgttcctatatcatctccaggatttaagctgctgctgcgaggtggttgggaacccggaatgggactaggccctagaggcgagggcagagccaatcccattccaaccgtactcaaacgggatcaggaaggcctgggttatcggtctgcacctcaacccagagtcacccacttcccggcttgggacacacgggctgtggccggtagggaaagaccaccacgggttgctactctgagttggagggaagaacgtcgcagagaggaaaaggacagggcgtgggagcgggacctgcggacgtatatgaacctagaattctag

SEQ ID NO: 223879 - DNA, 1071 bp, synthetic construct
  misc_feature 1..1071: note = Description of Artificial Sequence: Synthetic coding sequence
  source 1..1071: mol_type = other DNA
atgtccagaccgctcctgataacatttacaccggcaaccgatccatccgacctgtggaaggatggtcagcaacagccccagcccgagaagccagagtcgacgcttgatggagcggctgccagagccttttacgaggctttaatcggagacgagtctagcgccccagactcacagcgttcccagaccgagcccgcacgggaaaggaagaggaagaaaaggagaatcatgaaggcacccgctgcagaggctgttgcggaaggcgcaagtggcagacatgggcagggccgttcactggaggccgaagacaagatgacacataggatattgcgggctgctcaggagggtgacctgccagaactgcggaggctgctcgaaccgcacgaagcgggtggcgctggcggtaacatcaatgctagggatgccttttggtggacccctctgatgtgtgccgctcgcgctggccagggtgccgcagtgtcctacctactgggcagaggagctgcatgggtcggtgtgtgcgagctaagtggtagggacgcggctcagctggcggaggaggctggcttcccagaggtagccaggatggtgcgagagagccacggggagacacgtagcccggaaaacagaagcccgacaccctcacttcagtactgcgagaactgcgatactcattttcaagactcaaaccatcggacgagcacggcccacttactgtcattatctcagggtccacagcccccaaatttgcctctgggagtacccattagtagtcctggtttcaagctgttactccggaggggatgggaacccggaatgggcttgggccctcgaggggaaggaagggctaacccaattcctaccgtcctaaagagagaccaagagggactgggataccgaagcgccccacagcctagggttacccactttcccgcatgggacacccgcgctgttgccggaagggagaggccgcctagagtggccactctttcctggcgcgaggaacggaggcgtgaggaaaaggaccgcgcttgggagcgggatctaaggacgtacatgaatctggaattctag

SEQ ID NO: 223880 - DNA, 1071 bp, synthetic construct
  misc_feature 1..1071: note = Description of Artificial Sequence: Synthetic coding sequence
  source 1..1071: mol_type = other DNA
atgtctcgacctttgctgatcactttcacccccgcaaccgacccctcagatctttggaaggacggccagcagcagccacagcccgagaagcctgaaagtacccttgatggcgctgccgcacgcgctttctatgaagctctgattggggatgagtcaagcgccccagattcacagaggtcacaaacggaaccggcacgcgagcgaaaacgaaagaagagacggatcatgaaggctcctgcagccgaagcagtggccgagggggctagcgggaggcacgggcagggaagaagtctggaagccgaagataagatgactcatcgaattctgcgcgctgctcaggagggagacctgcccgaattgcggaggttactagaaccccatgaagccggaggcgcaggaggtaatattaatgcaagggacgctttttggtggacccctcttatgtgtgccgctcgcgctggacagggcgctgcggtgtcgtacctgcttggaagaggcgctgcttgggttggagtgtgcgaactgtccggtcgggacgcagcacagctggctgaagaagcgggttttcctgaggtggctcgtatggtgcgggagtcccacggagagacacggtctccggagaatcggtcacccactccatcattgcagtattgcgagaactgcgatacccactttcaggactctaatcatcgcactagcactgctcatctccttagcttgtcccaggggccacagcccccaaacctgcctttaggagtgccaatatcttctcccggattcaagttgctgttgcgcagaggttgggaaccaggtatgggccttggcccacgcggtgagggcagggcgaacccaattcctaccgtcctgaagagggaccaggagggcctggggtatcgctcagctccacagccccgagttacgcactttcccgcatgggacacacgcgctgttgccggtcgagagcggcctccacgggtagctactctgagttggcgtgaagagcgccgacgagaagagaaggaccgcgcttgggagcgcgatttaaggacctatatgaatctggaattctag

SEQ ID NO: 223881 - DNA, 498 bp, synthetic construct
  misc_feature 1..498: note = Description of Artificial Sequence: Synthetic coding sequence
  source 1..498: mol_type = other DNA
atgtcaaggcctctcctgattactttcaccccagccaccgaccccagtgacctctggaaagacggacagcaacagccccagcccgagaagcctgagtccaccctcgacggcgctgcagccagagccttttacgaagcactgattggggatgagagttccgctcctgactcccagaggagtcaaacagagcctgcccgtgagcgtaagcggaagaaaagacggattatgaaggcccctgctgcggaggccgtcgcagagggggctagtgggaggcacggtcaggggaggagccttgaggcagaagataagatgactcacaggattctgcgcgcagctcaggagggtgaccttcctgaacttcggaggctgctggaacctcatgaagctggtggtgctgggggtaatatcaacgctagggacgccttttggtggacaccgttaatgtgtgcagccagggctggtcagggtgctgctgtttcctacctactgggcaggtag

SEQ ID NO: 223882 - DNA, 1071 bp, synthetic construct
  misc_feature 1..1071: note = Description of Artificial Sequence: Synthetic coding sequence
  source 1..1071: mol_type = other DNA
atgtcacgacctcttctaattacctttactcccgcaaccgaccctagtgatctgtggaaggacggccagcagcagccccaaccagagaaaccagaatccaccttggacggagccgcagcccgagctttttacgaggccctgattggggatgagagcagcgccccagactcacagagatcacagactgaacccgctcgcgaaagaaagagaaagaagcgcagaattatgaaagctccggctgcggaggccgtcgccgaaggtgcaagcggacgtcatgggcaggggagatccttggaagcagaagataagatgactcacaggatactgagggctgcccaagaaggggatctgcccgaactgaggcgccttctagaaccgcacgaggcaggcggagcgggagggaatatcaacgccagggatgcattttggtggacccccctgatgtgcgcagcccgagctgggcagggggcagcagtgtcctacctcctgggcagaggagccgcatgggttggtgtctgtgagttgagcggacgtgacgccgcacagctggctgaagaagcagggttccccgaagtggccaggatggttcgtgagtcacacggtgaaacccgttcgccagaaaataggtccccaacgccatccctgcagtactgtgagaattgtgatactcatttccaagactctaaccacaggacgtctacggcccatctgctcagtctctcccaaggccctcagccgcctaacctacccttgggcgtgcctattagcagcccgggattcaaactcctgctgcgcggaggttgggagcctgggatggggctaggtcctcgtggggagggtcgggctaatcctatccccaccgtcctaaaaagggaccaggagggcttaggctaccgctcggcgcctcaacctagagtgacacatttccccgcttgggatactagggctgtggccggaagagaacgcccacctcgggtggctacgctttcctggagggaagagaggaggagggaagaaaaagatagagcctgggagagggatctccggacttacatgaatcttgaattttag

SEQ ID NO: 223883 - DNA, 597 bp, synthetic construct
  misc_feature 1..597: note = Description of Artificial Sequence: Synthetic coding sequence
  source 1..597: mol_type = other DNA
atgtcaaggccgttgctgataacattcacccctgctacggatccatctgatttgtggaaagacggacagcaacaaccacagcctgagaagccagagtcgacattggacggagccgctgcgcgagcattctatgaggcccttatcggagatgaatcctccgcacctgatagccagagatcccagacagaaccggcacgcgagaggaaacgaaagaagcgaagaattatgaaagcaccggctgcagaggcagttgctgaaggagcttctggaagacatggacagggaagatcccttgaagccgaagataaaatgacccacagaattctgagggccgctcaggagggtgacttgcctgaactgcgaaggcttttggagcctcatgaggcagggggtgcaggcggaaatatcaatgccagagacgccttttggtggacgccactcatgtgtgctgcaagggccggtcagggcgctgcagtctcatacttactaggaaggggcgcagcgtgggtgggagtctgcgaattgagcgggagagacgctgcccagcttgccgaagaagctggctttccagaggtggctcggatggtccgcgagtag

SEQ ID NO: 223884 - DNA, 1071 bp, synthetic construct
  misc_feature 1..1071: note = Description of Artificial Sequence: Synthetic coding sequence
  source 1..1071: mol_type = other DNA
atgagccggcctctccttatcacatttacacccgcaacggacccctcagatctatggaaggatggacaacagcagccccagcctgaaaagcccgagagtacgcttgatggtgctgccgcaagggccttctacgaggctctgataggagacgaatcttctgccccagacagtcaacggagtcagactgagccagctagggaacgcaaacgcaaaaaacggcgtatcatgaaggcacccgcagctgaagctgttgctgagggtgccagcggccgacacggccaggggaggtcgctggaggccgaggataagatgacacatagaatcctgcgtgcggctcaagaaggggacctgccagagctgcgtcggctgttagagcctcacgaagctggcggtgccggaggcaacattaacgcgagggacgcattctggtggacccctctgatgtgcgcggcaagagcgggacagggcgcagcagtatcttatctcctcgggcgaggggctgcttgggttggtgtgtgtgaactgagcggaagggatgccgcacagctggccgaagaagcagggtttcctgaggtggctagaatggtgagagagtctcatggagagactagaagccccgagaatcggtcgcctacacctagcctgcagtactgtgaaaattgcgacactcacttccaggactccaaccatcggacatcaacggcacacctcctgtcgctgagccagggccctcagcccccaaatcttcctctgggcgtgcccatttccagcccaggtttcaagctgctcctgaggcgcggttgggaaccagggatggggctcggtccacggggagaagggcgtgctaatccaattcctacagttctgaagcgggatcaggagggcttagggtaccggtcagcgccacagcccagagtaacgcattttcctgcatgggacacccgcgcagtcgcgggtcgggaacgtcctcccagggtggctacgctgagttggcgggaagaacgacggcgagaggaaaaggatcgagcctgggagcgggatctacgaacttacatgaacctggaattctag

SEQ ID NO: 223885 - DNA, 498 bp, synthetic construct
  misc_feature 1..498: note = Description of Artificial Sequence: Synthetic coding sequence
  source 1..498: mol_type = other DNA
atgtcacggccactcctcattacattcacccctgccactgatccatctgatctctggaaagacggccagcaacagcctcaacctgaaaagcccgaaagtactctggacggggctgccgcactcgcattctacgaagctctgatcggcgatgagtctagtgctcctgacagccagcgctctcagactgagcccgctcgggagcgtaagaggaaaaagaggcggatcatgaaggcaccagctgctgaagccgtggccgaaggcgcttcggggcgtcacggccaggggaggtcccttgaagcagaagacaaaatgactcataggattctgagggcagcgcaggagggcgacctgccagaactacgacgcttgctggagccacacgaagctggaggagccggtggcaacatcaatgcaagggatgctttctggtggaccccactcatgtgcgccgctagagccggacagggggcagcagtttcctacctattgggcaggtag

SEQ ID NO: 223886 - DNA, 459 bp, synthetic construct
  misc_feature 1..459: note = Description of Artificial Sequence: Synthetic coding sequence
  source 1..459: mol_type = other DNA
atgagtaggccgctgctcattacattcacccccgcaaccgacccaagcgacctttggaaggacggtcagcaacagccccagcctgagaagccagagagcaccctcgacggagccgcagcgctcgctttctacgaggccctgatcggagatgagtcctctgcacctgatagccaaagaagccaaaccgagcccgctagagagaggaagcggaaaaaacggagaattatgaaggcaccagcagccgaagccgtggctgagggcgcatccggccgacatgggcaagggcgtagtttggaagccgaggacaaaatgacgcacagaatcctccgagccgcacaggaaggcgacctacctgagctcaggagactgctggaacctcacgaagccggtggcgctggagggaatattaatgctcgggacgccttttggtggacgcccctaatgtgcgcagcgagatag

SEQ ID NO: 223887 - DNA, 459 bp, synthetic construct
  misc_feature 1..459: note = Description of Artificial Sequence: Synthetic coding sequence
  source 1..459: mol_type = other DNA
atgagcagacctctcctaattaccttcactccagccaccgatcctagtgacctctggaaagacggccagcaacagccgcagcctgaaaagcccgagagcacattagacggtgcagcggctcttgctttttatgaggcactgattggagacgaatccagtgctccagactctcagcggtctcaaacggagccagcccgagagcggaaaaggaaaaagagacgcattatgaaagctcccgctgccgaggctgtggccgaaggcgcatctggaaggcacggacaggggcgttcactcgaagcagaggacaaaatgacacatagaatcttacgcgcagctcaggaaggagacctgcctgaactgcgcagactactggagccccacgaagccggaggagcgggtggaaacatcaatgcacgtgacgccttttggtggacccccctgatgtgcgcagccaggtag

SEQ ID NO: 223888 - DNA, 597 bp, synthetic construct
  misc_feature 1..597: note = Description of Artificial Sequence: Synthetic coding sequence
  source 1..597: mol_type = other DNA
atgagcaggccactgctgattactttcacccctgccacagacccatcggatctctggaaggacgggcagcagcagccacagccagagaagccggagagcacactggatggggctgccgctctcgctttctatgaagctttaatcggagatgagagctccgctccagacagccagcggtctcagacagagcctgcgcgagaacgtaagaggaaaaagcgacgaataatgaaggcccctgccgctgaagcagttgcagagggcgcatctggcaggcatggtcaggggcgaagtctggaggcggaggataagatgacccacaggatactgcgggctgctcaggagggcgatctgcctgagctgcgaagactgcttgaacctcacgaggcaggcggagccggaggtaatattaacgcaagggacgctttttggtggaccccattgatgtgtgcagccagagcagggcagggagccgcagttagctatctgctgggcagaggcgctgcttgggtgggggtgtgtgaattgtcaggccgagacgccgcacagctagcggaggaggccggattccctgaagtcgccagaatggtaagggagtag

SEQ ID NO: 223889 - DNA, 597 bp, synthetic construct
  misc_feature 1..597: note = Description of Artificial Sequence: Synthetic coding sequence
  source 1..597: mol_type = other DNA
atgagtcgtccactgcttattacatttactcccgcaaccgacccctccgacttatggaaggatgggcagcagcaaccacaaccagagaaaccagagtccactctggacggggctgctgctttagcattctacgaggctctgatcggagacgagtcttcggccccagacagtcagaggagccaaactgagccagctcgggagcgcaagcggaaaaagcgtcgcattatgaaggccccagccgcagaggcggtcgctgagggcgctagtgggaggcacgggcaaggtagatccctagaagcagaggataaaatgacgcataggattctaagagcagctcaggagggagatctgcccgagttgaggcggcttttggaacctcatgaagctggcggtgccggtggtaacatcaacgccagagatgccttctggtggacgcctctgatgtgcgccgctcgtgcgggacagggggcagcggtgagctatctgctgggtcgtggggctgcttgggtgggggtgtgcgagctgtccggaagggatgccgctcaactggccgaggaggccggatttccagaagtggcacgcatggttcgtgagtag

SEQ ID NO: 223890 - DNA, 1071 bp, synthetic construct
  misc_feature 1..1071: note = Description of Artificial Sequence: Synthetic coding sequence
  source 1..1071: mol_type = other DNA
atgtcccgcccactcctcatcacttttacccccgctaccgaccctagtgatctctggaaagatgggcagcaacagccccaaccagagaagccggagtctactctcgatggcgcagccgctcgggcattttacgaagcgctgattggtgacgagagctcggccccagattcgcagcgaagtcagactgagcctgccagggagaggaagagaaaaaagaggagaatcatgaaggcacccgcagctgaggccgtagctgaaggcgcttcaggtcgtcacggacagggacggtcactggaagcggaggacaagatgacacacagaattctcagagcagcccaggagggagacttgcccgagctgcgtaggcttctcgagccacacgaagccggtggtgctggcggtaacattaacgcacgagatgccttttggtggacacccctgatgtgcgcagctcgtgccggacagggggctgcagtcagctacctgttgggcagaggagccgcatgggtgggagtgtgtgaactaagcggcagggatgcagcccagcttgctgaagaggccggttttccagaagtcgcacgcatggtgagggagtctcatggagaaaccagatctccggaaaaccggagccctactccctccctgcagtactgtgaaaactgcgacacgcatttccaagactctaatcacagaacctcgacagcccatctgctgtccctcagtcaggggcctcaaccccctaaccttcccctaggagtcccgatcagctctcccggatttaagctgctcctgaggcgcggttgggagcccggaatgggtctaggacctcgaggcgaggggcgtgccaatccaatccccactgtcctcaagcgggaccaggagggactgggttataggagcgccccacagcctagagttactcactttcctgcatgggacaccagagcagtggctgggagagagcggccaccccgtgtagctactcttagctggcgggaggagagaaggcgagaggaaaaggatcgtgcctgggagcgagatctccggacgtatatgaacctggagttctag

SEQ ID NO: 223891 - DNA, 1071 bp, synthetic construct
  misc_feature 1..1071: note = Description of Artificial Sequence: Synthetic coding sequence
  source 1..1071: mol_type = other DNA
atgagtcgccctcttctgatcaccttcacccccgcaaccgacccgtcggacctctggaaggatggacaacagcagccgcagcctgagaaaccagagtcaaccctcgacggcgctgccgcactggccttctatgaggccctcataggcgacgaatcctccgctcccgactctcagcgcagccagaccgagcccgctagagagcggaaacgcaaaaaacgcagaataatgaaggcaccagccgcagaagctgtcgccgagggagcgagcggtcggcatggacagggacggtctctcgaggcggaagacaagatgactcatcggatactgagagccgcacaagaaggtgacctgccggaactgaggaggctcctggagcctcatgaggcaggaggtgccggagggaatattaacgctagagacgctttctggtggactcccctgatgtgcgccgctagggcgggacaaggggcagcagtgagctacctgctggggagaggggctgcctgggttggcgtgtgcgaactatctggaagggatgctgcccagctggcagaagaggcaggctttcccgaggtcgcacggatggtaagagaatctcacggtgaaacccgttcacctgaaaacaggtctccaactcccagtttgcagtactgcgagaattgcgacacacattttcaggactctaaccaccgcaccagtacggcccatctgttatccttaagccagggaccacaaccccctaacttaccgctgggcgttccgatctccagtccagggttcaagctcctgctgaggggtggctgggagcctgggatgggtctagggcctcggggtgagggccgagctaatccaatccccactgttctgaagagggatcaggagggcttaggatatcgatccgcccctcagcctagggtgacacactttcccgcatgggatacacgtgccgtcgccggaagagaacggcctccccgtgtggcgactctgtcctggcgggaggagcggaggcgcgaggaaaaagatagagcttgggagagggacctgagaacctatatgaatctcgagttttag

SEQ ID NO: 223892 - DNA, 597 bp, synthetic construct
  misc_feature 1..597: note = Description of Artificial Sequence: Synthetic coding sequence
  source 1..597: mol_type = other DNA
atgtctaggccgctccttatcaccttcaccccagccactgacccaagtgatctctggaaagatggacagcagcagcctcagcctgagaagcccgaaagtactctcgatggcgcagcggctctggccttctatgaggcattaatcggagatgaatcatctgcgcctgactctcaacgtagtcaaaccgagcctgcccgtgagaggaagcggaaaaagaggcgaatcatgaaagcccctgccgcagaggctgtggcggagggtgcgtcagggcgacacgggcagggtaggtccttagaagcagaggacaaaatgacacacagaatactcagggccgctcaggagggggatctccctgaactccggcgactgctggagccccacgaggccggaggcgctggaggtaatattaacgcacgagatgccttctggtggactccactcatgtgcgctgcccgtgctggccaaggtgctgctgtgtcttacctactgggacgcggagccgcttgggttggcgtctgtgaattatctggccgagacgccgcacagttggccgaagaagctggatttccggaggtagctcgcatggtgagggagtag

SEQ ID NO: 223893 - DNA, 1071 bp, synthetic construct
  misc_feature 1..1071: note = Description of Artificial Sequence: Synthetic coding sequence
  source 1..1071: mol_type = other DNA
atgtcgcgccctcttcttattacatttacccctgccacggatccctctgatctctggaaagatggacagcagcagcctcagcccgaaaagccagagagtaccctggacggggctgctgcccttgccttttacgaggcccttattggcgatgaatctagtgcccctgactcccagaggtcccaaacggaaccagcgagggaacgcaaacgcaaaaaacggagaatcatgaaggcgccagcggctgaagcagttgctgagggcgcaagtggtagacacggacagggacgctctttagaagcagaggataagatgacccatcgcatccttagagcagcacaggaaggcgatctgcctgagctccggaggttacttgaaccccacgaagcgggtggcgctggcggaaatattaacgctcgtgatgctttttggtggacccctctgatgtgcgctgccagggctggacagggcgctgccgtcagctatctgctcgggcgaggtgctgcctgggttggtgtgtgcgagttatccgggagggacgccgctcagctggcagaagaggccggattcccggaggtggcgagaatggtccgtgagtcccatggggaaacccgaagtccggaaaatcgtagcccaaccccttctctccagtactgcgagaattgcgacacgcacttccaggatagcaaccacaggacttctacagcgcacctgctctctttgtctcagggacctcagccccctaacttgcctctcggagtccctatctcttcaccaggatttaaactcctgttgcgtgggggatgggaaccgggtatgggcttgggccctagaggggaagggagagccaacccaataccaaccgtgctcaaacgggatcaagaggggctgggatatagatccgcaccgcagcctagggtgacccatttccccgcttgggatacaagagcagttgcgggacgcgagcggcctcccagagtggcaacactcagctggcgcgaggaaagacgcagagaagagaaggatcgtgcctgggaaagggatctgcgcacctatatgaaccttgaattttag

SEQ ID NO: 223894 - DNA, 597 bp, synthetic construct
  misc_feature 1..597: note = Description of Artificial Sequence: Synthetic coding sequence
  source 1..597: mol_type = other DNA
atgagccggcctctgttaattacctttactccggctactgatccttctgatctttggaaggacggccaacagcagccccagcctgagaagcctgagtcgacactggacggcgctgccgcaagggccttttacgaagccctgataggcgacgagtcgtccgcaccagactcccaaaggtcacagacagaacctgccagggagcgcaaacggaagaagcggcgaattatgaaagcgccagccgctgaagccgttgcagagggggctagcggccgacatgggcagggacgaagtctcgaagcggaagacaaaatgacacatcgaatcctacgtgctgcccaagaaggtgacctaccagaacttaggaggctgttagagccacatgaggcgggtggagccggtggaaacattaatgcacgcgatgccttctggtggacccctctcatgtgcgctgccagagccggtcagggcgcagccgtgtcttacctcctggggcgtggtgcagcatgggtgggggtttgcgagttgagcgggagggacgcggcacagttggcagaggaagccggattccccgaagtggcacggatggtgagagaatag

SEQ ID NO: 223895 - DNA, 1071 bp, synthetic construct
  misc_feature 1..1071: note = Description of Artificial Sequence: Synthetic coding sequence
  source 1..1071: mol_type = other DNA
atgtcccgccctctgctcatcactttcacacctgccacagacccatcagacctatggaaggatggtcagcagcagccgcagcctgagaaacccgagagcacacttgatggtgctgcagcaagagcgttttatgaagctttaatcggagatgagtcaagtgctccagattcgcagaggtcccagaccgaacctgccagagagcgcaagaggaagaagaggaggatcatgaaggccccagctgcggaggctgtagctgaaggtgcatccggcagacacgggcaaggtcgttccttggaggccgaagacaagatgactcataggattctcagggcagctcaggaaggcgatctgcccgagctcagaagactgttggaaccacacgaggccggaggtgcaggcggaaacatcaacgcccgtgatgcattttggtggacccccttgatgtgcgcagccagggcaggccagggagctgcggtgtcctacttgcttggcagaggtgctgcgtgggtcggtgtttgcgaacttagtggccgtgacgctgcacagttggctgaggaagcagggtttcctgaggtcgccaggatggtccgcgagtcccacggggaaaccaggagtcctgagaatcggtctccaacccctagtttacaatattgcgagaactgcgacactcatttccaagattccaaccatcgcacttccacggcccatctgctaagcctcagccagggaccgcagcccccaaacctgcctctgggagttccaatttctagccccggttttaaactactgcttagggggggatgggaaccaggaatgggtcttgggcctaggggcgaaggtagggccaaccccattcctacggttctgaagcgtgatcaggagggcctcggctataggtcagcacctcagcccagagttactcactttccagcctgggacacccgcgcagtggcgggacgggagcgaccacccagggtcgccacactttcatggcgggaagaacggcgacgggaggagaaagatagagcatgggaaagagatttgcgtacttatatgaacctggagttttag

SEQ ID NO: 223896 - DNA, 324 bp, synthetic construct
  misc_feature 1..324: note = Description of Artificial Sequence: Synthetic coding sequence
  source 1..324: mol_type = other DNA
atgtcacggccactcctgatcaccttcactcccgctactgacccgtccgacttgtggaaagacggccaacagcagccgcaacccgagaagccggagagcacactggatggcgcagctgcaagggctttctatgaggcgctgatcggcgacgaatcgtccgccccagactctcagcgaagtcagactgaacctgctcgggagagaaagcgtaaaaaaaggcgaattatgaaagcacccgctgcagaagccgtagcagagggggctagcgggaggcacgggcagggcaggagcttggaggctgaagataagatgacacacagatag

SEQ ID NO: 223897 - DNA, 1071 bp, synthetic construct
  misc_feature 1..1071: note = Description of Artificial Sequence: Synthetic coding sequence
  source 1..1071: mol_type = other DNA
atgagtaggcccctattgatcacattcaccccggctaccgatccatcggatctctggaaagatggccagcagcaacctcagccagaaaagccagagtcgaccctggatggcgctgcggctcgggcattttacgaagctctcatcggggatgaatcctctgctcccgatagccagcgctctcagacggagcctgctcgagaaagaaagcggaaaaagaggcggattatgaaggcacccgctgcagaagccgtcgccgagggcgcatctggccgacatggccaaggacggagtctggaggcagaggataagatgacccaccgcatcttgcgggcagcccaggaaggagacctgcccgagctccgacgcctattagaacctcacgaagccggaggagcaggaggtaatattaacgcaagagacgctttttggtggacacctctaatgtgtgccgcaagggcaggccaaggggcagcagtttcatacttgctgggacgtggcgctgcttgggtgggcgtgtgtgaacttagcggacgcgacgctgcccagctggcggaagaagcagggttccccgaagtggctaggatggttagagagagtcatggtgagactcggtcacccgaaaatagatctcccacgccgagtctgcagtattgcgagaattgtgatactcatttccaggactccaaccaccgtactagcacggcccacctgctttcgctctctcagggaccgcagccacccaaccttcctctcggtgttcctatctcctcgccagggttcaagctacttctcagaaggggatgggaaccaggcatgggcctcggccctagaggcgaagggagagccaaccccatcccgaccgtcctgaaacgcgaccaggaaggactcgggtatcggtcagcaccgcagccaagggtgacccatttcccagcatgggatactagagctgtggcagggagagagaggcctccacgtgtggctactctgagttggcgggaagagagacgcagggaagaaaaagaccgggcatgggagagggacctacggacgtacatgaatctggagttctag

SEQ ID NO: 223898 - DNA, 324 bp, synthetic construct
  misc_feature 1..324: note = Description of Artificial Sequence: Synthetic coding sequence
  source 1..324: mol_type = other DNA
atgtccaggcccctattgataactttcacccccgcaaccgaccctagcgatctgtggaaggacggacagcagcaaccccagccagagaaacccgaatcgacacttgacggagctgccgcaagggcgttctacgaggccctgattggagacgaatcatctgctcccgacagccagcgctctcagaccgagcccgcacgagaacgcaaaaggaagaagagacgaattatgaaagctcccgctgccgaagccgttgcagagggtgcatcagggagacatggccaaggccgaagtctggaagccgaagataagatgacacatcggtag

SEQ ID NO: 223899 - DNA, 459 bp, synthetic construct
  misc_feature 1..459: note = Description of Artificial Sequence: Synthetic coding sequence
  source 1..459: mol_type = other DNA
atgtccaggccactgctgataacttttactcccgcaacagacccctccgatctgtggaaagacggccaacaacagccgcaaccagagaagccagaaagcaccttggacggtgccgctgcacgggcattctatgaggcactgataggcgatgaaagcagcgccccagattcccaacggagtcagaccgaacctgcacgcgaacgtaagcgcaagaagcgtcggatcatgaaagcacctgctgcagaggccgtggccgaaggagcttccggaaggcatggccaggggaggtccttagaggccgaggacaagatgacacacaggattcttcgggctgcacaggagggcgatctccccgaattgaggcgactcctggaacctcatgaggctgggggagccggaggaaacataaatgcccgtgacgccttttggtggacgcccctgatgtgcgcagccagatag

SEQ ID NO: 223900 - DNA, 1071 bp, synthetic construct
  misc_feature 1..1071: note = Description of Artificial Sequence: Synthetic coding sequence
  source 1..1071: mol_type = other DNA
atgagccgcccattactcatcaccttcactcccgctacagacccctcagatctgtggaaggatggtcagcagcagccacagcccgagaaacctgaaagtacactcgacggggctgccgctctggctttttacgaggctctgataggagatgagagtagcgcccctgattctcagcgatcacagactgaacccgcacgagagcgaaagaggaagaagcgtagaataatgaaggcacccgcagccgaggcagtagctgaaggcgcaagcgggaggcacggtcaaggccgttctctcgaggccgaggataagatgacacatcggatcttgcgcgctgctcaggaaggtgatcttcccgagctcagaaggttgctggaaccccacgaggccggaggcgctggaggaaatattaatgcacgcgacgccttctggtggacacctctcatgtgtgccgctcgggctggccagggcgctgccgttagctacttactgggacgaggcgctgcttgggtcggtgtgtgcgaactgtccgggcgtgacgcagcccagttggctgaagaggcgggatttccggaggtcgcccgaatggtccgggagagccatggagagacccgttcccccgaaaatcggagccccaccccttcactccagtattgtgagaactgtgacacccacttccaggatagcaatcacagaacctcaacagctcacctcctgagtctctctcagggtccccaaccacccaacctgcctttaggtgtccctattagttctccagggttcaagctcctgctgagagggggatgggaacccggaatgggtctgggcccaagaggcgaaggtcgagctaatccaatccctactgtgcttaagagagaccaggaggggcttggctatcggtccgcaccccagcctcgcgttacacacttccccgcttgggacactcgggcagtcgccggaagggaacgaccgcctcgtgtcgctacgctgagctggcgcgaagaaagacggagagaggagaaagatcgagcttgggagcgagatttgaggacatacatgaacctggaattctag

SEQ ID NO: 223901 - DNA, 1071 bp, synthetic construct
  misc_feature 1..1071: note = Description of Artificial Sequence: Synthetic coding sequence
  source 1..1071: mol_type = other DNA
atgagtcgtcccctgctgatcactttcacgcccgcaacagacccatcagatttatggaaagatggccaacaacagccacagcctgaaaagcctgagtcaactctcgatggggctgccgcactcgctttttacgaggctctgattggcgacgaatcctccgcgccagacagccagagatctcagactgagcctgcacgagaacgcaagaggaagaagagacgaattatgaaggcacccgctgccgaggcggtggcggagggtgctagcggacggcatggacaaggacgctcactagaggctgaagataagatgacccacaggattctgcgggcagcccaggagggggacctcccagagcttcgtcgcctgttggagccgcacgaggcagggggagctggtgggaacatcaatgcaagagatgccttttggtggaccccgcttatgtgtgctgcccgagctggccaaggggctgcagtgtcttacctactggggagaggggcagcctgggttggggtctgcgagttatctggacgcgatgctgcacagctggcggaggaggccggattcccagaggtcgcgaggatggtgagagaatcccatggggaaacaagaagccctgagaatcgaagtcccacaccatccctgcagtattgtgaaaactgcgatactcactttcaggactccaatcacagaaccagcaccgctcatttactgtctctgtctcagggccctcaaccacccaatctcccacttggagtgcctatatcaagccccggatttaagttgctcttacgtggaggatgggagccaggtatgggcctggggccacgcggtgaagggcgtgcgaatccgatacctaccgtgctgaaaagggaccaggagggacttggctaccgctctgcacctcagccgagagtgacacactttcccgcttgggacacccgtgctgtcgctggcagagagcgtcctcccagggtggctactctctcttggcgggaggaacgaagaagagaggagaaagaccgtgcatgggagcgcgatctccgtacctacatgaacttggagttttag

SEQ ID NO: 223902 - DNA, 498 bp, synthetic construct
  misc_feature 1..498: note = Description of Artificial Sequence: Synthetic coding sequence
  source 1..498: mol_type = other DNA
atgagcaggccactgttgattacattcacaccagctaccgatcccagcgacttatggaaggatggacagcagcagccacaacctgagaaacccgaaagtacgctcgacggcgctgccgcacgagcattctacgaagcactcattggcgatgagtcctccgctccggattcacagaggtcacagaccgaaccggcacgtgagcgcaaaaggaagaaacgcaggatcatgaaagcgcctgcagctgaggctgtggcagagggcgctagcgggaggcacggccaaggcaggagcctggaagcagaggacaaaatgacacacagaatcttgcgggcagcacaggaaggcgatctgcctgagttgagacgactcctagaaccccacgaggcgggaggagcaggcggaaatattaacgctcgtgatgcattctggtggaccccactcatgtgtgcagcccgagcagggcagggcgctgcagtgagctacctcctaggtagatag

SEQ ID NO: 223903 - DNA, 273 bp, synthetic construct
  misc_feature 1..273: note = Description of Artificial Sequence: Synthetic coding sequence
  source 1..273: mol_type = other DNA
atgtcccggcctctgctcatcaccttcactcctgcaacagacccaagcgacttgtggaaggacggccagcagcagcctcagcctgagaagcccgagagcacactggatggcgctgccgcacttgctttttatgaagccctgatcggtgacgaaagctccgcaccagattcccagcggtctcagaccgaacctgcacgtgaacggaaacgtaaaaaaaggagaatcatgaaggccccagcggcagaagccgttgctgagggtgcctccggctag

SEQ ID NO: 223904 - DNA, 1071 bp, synthetic construct
  misc_feature 1..1071: note = Description of Artificial Sequence: Synthetic coding sequence
  source 1..1071: mol_type = other DNA
atgagccgcccattactgatcacttttactccagctacagaccccagtgacctatggaaggatgggcaacagcagcctcaaccagagaagccagagtctactctcgacggagcagccgcacgtgcattttatgaagcattgataggcgatgaatcctctgcccctgacagtcagcgttcccagactgagcctgcaagagagcgcaagcgcaagaagaggcggatcatgaaggcacctgcagcagaagccgtcgcggagggtgccagcggcagacacgggcaaggcagatctcttgaagcggaggacaagatgacgcaccgaatattgagggctgcccaagaaggtgaccttcccgaactgcgaagactgctggagcctcacgaggctggaggggctggcggaaatattaatgctagggacgccttctggtggacccctctcatgtgtgccgctagagccggacagggagccgcagtgtcgtatctcttagggagaggggctgcgtgggtgggcgtctgtgaactgtcaggaagagacgctgcccagctcgctgaggaggcgggttttccagaagtagcccgtatggtaagggagagccatggagaaactcgctctccggaaaatcggagtcccacccctagcttgcaatactgcgagaattgcgacactcacttccaagactccaatcatagaacatccactgcccacctgttatcgctctcccaagggccacagcctccgaatcttcccctgggcgtgcctatcagcagcccaggcttcaagctgctcctgagaggagggtgggagccagggatggggctcggccctcggggagaaggcagggccaacccaattcccaccgtgttgaaacgggatcaggaagggttgggttaccgatcggcacctcagcctcgcgtgacccacttccctgcctgggatactcgagcagttgctggcagagagaggccgccacgtgtggccactttgtcttggagagaggaacgcaggcgggaagagaaggatcgcgcttgggaacgtgatctgaggacttatatgaatttggagttttag

SEQ ID NO: 223905 - DNA, 273 bp, synthetic construct
  misc_feature 1..273: note = Description of Artificial Sequence: Synthetic coding sequence
  source 1..273: mol_type = other DNA
atgtcccgccctctgctcattacctttacgcctgctactgatccatccgacttgtggaaggatggacagcagcaaccccagcccgagaagcccgagagcacgctggatggcgctgcagcccttgccttctacgaagcactgatcggcgacgaatcttctgcccctgacagccagcgatctcaaaccgaacctgcacgcgagcggaaaaggaaaaaaaggcggataatgaaggctccggctgccgaggctgtggcagagggcgcatctggttag

SEQ ID NO: 223906 - DNA, 1071 bp, synthetic construct
  misc_feature 1..1071: note = Description of Artificial Sequence: Synthetic coding sequence
  source 1..1071: mol_type = other DNA
atgtcaagacccctgctcatcacatttactcctgctacggacccgtcggacctgtggaaggatggccagcagcaaccccaacctgagaagcccgagagcactctggatggagcagccgctcgcgctttctacgaagcgctgattggcgatgaaagttcggctcctgacagccagagatcacagactgagcccgctagggagcgcaaaagaaagaagcggaggattatgaaagctccagcggcagaagctgtcgcagagggggcttcaggacggcatggccagggccgttccttagaagccgaagataagatgacccatagaatcttgcgggcagctcaggagggtgacctgccagaactccgcagactgcttgaaccccatgaggccggtggcgctgggggaaacatcaacgcccgtgacgctttttggtggaccccactgatgtgtgcagcacgtgccggacagggcgcagccgtgtcgtaccttctgggaagaggtgccgcatgggtcggcgtatgcgagctcagtggaagagacgcagcccagttggccgaagaagcgggattccccgaagtggccaggatggtgagagagtcgcacggggagactcgcagtccagagaatcgatccccgacaccttccttacaatattgtgagaattgtgacactcactttcaggacagcaatcaccgcaccagcacagctcacctgctcagcctgagccagggccctcagcctcctaacctgccgctcggcgtgcccatcagttccccaggctttaaactgctgctgcgcggtggatgggagccaggtatggggctcggtccaaggggggagggcagggcgaatcccataccgaccgtcctgaagcgcgaccaggagggcctaggataccgttcagccccacagcccagagtgacacactttcccgcatgggacacgcgtgctgtggccggtagagaacggccaccgagggtagccacactgtcttggcgtgaggagaggcgacgggaggaaaaagatcgcgcatgggaaagagacctgagaacttacatgaacttggaattttag

SEQ ID NO: 223907 - DNA, 597 bp, synthetic construct
  misc_feature 1..597: note = Description of Artificial Sequence: Synthetic coding sequence
  source 1..597: mol_type = other DNA
atgtctaggccactgctcatcacctttacaccagccaccgatccatctgatctgtggaaagacgggcagcagcagccccagccggagaagcctgaaagcactctcgacggggctgctgccagggccttctatgaagcccttatcggggacgaatcctccgctcctgatagccaaagaagccaaacagagcctgctcgcgagagaaaacggaagaagagaagaatcatgaaagctcccgcagccgaggccgtggccgagggagcgagtggcagacatggacaggggcgatctctggaggcagaggataaaatgactcacaggatcctcagagccgctcaggagggggatctccccgagctgcgacggctgctggagcctcatgaggccggtggcgcaggaggcaacatcaacgccagggatgctttttggtggaccccgctgatgtgtgcagcccgtgccggacaaggcgctgccgtttcctatcttctgggacggggtgcagcttgggtaggcgtgtgtgagctgtccgggcgagacgcagcacaactggccgaggaagctggcttccccgaggtggccaggatggtccgggagtag

SEQ ID NO: 223908 - DNA, 324 bp, synthetic construct
  misc_feature 1..324: note = Description of Artificial Sequence: Synthetic coding sequence
  source 1..324: mol_type = other DNA
atgtcaagacctttgctaatcactttcactccagcgactgatccgagcgacttatggaaggatggacagcaacagccacagccagagaagccggaatccaccctagacggggcagccgctctggcgttttacgaggccctgataggcgacgaaagctcagccccagatagtcagaggagtcagacggagcctgcgagagaacggaagcgcaagaagcgtagaattatgaaagcccctgcagccgaagccgtagccgagggcgcatctggacgacacggacaaggtcggtccctggaggcagaggacaagatgacacatcgatag

SEQ ID NO: 223909 - DNA, 324 bp, synthetic construct
  misc_feature 1..324: note = Description of Artificial Sequence: Synthetic coding sequence
  source 1..324: mol_type = other DNA
atgtctcgcccactgttgatcaccttcacccctgccactgaccctagtgatctctggaaggatggccagcagcagccacagcctgagaaaccagagtctacactggacggtgccgctgccctggctttttacgaggcactcatcggagatgagtcgtccgcgcctgacagccaacgaagccagaccgagcctgctagggagcgcaagcgtaaaaagaggagaatcatgaaggcccctgcagccgaggctgtcgctgaaggcgctagcggcaggcacggacaagggagatcactcgaggctgaggataaaatgacccacagatag

SEQ ID NO: 223910 - DNA, 273 bp, synthetic construct
  misc_feature 1..273: note = Description of Artificial Sequence: Synthetic coding sequence
  source 1..273: mol_type = other DNA
atgtctaggcctctcctcatcacttttacgccagctaccgacccaagcgatctctggaaagatgggcagcagcaaccccagcctgagaaacctgagtccactcttgacggagcagctgcccgagctttctatgaggccctaattggcgacgagtcaagtgctccagatagccagcggtcccaaactgaacccgctagggagagaaaacgaaagaagaggagaatcatgaaagcacccgctgcagaggcggttgctgagggggctagtgggtag

SEQ ID NO: 223911 - DNA, 273 bp, synthetic construct
  misc_feature 1..273: note = Description of Artificial Sequence: Synthetic coding sequence
  source 1..273: mol_type = other DNA
atgagcagaccgttgttaattacgtttactcccgcaactgacccatcagacctctggaaggacggtcagcaacagccacagcctgagaagcccgaaagcacgctcgatggcgcagccgcacgggcattttacgaagcgctgatcggagacgaatcttctgcacccgactcacaaaggtcccaaaccgagcccgcaagagagcgcaagagaaaaaaacgtaggatcatgaaggcccctgccgctgaggcagtggctgagggcgcttccggctag

SEQ ID NO: 223912 - DNA, 459 bp, synthetic construct
  misc_feature 1..459: note = Description of Artificial Sequence: Synthetic coding sequence
  source 1..459: mol_type = other DNA
atgagcagacccctgctgataacgttcacacctgctaccgaccccagcgacttgtggaaagacggacaacagcagcctcagccagagaagcccgaatcaactctcgacggcgctgcagcccgtgccttctacgaggcacttattggcgacgagagttcagcacccgacagtcagcggtcacaaaccgaacctgccagggagcggaagaggaaaaagcgaaggatcatgaaggctcccgctgccgaggccgtggctgagggagccagcggcaggcatggacaaggccgaagcctggaggctgaagacaaaatgacacataggatcctcagagctgcccaggaaggggacttgccagagttgcgtaggttgctcgaaccccatgaggcagggggagcaggcggtaacattaatgccagagacgctttctggtggacccctctcatgtgtgctgctcgctag

SEQ ID NO: 223913 - DNA, 597 bp, synthetic construct
  misc_feature 1..597: note = Description of Artificial Sequence: Synthetic coding sequence
  source 1..597: mol_type = other DNA
atgtcccgtccactgctgattaccttcactccagccaccgatcctagtgacttatggaaagacgggcaacagcagccccagccagagaaacccgaaagcactctggacggcgcagcagccagggcattctacgaggcactcatcggagatgagagcagcgccccagattcacagcgctcccagactgaacccgctagggagcggaaaagaaaaaagaggcgaattatgaaggcaccagcggctgaagccgtcgcagaaggagcaagcggtcgccacggccagggacgaagcctggaggctgaagacaagatgacgcacagaatcctgagagcagcacaggagggcgacctccccgagttgagaaggttgctcgaacctcacgaggcaggtggtgcaggtggtaatataaacgccagagacgccttttggtggaccccactgatgtgtgccgctagagccggacagggcgctgctgtgtcttatctgctcggtaggggggctgcctgggtgggcgtgtgcgagctgagcggaagggatgccgcacagttagccgaggaggctggcttcccggaagtggctcggatggtacgggagtag

SEQ ID NO: 223914 - DNA, 1071 bp, synthetic construct
  misc_feature 1..1071: note = Description of Artificial Sequence: Synthetic coding sequence
  source 1..1071: mol_type = other DNA
atgagtcgaccccttctgatcacatttacccctgccacagatccgtccgacttatggaaggacgggcagcagcagcctcagccagaaaaaccagagagcactctagatggggctgcagctctcgccttctacgaagctctcattggtgacgaaagttcagcaccggattcacaacgctcccaaactgagcctgccagggagcggaaaaggaagaagaggaggatcatgaaggcccctgctgcggaagcggtcgccgagggcgctagcggacgccatggtcagggaagaagtctggaggccgaggacaagatgacacataggatcctgcgggctgcacaagagggcgaccttccagagctgcgaagattactggaaccacacgaagccggaggcgctggaggaaacatcaatgcgagagacgctttttggtggacaccgctgatgtgtgccgctagggccggacaaggggcagctgtgtcgtacttattgggcagaggggcagcctgggtgggggtgtgcgagctgagcggtcgcgatgctgctcagttagcagaggaggccggatttccagaggttgcgcgaatggtaagggaatctcacggagagactagatctcccgagaaccgctctcctacccctagtctgcagtattgcgagaattgcgatacgcattttcaggactctaatcaccgaaccagcactgcacacctgctgtccttgtcccaaggcccacagccccctaatctccctttgggtgtacccataagctcccctgggtttaagttgttactgcgtggaggctgggagcctggaatgggcctagggcctcggggagaaggccgagcaaacccaattcctacggtcctaaagcgagaccaggagggactcggctatcgctccgctcctcaaccacgcgttacccatttcccagcgtgggataccagagccgtggcgggtcgcgagaggccccctcgagtggctacactgagctggcgtgaagagcgtcgaagagaagagaaggacagagcttgggagcgcgatctccgcacatacatgaatctggaattctag

SEQ ID NO: 223915 - DNA, 1071 bp, synthetic construct
  misc_feature 1..1071: note = Description of Artificial Sequence: Synthetic coding sequence
  source 1..1071: mol_type = other DNA
atgagccgtcctctactcatcacctttacgcccgcaacagatccctccgatctgtggaaggacggccaacagcagccccagcccgagaagccagaaagtacacttgacggtgccgcagcaagggctttttacgaagccctgatcggcgatgagtcatccgcgcctgacagccagcgatctcagacagagcctgccagagagagaaagagaaaaaagagaagaatcatgaaagcccctgcggcagaggctgtggcggaaggagcctccgggagacacggccaggggcgatcattagaggctgaggataaaatgacccacaggatcttgagggcggcacaagaaggagacttacccgagctgcgaagactcctcgagccacacgaggccggtggcgcaggcggaaacatcaatgccagggacgccttctggtggacgccactcatgtgcgcggctagggctggccaaggcgctgccgtgtcatacctcctcggtcggggagccgcatgggttggagtgtgtgagcttagtgggagagacgctgcacagttggccgaggaggcaggctttccagaggtggcccgtatggttagggaaagccacggagagacccgatctccagagaatagatcccctacccctagcctgcaatattgtgagaactgtgacacccattttcaggattctaatcacagaactagcacagcacacctgctttctctgtctcagggccctcaacctcctaatcttcctcttggcgtacccatatcctctcctggattcaagctgctactgagggggggttgggagccaggaatggggctcgggccacggggagaaggcagagccaaccccattccaactgtgctcaaacgtgaccaggagggcctcgggtatcgaagcgctccgcaaccccgtgttacccacttccctgcttgggatacccgagctgtcgccggaagagagagaccccctagagtagccacactaagctggagagaggagaggcggagggaagaaaaagatcgagcctgggaacgggatcttcggacctacatgaatctggaattctag

SEQ ID NO: 223916 - DNA, 1071 bp, synthetic construct
  misc_feature 1..1071: note = Description of Artificial Sequence: Synthetic coding sequence
  source 1..1071: mol_type = other DNA
atgtcccggcctctgcttatcacatttacccctgccacagacccatctgacctgtggaaagatggccagcagcaaccccagcccgaaaagccagaatcaacactcgacggtgccgcagccagggccttctatgaggctttaataggcgatgaaagctctgctccagattcccagcggtcccagaccgaaccagcaagggagcgcaagcgaaaaaagcgcaggattatgaaagcacccgcagctgaagcggtggctgaaggggcatcgggacggcatggccagggtagaagtcttgaggcggaggacaaaatgacccaccgcattctgagggcagctcaggaaggagatttgcccgaattaagaagattactggaacctcacgaggctggtggcgcaggtggaaatatcaacgccagagacgcattttggtggacgccgctgatgtgcgctgcgcgagccggtcagggcgcagccgttagctacctgctgggaagaggggcagcgtgggtcggtgtttgcgaactgtctgggagagacgcagcccagctcgctgaggaggcaggatttcctgaagttgcacggatggtgagggaatcacatggggagacgcggagccccgagaaccgcagtcccacacccagcctacaatactgcgagaactgcgatacccatttccaggattcaaaccacaggacatccactgcccatctcctttccctgtcccaagggccacaaccgccaaacctccctctgggggttcctatatcctcccccggattcaaattgttgctgaggggcggatgggaaccgggtatgggtctcggccctaggggagagggccgagcaaacccaatacccactgtcctcaagcgtgaccaggaaggacttggctacaggtctgcacctcaaccaagagtcacccactttccggcttgggatacgcgcgcagtggctggacgtgagcgaccgccaagagtagctaccctgtcttggcgagaggagcgacgaagagaagagaaggatcgtgcctgggaaagagacttgagaacctacatgaacctagagttttag

SEQ ID NO: 223917 - DNA, 498 bp, synthetic construct
  misc_feature 1..498: note = Description of Artificial Sequence: Synthetic coding sequence
  source 1..498: mol_type = other DNA
atgtcgcggcctctcctcattactttcacgccggcaacggacccatcagacttatggaaagatggacagcagcagccgcagcctgaaaagcccgaaagcacactggacggggctgccgcattggctttctacgaggcactgattggggacgaaagtagcgctccagattctcaacggagccagacagaacctgctagagaacgcaaaagaaagaagaggagaattatgaaggcccctgcagcagaagcagtggctgagggcgctagcggcagacatgggcagggacgctcactggaggcggaggacaaaatgactcatcggattctcagggcggctcaggaaggagacctgcccgagctgaggagactgctggaaccacatgaggccggaggggctggtgggaacattaatgcacgagatgccttctggtggacaccactgatgtgtgccgcacgggcaggtcagggcgcagccgtatcgtacttactggggcgttag

SEQ ID NO: 223918 - DNA, 273 bp, synthetic construct
  misc_feature 1..273: note = Description of Artificial Sequence: Synthetic coding sequence
  source 1..273: mol_type = other DNA
atgagccgcccactgcttataacttttacccctgcaacagacccttcagatctgtggaaggatggccaacagcaaccgcagccagagaaacccgagtccacacttgacggtgccgcagcgcgtgctttctatgaggctctgatcggagacgagagctcagccccagattctcagcgtagccagactgagcccgcacgagagcggaaacgtaagaagcggcgtataatgaaagctccggctgccgaggccgtggctgaaggcgcttctggatag

SEQ ID NO: 223919 - DNA, 324 bp, synthetic construct
  misc_feature 1..324: note = Description of Artificial Sequence: Synthetic coding sequence
  source 1..324: mol_type = other DNA
atgtctaggccattgctgattaccttcactccagccaccgacccttccgacctctggaaagatggccagcaacagccccagccagagaagcccgaaagtaccctagacggcgcagcagctagggcgttttatgaggctctgattggtgacgagagtagtgcacctgattcccagcgctcccagactgagcccgctcgagaaaggaagcgcaagaaacggcgtattatgaaggcaccagccgctgaggccgttgcagagggagcatcagggcgacatggccaagggaggtccttggaagccgaggataaaatgacccacaggtag

SEQ ID NO: 223920 - DNA, 1071 bp, synthetic construct
  misc_feature 1..1071: note = Description of Artificial Sequence: Synthetic coding sequence
  source 1..1071: mol_type = other DNA
atgtcacgtcctctgctcattacctttacgcccgctactgaccctagcgacctctggaaggacggacagcaacagccccagccagaaaagccagaaagcacgttagatggtgcagccgctcgcgctttttatgaagcactgatcggcgacgagtccagcgcacccgacagccagcggtcccaaaccgaaccagcacgcgagcgaaaacgcaaaaaaagacgcatcatgaaagccccagctgctgaggccgtagccgaaggcgcaagcggtagacacgggcagggccgttcactggaggccgaagataaaatgacacatcgcatactgcgggcagcgcaggagggagatttacctgagttgcgcaggcttctggagccacacgaggcaggcggagctggaggcaatattaacgcacgtgacgctttctggtggacccccctcatgtgtgccgctcgcgcaggccagggtgctgccgtgtcatacctgctcggacggggagctgcttgggttggagtttgtgagctgtcaggacgcgatgccgcacagctcgccgaggaagctggctttcctgaggtggcccgtatggtccgggaaagccatggggagacccgttcaccagaaaatcggtccccgaccccctctctgcagtactgcgagaactgcgatactcattttcaggactccaatcataggacatcaaccgcacacctcttgagtctgtcccaaggacctcagccacccaatctgcctctgggggtccctatttctagtcctggtttcaagctcctgttgagggggggttgggagcccggaatgggactggggccacgtggcgaggggagagcgaatccaatccccacggtactgaaaagagaccaggagggcctgggttataggtccgcaccacagcctcgcgtgacacatttccccgcttgggatacccgggcagtggccggacgcgagaggcccccacgcgtagccaccctgtcatggcgggaggaaaggagacgcgaagaaaaggatagggcctgggaacgcgatctgcgcacttacatgaatctggaattttag

SEQ ID NO: 223921 - DNA, 1071 bp, synthetic construct
  misc_feature 1..1071: note = Description of Artificial Sequence: Synthetic coding sequence
  source 1..1071: mol_type = other DNA
atgtccagaccactgttgattaccttcaccccagctaccgaccctagcgatctgtggaaagatggacagcaacagcctcagccagaaaaaccggagagcacattggacggcgcagccgctctggcattttatgaagcactgattggggatgaaagcagtgctcccgattcgcaacgctctcagaccgaacccgctcgcgagaggaagagaaaaaagcggaggatcatgaaggcccctgccgcagaggctgtggccgaaggcgcaagcggcaggcatgggcaaggcaggtccctcgaagccgaggataaaatgacgcatagaatcttaagagctgcccaggagggagatctgccagaactgagacgactgctggagccacacgaagcaggaggggcagggggaaacattaacgctcgcgatgccttttggtggacaccgctgatgtgtgccgcacgcgcaggtcaaggtgccgctgtgagctacctgctgggcagaggtgctgcgtgggtgggcgtgtgtgagctcagcggacgagacgcggctcagctcgctgaagaggcaggctttcccgaggtggcccgtatggtccgggaatcgcacggggaaacccggtcccccgagaataggagtccgacacctagcttgcagtattgtgagaactgcgacactcacttccaagattctaatcaccgtacgtcaacagctcaccttttgagcctctctcagggtccccagcctcctaacctgcctctcggcgttcctatcagtagccctggcttcaaactgcttttaagggggggttgggaacctggaatgggacttggaccacgaggcgagggtcgagccaatccaatcccaaccgttctcaagagggatcaggagggtttgggatatagatccgcacctcagcctcgcgtgacccattttcccgcttgggacactcgcgcagttgccggacgggaaaggcccccacgagtcgcaaccttatcttggcgagaagaaaggaggcgagaggaaaaagatagggcgtgggaaagagacctccgtacctatatgaaccttgagttctag

SEQ ID NO: 223922 - DNA, 1071 bp, synthetic construct
  misc_feature 1..1071: note = Description of Artificial Sequence: Synthetic coding sequence
  source 1..1071: mol_type = other DNA
atgagccggccactgttgatcacatttacacctgctactgacccctccgacctgtggaaggacggacagcaacagccccaaccagagaagccggagagtacccttgacggggctgcagcactggccttctacgaggctttaatcggcgatgagagttcagctcccgattctcagcgtagccaaactgagcctgccagggagcgaaagcggaagaagcgcaggattatgaaagcccctgccgctgaggcagtagctgagggcgctagtggtcgtcatggccagggtaggagtcttgaggccgaagacaaaatgacgcaccgcattttaagagccgcacaggaaggtgatctgcccgaattgagaaggttgttagaaccccacgaggccggaggcgctggaggtaatattaatgcaagggacgcgttctggtggacccctcttatgtgtgccgcaagagctggacagggggctgcagtttcctacttgctcggacgtggagctgcctgggtgggcgtgtgcgagctgtccggcagggacgccgctcagctcgccgaggaggcaggattccctgaggtagcaaggatggtgcgggaatcccatggagagaccaggtctcccgagaatcgtagccccactcccagtttacagtactgcgaaaactgtgatacccacttccaggactcgaaccaccgcacatctactgctcatttgcttagcttatcgcaagggcctcagcctcctaatctccctcttggggtccccataagcagcccgggattcaagttgctgctcagaggaggatgggaacctggaatgggcttgggcccaagaggtgaagggagggccaatcccatacccactgtcttgaagcgagatcaggaaggactcgggtataggagcgccccacagccgcgagtaacacatttccctgcttgggacactagagcagtcgccggacgcgaaaggcccccacgggtcgccaccctgtcctggcgggaagagagaagacgggaggaaaaggatcgggcatgggaaagagacctgcggacatacatgaatctggaattctag

SEQ ID NO: 223923 - DNA, 273 bp, synthetic construct
  misc_feature 1..273: note = Description of Artificial Sequence: Synthetic coding sequence
  source 1..273: mol_type = other DNA
atgtcacggccactactcattacattcacccccgctacggatcctagtgacctgtggaaagacgggcagcagcagcctcaacctgagaaaccagagtcaaccctggacggggcagcagccagggcgttttacgaggccctcatcggggacgagtcctcagccccagacagtcagagaagtcagaccgagcccgcaagggagaggaaacgaaagaaaagaaggatcatgaaggcccctgcagctgaagctgtggccgaaggcgcttccgggtag

SEQ ID NO: 223924 - DNA, 1071 bp, synthetic construct
  misc_feature 1..1071: note = Description of Artificial Sequence: Synthetic coding sequence
  source 1..1071: mol_type = other DNA
atgtcccgccctctcttgatcacattcacacctgctaccgacccctccgacctgtggaaagacggccagcagcagccacagccggagaagcctgaatcgactttggatggtgccgctgcattggccttctacgaggccctgatcggtgacgaaagttcggctccggactcacaaagatcccaaactgagcccgctcgggagaggaagcgtaagaaaagaagaatcatgaaggcgcctgccgcagaagccgttgccgagggtgccagcggaagacatgggcagggaagaagcctcgaagctgaagataagatgactcataggattctgcgggctgcacaggagggggatttaccagagcttagaagactactagagccccacgaggcaggcggagccggtggaaatataaacgcgcgtgacgctttttggtggactcctctgatgtgtgccgcacgcgcaggacaaggcgcagcagtatcttacctccttggtagaggagcagcctgggtgggcgtgtgcgagttatccggacgggatgctgcacaactggccgaggaagctggattccccgaggtcgctagaatggtcagagaaagtcacggggaaactaggtctccagaaaaccggtcccccactccttccctgcagtattgtgagaactgcgacactcacttccaggattctaatcacaggacaagtacagcccatctcctcagtctgtctcaaggcccacagccccctaacctgcccctcggagtccccatcagctctcctggattcaaattgctcctgagaggcggttgggaacccggaatggggctgggccctcgtggggagggccgtgccaatcccatacctaccgttctgaagagggatcaagagggcctgggttacaggagtgctccccaacctcgtgtgacccactttccagcctgggatacccgtgcagtggccggtagagagcggccaccgagggtggcgacactgagctggcgcgaggagcggagaagggaggaaaaagacagagcttgggaaagggatttgcggacctacatgaacctggaattctag

SEQ ID NO: 223925 - DNA, 498 bp, synthetic construct
  misc_feature 1..498: note = Description of Artificial Sequence: Synthetic coding sequence
  source 1..498: mol_type = other DNA
atgtctcgtccactgctgatcaccttcaccccagccaccgacccttccgatttgtggaaggacggacaacaacagccccagcctgagaagccagagagcacactcgatggcgctgctgcccgagccttctatgaggccctcattggcgacgaatctagtgctcctgacagccagcgttcacagaccgaacccgctcgggaaaggaagaggaagaagcgcagaattatgaaggccccagcggctgaggctgtggcggagggggcttctggcagacatggacagggacgctccctggaagcagaggacaaaatgactcaccgcatcctgcgtgccgctcaagagggggatttgcctgagcttcgcaggctgcttgagcctcacgaagccggaggggctgggggaaacattaacgcacgggatgccttctggtggacccccctcatgtgcgccgcacgcgcaggccagggcgcagctgtcagttacctcttggggagatag

SEQ ID NO: 223926 - DNA, 459 bp, synthetic construct
  misc_feature 1..459: note = Description of Artificial Sequence: Synthetic coding sequence
  source 1..459: mol_type = other DNA
atgagcaggcccctgctgattacttttacacctgccaccgacccttcagacctttggaaagacggccagcagcagcctcagcccgagaaaccagagagtacactcgatggagcagcagcgcgtgccttttacgaggcactgataggcgatgagagctctgcccctgatagtcagaggtcacagaccgaaccagccagagagaggaagagaaagaaacgtcgaattatgaaagcgccagcagctgaggctgtagcagaaggagcttccggacggcatggccaaggcaggtctctggaggcagaagacaaaatgacgcatcgcatcttacgggctgcccaggagggagatctgccggaactgaggcgccttctggagcctcacgaagccggaggggctgggggaaacatcaacgcaagggatgctttctggtggaccccattgatgtgtgcggctcggtag

SEQ ID NO: 223927 - DNA, 4509 bp, synthetic construct
  misc_feature 1..4509: note = Description of Artificial Sequence: Synthetic coding sequence
  source 1..4509: mol_type = other DNA
atggctgaccggttttccaggttcaacgaagaccgggatttccaggggaaccatttcgatcaatatgaagagggacacctggagatcgagcaggcttcactggataaacccattgagtccgacaatatcggccatcgtctgcttcagaaacatgggtggaagctcgggcagggccttggtaaatcactccaagggagaactgaccccattcctattgtggtgaaatatgacgtgatgggaatgggcagaatggaaatggagcttgattacgctgaggatgccaccgaacgccgacgcgtccttgaagtggagaaggaagacaccgaggaactcaggcagaagtacaaggattatgtcgacaaggagaaagcaatcgctaaagcgctggaagacctgagagctaacttttactgcgaattgtgtgataaacagtatcaaaagcaccaggagttcgataaccacatcaattcatacgaccatgctcacaaacagcgcctgaaggacctgaaacagagagagttcgcacgcaatgtaagctctcgcagtaggaaagatgagaaaaagcaagagaaagccctgcgacggctccatgagctggccgaacaaaggaaacaagctgagtgcgctccaggctcaggcccaatgttcaaacctacaactgtggccgtggacgaggagggcggagaagatgacaaagatgaaagcgccaccaattctggaactggagccacagcctcatgtgggctcggttcagagtttagtaccgacaagggaggaccgttcactgctgttcagatcacaaacacaacggggttagcccaggcacctggcctagcctcccagggcatctcctttgggattaagaacaacctcggaacccctctgcagaaactaggcgtctcctttagctttgctaaaaaggcccctgtcaaactcgagagcattgcctctgtatttaaagatcatgccgaagagggcacatcagaggatgggaccaaaccggatgagaaaagttctgaccagggtctgcagaaggtgggggacagcgatggctcgtctaatcttgacggcaaaaaagaggatgaggacccacaagatggcggttcattggctagtacactgtccaaactcaagcgtatgaaaagagaggagggggctggcgcaaccgaacctgagtactaccactacattccacctgcccattgcaaggttaagccgaactttccttttctcttgttcatgcgggcttccgagcagatggatggtgataacacgactcatccaaagaacgctcccgaatcaaagaagggatcctcccctaagcccaaatcttgcatcaaggccgcagcaagccagggagccgagaaaaccgtgtcagaggtttcagagcaacctaaggaaacatccatgactgagccctcggaacccggatccaaagccgaggcaaagaaggccctgggtggcgatgtgagtgatcagagtttagaaagtcacagccagaaggtctctgagactcagatgtgcgaatcgaatagttcaaaggaaacctcattggctaccccagcaggtaaggagtcacaagagggccctaagcacccaactggtccgttttttcctgtcttgtccaaggacgagagcaccgctctccaatggccttccgagttgttgatttttacgaaagcagaaccttctatctcctactcatgtaaccctctgtatttcgatttcaagctaagtcgaaacaaggatgcccgaaccaagggcaccgagaagccaaaagacatcgggtcaagctctaaagaccaccttcaggggctggatcctggagaaccaaataagtccaaggaagtaggcggtgagaaaattgtcaggtcgtctggcggtcggatggacgctcctgctagcggctcagcgtgctcgggccttaataagcaggagcccggaggatcccacggctctgagacagaggatacagggagatccctgccttccaagaaggaacgttctggcaaaagccacaggcacaagaaaaagaagaagcataagaaatccagtaaacacaaacggaaacataaagccgatacagaggagaagtcctcaaaagccgaaagcggagagaaatcaaaaaagaggaaaaaaaggaagcgaaaaaagaataagagctcagcccctgccgattcagaaaggggacccaagcctgagcctcctggatcaggatcgcccgcaccccctaggcgcaggcgccgtgctcaggacgactctcagagacgctctcttccagcggaggagggatcatcggggaaaaaagatgaaggaggtgggggatccagttctcaggatcacgggggaagaaaacacaaaggggaactccctcccagttcctgccagcgtagagcaggaaccaaacgctcttccaggtcctcacatcggtcccagccttcttccggagatgaggatagtgatgatgccagtagtcaccgactccaccaaaaatctccaagtcagtattctgaggaagaagaggaggaggatagcgggtctgagcactcaaggtcacggagcaggagtggcaggaggcacagcagccatagaagctctaggcggagctactctagctcctccgacgcaagtagcgatcagagctgctacagccgccagcggagttactcagacgacagctatagcgattacagcgatagatcgcgtcggcattcaaagcgttcccatgattcggacgactccgactacgccagttccaagcacaggagtaaacggcacaagtactccagctccgacgatgattattcactatcatgcagtcagtccaggtcacgcagtcgctcacacacaagggagaggagtagatccagggggcgatctcgcagctccagctgttctcgcagccgaagtaagcgcagaagccgctccactaccgcacatagctggcagaggtctaggtcatattctcgggaccgctccaggagtacccgatcgcctagccagaggtcaggctcccgtaaaagaagctggggccatgagtctcctgaagagaggcactcaggcagaagagattttattagatctaagatctataggagccagagccctcactactttaggagtggtagaggcgagggacctggtaaaaaagatgatggcaggggagatgactctaaagccacagggccaccatctcagaactccaacatcggaaccgggagaggatcagaaggagattgttcaccagaagacaagaactctgtcacagccaagcttctcctcgaaaaaatacagtctagaaaggtggaacgcaagccctctgtcagtgaagaggtgcaagccactcctaacaaagcaggcccaaaattgaaagaccctccacaagggtatttcggacccaaactgccacctagcttgggaaacaaacctgttctccccctcatcgggaagctaccagccactcgaaagccaaacaaaaaatgtgaggagtccggcttggaacggggtgaggagcaggagcagtctgaaacagaagagggcccacccggaagctcagacgccctgttcggtcatcaattcccatctgaggaaaccactggcccattgttggacccccctcctgaggagtctaaatctggcgaagctacagctgatcatcctgtggccccactgggaaccccggctcacagcgactgctatcccggagatcccacaatttcccacaattacctcccagacccatctgatggggataccttagaaagtctggacagcagctcccaaccgggacccgtggagtcttccctgcttccaatcgctcctgatctggagcactttcccagctatgctcccccttcgggcgacccttcaattgaaagtaccgatggggcagaagatgcctctctggctcctcttgagtcccagcccataacgttcaccccagaggagatggagaagtacagtaagctgcaacaggctgcccagcagcatatacagcagcaacttttggcaaaacaggttaaagctttccctgccagcgccgcactcgccccagcgactccagccctgcaaccaatccacatccagcagcccgctaccgcgtctgcaaccagcattaccacagtacagcacgctatactgcagcaccacgcagccgctgcggctgccgcaatcggtatccacccacatccacaccctcagccactcgctcaggtgcatcacatcccccagccacacttaacgcccattagtttgtctcatttaacgcattcaatcattcccggacatcctgcaacttttctcgcctcacatcctatccatataattcccgcttcggccatccacccagggccatttaccttccaccccgttccccacgccgcattgtatcccactctgctcgctccccgaccagccgcagctgctgctaccgcgcttcatctgcatcctctgttgcaccccattttttctggccaggatctgcagcaccccccatcccacggcacgtag

SEQ ID NO: 223928 - DNA, 4275 bp, synthetic construct
  misc_feature 1..4275: note = Description of Artificial Sequence: Synthetic coding sequence
  source 1..4275: mol_type = other DNA
atggggatgggacgaatggagatggagctggattacgctgaggatgcaactgagcgtaggagggttctggaagtggagaaggaagatactgaggagttgcggcaaaagtataaagactacgtggacaaagagaaagcaattgctaaagcacttgaagacttgcgcgcaaacttttactgtgagctatgcgacaaacagtaccaaaaacatcaagagtttgataaccacatcaattcctatgatcacgctcacaagcagcggcttaaagatctcaaacagcgagagtttgctagaaacgtgagcagcaggagtagaaaagatgaaaaaaagcaggaaaaagctttaaggaggctgcatgagctggccgaacagagaaagcaggcagaatgcgcccctggttctggtcccatgttcaaacctacaaccgtcgcggtagacgaggaaggtggcgaggacgacaaagatgagtcggccacaaattctggcactggtgcgaccgcctcatgtggcttgggcagtgaattttcgactgacaagggaggtcccttcactgcagtgcagatcaccaacaccacgggtctggcacaagcgcctgggctcgccagtcagggtataagttttggcattaaaaacaatctggggacaccgctccagaagttgggcgtgagttttagctttgccaagaaggcccctgttaagcttgagtccatcgcttcagtgttcaaagaccacgccgaggagggcacaagtgaagatggcacgaaaccggacgagaaatccagcgatcagggcctgcagaaagttggtgactccgatggctcttcaaacttggacggtaagaaagaggacgaggatccccaggacggagggtcccttgcgtctaccctatctaagctgaagagaatgaagcgagaggagggagcgggtgccaccgagccagaatactaccattatatccctccagcgcattgcaaagttaagccgaatttcccctttttactgttcatgagagcgtctgaacagatggacggggataatactacacaccctaaaaacgcccctgagtctaaaaagggcagcagtcctaaaccgaagagctgtatcaaggccgctgcatctcagggcgcagagaagaccgtatcagaggtgagcgagcagccgaaggaaacctccatgactgaacctagtgagcctggaagtaaggcagaagccaagaaagcactgggtggagacgtgtctgatcaaagcttggagtcacattcacagaaagtgagtgagacccagatgtgcgagtcaaacagctccaaggaaacttctctagcaactccagccggtaaggaaagccaggagggcccaaaacatcccacgggcccattcttccctgtgctgtcaaaagacgagtcgaccgcgttgcagtggccctctgaactcttgatctttaccaaagccgagccaagcatttcttattcatgtaatcctttgtatttcgactttaagctgagccgcaacaaggatgcccgtacaaaggggaccgagaagcctaaagatatcgggagcagttcgaaagaccatcttcaagggcttgaccccggtgaaccaaacaagagcaaggaagtgggcggagaaaaaatcgtgcgcagtagcggtggcagaatggacgccccagcttctggcagcgcatgctctggcctcaataagcaggagcctggcggaagccatggcagcgagaccgaggacacaggaaggtccctcccatccaagaaagaaaggtccggcaaatcgcacagacataagaagaagaaaaagcacaagaagagctccaaacacaagagaaaacataaagctgataccgaggaaaagagctctaaagcggagtctggagaaaaatctaagaaaaggaagaaaagaaaacggaagaaaaataagagctcagccccagccgatagcgagcgcggacctaaaccggaacctcccggttccgggagcccagctccacctaggagaagaagaagggcgcaggatgacagccagcggagaagcttgccggctgaagagggaagcagtggaaagaaggacgagggcggtggtggctcttccagccaggatcacggaggcaggaaacataaaggagagcttcccccatcttcatgccagagacgggctggaactaaaagatcaagccgctcatcccaccgctctcaaccaagtagcggcgacgaagacagcgacgatgcgtcctcccacagactgcaccagaagagtccaagccaatacagcgaggaagaagaggaagaggattctgggtccgagcactccaggagcagatcccgctctggccgacggcactcttcccatagaagtagccgcagatcttactcatcaagttcggacgcctcttctgatcaatcctgctattctagacaacgcagttatagcgacgacagctattccgattacagcgatagatcccgcagacattcgaagcgcagccacgacagtgacgattctgactacgcatcttccaaacatagatctaagcgtcataagtactccagttcagatgatgactactccctcagttgttctcagagtcgtagcaggagccgctcgcatacaagggagcggagccgttctcgcggacggagccggtcctcttcatgctccagatctcgctcgaaacggaggtctagatccaccactgctcactcctggcagcgcagccgctcttacagtagagacaggtcacgctcgacccgttctccaagccaaaggagcggctctagaaagcgcagctggggacatgagagccccgaagaaaggcatagcggtcgaagggacttcatcagatccaagatttacaggtcccaaagcccccactattttaggagtgggaggggggaggggcctggcaaaaaagacgatgggaggggagatgatagcaaggcaacaggccctcccagccagaactctaacattggaaccgggaggggatccgaaggagactgttcaccagaggacaagaactcagtcactgcaaagttgttgctcgagaagatccagagtcgaaaagtggaaaggaagcccagcgtgtctgaggaagtccaggcaaccccaaacaaagcagggccaaagctcaaggatccaccccagggatactttgggccaaagctcccgccatcccttgggaacaagcctgttctgccactcattggcaaactccccgctactagaaagcccaacaagaagtgcgaagagtctgggctcgaacgcggagaagagcaagagcagagcgagactgaagaaggcccacctggctcaagcgatgccctgttcggacatcaattcccgtccgaggagactaccggccctcttctcgaccccccacccgaagagtccaagtctggagaagccacagccgaccatcccgtcgctcctctgggcacgcccgcacacagtgattgctacccgggagaccctaccatctctcacaactacctaccagacccgagcgatggtgacacacttgagtcactggacagctcatcacagccaggcccagttgagagctcacttcttccaatcgcacccgatttggagcacttccctagttacgccccacctagtggggacccaagcatagaaagtacggacggcgcagaagatgcctcacttgcgccacttgagtctcagcccattaccttcacccctgaagagatggagaagtactcaaagctgcagcaggccgctcagcagcacattcagcagcagctcctggccaaacaggtgaaggcattccctgcctcagctgcactggccccagctacacccgctctgcagccaatccacatccagcagcccgcaacagctagcgctacaagcatcactacagtgcagcacgctatcctccagcatcacgcggcagccgcagccgctgcaattggaatccaccctcacccacatccacagccccttgcccaggtgcaccatatcccccagccacatctgactccaatttccctgtcacatctgacccacagcatcatccccggtcaccctgctaccttccttgcctcccacccgatccatattatcccagcctcggcaatccatcccggacccttcacattccatcccgtccctcacgccgcactttaccccacccttctggcaccgaggccagctgccgctgctgctactgctcttcacttacacccgctgctgcatcccattttctcaggtcaggatctgcaacatcccccttctcacggtacgtag

SEQ ID NO: 223929 - DNA, 132 bp, synthetic construct
  misc_feature 1..132: note = Description of Artificial Sequence: Synthetic coding sequence
  source 1..132: mol_type = other DNA
atggccgatagatttagcagatttaatgaagatagggacttccaaggaaaccattttgatcagtatgaagaaggacacttagagatcgagcaggctagcttagacaagcccattgagtcctcttgcttctag

SEQ ID NO: 223930 - DNA, 4509 bp, synthetic construct
  misc_feature 1..4509: note = Description of Artificial Sequence: Synthetic coding sequence
  source 1..4509: mol_type = other DNA
atggcagacagatttagtagattcaacgaagaccgagacttccagggcaatcatttcgaccaatatgaggaaggacacctcgaaatcgaacaggcttccctggataagcctattgaatcagacaacatcggacataggcttctgcaaaagcatggttggaagctcggacaaggtctgggcaagtccttgcagggccgtaccgatcctattcctatcgtggtcaagtatgacgtgatgggcatgggaaggatggagatggagcttgattacgctgaagatgccacagagcggaggcgggtgctggaagtggagaaagaggatacggaggagctgcggcagaaatataaagattatgtagataaggagaaagcaattgctaaggcacttgaggacctgcgggcaaacttttactgcgagctttgtgataagcagtaccagaagcaccaggagtttgataaccatatcaactcgtacgaccatgcccacaagcagcgcttaaaggacctgaagcagagggagttcgccagaaacgtaagtagtagatcaagaaaggacgagaaaaaacaggagaaagcacttcggagactgcacgagctggctgagcagcgtaaacaagccgaatgtgctcccggatcgggccctatgttcaagccaacaaccgtggccgtagatgaggagggaggcgaggacgacaaagatgaatccgcaactaacagcggcacaggtgctactgcctcctgcggacttgggtctgagttttccactgacaagggcggtccttttactgctgtgcagattaccaacaccacgggcctcgcccaggcgcctggattggcctcccagggaatttcattcggcattaaaaacaatctcggcaccccattgcagaaactcggggtctccttttcattcgctaagaaggctcccgtgaaactcgagagtatcgcaagcgtatttaaggatcatgctgaagaaggtacctccgaggacggcacgaaacctgatgaaaagtctagcgatcagggcctccagaaagtgggcgattctgacggctcttcaaatcttgatggcaagaaggaggatgaagacccgcaggatggtggcagtctcgcctcaaccctaagcaaactcaagcgcatgaagcgcgaggagggagccggtgccaccgagcctgaatactatcactatatcccacccgctcattgtaaggtgaaaccgaactttcccttcttgctcttcatgcgcgcttccgagcagatggatggcgataatacgacgcaccccaagaatgctcctgaatccaagaaggggtccagtcccaagccgaagtcgtgtatcaaggcagccgctagccagggggctgaaaaaactgtcagcgaggtgtccgagcaaccgaaagaaactagcatgaccgaacccagtgaaccaggcagcaaagccgaggctaagaaggctctgggcggtgatgtcagtgatcagagcttggaaagccacagtcagaaggtctccgagactcagatgtgtgagagcaactcatctaaagagacttcactcgccactcccgcaggtaaggagagtcaggagggccctaagcacccaactggcccattcttccccgtcctgagtaaagacgagagcacggccctccaatggccctccgagctgctaatctttacaaaggcagaacctagcatcagctattcctgtaacccgctgtattttgatttcaagctttcaagaaacaaagatgccagaactaaaggtaccgagaagcccaaggacatcggaagttcgtccaaggatcatctgcaaggcctggaccctggagagcctaacaagagtaaggaggtgggcggtgagaaaatagtaagatctagcggtggccgtatggacgcacctgcttctggctccgcttgctccggtttgaataagcaggagccgggtggaagccacggctcggagactgaagataccggacgctctctcccttccaagaaagaacgttctggcaagagccaccgtcacaagaagaagaagaagcacaaaaagtctagcaaacacaagcgaaagcataaagctgacacagaagaaaagagctctaaagccgaatctggcgagaaatctaagaagcgaaagaaacggaagcggaagaagaacaaatctagcgccccagccgattcagagcgcggtccgaagcccgaaccaccaggatctggaagtccagctccacctcgccgtagacggcgagcccaggacgattctcaacggaggtctctcccagctgaggaaggcagctctggcaagaaggatgaagggggaggcggtagttctagccaggatcatggagggagaaaacacaagggtgagctgccgcctagttcatgccagaggagagctgggaccaagagatctagtcggtcctcccacaggagccagccttcatcgggcgacgaagactcggatgacgcatcctcacatcgattgcatcagaaatcccccagtcagtatagcgaagaagaggaagaggaagactctggctccgagcatagcagatcacggagccgatccgggaggagacatagcagccaccgtagctccaggaggagttactcttcttctagcgacgcttcaagcgatcagagctgttattcacgtcagagatcatatagcgatgactcctattccgattacagcgaccggtctcgacgtcactctaaacggtctcacgatagcgacgattccgactatgccagcagtaaacaccggagcaagcgccataaatatagctcaagcgacgatgactattccctgagctgtagccaatcaagaagccgcagtcgttctcatacacgcgagagaagcaggtcccgtggaagatctcgctcatcctcctgctccagaagccggagtaagcggagatccaggagcaccaccgctcattcctggcaacggagccgcagctatagcagggatcgaagcaggtctaccaggtctccatcccaacgcagtggctctcgtaaaagatcatggggacacgagagtcccgaggagcggcattccggcagaagagacttcattcgctctaaaatttacaggtctcagtctccacattattttagatccggaagaggagagggtcctggcaagaaagacgatgggagaggtgacgacagcaaagctacaggcccaccaagccagaacagcaacatcgggaccgggaggggtagtgagggcgactgttcacccgaagacaaaaactcagtgacggcaaagttgctcctggagaaaattcagtcaagaaaggttgagagaaagcctagtgtgagtgaggaggtccaggcgacacccaacaaggctggacccaaactgaaagaccctccacaagggtatttcggcccaaagttgcccccttccttgggtaacaagccagttctgccattaatagggaagctgccagcaactcgcaaacccaacaagaaatgcgaggaatccggactggagagaggagaagagcaggagcagagcgaaaccgaggaaggtcctcctggcagctcagatgctctgtttggacatcagttcccgtcggaagaaactaccggtccactgttggatcccccaccggaggagtcaaagtcgggcgaagccaccgccgaccacccggtggctccactgggcactccagctcacagcgactgttaccccggagacccgactatttcccacaactacctgccggatccaagtgacggcgatacgctcgagagtctggactcaagctcacagcccggacccgttgagtcgagccttctgcctatagcacccgatctcgaacacttccccagctatgctccaccctctggcgatccctccattgagagcacagacggcgctgaggacgccagcctggctccacttgaaagccaacccattaccttcacaccagaggaaatggagaagtactccaagttacagcaagcggctcagcagcatatccagcagcagttgctagcaaagcaggttaaggctttcccagcttcagccgcactggcgccagcaactcccgctctgcaacctatccacatccagcagccagctaccgcaagtgccaccagtattacgacagtacagcacgccattctccagcaccacgcagccgctgccgcagctgccataggcattcaccctcacccacaccctcagccgctggcgcaggtacaccacatccctcagccgcatctgaccccaatcagcctgtcccacctgacccattccataatcccaggccaccccgctacttttctggcaagccatccaatacacatcatccccgctagcgcaatccatcctggcccatttactttccaccctgtgccacacgctgcactataccccactctgctggctccgcgtcccgctgctgccgcagcgactgcactgcatctacatcctctgctgcacccaatcttttctggccaagatctgcagcatcctccaagccacggcacctag

SEQ ID NO: 223931 - DNA, 1476 bp, synthetic construct
  misc_feature 1..1476: note = Description of Artificial Sequence: Synthetic coding sequence
  source 1..1476: mol_type = other DNA
atgccacttcccgtgcaggttttcaacctccagggtgctgtcgaaccgatgcagatagacgtcgaccctcaggaagaccctcaaaatgccccagatgttaactatgttgtggagaacccttccctcgatctcgaacagtatgcggcttcctatagcggtcttatgcggatcgagaggctccaattcatcgcggaccactgccccaccctccgggtcgaggccctgaagatggcactgtcattcgtgcaaagaacatttaatgtcgacatgtacgaggagatccacaggaaactgagcgaggctacccgtagttccctccgggaactacagaatgcgccagatgctatccccgaaagtggagtagagccgcctgccctggataccgcgtgggtggaagcaacgaggaagaaggctcttttaaaattagagaaattggatacagatttaaaaaactacaaaggaaatagtattaaagaatccattcgcagaggccatgatgatttaggcgatcactatttggattgtggcgatctatccaacgccctgaagtgctatagccgagctagagactactgtacaagcgcaaagcatgtgataaatatgtgcttgaacgtcattaaagtttctgtatatttacagaattggtcccacgtgctttcatatgtatccaaagccgaaagcaccccagagatagccgaacagcgcggtgagcgcgattcacaaacccaggctattctgacgaagctaaagtgtgccgctggactggccgaactggccgctagaaagtataagcaggcagcaaagtgtttactccttgcaagctttgaccattgtgactttcctgagttgctttctcccagcaacgtcgcaatttatggcggactgtgcgccctggccacattcgatcggcaggaacttcagcggaatgtcattagcagctcttctttcaagctgttcctcgaattagagccacaggtgcgagatatcattttcaagttttatgagagtaaatacgcgagctgtctcaaaatgctcgacgagatgaaagataacttgctgttggatatgtacctcgcaccacacgtccgcactctttatacccagattcggaacagagccttgatccagtacttcagcccatatgtctctgccgatatgcaccggatggcggctgcatttaataccactgtcgcagctctggaggacgaacttacccagctgatcctggaaggattgattagcgctcgagtggactcacactctaagatcctgtacgccagggatgtcgatcagaggagcacaacgttcgaaaaatcactgttgatgggcaaggagttccagcggagagccaaggccatgatgctacgagcggctgttttacgcaaccaaatacacgtaaaatcaccaccgagagaaggttcccaaggagagttgacccctgctaactcccaaagccgcatgtctacgaacatgtag

SEQ ID NO: 223932 - DNA, 1653 bp, synthetic construct
  misc_feature 1..1653: note = Description of Artificial Sequence: Synthetic coding sequence
  source 1..1653: mol_type = other DNA
atgccacttcctgtgcaggtcttcaatttacaacagcccgcatctagcgtgagtgggagcggcggagctgagagtcaggatcggatgcgcgactcgtccgctccatcaagcgctagctcttctgtgaccgatttgtactgcacccctcattcaagtcggagtgatctggtgctcccaggcaccgcaggcgacttttcactctccgcaagcttatcagcttgcactcttttatatgagggcgcagtggaacccatgcagatagacgtagatccacaggaggaccctcaaaatgctccggacgcaatcccagagagcggggttgagcccccagccctggatactgcatgggtggaagcgactaggaaaaaggccctcctgaaactggagaagctcgacacagacctcaagaactacaaaggcaacagtataaaggaatcaattcgcaggggccacgacgacctaggtgatcactacttagactgtggcgacctgtctaacgcccttaaatgttacagtcgcgcacgagattactgcacttccgcaaagcatgttattaacatgtgcctcaatgtgattaaggtgtctgtttaccttcaaaactggtcgcacgtgctgtcttacgttagcaaagctgaaagcactccagaaatcgctgaacagcggggagagagagatagccagacgcaggctattttaacaaagctgaagtgtgctgctggattagccgaattggccgcacgtaaatataagcaggccgctaaatgtttgttgctggctagcttcgaccattgtgacttccccgagctgttatctccctccaatgtcgccatttatgggggtctctgcgccctcgcaactttcgaccgtcaggaacttcagcgaaatgtgatcagcagctcttcttttaagctttttctggaattggaaccacaggtgagagacattatatttaaattttacgagagcaagtatgcctcttgcctaaagatgctagatgaaatgaaagacaatctccttctcgatatgtacctagcccctcacgtacgtacgctctacactcagatccgtaaccgagccctgattcaatacttttctccgtacgtatctgcagatatgcaccgaatggccgcagccttcaacaccaccgtggccgcattggaggacgagctgacgcagctgatcttagaagggttgatttccgctcgggttgattctcatagtaagatactgtatgccagagatgtcgaccagaggagtaccacttttgaaaaaagcctgctgatgggcaaagaatttcaaagaagagccaaggccatgatgctgcgggctgccgtgctgcgaaatcagatccacgtcaagcctctgcctacatcaactgacctgggaccccctggcggttccgtgctgcccgcagcccaactgcggggattggccacaggctgccatcccgcatgtgtgccctcattggggctccgcagacaagctgccgcttcttgtggcccaagttggaaggagagacccgctggactggatcctgtcggcttctgtccacagggggcagattgtgcagctcctaggccatccggcacaatttcgcagactccacccgtgccagccagtgtgaggtgccgccaagtcggaggtgtgcactag

SEQ ID NO: 223933 - DNA, 1584 bp, synthetic construct
  misc_feature 1..1584: note = Description of Artificial Sequence: Synthetic coding sequence
  source 1..1584: mol_type = other DNA
atgagagacagtagcgcgccatccagcgccagtagcagtgtgacagatctatactgtaccccccattcatcccgatccgaccttgtgttgcccggaacagcgggtgactttagcctgtcagcatcattatcggcttgtacccttctgtacgagggggctgtcgaaccgatgcagatagatgttgatccccaagaggatccccaaaacgctcctgacgtgaactatgtggtggagaaccccagtctcgatttggagcaatatgctgcatcgtattcaggattgatgagaatagagcggctgcagtttattgcggatcattgtccaaccctgagggttgaagcacttaagatggcattgagctttgttcagaggacgtttaatgtggatatgtatgaagagattcacaggaaactctctgaggcgacgagagagttgcagaatgcccctgatgctattcccgagtctggagtggagccccctgctctagatacagcatgggtggaagcaacccgtaagaaggccctcctgaaactagagaaattagataccgacctaaagaattataagggaaactctataaaggagagcattcggcgtgggcatgacgacctgggggaccactatctggattgcggcgatctatcaaacgcgctcaaatgctattcccgggctcgcgattactgcacgagcgcaaagcacgttattaacatgtgtctcaacgtgatcaaggtgtctgtgtacctgcaaaactggagtcacgtgttgtcctatgtgtcaaaggcggagtctacaccagaaattgccgagcagcgcggtgagagggacagccagacccaagccatcttgaccaagctcaagtgcgccgcaggattagctgagctggccgctcgaaaatacaagcaggctgccaaatgtcttctgctggcctcttttgatcactgcgatttccccgagttgctgagtccaagtaatgtggccatatacggtggactgtgcgctcttgcaacattcgacagacaggaactgcaaaggaacgtaatatcctcatctagttttaagctgtttcttgagctggagccgcaggtgcgagatatcatctttaagttttacgagagcaagtacgcgtcctgtctgaagatgctggatgagatgaaggataacctgttgcttgatatgtatctggcgccacatgttagaactttgtacacgcagatacgtaatcgtgccctcattcagtacttctccccgtatgtttcagcggatatgcaccgcatggctgcagcatttaacactacagtcgccgcactggaggatgaactgactcagttaattctagaggggctgatcagtgccagggtggattctcatagtaagattttgtatgcacgcgacgtcgatcagaggagtaccactttcgaaaaatcactgctgatgggtaaggagttccaaagaagggccaaggccatgatgctccgggctgctgttctgaggaaccaaatccacgttaagtctccaccaagggagggcagtcagggagagttgacaccggctaatagtcagagtaggatgtcaacgaacatgtag

SEQ ID NO: 223934 - DNA, 855 bp, synthetic construct
  misc_feature 1..855: note = Description of Artificial Sequence: Synthetic coding sequence
  source 1..855: mol_type = other DNA
ggccagcctgaaattggcggttttctccctagcagcttggcccctgtaaccgccgctattctgatggcaagatcaagtctgagagaactacaaaacgcgcctgacgctatacccgaaagtggagtggagccccctgccctggatacagcatgggtggaggctacccggaaaaaagctctgctgaagctggaaaagttggacaccgacctgaagaactataagggtaactccatcaaggaatctattagacggggacatgatgatctcggggaccactacctcgactgcggggacctgagcaacgcactcaagtgctatagtagagctcgtgattactgcacgagcgcaaagcacgttattaacatgtgtctcaatgtgatcaaggtgagcgtgtacctgcaaaattggagtcatgtcctatcatacgtcagcaaagctgaaagcacccccgaaattgccgaggtaagagccacctctagcgagacgttgccaccaggattccttacgacagccggacccagctgccctcctccccctcacagccctcccgaccttaacttgccttcgagccctttgtcgctgggcgctgggcatcgtgcgctgggtaacgtcgagcatggacctcacgcttgtggcttcttactgcagcagcgtggcgagcgcgattcacagacacaggccattctgacaaagctgaagtgtgcagcaggtgagggattgggccacgcccagctgacccccaggagccccgtggctaagagcagtcagcctcgtgccgtcggttggtccttaccgcagccgggtaagactagcctggcgggaagacggatgctgtgggcccacgtacaagtatag

SEQ ID NO: 223935 - DNA, 1584 bp, synthetic construct
  misc_feature 1..1584: note = Description of Artificial Sequence: Synthetic coding sequence
  source 1..1584: mol_type = other DNA
atgcgagactcctctgcacctagttccgcgagtagctccgtgactgacctgtactgtacgccacacagtagccgctcggacctggtgctgcccggaacagctggcgacttcagcttatccgcctcactgtccgcctgtaccttgttatacgagggagctgtagagcctatgcagatcgacgtcgatccccaggaagaccctcaaaatgcacccgatgtgaattatgtggttgaaaaccccagcctggatttggaacagtacgccgcttcctattctggcctcatgagaatcgagcggctgcaatttattgccgatcattgtcccaccctacgggtggaagccctgaagatggctcttagctttgttcagaggacctttaacgtagacatgtatgaagagatccatcggaaactgtccgaagcaacaagagagctgcagaatgcccctgacgcaataccggagtcaggggtcgagccacccgctctcgatactgcctgggtggaggctacccgaaaaaaagccctgttaaaactagagaagctggataccgacctcaagaactacaagggcaacagcataaaggagagcatccgcaggggccatgatgacctcggcgatcattacctcgattgcggtgatctgagcaatgcccttaaatgctactcaagagcaagagactattgcacctctgctaaacacgtgatcaacatgtgcctcaatgtgattaaagtcagtgtgtacctgcagaattggagccacgtcctctcatatgtaagcaaagctgaaagcacgcctgaaattgccgagcagcggggagaacgagacagccagactcaggctatcctcactaagttgaagtgtgcagccggattagccgagctggctgctcgaaaatataaacaggccgcaaagtgtctgttactggctagttttgaccattgtgatttcccagaactgctgtccccttcaaacgttgctatctatggtggcctgtgtgcattggctacgtttgaccgccaagagcttcaacgcaatgtaatatcttcctcttccttcaaactgtttctggagctggaaccacaagtccgagatatcattttcaaattttacgaatctaaatacgcctcgtgtcttaaaatgttagatgaaatgaaggataacctgctgctggatatgtatttggcaccacacgtgcgtacgctgtatacacaaatccggaatagggcgttgatccagtacttttccccatacgtgagtgccgacatgcatagaatggcagcggctttcaatactactgtggcggctctagaggacgaactgactcagctgattctggagggtctaatttctgccagggtggattctcacagcaagatcctgtacgccagagacgtagaccagcgaagcacaacatttgaaaaatcgctactaatggggaaggagtttcagcgtcgagcaaaagcaatgatgctgcgcgcagccgtactacgcaaccagattcacgttaaatcgccaccgagggagggatctcagggagagcttacacccgctaacagtcagagcagaatgagtacgaacatgtag

SEQ ID NO: 223936 - DNA, 993 bp, synthetic construct
  misc_feature 1..993: note = Description of Artificial Sequence: Synthetic coding sequence
  source 1..993: mol_type = other DNA
atgacacccaactcaaccggtgaggttccatctcctattcctaagggggctctcgggctaagtctggctctagcaagcttaatcatcacagcaaatctgctcctagccctggggatcgcttgggatcgccgtctgcggtccccacccgcaggatgtttttttctgtctctgcttttagctgggcttctcaccgggctggccctccccacacttccaggtctttggaaccagtccagaagaggttattggtcttgcctcttagtgtacctggccccaaatttttcttttttatccttgctcgctaatttactgctggtgcatggggagcgttatatggccgtgctgcgtccgttgcaaccccctggcagcattcgtcttgcgctactgctgacgtgggcaggccctttgctcttcgcctcactgcctgccctcgggtggaatcactggactcccggagctaattgtagttcccaggcaattttccctgctccttacctctacctagaggtttacggcctgttactccctgctgtgggagcggctgcgtttctgagcgttcgcgttttagcgaccgcccacagacaacttcaggacatctgcaggctggagagggctgtgtgtcgggatgagccgagtgctctggcgagagctttaacgtggagacaggcaagagcgcaagccggagcgatgctgctgttcgggctgtgttggggtccttatgtcgctaccttactcctgtctgtgctggcctacgagcagaggcctcctctcggtcccggaactttgctctcgttgttgtctttggggtctgccagtgccgctgccgttccagtcgccatgggtctaggtgaccagcgctataccgccccttggcgtgccgcagcacaacgttgtctgcaggggttatggggcagggcatctagagactcaccagggccatctattgcataccatcccagtagtcaatcgtccgtggacctggacctgaactag

SEQ ID NO: 223937 - DNA, 993 bp, synthetic construct
  misc_feature 1..993: note = Description of Artificial Sequence: Synthetic coding sequence
  source 1..993: mol_type = other DNA
atgacacctaattccacaggggaggtgccatcaccaattccaaagggggctctgggactaagcctggctctggcttccctcatcataacagctaacttgctcttagccttagggattgcttgggaccgtcgccttagatctcccccagcgggttgctttttcctgagtctgctcttggccggactgttaacaggcctggcccttccaacccttccgggactatggaaccagtccagacgtggatattggagttgcctgctggtgtaccttgcacccaatttctcatttctatctctgctggctaacctgctcctggttcacggcgagcggtacatggccgtgctaaggcccttgcagccacctggcagtatacgcctggccctgctcttaacatgggcaggccctctgctctttgcatcattgcctgccctcggctggaatcactggactcccggagccaattgttcaagtcaggctatttttccagctccctacctgtacctggaggtgtatggactcctcctgccggcagttggggcagccgctttcctctcagtacgcgtactggcaaccgctcaccgccagctccaggacatatgtcgactcgagcgagccgtgtgtcgggacgagcccagcgccctggccagagctctgacatggcgccaggccagagcgcaggcgggagccatgctgttgttcggcctgtgttggggtccgtacgtcgctacactgctgctgtcagtcttagcctatgagcagagacctcctctcggacccggaactctcttgtctcttctgagcttggggagcgctagtgctgccgctgttccagttgccatgggactgggggaccagagatacaccgccccatggagagcagccgcacagaggtgcctgcaagggctgtggggccgagcctctagggacagccctggaccttcaatagcttatcatccatcttctcagtcctccgtcgatctggacctgaattag

SEQ ID NO: 223938 - DNA, 993 bp, synthetic construct
  misc_feature 1..993: note = Description of Artificial Sequence: Synthetic coding sequence
  source 1..993: mol_type = other DNA
atgaccccaaactccactggagaagtgccaagcccgattcccaagggcgcactcgggctttctctcgctttagcctccctgatcatcacggccaacttgctgctggctctgggcatcgcctgggacaggcgcctgcgatctccgccagccggatgcttctttttgtcattgctcctcgctggcttgcttacaggcctcgcccttcccaccctccccggtctgtggaaccaaagtagacggggttattggagttgtctgctagtatatcttgcgccaaactttagcttcctgagtctgctggcaaatctgctattggtgcacggagagcggtacatggccgtccttagaccactgcagcctcccggttccattcgtcttgcattattgctgacatgggcagggcctttgttgttcgcatccctgcccgcattaggctggaatcactggactcccggagcaaactgcagctcacaagcaatcttccccgctccatacctctacttggaagtatacggcctgttgctcccagctgtcggggcagcagcatttttaagcgtccgggttttggccaccgctcaccggcagctgcaggacatttgccgactggagcgagcggtgtgtcgggacgagccctccgcgctcgcaagagccctgacttggaggcaggctagggcccaagctggagcaatgctgcttttcggactgtgctggggaccgtatgttgccaccctgctcctcagcgttctggcttatgaacagcgccctccactggggcctggtaccctcctgtcactgctgtcgctcggatccgccagtgctgccgcagtaccagtcgccatgggattaggggatcagagatatacagccccttggcgcgctgccgctcaacggtgccttcagggcctttgggggagagcctcgagggattcgcccggaccatcaatcgcttaccaccccagcagtcagagttccgttgatctggacctgaactag

SEQ ID NO: 223939 - DNA, 993 bp, synthetic construct
  misc_feature 1..993: note = Description of Artificial Sequence: Synthetic coding sequence
  source 1..993: mol_type = other DNA
atgaccccgaattccaccggtgaagtcccatctcctatacctaaaggggctttgggcttgtccctggccctggcttccctcatcatcaccgctaatctgctcctcgcgctaggaattgcctgggacaggcgcttaagatcgccccctgctggctgcttctttctctcactgctgctggctgggttgctcaccggcctggctttgcctaccctgcctggactgtggaaccagtcacggagaggctattggtcttgtttactcgtttatctggccccaaatttctcttttctgagcctgttagccaacttactccttgttcacggcgagcgttacatggcagttctgcgcccacttcagcctcccggaagcattaggctcgccttgctgctgacctgggcaggacccctactattcgcctcactccctgctctggggtggaaccattggacgccaggggcaaactgcagctctcaggccatctttccggctccctacctgtacttagaggtctacggcttgctgcttcctgccgtgggcgcagccgcattcctctcggtaagagttctggcgaccgcccaccggcaactgcaggatatctgtaggctggagagagccgtctgccgggatgagccgtcagcccttgcgagagctctcacatggagacaggccagggcacaagcaggagctatgctgttgttcgggctgtgctggggtccttatgtggctaccctgttactgtcggtgctcgcctatgagcagaggcctcctctggggccaggaacattgctgagccttctgtctctgggctcggcaagcgcggctgcagtgcctgtagccatgggcctcggagatcagcgttacacggcgccttggagggcagctgctcagcgttgccttcagggtctgtggggaagggcctcacgagattccccgggacctagcatcgcgtatcatcctagtagccagagttcagttgatctcgacctgaattag

SEQ ID NO: 223940 - DNA, 1128 bp, synthetic construct
  misc_feature 1..1128: note = Description of Artificial Sequence: Synthetic coding sequence
  source 1..1128: mol_type = other DNA
atggatgtgacatcacaggccagaggtgttggattggagatgtaccctggcacagctcaacccgctgccccaaatacaacgagtccggagctcaacctcagccacccattactgggcactgctctagctaatggcacgggggagctgagcgagcaccagcagtacgtaatcggccttttcctgtcatgcctgtatacgatctttctttttccaattggatttgtcggtaatattctcattctggttgttaacatctcttttagagagaagatgacaataccagatttatactttatcaacctggccgttgccgacttgattctcgtggcggactctctgattgaagtctttaacttgcacgaacgatattacgacatcgctgtgttgtgcacgtttatgtccctcttccttcaggtcaacatgtattcttccgtgttctttttgacatggatgtctttcgatcgctatattgctcttgccagagccatgcgctgcagtctgtttaggaccaaacatcatgccagactttcttgcggccttatatggatggcctccgtcagtgcgacactggtgcccttcaccgcggtccatctccagcacacagacgaagcttgcttctgcttcgccgacgtcagagaggtccagtggcttgaagtcaccctggggtttattgtaccctttgcaataattgggctgtgttattctcttatcgtgcgggtccttgtgagggcgcacagacatagggggctgagaccacgcagacagaaggctctgcggatgatccttgccgtggtcctggttttcttcgtctgctggctccccgagaatgtatttatctctgtgcacttgctgcagcgcactcagccaggtgccgcaccttgtaagcaaagcttcagacacgcccatcctctgactgggcacatcgttaaccttgcagctttcagcaactcttgccttaatcccttgatatacagtttcctaggtgaaactttcagggataaattgcggctatatatcgaacagaagactaatcttcccgcactgaatcgattttgccatgctgccctcaaagctgtgatcccagattcgactgaacagtccgacgtcagattctcttccgcggtgtag

SEQ ID NO: 223941 - DNA, 531 bp, synthetic construct
  misc_feature 1..531: note = Description of Artificial Sequence: Synthetic coding sequence
  source 1..531: mol_type = other DNA
atgagcctaaactgtggccaaatgtggcttctggcccctcgcggtttggccagagtgaccttggcttggtctccctgggggtgcctggggaacttaacgacaggccatctcgccttattaacacaaaactgctacaatccgaaggcactcgcccctcaaggacccaaggcctccggggatcagcctgtcacacagctgctgcccgcaaatccggcatgccggtgcacatgcctcccactccaagaaacttttctgagcgtgctccacctcccagggtggcaacagtggaggtgtgccgctagccccggtcccaggggcgctgctgccttagggcctgagcaacaggaggggcctagcgtcgagaggccccctagcgcacccggttggttctcacactgcttattaacatccacatggcagctccacagctgcggcttgggtccatgtgagcttccctgcgggctagtgggttgccaggacaacgagatcctgcaacacctgtggctaactaatctgtttttacagaaatag

SEQ ID NO: 223942 - DNA, 1128 bp, synthetic construct
  misc_feature 1..1128: note = Description of Artificial Sequence: Synthetic coding sequence
  source 1..1128: mol_type = other DNA
atggacgttacctctcaggcgaggggtgtaggactggagatgtaccccggtactgctcagcctgccgctcctaataccacttcccctgaacttaatttatcacatcccctcctgggaaccgctctagctaatggcacaggagagctctctgagcatcagcagtatgttattgggctgttcctgagttgtttgtacaccatctttttgtttcccattggatttgtggggaatatcctgattcttgtagtgaacattagctttcgcgaaaaaatgacgatcccagacttgtatttcataaacctggctgtggccgacctgatccttgtggccgactccctgatcgaggttttcaatctgcacgaacgttactacgatatcgctgtcctgtgtactttcatgagcctgttccttcaagtcaacatgtactcgtccgtgttttttttgacatggatgtctttcgaccggtatatcgccttggcaagggctatgcggtgttcactctttcggaccaagcatcacgccagactcagctgcggtttgatttggatggcctccgtctccgccacacttgttccgtttactgccgtccatctgcaacacaccgatgaggcttgtttctgttttgccgacgtcagggaagtccagtggctggaagttactctggggtttatagtgccatttgcaattattggcttatgctactctctaattgtaagagtgctagttagggcacacaggcacaggggcctgcgaccccgtcgccagaaagccctgaggatgattctggcagtggtactggtgttcttcgtatgctggctacctgaaaacgtattcatttctgtccacctgttacagcggactcagccaggggcagctccctgcaaacagagtttccgacatgctcatccattaaccggccacattgttaacctggccgcattctctaactcatgcctgaatcctctaatttacagcttcctgggcgaaacgtttcgtgacaaactgaggctatacatcgagcagaaaaccaatctgccagccttgaatcggttctgccatgcggcattaaaagcagttattcctgactccactgaacagagtgatgtcaggttcagcagcgccgtctag

SEQ ID NO: 223943 - DNA, 1128 bp, synthetic construct
  misc_feature 1..1128: note = Description of Artificial Sequence: Synthetic coding sequence
  source 1..1128: mol_type = other DNA
atggacgtgacaagccaggcgagaggggtcggccttgagatgtatccaggcactgcccaacctgccgctcctaacactacgtcccctgagctaaacttatctcaccccctcctggggacagcattggccaacgggactggcgaactgagcgagcatcaacaatacgtaattggactctttctgtcctgcctctacaccatctttctctttccaattggttttgtgggaaatattcttatcttagtagtcaacatttcattccgagagaaaatgaccattcctgacctctacttcattaacttagctgtggcagacctcatcctggtggccgattccctcatagaggtgttcaatcttcatgagagatattatgacattgctgtgctatgtacctttatgtcactgttcctgcaggtcaacatgtacagcagcgtcttttttctgacatggatgtcgttcgataggtatatcgcattggccagagcgatgcgatgtagcttattccgaacgaaacaccacgccagactgagctgcgggcttatctggatggccagcgtgagcgctaccctggttccatttacagcagtgcaccttcagcacaccgacgaggcatgtttctgttttgcagacgtgcgcgaagtgcagtggttagaagtcacattaggattcattgtgcctttcgcgataattggtctgtgttactcgttgattgttcgggttctggtgcgggctcaccgacataggggtcttcgccctcgccgacagaaggccctacggatgatcttggcagtcgtactagtcttctttgtttgttggctcccagagaatgtgttcatctccgtgcatctgctccagagaacacagcctggcgcagctccttgcaagcagtctttccgacacgcccatcccttgaccggtcacatcgtaaacctggcagctttctcgaactcctgtctgaatccactcatatatagttttctcggagagacctttagggataaactgcgattgtacattgaacagaaaacaaatctgcccgcactgaaccggttttgccatgcagccctgaaagcagtcatcccagattctacggaacagtctgacgtgaggttctctagtgcagtttag

SEQ ID NO: 223944 - DNA, 1128 bp, synthetic construct
  misc_feature 1..1128: note = Description of Artificial Sequence: Synthetic coding sequence
  source 1..1128: mol_type = other DNA
atggatgtaaccagccaggcacgtggcgtcggcctggagatgtaccctgggactgcccagccagccgcacccaacaccacaagtcccgagctgaatctgtctcaccccttgctgggcaccgctttagccaatgggacaggagaattgtctgaacatcagcagtatgtgatcggcctttttctctcatgtctctacaccattttcctgttccccataggatttgtcggcaatattcttattcttgtggtgaacattagtttccgcgaaaagatgacaatcccagatctctacttcatcaacttggctgtggctgacttgattttagtggcagactcacttatcgaggtctttaacctgcacgagagatactacgatatcgccgtattgtgcacttttatgagtttgtttctgcaggtgaacatgtacagctccgtgttctttctgacatggatgagcttcgacaggtacattgcgctggcgcgtgcaatgagatgctctctttttcgcaccaaacatcatgcgcgactgagctgcggactcatttggatggccagcgtgtcagcgaccttagtgcccttcacagctgtgcacctccagcacactgatgaggcttgcttctgtttcgccgacgtgagggaggtgcaatggctagaggtaacccttggattcattgttccatttgcaattatcggactttgctactccctgatcgttagagtcttagtccgagctcaccggcaccgaggcctgcggcctaggcgccagaaagccctgagaatgattcttgccgttgtattggtcttttttgtgtgttggctgccagagaacgtctttataagtgtgcatctgctgcagagaactcagcctggggcagcaccttgcaagcagtcatttagacacgcccatcctttaacgggacatatagtgaaccttgccgcattttcgaactcttgtctgaaccccctcatttactcttttctcggtgagacttttagagataagcttaggctgtacattgagcagaagacaaacctcccagctttaaacaggttttgtcatgcagcactgaaggctgtaattcccgatagcaccgagcagtctgacgttaggtttagcagtgctgtttag

SEQ ID NO: 223945 - DNA, 222 bp, synthetic construct
  misc_feature 1..222: note = Description of Artificial Sequence: Synthetic coding sequence
  source 1..222: mol_type = other DNA
atggacgtgacgtcacaggctagaggcgtcggcctggagatgtatccgggaaccgcgcaaccagctgcccctaacacaacgagccccgaactgaatttatcacaccccctactcggtacagccctcgccaacggaaccggtgagctgagcgaacaccaacagtacgttattggtctattcctgtcctgcctgtatacaatatttctgttccccatcggatag

SEQ ID NO: 223946 - DNA, 1227 bp, synthetic construct
  misc_feature 1..1227: note = Description of Artificial Sequence: Synthetic coding sequence
  source 1..1227: mol_type = other DNA
atggacgtcactagccaagctagaggtgtaggcctagagatgtatccaggtaccgcacagcctgcagccccaaataccacgagcccggagttgaatctcagtcacccgctgctaggtactgccctcgcaaacggcaccggggagctctcagagcatcaacaatacgtgattggactcttcctgagctgcctctacacaatttttctcttccccattggatttgtaggcaacattctcatactcgtggtgaatatctcattcagggagaagatgaccatccccgatctgtactttattaacctggcagttgcggacctgattttggttgccgattcactgatcgaagtgtttaatctgcatgaacgttattatgacattgctgtcctgtgtactttcatgagtctctttctgcaagtgaatatgtattccagcgtgttctttctgacttggatgtcgtttgatagatacatcgcattggcccgtgcaatgcgctgcagtctgtttcgtacaaagcaccacgctcgtctgtcttgcggactgatctggatggccagtgtgtcagcaactttagtgcccttcaccgcagtgcatctgcaacataccgacgaagcctgcttctgttttgccgacgttcgagaggtgcagtggctggaagtgaccttaggatttattgtccccttcgctataattggcctttgctactccctgattgttcgggttcttgttagggcacacaggcatcgtgggttacgaccaaggcgccagaaggccctgcgcatgattcttgctgtagtcctcgttttcttcgtctgttggctgcctgagaatgtatttatatccgtccacttgcttcagcggacccaacctggagccgctccctgcaagcagtccttccgacatgcacacccacttacacacggccacgtcatgagcctcaattgcggacagatgtggctgctggctcctcgtggcctcgcccgagttaccctagcttggtccccctgggggtgtctagggaatttaaccaccggtcacctggccctcctgacacaaaattgctacaacccaaaagcgttggctccacagggtcctaaagcttctggcgaccagcctgtcacacaactgttgcccgcaaatcccgcttgccgatgcacatgtctgccactgcaggagactttcctgacaccttctaccagaaaagctacgcgtcgaggccattgtgggtag

SEQ ID NO: 223947 - DNA, 1068 bp, synthetic construct
  misc_feature 1..1068: note = Description of Artificial Sequence: Synthetic coding sequence
  source 1..1068: mol_type = other DNA
atggaggacctcgaagagacactgtttgaggaattcgagaattacagctacgacttagactactattcgctagagtcagacttagaagaaaaggtgcagctcggagtggtccactgggtgtcacttgtgctttactgtctggcatttgtcctaggcatacccggtaacgccatcgtgatctggttcacagggtttaaatggaaaaaaactgtcaccacactgtggtttctgaatcttgctatagctgactttatttttctcctctttctgcccctgtatatctcctatgtggcaatgaattttcattggccgtttggcatttggctttgtaaagccaattctttcacagcccaactgaacatgttcgcctcagtgtttttcctgacggtgatctcactggatcactatattcacctcatacatcctgtattatctcatagacatagaaccttaaagaactccttgattgtcataatttttatttggctactggcttcattaatcggagggccagccctctacttcagggatacagtagagtttaataaccacaccctttgctacaacaatttccagaagcacgaccctgacctcacccttatacgccatcatgttcttacatgggtgaagtttattataggttatctctttccactgttgacaatgtcaatttgttatctctgcctgatcttcaaagtcaagaaaaggagtatcctcatatcgtcccgtcatttttggacgattctggtagtggtggttgccttcgtggtttgttggacgccgtatcacctgttttctatttgggagctcacaatacaccataattcctatagtcatcacgttatgcaagccggaatccctttatcgaccggtctagcatttctaaatagttgcctgaaccccattctctacgtgcttataagtaagaagttccaggctaggttccgctctagcgtagccgaaatactgaaatacactctctgggaagtgagctgctcaggtacagtttctgagcagctcagaaactcagagaccaagaacctctgtctgctggagacagctcagtag

SEQ ID NO: 223948 - DNA, 225 bp, synthetic construct
  misc_feature 1..225: note = Description of Artificial Sequence: Synthetic coding sequence
  source 1..225: mol_type = other DNA
atggaagatctggaggagaccctgttcgaggaattcgaaaattattcctacgatcttgattattactccctggagtcagatcttgaggagaaagtacaactgggcgtggtacactgggtcagtctggtgctttactgtttagctttcgtgcttggaatcccgggaaacgccatcgtgatttggttcactggatttaagtggaaaaagaccgtaaccacgctttag

SEQ ID NO: 223949 - DNA, 1068 bp, synthetic construct
  misc_feature 1..1068: note = Description of Artificial Sequence: Synthetic coding sequence
  source 1..1068: mol_type = other DNA
atggaagacctcgaagaaacgctgttcgaagaattcgaaaattattcctatgatctcgactactactccctggagtcagacctagaggaaaaagtgcaactcggagtggtccactgggtgtcactagtcctttattgtttggcctttgttttgggcatcccgggaaatgccatcgtgatatggtttactgggttcaaatggaagaagactgtgaccacgctgtggttcctcaacttagccattgcggatttcatctttctgctgtttctccctctttatatctcatatgttgcaatgaacttccactggccattcggtatttggttgtgtaaagccaacagctttactgctcagctgaatatgttcgccagcgtattcttcctgacagtgatctcacttgatcactacatccatctcattcatcctgtcctcagccaccggcatcggactctgaagaactcactcatcgtgattatcttcatctggctgctggcatctctgattggcggaccggctctgtatttccgcgatactgtggaattcaataatcataccctctgttacaataactttcagaagcacgatccagacttgaccctaattcgtcatcacgtccttacttgggtgaagtttattatcggttatctgttcccactgttgactatgtccatttgctatctgtgcctcatttttaaggttaagaaacgcagcatacttataagtagtaggcatttttggactatcttggtggtggtggtggcatttgtggtatgctggacaccctaccacttgttttctatctgggagctgacaatccatcataacagctatagccatcacgtgatgcaggccggaattccactgtcaactggccttgcctttttgaactcatgccttaacccaatcttgtacgtccttatctccaaaaagtttcaggccagatttagatcatccgtcgctgaaattcttaaatacacactgtgggaggtttcctgtagcggtacagtgtcagagcagcttaggaacagtgagactaagaatttgtgcctgcttgagacggcccagtag

SEQ ID NO: 223950 - DNA, 249 bp, synthetic construct
  misc_feature 1..249: note = Description of Artificial Sequence: Synthetic coding sequence
  source 1..249: mol_type = other DNA
atggaggacttggaagagaccctgttcgaagaattcgaaaattatagttatgacctcgactactattctctcgaatcggacctcgaggagaaagttcagctcggagtggtccactgggtgtccctggtcttatactgtctcgcctttgtgctaggcattcccggtaacgcaattgtgatctggtttacgggatttaaatggaaaaaaacagtgactaccctgtggtttctcaacctggctatagcttag

SEQ ID NO: 223951 - DNA, 684 bp, synthetic construct
  misc_feature 1..684: note = Description of Artificial Sequence: Synthetic coding sequence
  source 1..684: mol_type = other DNA
atggaggaccttgaagagactctatttgaagagttcgagaactattcctatgacctcgactattactccctggagagcgatttggaagaaaaggtgcaactgggtgtggtacattgggtgtccttggtgctgtactgccttgcatttgtattggggatccccggaaatgccatcgttatttggttcacaggttttaaatggaaaaaaacagtgactactctgtggttcctgaacttggccatcgctgattttatctttcttcttttcctgcccctatatatatcctatgttgctatgaactttcattggccatttggcatttggctttgtaaggccaatagcttcacagctcagttgaacatgtttgcttcggtgttctttctgacagtgatctcgcttgatcactatatccatctgattcaccctgtgctgagtcaccggcatcgtaccttgaaaaatagtctgattgtgatcatatttatatggctcctggctagcctcatcgggggacctgcgctgtactttcgggatacagtagaatttaataatcacactctgtgctacaacaatttccagaaacatgaccccgacttaacccttataagacatcatgttctgacttgggtaaaattcatcatcggctacctcttccccctcctgactatgagtatctgctacctctag

SEQ ID NO: 223952 - DNA, 414 bp, synthetic construct
  misc_feature 1..414: note = Description of Artificial Sequence: Synthetic coding sequence
  source 1..414: mol_type = other DNA
atggaggatctcgaggagacgctatttgaagagtttgagaactacagctacgacttagactactacagtctggaatcggatctggaggaaaaagtccagctcggggtggtacactgggtgtccttagtgctctattgtcttgctttcgtcctgggaattccaggcaatgcaatagtgatctggttcactggcttcaagtggaaaaagacagttaccacactttggtttctcaacttggccatcgctgattttatattcctcctgtttctacctctttatatcagctacgtggcaatgaacttccactggccatttgggatttggctgtgtaaagccaatagctttaccgcccagcttaacatgtttgcatctgtgttctttcttactgtgatttcgctggaccactacatctag

SEQ ID NO: 223953 - DNA, 537 bp, synthetic construct
  misc_feature 1..537: note = Description of Artificial Sequence: Synthetic coding sequence
  source 1..537: mol_type = other DNA
atggaagatctggaagaaactctgttcgaggagttcgaaaactactcgtacgatttggattattactcgttagagtccgacctggaggaaaaggtccagttgggagtggtgcattgggttagtctggtcttatattgcctggcatttgtcctagggatacctgggaacgcaatagtcatttggtttacaggatttaagtggaagaagaccgtgacgactctctggttcctaaacctggctatcgcggacttcatatttctcctgttcctgccgctgtatatttcgtatgtggcgatgaacttccactggcctttcggcatctggttatgtaaggccaacagcttcactgcccagcttaacatgtttgcaagcgtgttctttttgacggttatatcgttggatcactacatccacctcatacatccagtgctgtcacacaggcacaggactcttaaaaactcacttatcgtcataatctttatctggctgttagcgagtttgattggcggaccagctctttacttcagagatacctag

SEQ ID NO: 223954 - DNA, 60 bp, synthetic construct
  misc_feature 1..60: note = Description of Artificial Sequence: Synthetic coding sequence
  source 1..60: mol_type = other DNA
atggaggatcttgaggagactctattcgaagagtttgagaactattcttacgacctctag

SEQ ID NO: 223955 - DNA, 1527 bp, synthetic construct
  misc_feature 1..1527: note = Description of Artificial Sequence: Synthetic coding sequence
  source 1..1527: mol_type = other DNA
atgacttctacttgcactaatagcactcgcgagagtaactcaagccatacctgcatgccgctgtctaagatgccgatttccctggcacacggcatcatcagaagtactgtgctggtaattttcttggccgcatcattcgtggggaacattgtgctggcactggtcctgcagcggaaaccacaactcttacaggtgactaatcgatttatcttcaacctgcttgtaacagaccttcttcagattagtttggtcgcaccatgggtagttgccacaagcgtgccactcttttggcccttgaacagtcatttctgcaccgccttggttagcctgacacacttgttcgcttttgcctcggttaacacaatcgtggtggtgagtgtcgaccgttatttatccattatccaccccttgagctacccatctaagatgacccagagacgaggatacttactgttatatggcacctggatcgttgcaatcctgcagagtacaccaccactttatgggtggggccaggctgcattcgatgaacgcaatgcactgtgtagcatgatctggggggcttcccccagttacaccattttaagcgtggtgtcttttatcgtgatacctctgatcgtcatgatcgcctgttacagcgtggtattttgtgcagccagacggcagcacgcactattgtacaatgtcaagagacactcgctggaagtgagggtgaaggactgtgtggagaacgaagacgaggagggtgcagaaaaaaaggaagaattccaggacgaaagcgagtttagaaggcagcacgagggcgaggttaaagccaaggaggggaggatggaggctaaagacgggtctctgaaggctaaggaaggcagcaccggcacctccgagagttctgtggaggctagaggctccgaagaggtgcgtgaatcatcgaccgtagcctctgatggatcaatggagggaaaggagggttccacaaaggtagaggagaactcaatgaaggctgacaaaggcagaaccgaagtgaatcagtgctctattgacctcggcgaggacgatatggagttcggggaggatgacattaacttctcagaggacgacgtggaagccgtgaacatccccgaatccctgccgccatccaggcgtaactctaactcaaatcccccactgcccaggtgctatcagtgtaaggcggcaaaagtaatttttatcatcatctttagttatgtgctctccttggggccatactgcttcctcgccgtgctggccgtttgggttgatgtggaaactcaggtgccacagtgggtgatcaccattatcatctggctgttcttcctgcagtgttgtattcacccttacgtttatgggtatatgcacaaaacaattaagaaggaaattcaggatatgctaaagaagtttttctgtaaagagaagccgccaaaagaagacagccatcccgatctgccaggaactgaaggcggaaccgagggcaagatcgttccatcttacgacagcgctacattcccctag

SEQ ID NO: 223956 - DNA, 2088 bp, synthetic construct
  misc_feature 1..2088: note = Description of Artificial Sequence: Synthetic coding sequence
  source 1..2088: mol_type = other DNA
atgaagatgaagagtcaggccaccatgatttgctgcttggttttctttcttagcacagaatgttcccactaccgttctaaaattcacctgaaagccggagacaagttgcagagcccagaggggaagcccaaaacagggcgtatccaagagaagtgtgagggaccttgcatctcctcctcaaactgtagccagccttgcgccaaagactttcatggcgagatcggctttacgtgcaaccagaagaagtggcagaagtcggccgaaacttgtaccagtctctctgtggaaaaattgttcaaggatagcacaggcgcttcccggctgagcgtggctgctccgtcaatccctctgcatattctggattttcgcgcacccgagactattgaatcagtggcccaggggattcgaaagaactgcccctttgactatgcctgcatcaccgatatggtgaagtcttccgagactaccagtggcaacatagcctttattgtggagctgttgaagaatatcagcaccgatctgtcagataacgtgactcgggagaaaatgaagagctactccgaggtggctaatcatattctcgacaccgcagcgatcagtaactgggctttcatccctaataagaacgcaagtagcgatctgctgcagagcgtgaacctgtttgcacgccaactccatatccacaataattcagagaacatcgtcaatgagttatttatacaaactaagggattccatatcaatcacaacactagcgaaaagtccctgaacttctccatgtcgatgaataacactacagaagatatcttaggaatggtgcagatcccgaggcaagagctgcggaagctctggcccaacgcatctcaggccattagcatcgccttccctaccctgggggctattctgcgcgaagcacatctgcagaatgtctcactgcctcgccaggttaacgggcttgtcctctcagtcgttcttcccgaaaggctgcaggagatcatccttactttcgaaaaaatcaacaaaaccagaaacgcccgagcccagtgtgtaggctggcactcaaaaaagcgcagatgggatgagaaggcatgccagatgatgctcgatattcggaacgaagtaaagtgcagatgcaattatacgagtgtcgtcatgagtttctcgatcctcatgtcatcaaaatcaatgactgataaagtgttggactacattacgtgtatcgggcttagcgtgtctatactttccttggtgctctgcctgataatcgaagccaccgtgtggtctagagtggttgtgacagagatctcttacatgagacatgtgtgtatcgtaaatattgctgtgtccttactcacagccaatgtgtggtttataattggttcccacttcaatatcaaggcccaggattataatatgtgcgtcgctgtgacttttttcagtcattttttctatctcagcctcttcttttggatgctgtttaaggctttgctcattatctacgggatcctggtcatttttcgcaggatgatgaagtccaggatgatggtaatcggcttcgctatcggctacggctgcccattgattatcgcagtcaccactgtggcgattaccgagcccgagaagggatacatgcgcccagaagcctgttggttaaattgggacaatactaaggccctgctagcgtttgcaatacccgcttttgtgattgtcgccgtgaacctaatcgttgtgcttgttgttgcagtgaatacgcagcggccaagcatcggcagtagcaagagtcaagacgtcgtgatcattatgcgcatatcaaagaatgtggcgatactgaccccattgctcgggctgacttggggattcggaatcgccacacttatcgaaggcaccagtctcacttttcacattatcttcgccttgctgaatgcttttcagggatttttcatcttacttttcggcactattatggaccataagatccgcgacgctctgagaatgaggatgagtagtctaaagggaaagagtcgggctgcagaaaacgcgtccttgggcccaacaaatggctctaagttgatgaacagacagggatag

SEQ ID NO: 223957 - DNA, 2088 bp, synthetic construct
  misc_feature 1..2088: note = Description of Artificial Sequence: Synthetic coding sequence
  source 1..2088: mol_type = other DNA
atgaagatgaagagccaggcaaccatgatctgttgccttgtctttttcctgtctacagaatgttcccattatcgctcgaaaatacatttgaaggccggagataagctgcagtcacctgagggaaagcccaagacaggaaggatacaggagaagtgcgaaggaccttgcatttccagcagcaactgttcacagccatgcgctaaagattttcacggagagattggctttacttgcaatcaaaaaaaatggcaaaaatccgctgagacttgcacttccttgtccgtggagaaactgtttaaggacagtaccggagcgagccgcctttctgtggccgctccgtctattcctttacacatcctcgactttcgggcaccagaaaccatcgaaagcgtagcccagggtattagaaaaaactgccccttcgattatgcgtgtataacagacatggtgaaatcatccgagacaacctcaggcaatatcgcgttcattgtggaactcctcaagaatatatccaccgacctgtctgacaatgtgacacgagagaagatgaagtcttatagtgaggtcgccaatcacattctcgatacggcagccatctccaactgggcattcattccgaataagaacgccagtagcgacctcctccagagtgttaacctcttcgctcgacagctacatatccacaacaactccgagaatattgtaaatgagctgtttatccagacaaaagggttccacattaatcataacaccagcgagaaaagcctgaattttagcatgtcgatgaacaatacaactgaggatattctcgggatggtgcaaatcccaagacaagagctacggaagctgtggcctaatgcatcacaggccattagtatcgcatttcccactctaggagccatactgagggaggcccacctgcagaacgtttccctccctaggcaggtgaatggtctggtgctgagtgtcgtgttgcccgagcggctgcaggagatcatcttgacattcgaaaagatcaacaaaacccgcaacgccagagcacagtgcgtcggatggcacagcaaaaaacgacgttgggatgagaaagcctgccagatgatgttagacatcaggaacgaggtcaaatgtagatgtaattatactagcgtcgtgatgtccttctcaatccttatgagctctaaatcaatgactgataaagtcctggattacattacatgtatcggattatccgtctctattctgagccttgtgctctgccttattatcgaagccactgtctggtctagagtcgtcgtgacagaaatatcgtatatgagacatgtgtgtattgtgaatatcgctgtctcgctcctgactgcaaacgtgtggttcatcatcgggtctcattttaatatcaaggctcaggactacaatatgtgcgttgccgttaccttcttttcccatttcttttacctgtcgttgttcttttggatgctattcaaggctttattaattatatatggtatcctggttatcttccgacgtatgatgaagtctcgcatgatggtgataggcttcgccattggctacggctgccctttaattatagccgtaacaacagttgcaatcaccgagccagagaaaggctatatgaggccagaagcctgctggcttaactgggataacacaaaagcactgttagcatttgccataccagcctttgtcatcgtggcagtgaatttgattgtagtgctggtagtggcggtcaatacacaaaggccgagcattgggagcagcaagtcccaggatgtcgtgatcattatgaggattagtaaaaatgtggccatactgacaccgctgctcggccttacatggggattcggcattgcgaccctgatcgaagggaccagtctgacattccacattatcttcgccctactgaacgcatttcaggggttttttatcttgctgttcggcaccatcatggaccataagatccgggacgctctaagaatgcgcatgtcatcattaaaaggcaaatcgagagcagccgagaacgcaagcttgggccctactaacggctccaagctcatgaatcggcaggggtag

SEQ ID NO: 223958 - DNA, 2259 bp, synthetic construct
  misc_feature 1..2259: note = Description of Artificial Sequence: Synthetic coding sequence
  source 1..2259: mol_type = other DNA
atgtacaccggcccttgtaaggtattgcacctgtccagtggactcctcccgaattccggtcgctttggcattgtacttagcgatgaataccaagttgtgacaagtctctggtgccagctctatacaacccacgctccacagcaggcgtccggcatgctcctcctgaattacctcgtgattccaagcaaggctcaggtgaacaagcctggatatattccaaacctgggtgagtgcagccattacaggtctaaaattcacctgaaagctggcgacaagttacagtctcctgaggggaaacccaagaccggcaggatccaggaaaagtgcgagggaccctgcatctcaagcagtaactgttcacagccctgtgcaaaggatttccacggagagatcggcttcacttgtaaccagaaaaagtggcaaaaatctgcagagacatgtacctccctctctgtggaaaaattgttcaaagacagtacaggcgcatctcggttaagtgtagcagcaccttctattcccctgcacattttggatttcagggcaccagaaaccatcgagagcgttgcacagggaattcgtaaaaactgcccgttcgactacgcgtgtatcacagatatggtaaaatcatcagagacaacgagcggtaacatcgctttcattgtggagttgctgaaaaacatcagtactgacctttctgacaacgttacccgagaaaagatgaagtcctattctgaagtcgcgaatcacattctcgacacagccgctatctctaactgggccttcatcccaaacaaaaacgccagttcggatctcttacagtcggtcaacctgtttgccagacagctccacattcacaacaatagcgaaaacatcgtgaatgaactcttcatccagaccaagggtttccacatcaaccacaacacctcggaaaagtctttaaactttagcatgtctatgaataatactacagaagatattttgggcatggtccaaatccccagacaagagctgcgcaagctctggcccaacgctagtcaagcaataagcatcgcgttccccaccttgggtgccatcctcagagaggcgcatttacaaaatgtcagcctcccgaggcaagtgaatggcctggtgctgagcgttgtgctccccgagcggctgcaggagattatcctcacctttgagaaaatcaataaaacaaggaacgctagagctcagtgtgtaggatggcacagcaagaaacggagatgggatgaaaaagcgtgtcaaatgatgttagacatccggaacgaggtgaaatgtcggtgcaattacacttccgtcgtgatgtcatttagtatcctgatgagcagtaagagcatgaccgataaggttttggactacatcacttgtatcggtctatccgtctccatactctcccttgtactgtgcctgatcatcgaggccacagtttggagtagggtcgtcgttacagaaatctcatacatgcgtcacgtatgcattgtgaatattgcagtgtcactcctgaccgccaatgtctggttcatcattggatcccacttcaatataaaagctcaagattacaacatgtgtgtagcagtcacctttttctcccacttcttctacctgtccctgttcttttggatgctgttcaaagcccttctgataatctatggaattttggttatattcagacgcatgatgaaaagtagaatgatggttatcgggtttgcaataggttatggttgccctctaatcattgcggtgactacagtggctatcacagaacctgaaaaaggctatatgaggccagaagcgtgctggttgaactgggacaacacgaaggctctgttggccttcgcgatacccgcattcgtgatagtggccgtgaatctgattgtggttctcgtcgttgccgtcaacacacagagaccaagcatcgggagcagtaaaagtcaggatgtggttatcattatgaggatcagtaagaatgtggctatcctgacaccactgctcggccttacctgggggttcggcattgccacattaattgagggtaccagcctgacttttcacattatctttgccctgctgaacgcatttcagggatttttcatcctgctcttcggtacaattatggatcataaaatcagggacgccctgcgaatgcggatgagctctttaaagggcaagtcaagggccgctgaaaacgcaagcctgggcccaacaaacggctctaaactgatgaaccggcagggctag

SEQ ID NO: 223959 - DNA, 1005 bp, synthetic construct
  misc_feature 1..1005: note = Description of Artificial Sequence: Synthetic coding sequence
  source 1..1005: mol_type = other DNA
atgaacgaggatctgaaagtgaatctgtctggcctcccacgcgactacctagacgccgcagccgcagaaaacatctcagcggctgtttcctctcgggtcccggctgtcgagcctgagccagaactggtggtgaatccctgggacatcgttctgtgcacttctggcacactcatctcctgtgagaatgccattgtcgtgctaatcatctttcacaatcctagcctgcgggctcctatgttcttgctgattgggtcgcttgctctcgctgacttacttgctgggatcgggttgataaccaatttcgtgtttgcttacttgctgcagagtgaagctactaaactggtcacaattggcttaattgtggccagcttctccgcatcagtctgttctttactcgcaattacggtagataggtatctgtctctctactatgctttgacctaccactccgagcgcactgtgacttttacctatgtgatgctggttatgttatggggaacaagtatctgcctgggtttgctgcccgtgatgggctggaattgcttgcgcgatgagagtacatgctctgtagtccgccctcttaccaaaaataacgcagcgattttgtcagtgtcatttttgtttatgttcgccttaatgctacagctctacattcagatctgtaagatcgttatgagacatgctcatcagatcgccttgcagcatcactttctggctacctcccattacgtcaccaccaggaagggggtttccaccttggctattatcctggggactttcgctgcctgctggatgccctttacattatactcccttatcgccgattacacttatcccagtatatatacttacgctaccctgctgccagccacatataatagcattattaatcctgtcatatacgcttttcggaaccaggagatccagaaggctttgtgcttgatctgttgtggatgtatcccttcatctttggcccagagagcgaggagcccatctgatgtgtag

SEQ ID NO: 223960 - DNA, 1005 bp, synthetic construct
  misc_feature 1..1005: note = Description of Artificial Sequence: Synthetic coding sequence
  source 1..1005: mol_type = other DNA
atgaatgaggacttgaaggtgaacctcagcggacttcctagagattatctggacgcagctgcagccgagaatattagtgctgccgtgtcatcaagagttccagccgtggaaccagagcctgagctggtagtcaatccctgggatattgtcctctgcacctctggcaccctaatttcttgcgaaaacgcaattgtcgtgctcatcattttccacaacccatcactccgcgctccgatgttcttgctgataggcagcctcgcactggcggatcttctggccggtatcgggctgatcacgaactttgttttcgcctacctcctccaatcagaggcgactaagctcgtgacaatagggctgatcgtggcatccttttccgcaagcgtatgctccctcctggctatcaccgtggataggtacttgagtctgtactatgcactgacctaccattcagaacgcaccgttacattcacatacgttatgcttgtcatgctctggggcacctcgatttgcctgggccttcttcctgtgatggggtggaactgcctacgtgacgaatctacatgttccgtggtgcgaccgttaactaagaacaacgcggcaatcctgtctgtatcatttctgttcatgtttgccctgatgctgcaactctatattcagatctgcaagatcgtcatgagacatgcacatcaaatcgctttgcagcatcacttcctggccacatcccattacgtcaccactcgcaagggcgtgagcaccctcgccatcatcctgggcaccttcgccgcatgttggatgccttttaccctgtactccctcatagccgactatacctacccctccatctacacctacgctacattacttcctgccacctacaactctatcattaaccctgtgatttacgccttccgcaaccaagaaattcagaaagccctgtgtcttatttgctgtggctgcattccgtcgagcctcgcacagcgggctagaagtccttctgatgtatag

SEQ ID NO: 223961 - DNA, 3840 bp, synthetic construct
  misc_feature 1..3840: note = Description of Artificial Sequence: Synthetic coding sequence
  source 1..3840: mol_type = other DNA
atgagaggccatggaaatcactcccgcctcaaaagccggtgtgcctcactgggcaacgtacaccaccatcaggcacaaatggcccacggtgcccattgtcggggaggaagaacccctcagtcgcccgattccaggggtcccacagctggcggtcacaccagaggaagatggacatacagacccatagaggctctgatcaacgtcagcttccctggcgcaaaaggcggacggactgccgagggggaaccatcttgggcttgggtgttccggtctggctatctccagcgacaggcgctgcctggcctgccggttagcacccgtgtggccgcatgctggtggcagcaccatccaggacgcgatagcggtttccttggacccggatttattgatctgcttcgcgaagaaccctctggtcgtgcagacggcaaggccgcagcccagaagaccggtaggctgtacttgtttccaacctttttgggtaataagctaccagaggccgcagacagcttcggggagatcgccagtgggaacagtgtgatatttactagcgtactccaatcctcccacccacctggaaccccaccccctagcgcgaggaagccttcacctggcgctgctatgctcgtgtgtgaggagaccctggagctcggggcacaaggctgttgggggtcaacctcccccagggggcaggcagtgtctttggtcggcggtccaacagctggaggcagcagactcggtggggctggatgtacaatgggattgttgatggctctccaggcaaggcggccacgggacggcacctgggctgaccctcgcaggtgtagccgggctgtggagggttctggcttgacccgcgcagctttagtctcccctggcccaagtggagtggaggaggatactagacgggaagggtgcgtactggtcggctcatggcggtcttcaacccaccggtcccgcgtgcttatcattaatacccctagcggacgtacgccttggagccaggggagtctggggagcaccggaaggtacaaccagacgagagctcccggtagccagcagcaggggctgtgctccgacgcagcacttcatgaagactttgtgccagagcctaccccagctttcttccaatacccaccccaggcattcagcaagactaaagtgcgggacctgggcaggggcggattgtacgccttttctaaggaggagaaagtcagtgaggcccagcgcgtcgaagcctacgagacccacggattaggactgtccaccggaagacaaaatcccgtgccctctccgtgtaagccaggttgcgtatgtcagggactagcgcttgacgccgaagcttggcccagacatcctggccgacggccttgcgcagccaaggaagcctgcctcgggcctccaggctgcagcggagagctctctctccccgaggaagaggggatcgcgcctggtgcagctactgctgctccagcatgggtgccgcacggcagagtctctaggttcttgactgtcaagctgttcacctacgtgaccatgtatcaatgtaaacaggaaaggattcttcgactctgcattagtggagagtcagggaggtacgtcaggcgcagcaggtttcgtaactttgccgctttgatggtgagcaccggtgtgccgggagttcttcagctcggcgcaagacctcttcgaggaggcggacacccttacggcgacagtcaagccggaaaagtggtggaatggcgagcaggagacagggctagtggactatcagcaggagagcggaggttcctgtctcagtctgagctgcagacatggcctaggactccccattgcgtcgggaagaaagtgccacagcccgtgggcgctgctgatctcgccccagataccagcttatgtaggaaggagggatctagcgcaagccggagctgcagaccagggcctgggcatctgactaggagggaggaagattcctttcggcagctcgcgttcccaaggttcgaggaggtgacttttccccctctgactgctgctgagcgggctccatccgttcacgggggacacagtcttgcgagccaagggctggtgcttgcgggacggactcgcagcgtggcatccggaggaaaacaagagctttccggcccactagctgcctgcatcccaacacaggatctgaagacagtgctgtcactccctcggtaccccggagaattccttcacccagttgtctatgcttgcactgcggtgatgctgctgtgtctgctggccagctttgtgacctatattgtgcatcagtcagctattagaatctctcgtaaaggcagacatactttgctcaacttctgttttcacgcagcactgacgttcaccgtgttcgccggagggatcaacagaacgaagtatccaatcttgtgccaggcagttggaattgtattacattatagtacattatctaccatgctctggattggcgtaacagccagaaatatatataagcaggtgaccaaaaaagctccgttgtgtcttgacacggatcagcccccatacccccgacagcctctcctgcggttctatctggtttctggaggcgtgccctttattatctgcggcgttaccgcagccaccaatatccgcaattacggtactgaggacgaggacacagcttgctggatggcatgggaaccctctctgggcgctttttacggccctgccgcaatcataacactcgtcacctgcgtatattttttgggaacctatgtgcaactacgcaggcaccccggaagacgctatgagttacgaacccagcctgaggagcaacggagactcgcaacacccgagggagggagaggaatcagacctggcactcccccagctcacgatgcccctggggcatccgtgctgcagaacgaacacagcttccaggcacagctgagggccgcagcattcacgctatttctgttcaccgctacatgggcatttggagccctggctgtcagtcagggtcatttcttagatatggtattttcctgtttgtacggagccttttgcgtcacactggggctgtttgtcctgatccatcactgcgctaaaagagaagatgtctggcaatgctggtgggcttgctgtccaccacggaaggatgcccatccagctctggacgcgaatggagccgctctgggaagagcagcgtgtctacacagtccgggactaggacagccacggggttttgcccaccctccgggaccctgtaaaatgactaatttgcaggcagcacagggccatgcctcttgcctgagtccagccacaccatgttgcgccaaaatgcattgtgaacccctcacagcagatgaggcccatgtacacctgcaagaagaaggggctttcggccacgacccacacttgcatggctgcctgcagggaaggaccaagcctccctatttctcgcgccacccggctgaggaacccgaatacgcctaccacatacccagctcactcgacggctctccgaggtcgagccgaactgattcacctccctccagtctggacgggcctgctgggacccatacgctcgcctgttgcacccaaggggatccttttcctatggtcacccagcccgagggctccgatggctccccggcactctactcctgcccgacgcagccaggaagggaggccgcactggggccagggcacctggaaatgctgagacggacacagtccctgccgtttggaggcccatctcagaacggactacctaaaggaaagttgcttgagggactcccattcgggacggatggcaccgggaacatccgcaccggaccatggaaaaatgaaaccaccgtgtag

SEQ ID NO: 223962 - DNA, 1395 bp, synthetic construct
  misc_feature 1..1395: note = Description of Artificial Sequence: Synthetic coding sequence
  source 1..1395: mol_type = other DNA
atgctgtggataggggttaccgccaggaacatttacaagcaagtaacaaaaaaggctcctctgtgcctcgacaccgaccaacccccatatcccaggcagcctctgttgtccaggttctatctcgtgagcggcggagttcctttcatcatttgtggagtcaccgccgctactaacatccgtaactatggcacagaggacgaagataccgcgtattgctggatggcctgggaacccagtctcggggctttttacggacctgccgctatcataaccctcgttacctgcgtctatttcttaggtacctacgtgcagctgcgcaggcatcccggaagacggtatgagttacgaacccagcctgaggagcagaggagacttgcaacccccgaagggggaagggggatcaggcctgggacccctcccgctcatgatgccccaggcgcatcggtcctgcaaaatgagcatagctttcaggcccagctaagagctgccgctttcacattatttctcttcaccgcgacgtgggccttcggcgctctagctgtgagtcagggacacttccttgacatggtgtttagctgcctgtacggcgcattttgtgtgactctcggtctgttcgtgctgattcaccactgcgcaaaacgggaagacgtttggcagtgttggtgggcgtgctgcccacccaggaaggacgctcacccagccctggacgcaaatggcgctgcattgggacgcgctgcatgcctccactctcctggcctgggccaacccaggggattcgcacatccacccggaccctgtaagatgacaaacctgcaggccgcacagggacacgcgtcatgtctctcaccggcaacgccatgctgcgctaagatgcattgtgagcccctgacagcggacgaggctcacgttcatctgcaggaggaaggcgcttttgggcacgacccccatttacacggttgcctccaggggagaaccaagccaccatacttctcacggcatcccgctgaggagcctgaatacgcctatcatattccctccagtctggatggttccccgcgatcttctagaacagattcaccaccgagcagtctggacggccctgctggaacacataccctggcatgttgcacacagggcgatccatttcccatggtcacacagcccgagggcagtgatgggtcacccgcattatattcctgtcctacacagccagggagggaggccgctctggggccaggacacctggagatgctgagacgtactcaatctctcccgtttgggggacctagccaaaatggtctccccaaggggaaactcctcgagggattaccatttggaactgacgggactggtaacatacgtactggcccatggaagaacgagaccacagtgtag

SEQ ID NO: 223963 - DNA, 1683 bp, synthetic construct
  misc_feature 1..1683: note = Description of Artificial Sequence: Synthetic coding sequence
  source 1..1683: mol_type = other DNA
atggatctgaaaacagttctgagcctgcccagatacccaggggagtttctccatcctgtggtctatgcctgcacagctgtgatgcttctctgtcttctcgccagtttcgttacctacattgtgcaccagtccgctatacgtatctcacggaaggggagacacaccttgctcaacttttgttttcatgccgcattgaccttcaccgtcttcgccggagggatcaacaggacaaagtacccaattttatgtcaagccgttggcattgtgttacattactctacactgagtaccatgttatggataggagtgacagctcggaatatctataaacaggtaacaaagaaggctcccttgtgtctggacaccgaccagccaccataccccagacaacccctgcttaggttttatttggtctctggaggtgtgccattcatcatttgcggagttaccgccgctacaaacatccgcaactacggaacggaagacgaggataccgcctactgttggatggcgtgggagccctcactgggagcattttacggacctgccgctattatcaccttggttacttgtgtttatttcctgggcacctacgtgcagctgaggaggcacccaggcaggaggtatgagctgcggacacagcccgaagagcaacgcagattggcaacacccgaggggggacggggtattcgcccaggcactcctccagcccatgatgcccctggggcttctgttctgcaaaacgaacacagctttcaagcccagctgcgcgctgccgcattcaccctcttcttattcacagctacgtgggcgtttggagcgttggccgtgagtcagggccatttcttggacatggtgtttagttgcctctatggagccttctgtgtaaccctgggcctgtttgtcctcattcatcactgcgctaaacgcgaggacgtctggcagtgctggtgggcctgttgtcccccaaggaaggacgcccaccctgcccttgacgcgaacggcgctgcacttggtcgggcagcctgtctgcactcccccggtctaggccagccgagagggtttgcccaccctccagggccatgcaaaatgaccaatctgcaagccgcacagggacatgcatcgtgtctttcacctgcgacgccatgttgcgcaaagatgcattgtgaaccactgacggctgacgaggcccacgttcatctgcaggaggagggagcctttggccatgatcctcatttacacggctgtctacagggcaggaccaagcctccttacttcagcaggcaccccgctgaggagcccgagtatgcataccatattccgtcatctctggacggctccccaagatcatctagaacagacagtccacctagcagcttggatggacctgctggcactcatactctggcttgctgtacacagggggatccatttccaatggtgacacagccagaaggctctgatggcagtcccgctttgtacagttgcccaactcagcctggccgagaagcagcgctgggcccaggacacttggagatgcttcgtcgcacacagtccctgcccttcggcggtcctagccagaatggacttcctaaaggtaaactcctggaagggctcccattcggaacagacggcacaggcaacattcgcaccggaccctggaagaacgagaccacggtgtag

SEQ ID NO: 223964 - DNA, 2562 bp, synthetic construct
  misc_feature 1..2562: note = Description of Artificial Sequence: Synthetic coding sequence
  source 1..2562: mol_type = other DNA
atgcgcggtcatggcaaccacagcagactgaaaagcaggtgcgcctctttggggaacgtgcatcaccaccaagcgcaaatggcgcacggggctcactgtaggggcggaagaaccccgcagagccctgactcccgcggtcccactgccggaggccacacacggggtcgttggacatacagacccatagaggctctgataaatgtgtccttccccggtgcaaagggaggcagaactgctgagggagagccctcctgggcgtgggtctttcgaagcgggtatctgcagcggcaggcgctgcctggtctgcccgtgtcaacacgcgtggcagcatgctggtggcaacatcaccccggacgcgacagtggcttcctcggccctggcttcatcgacttactgcgcgaggagccctcaggaagggcagatggtaaagcagcggctcagaagacaggacgcctgtacctgtttcccacattcctcggtaataaattacctgaggccgctgactcttttggggaaatcgccagcggtaactcagttatctttaccagcgtcttgcagagctctcatcctcccggtactcctccaccttccgccaggaagccctcacctggtgccgctatgcttgtgtgtgaggagacactggagctgggtgcacagggctgttggggaagtacaagtcctagggggcaggcagtttctctggtggggggtcccaccgcaggtggatctaggttgggtggggctggctgcacaatgggcctcctaatggcgttgcaggctagaaggcctagagacggtacatgggccgatccccgaagatgcagcagagccgttgaggggagcgggttgacacgcgcagctctggtgagtcctggaccctctggtgtcgaagaggatacgcgcagagagggctgtgtgctcgtgggtagctggagatcgagcacacatagatcacgggtgttaattatcaatactccctctggtcggactccctggtcacagggctctctgggatctacaggcagatacaatcagacgcgcgctcccggatctcagcaacagggactctgtagcgacgcggctctacacgaggatttcgtgcccgaacccactccggctttcttccaataccctccccaagcgttttctaagaccaaagtgagagatctggggagaggaggattgtatgcctttagcaaagaggaaaaagtgagtgaggcacagcgtgtcgaagcctacgagactcacggccttgggctaagtactggcagacagaaccccgtaccctctccttgcaagcctggctgcgtctgtcaaggtctggccttggacgctgaagcatggccgaggcacccaggacgaagaccctgtgctgccaaggaagcctgcctcggcccaccgggttgctctggagaactcagtctcccagaagaggaaggcatcgcccctggagcagctactgccgctcctgcgtgggttccccacggacgagtgtcccgattcctgacagttaagctctttacttatgtgactatgtaccagtgcaaacaagaacgcatcctcaggctgtgcatctctggagaatcaggcagatacgtgcgcaggtctagattcaggaattttgcagcactcatggtcagcacgggagtgccaggcgttctgcagctgggggcaaggcctctgcgcggagggggtcacccatacggggactcacaagctgggaaagtagtggagtggcgcgcaggagaccgcgcttcggggctgagcgccggagagcgcagattcctctctcagagtgagctgcagacctggcctcgcactccgcactgtgtgggtaagaaggtgcctcaacccgtcggagctgcggacctggctccagacacttctctgtgccggaaggagggatccagcgcctcccgcagctgcaggccgggacctgggcacttgacccgacgagaggaggattcctttaggcagttagccttccccaggtttgaggaagtgacgttccctcccctgacagctgcagaaagggctccaagcgttcatggaggccactcgttggctagccaggggctggtcctagctggcagaactaggagcgtcgccagcgggggaaaacaggagctaagtggcccactcgcagcttgcatcccgacacaggatctgaagaccgtgctcagcctcccacggtaccccggtgagttcctgcaccctgtggtctacgcatgtaccgctgttatgctcctgtgtctccttgcaagctttgtcacctatattgtccaccagtctgccatccggatcagcaggaaaggccgacacactctgctgaacttctgttttcacgcagccgagcaccctggcgttactcctttaagaactagccctcccctgccttggtggacaccaattcaggtcgggattgtgctccattattctactctgtctactatgttatggattggcgttacagctaggaatatttacaaacaggtgactaaaaaggccccactgtgtctggatactgaccagcccccatatcctcggcagccattgttgtag

SEQ ID NO: 223965 - DNA, 3366 bp, synthetic construct
  misc_feature 1..3366: note = Description of Artificial Sequence: Synthetic coding sequence
  source 1..3366: mol_type = other DNA
atgggggcaggtggcaggaggatgcggggagcccctgctcgacttctgttgccgctcctcccatggctcctcctgcttttggccccagaagccagaggagccccaggctgtcccttgtcaatccgatcctgcaagtgctcaggagagcgccctaaaggtttgagtggcggagttcccggacccgcacggaggcgcgtggtgtgttcggggggagacctgccagagccacctgagcccggtctgttgccaaatggaacagtgaccctcctattgtctaataacaaaataaccggcctgaggaacggaagttttctcggcttgagtctgctggaaaagttggatcttcgaaacaacatcatctccacggttcagcctggagcctttcttggtctgggggagctcaagcgtctggatctgtccaataaccggattggatgccttactagcgaaacttttcagggcctcccaagattgttgagactaaacatctcaggcaatattttctcttcgctgcaacctggggtgttcgacgagctgcctgctctgaaggtggtcgatctgggcactgagttcctcacgtgcgactgtcatttaaggtggttgctgccgtgggcccagaatcggagcctacagttgtctgagcacactctgtgcgcctatccatcagcactgcatgctcaagccctgggctcccttcaagaagcacagctgtgctgcgagggcgctctcgagctccatacccatcacctgatcccgtcattgcgacaggttgtatttcagggggatagattgcccttccagtgctccgctagttatctgggcaacgacaccaggatccgatggtatcacaatcgcgctcctgtggagggcgacgagcaggccggtatacttcttgccgaatccttgattcacgattgcacttttatcacctctgagctcacgttgagtcacataggagtgtgggctagcggcgagtgggaatgtaccgtttccatggcacaagggaatgccagcaagaaggtcgaaatagtcgtattagagacctcggccagctattgccccgctgaaagggtggccaataatagaggagattttcggtggcctcgaacactagcaggaattactgcctaccagagttgcctgcagtatcccttcacatccgtgcccctggggggtggggctcccggtactagggcttcaagacggtgcgatagagcaggtcgctgggagccaggggattactcacactgtctttatacaaacgatattacaagggtcctctataccttcgtcctgatgccgattaatgcgtcaaatgcccttactctggcacaccagcttagggtttacaccgccgaagctgcatcgttttcagatatgatggacgtagtgtatgttgcccagatgatccaaaagttcctcggctatgtcgaccaaatcaaagagctcgtggaagttatggttgacatggcttccaatctgatgctggtagacgagcacctgctatggctggcgcagcgagaggataaagcctgttcacgaattgtaggggctcttgaaagaattggcggtgccgctctcagtcctcacgcccaacacatttctgtggagctctcagcctttccaagagaagtgggcggagccggtgccggtctgcacccagtggtgtacccgtgcaccgccttattgctgctgtgcctgtttgctaccatcatcacctacattctcaaccactcatccattcgagtgagccggaagggatggcatatgctcctgaatctttgctttcatatcgctatgaccagtgccgtgttcgccggaggcataactctcactaactaccagatggtttgccaagccgtcggcatcaccctacactattcatctttaagcacattgctttggatgggtgtgaaggcccgagtcctgcataaagaactgacctggcgcgctccccctccccaggaaggagaccccgcactgccaacaccatcccccatgctcagattttacctcatcgcaggtgggatccccctgatcatctgcggtattaccgccgctgtaaacatccataactaccgggaccatagcccttactgctggctcgtctggaggccaagcttgggcgctttttatatccctgtcgccctgatcctgctgatcacctggatctactttctttgcgcagggttgcgtctcaggggccctctggctcagaatccgaaggcgggaaattccagggcatcactggaagctggagaagagctacgagggtccaccagactccgcggatcaggacctctgctcagcgacagcggcagcctgctggccaccgggtccgcccgagtgggcacaccgggaccacccgaggacggcgatagtttgtacagccctggcgttcagctcggcgctctggtgactacccacttcctctatttagctatgtgggcctgcggtgcattggctgtgtcccaaagatggctgccacgggtcgtgtgcagttgcttatatggagttgctgcttctgcactggggctgtttgtattcacacaccactgcgccagacgacgcgacgtccgtgcctcctggagagcctgctgtccacccgcttccccggcagcgccacatgcacctcctcgtgcccttccagctgccgctgaggatgggtcaccagtgttcggagaagggcctccaagcctgaaaagttctcctagcggaagctctggtcaccctctcgccctcgggccttgcaagctaactaatctccaactcgctcagagtcaggtttgcgaggctggcgctgctgcaggcggagaaggtgagcctgagcctgcaggcacccgagggaatctagcacatcgacacccgaataacgtacatcatggcagacgcgcacataagtcaagagctaaagggcaccgggctggggaggcctgtggtaagaatcgactcaaagccttgagaggcggagccgctggcgcactcgaactgctttcgtccgagagcgggtctcttcataactctcctacagattcatacttaggctcaagtaggaactccccaggggctggcctgcaattggaaggcgagccgatgcttactccttcagaaggaagtgatacatccgcagcccctctgagcgaggccggaagagcaggacaaagacgctcagcgtctagagactctcttaagggagggggtgctttggaaaaagagtctcacaggaggtcatacccactgaacgccgcatctctgaacggcgcacccaagggcggaaaatacgatgatgtcacactgatgggggctgaggtggcatctggtgggtgcatgaagacaggcctctggaagagcgagacaaccgtttag

SEQ ID NO: 223966 - DNA, 4017 bp, synthetic construct
  misc_feature 1..4017: note = Description of Artificial Sequence: Synthetic coding sequence
  source 1..4017: mol_type = other DNA
atgggcgcaggaggtcgtagaatgcgcggagctccagctcgccttcttctccctctgttaccgtggctcctccttctgctcgcacccgaggccaggggtgcgccagggtgtcccctgtctatcagatcttgtaagtgcagcggggagagacccaaaggcttgtccggtggcgtaccagggcctgcacgaagaagagtagtgtgcagtgggggtgacttgccagagcctccagagcctgggctcctcccaaacggaacggtcaccctactactgagtaataacaaaatcacgggtctgcggaacgggagcttccttggcttaagcctcctcgaaaaactggatctgaggaataatataatctcaacagttcagccaggagcatttctaggtcttggtgagcttaaaaggctggacttgtccaataatcggatcggctgtctgacatccgagacatttcagggtctccccagactgttgcgactgaatataagcggaaacatcttctcctctctgcagccgggtgttttcgacgaactgcctgctctaaaagtagtggacctgggtacagagtttttaacttgcgactgccatctgaggtggctcctaccctgggcacaaaataggtccttgcaactgtctgagcacaccctgtgcgcctaccctagcgctctgcatgcccaggccttaggatcccttcaagaagctcagctttgttgtgagggagccctcgagctgcacacacatcacttgatcccctctttacggcaggtggtctttcagggggatcgcctgccgttccaatgctccgcctcatatcttggcaacgacacacggatacgctggtaccacaatagggcccctgtcgaaggtgacgaacaagctggcatactgctcgcagaatcattgattcacgactgtacctttatcacgtctgaactgaccctttcccacattggagtctgggcgtctggtgaatgggaatgtaccgtgagcatggcacaaggcaatgccagcaagaaagtggagatcgtagtcctagaaaccagcgctagctactgccctgccgagcgagtggctaataatcgcggagacttccggtggccaagaaccctggcaggcataacggcctatcagtcctgcctccagtacccttttaccagtgtccctctgggcggaggcgctccaggcactagagcttcccgcagatgtgacagggcaggccgttgggagccaggcgactatagccactgtttgtatacaaacgatatcacacgagtgctctatacatttgtgttgatgccaattaacgcgtccaacgccctcactctggcccaccagcttcgggtgtatacagcagaggctgcctctttctctgatatgatggatgtcgtatatgtggcacagatgatccagaaattcctcggctatgtggaccagatcaaagaactggtagaggtcatggttgacatggcttctaacttaatgcttgtagacgaacacctgctttggttggcccagcgagaggataaggcttgttctcggatcgtgggagctctggagaggatcggaggagccgcactgtccccccatgcccaacacattagcgtgaatgctcggaacgtggctctggaggcttacttgatcaaaccacactcctacgttggtctaacatgcactgcattccaacggagagaaggaggagtgccgggaacaaggcctggttctcccggacagaacccacccccagagccggaacctcccgcagaccagcagctgaggtttcggtgcaccaccggccgacctaacgtatcccttagctcttttcatattaagaacagtgtcgcgctggctagtatccagcttcctccaagtctgttttcaagtctccccgcagcccttgctcctcccgtccctcctgattgcacgctccaactgctggtcttcaggaatggtaggctgttccactctcactcaaacacctctcggcctggcgctgcgggacctggcaagcggagaggtgtggcaacccctgtcatttttgccggtacctccgggtgcggcgtgggtaatctgactgagcccgtagccgtttcccttcggcattgggctgaaggagccgaacctgtcgctgcttggtggagccaggaaggtccaggagaggccggaggctggacctccgagggatgccaactgcgcagctcccagcctaatgtgtccgccttgcactgtcagcacctgggtaatgtggcggtgctcatggaactttccgcctttcctcgcgaagtcgggggtgccggagctggccttcaccccgtggtgtatccctgtactgccctgttactgctgtgtctattcgccaccattatcacctatattctcaatcacagctctattagagtatcgaggaaagggtggcacatgctcctgaatttgtgttttcacatcgctatgacaagcgctgtatttgctggaggcattaccttaaccaattaccagatggtgtgccaggcagtgggtatcacactgcactattcgtcgctcagcacccttctctggatgggagtgaaagcccgagtactgcacaaagaacttacttggagggcccctccaccgcaagagggggatcctgcgctcccaacaccatcgcccatgctcaggttctacctgatcgcaggtgggatcccgctgataatatgcggcattacagccgcagttaatattcacaattatcgggaccactccccttactgctggctggtttggaggccttctctgggggctttctacatcccagttgctctgatcctgttgatcacatggatttactttctctgtgcagggttaaggctcagaggtcctctggcgcagaacccaaaagccggaaacagtcgggcttcgctggaagctggggaggagctgaggggtagtaccaggttgagaggctctggaccattattgtccgattccggctcccttcttgccaccggctccgctcgggtcggcacacccggaccgccagaagacggcgattctctatactccccaggggtgcagttgggagccctcgtgactacacactttctctatcttgccatgtgggcttgcggcgctcttgccgttagtcagcggtggcttcccagggtggtgtgttcctgcctatacggagtcgccgcaagtgctctgggcctcttcgtcttcacgcatcactgcgcaaggcgaagggatgtgagggccagttggagagcctgctgccctcccgcatctccggcagcaccacacgcccctcctagggcccttcctgctgctgcggaagatggctctccagtcttcggcgagggcccaccgtctctcaagtcctccccgagtggaagttccggccacccactggccctggggccttgtaagttgacaaatctccaactggcccaaagtcaggtttgtgaggctggtgcagctgccggtggcgagggtgagcccgagcccgcaggcacaagggggaacctggctcatcggcatcctaataacgtgcaccatgggaggagagcccacaaaagcagagctaagggtcaccgcgctggcgaagcctgtgggaagaatcgactgaaggctctgcggggaggagctgccggtgccctagagctgctgtccagcgaatccgggtcccttcacaactcccctaccgactcctatctagggagttcccggaacagccccggtgcaggattgcagctggagggggaacccatgctgactccatccgagggctcagacaccagcgccgcaccgttgtcagaggctggcagagccggacaaagaagaagcgcttctagagactcattgaagggaggcggagcgctggagaaggaaagccaccggaggtcctatccccttaacgccgctagcctgaacggggcaccaaaggggggaaaatacgatgatgtgaccctgatgggtgctgaggtggccagtggaggctgtatgaagaccggtttgtggaaaagcgagaccactgtgtag

SEQ ID NO: 223967 - DNA, 3771 bp, synthetic construct
  misc_feature 1..3771: note = Description of Artificial Sequence: Synthetic coding sequence
  source 1..3771: mol_type = other DNA
atgagaggtgcccctgctcggctgctgctccccctgctgccttggctgttgctgctgctggccccagaagcgcgaggtgcccctggttgtccgctgagcatcagatcatgcaaatgttctggagaacggcctaaaggcctgagcggtggagtgcccggacccgctaggcggagagtcgtgtgctcaggcggtgacttgccagagccacccgaaccaggactcctgccgaacggtaccgttacacttctgctgagcaacaacaaaatcaccggtctgaggaatggctcctttctggggctgagccttcttgagaagctggacttgcgtaataatattataagtacagtccagccaggcgctttcctggggctgggagaactgaaaagactggatttgtccaacaacaggatcgggtgtctgacaagcgagacttttcagggcctaccccgacttttgaggcttaatatttcgggcaacattttttcttctctgcagcctggcgtgttcgatgagctccccgctctgaaggtggtggacctgggaaccgaattcctgacatgtgattgccatttgcgatggctgctgccctgggcccagaatcgttcgttgcagctgagtgagcacacactctgcgcctacccatccgcgcttcatgctcaggctctgggctcactgcaggaggcacagctttgctgcgaaggggctctggaactgcatacacatcatcttatcccaagtttgaggcaagtggtcttccagggtgataggctaccctttcagtgttcagcctcctacctcggcaacgacacccgcattcgctggtatcacaaccgcgcacccgtcgaaggggacgaacaggctggaattttgcttgccgaatcattaatccacgattgtacctttattaccagtgagctaaccctctctcacattggggtttgggcctcaggcgagtgggaatgcaccgttagcatggcccaaggaaacgcttctaaaaaggtggagattgttgtgctggagactagtgcctcctattgccctgccgagcgagtggctaataacaggggagacttcagatggccacggactttggccggtatcacggcctatcaaagttgccttcagtatcctttcacttccgttcctctgggtggtggcgctcccggaactcgggctagtcgtcgctgcgacagagccggaagatgggagcccggtgattacagccactgtctttacacaaacgacatcacccgcgttctgtacaccttcgtccttatgcccataaatgcttctaatgcgctcacactcgcccatcagcttagggtgtatactgccgaagcggctagcttcagcgacatgatggacgttgtgtatgtagcgcagatgatccaaaaatttctggggtacgttgatcagattaaagaattagtcgaggtcatggttgacatggctagcaacctgatgcttgtcgacgagcatctcctgtggctagcccaaagagaagataaggcttgtagtcggattgtgggggctctggagcgtattggaggcgctgctctgtcgccacacgcacaacatatttcagtgaacgcgcgaaatgtggctctggaggcctatctcattaagcctcatagctatgtgggactgacatgtaccgcattccaaaggcgggagggcggtgtgccagggacgcggccagggagccccggtcagaaccctcctcctgaaccagagccccctgcagatcagcagctccggtttcgttgcactactggaagacctaatgtgtcactgagctccttccatatcaagaattccgttgccctggcatccatccaactgcctccgtcactgttttcatctcttcctgccgcactggcccctcctgtgccaccagactgtacgctacagcttcttgtgtttcgcaatggcagactgtttcactctcatagcaacacttctagacctggggcagctgggcctggcaagagacgtggcgtggccacgccggtaatcttcgccggtacctctgggtgtggcgttggtaacctgaccgaaccagtagcagtgtcactgcggcactgggcagagggcgctgaaccggtggccgcttggtggagccaggaaggacccggagaggccggtgggtggacttcggaaggctgtcagttacgctcatcacagccaaatgttagtgcgctgcattgccagcaccttggaaacgtggcagtactgatggagttgtccgcgttcccacgcgaagtgggtggagccggagcgggactccaccccgtcgtgtacccctgcaccgcgcttcttcttctctgtctgtttgccacgattataacatacattcttaatcactctagtattagggtgagtagaaagggatggcacatgttgttaaatctctgttttcatatcgcaatgaccagtgcggtatttgcaggtgggatcaccctgactaactatcaaatggtttgtcaggcggtgggcattaccttacattattcctcactgtctactctgttgtggatgggggtgaaggctcgggtgctgcataaggagttaacatggagggcaccacctccacaagagggcgatcctgctctgcccacacccagccccatgctgagattctaccttatcgccggtgggatcccgctgatcatttgcggcatcacagccgctgtgaacatacataactatcgcgaccatagcccctattgctggctggtgtggcgaccatctctgggcgctttttatatccccgtggccctgattctgcttattacctggatctactttctgtgcgcagggttgagattgcgtggcccactggctcagaaccctaaagcaggtaatagccgcgcttccttggaagcgggagaggaactgcgtgggtctacaagattacgcggaagtggccctctgctttccgattcaggaagtttgctcgctaccggatccgccagggtaggaacccctggaccaccagaggacggcgatagcctgtatagccccggagtgcagaggggagcaggcgatcacgcccttccagtgcttggccacgtaggcctgagaggaagcggcagcgtccctgccctggctgcgccaggtggagtgcagctcctggttcggggaggcagcttgcgcccagggccactgcggttgcactcacctttgtgccaggcagaggggagagaatcactggtggcacggctcctcccaccttgtttgtcgagagggcctccatgccccgcaccaggtcccgctcggcgtagaagaggcagattcccgggagtgcggggaggccctccactgccccaggtactcccgaagcgccagcagagaccctccgccggttccgggcctctgcaagcccatcagcccgctgcaggacctgagtccggcgtgcgaggagggggaggcggtcgacgaggcagacgcgctggtgctgggggacatccgggaaaacctcggcctccaccccctcagcagagagcccctagagcctccggcgctcaagaacctggccagggtacccctcgcggaggcggactgcgacaggaacctgcgcaaggacctgctaggggaagggggggaggggcaggcgctgccgttcagcgggagcgacagtctgcacagcagccccacagacagcttccgggacagcagccccagcagccaggtagacgtcccgctgcaggcaggcgggcacacgcccacgcagtacggggtcagcgacaccaacgccgagccgctttctag

SEQ ID NO: 223968 - DNA, 3966 bp, synthetic construct
  misc_feature 1..3966: note = Description of Artificial Sequence: Synthetic coding sequence
  source 1..3966: mol_type = other DNA
atggagcctcccggacgacggagaggcagggcacagcctcctctgctgctgccacttagcttgctggcgctgctggcccttctaggcggaggcggaggcggaggtgcagctgctctcccggctggttgtaagcacgatggcaggccacgtggcgctggcagggcagctggcgctgcagagggtaaggtggtgtgcagctccctggagctggctcaggttcttccaccagacacactccctaaccggaccgtcacactgatactatctaacaataaaatttcggagctgaagaacggcagttttagcggcctctccttgctcgagcgcctggatcttcgcaacaacctcatatcctcaatcgaccctggcgctttctggggactctccagcctgaagagactggatttaaccaacaaccggattggctgtcttaatgcggacatttttcggggtctaaccaatctcgtgcggttgaatctctctggcaatctgttcagttcactgtctcaggggactttcgattacctggcttcactgcggtcgctcgaatttcagacagaatacctgctgtgcgattgcaacatcctgtggatgcatcgctgggtaaaggagaaaaacatcaccgttcgcgatacaaggtgcgtctacccaaaaagcttgcaggctcagccggttacaggggtgaaacaggagcttctgacctgtgatccacccctggaactgcccagcttttatatgactcccagtcacaggcaagtggtcttcgaaggggacagcctaccattccaatgcatggcctcctatatcgatcaggatatgcaggtgctgtggtatcaggacggacgtatcgtcgaaacagatgaatctcaaggcatttttgtcgaaaagaatatgattcacaattgttccctgattgcaagcgctctcacaatcagcaatatccaggccggttccaccggtaactggggatgtcacgtacaaacgaagaggggcaacaatactcgcacggtagacatcgtggttttggaaagttcagcgcaatattgtccacctgagagggtggtcaacaacaagggcgattttcgctggccaagaaccctagcaggaataacagcctacctgcaatgtactcgaaatacccacggctccggaatctacccaggcaatcctcaggacgagaggaaagcgtggagaaggtgtgacagaggtggtttctgggccgatgatgactacagtcggtgccaatatgcaaatgacgttaccagggtattgtacatgttcaatcagatgccgttgaatctgaccaacgcggtcgcaactgctcggcagctactggcatacacagttgaggctgcaaacttctcagacaaaatggacgtaatatttgtggcagagatgatagagaaattcggcaggttcacaaaagaagaaaagtccaaagaactgggagacgtcatggtcgatattgcctctaacatcatgttggcagatgagcgggtgctgtggctcgcgcagagagaagccaaggcctgttcaagaattgtgcaatgcctgcagaggattgctacataccggctggcaggaggcgctcatgtctacagcacctacagcccaaacatcgccttggaagcttacgtgataaagtccacaggtttcactggcatgacctgcaccgtgtttcaaaaggtggccgcatctgatagaaccgggctttcagattacgggcgtagggaccctgaggggaacttagacaaacagctgtctttcaagtgtaacgtgagcaacaccttttcaagtctggcccttaaaaacactattgtggaagcaagcattcagctccctccatctctattctcgcctaagcagaaaagggagcttcgaccgactgatgattccctgtataaactgcagttgatagcctttcggaatgggaaattgttccctgctacaggaaactctacaaatcttgccgacgacggaaaacggaggacagtggtgactcctgtcattctaacaaagatcgacggtgttaatgttgatacccaccatattcccgtgaatgtaacgcttcgccgtatcgcgcacggcgctgacgccgtcgccgcaagatgggattttgaccttctcaacgggcagggtggttggaaaagcgatgggtgccatattctgtacagcgatgagaacatcaccaccattcagtgttacagcctcagtaattacgccgtccttatggacctgaccgggagcgagctgtatacccaggcagcctctctgctccaccctgtcgtatataccaccgctatcatcctattactgtgtttgctcgcggtgatcgtgtcatacatctatcatcactccctgatccgcatttcactgaagtcatggcacatgctcgttaatctgtgctttcacatcttcctcacatgtgttgtgttcgttgggggtattacgcaaacacgcaacgcatcaatctgccaggcggtgggaatcatactgcactacagcaccctggcaaccgtactttgggtgggagtgaccgctcgaaacatctacaagcaggttaccaagaaagcaaaacggtgccaggatcccgacgagccccctcccccaccacggcctatgctgcggttttacctgatcggcggaggcatccctattatcgtctgcggcattaccgctgcagcaaacatcaaaaattacgggtctagaccgaatgcgccttattgttggatggcatgggagccatctttgggggcattttacggtccagcttcgttcatcacatttgtgaattgcatgtactttcttagcatctttattcagcttaagagacatccggagcgtaagtatgagctgaaggagccaaccgaggaacagcagagactggcagctaatgagaatggcgagatcaaccatcaagattctatgtcgttatctttaatctcaacgtccgccctggagaatgagcacacttttcactctcagcttctgggagcctctctgaccctattgctgtacgtggccctgtggatgttcggggcactggccgtttccttgtattaccctctggacctggtgttctcttttgtgttcggggctacgtcccttagcttctccgctttcttcgtggtccaccattgcgtgaatagggaggatgttcggctggcgtggataatgacctgttgtccgggaagaagttcgtattctgtgcaggtgaatgtgcagccgccaaactccaacggtactaatggcgaggctccaaaatgcccaaattcaagcgccgagtctagctgtaccaacaagtcagcctcctctttcaaaaattcaagccagggctgcaaactgaccaatttgcaggccgctgccgctcagtgccatgccaattcactgccgcttaacagcactcctcagctggacaattcactgaccgaacacagcatggataacgatattaaaatgcatgttgcccctctcgaggtgcagttccgtactaatgtgcactcatcacgccatcataagaataggtcaaaaggacatcgcgcttctagactgacagtgctgcgtgaatacgcctacgacgttcctacatctgtggagggaagcgtgcaaaacggtctgcccaagagtcgcctgggtaataacgagggacatagtcgctcaagacgggcttatttagcgtacagagaacgccagtacaacccgccacaacaggattccagcgacgcttgttcaaccctgcctaagtcttctagaaactttgagaagccggtgtccacaaccagcaagaaggacgccttgcggaagcccgctgtcgttgaattggaaaaccaacagaaatcttatggccttaaccttgccattcagaatggccctatcaagtcaaatggacaggagggccctttattaggaaccgactctaccggtaacgttaggaccgggctctggaagcatgaaaccactgtttag

SEQ ID NO: 223969 - DNA, 1851 bp, synthetic construct
  misc_feature 1..1851: note = Description of Artificial Sequence: Synthetic coding sequence
  source 1..1851: mol_type = other DNA
atggagccaccagggcgaaggagagggagggcgcaaccccctttgctcctccctctgagtctcttggctctgttagccttactgggcggagggggaggtggtggtgccgctgcactgcctgcgggttgtaagcacgatggcagacctaggggagccggacgtgctgctggggcagcagagggtaaagtagtatgttcctccctggagctcgcacaagtgctgccacccgatacactccctaacagaacggtgacgctgatcctcagtaataataagatttcagagctgaaaaacggaagcttcagcggactctccctgctggaacgcctggatctaagaaataatcttatctccagcatcgatcccggagctttttggggcctgtctagcttgaaaagattggacctgactaacaatagaattggctgcctgaatgctgacattttcaggggactgaccaatctcgtgaggctgaatctcagcggaaacctgtttagcagtttgtcccagggaaccttcgactacctggcctcattacgcagtcttgaattccagacggaatatctgctctgcgattgtaacattctctggatgcaccgatgggtgaaggaaaaaaatattactgtgagggatacccgctgtgtctatccaaagagtctccaggcgcaaccggtgaccggtgtaaaacaggagttactgacgtgtgaccctcctctcgagcttcccagcttctacatgacaccttcacatcgtcaggtggtgtttgagggcgattcactaccattccaatgcatggctagctacatcgatcaggacatgcaggttctatggtaccaagacgggaggatagtggagacggatgaatcacagggcatcttcgtcgagaagaatatgattcataactgcagcctgatcgcaagcgctctcacgatttccaatatccaggccggaagtaccggaaactggggttgtcacgtacagactaaaagggggaacaacacccggactgtggacattgtagtgctcgaatcaagcgcccagtattgccccccagaaagagtagttaacaacaagggcgacttccgctggccacggaccctggccggaattacagcctatctccagtgtactcggaacactcacggttcaggaatctatcccggaaatcctcaggacgagcgcaaagcttggagaagatgtgaccgcggagggttctgggccgacgacgattattctaggtgccaatatgcgaatgacgtgactagagtgctctatatgtttaatcagatgcctctgaatctcacgaacgcggtcgcaactgccaggcagttgttggcctacacggtcgaagccgcaaacttcagcgataaaatggacgtcatttttgtggcagagatgattgaaaaatttgggaggtttactaaagaggaaaagagcaaggaactgggagatgttatggtggacatagcctcaaatattatgctagccgacgagcgcgtactttggctggctcaacgtgaagccaaggcttgtagcaggattgttcaatgtttgcagagaattgctacctacaggctagcgggaggtgcacacgtgtattccacatattctcctaacattgccctggaggcgtacgtgatcaaaagtacaggatttactggaatgacctgcaccgtgtttcagaaagtggccgcatcagacaggacaggattatcagactacggccgacgggaccccgagggcaaccttgacaaacagttgagttttaaatgtaacgtgtcgaatacttttagctcactggccctcaaagtgtgttacatactgcagtccttcaagactatctatagctag

SEQ ID NO: 223970 - DNA, 1146 bp, synthetic construct
  misc_feature 1..1146: note = Description of Artificial Sequence: Synthetic coding sequence
  source 1..1146: mol_type = other DNA
atgcccctgaagagaaacaatagtaaatacccgcctctggaactgccttccttttatatgactccctcccacagacaggtagtattcgaaggagactcactgcccttccagtgtatggccagttatattgaccaggacatgcaggtgttgtggtatcaggacggcagaatcgtggagactgacgagagtcagggcatttttgtggagaaaaacatgatacataactgcagcctgatcgctagtgctctcacaatttcaaacattcaagcaggctccacaggaaactggggctgtcacgtccagacaaagaggggtaataacactagaactgtcgatatagtggtcctggaatcttccgcccagtattgccccccagagcgggtagtgaacaacaagggtgattttcgatggccacgaacgttggccggtattacagcttatttgcagtgcactcgtaacactcatggcagcggaatataccccggaaacccccaggatgagagaaaggcctggcggcgatgcgacagggggggtttctgggccgacgacgattactctagatgccaatacgcgaacgatgtaaccagggttctatatatgtttaatcagatgcccctcaacctgaccaacgcagtcgcgactgccagacagctgctggcctacactgtcgaggctgctaacttctcggacaagatggacgttattttcgtcgcagagatgatagaaaagttcggcaggtttacaaaagaggaaaagagcaaagaacttggcgacgtgatggtagacattgcttccaacatcatgctggccgatgagagagtgttgtggcttgcgcaaagagaagccaaagcttgtagccgtattgtgcaatgcctgcaacggatagccacctaccgcttggccggtggggcacacgtgtattctacctacagtcccaatatagcccttgaagcatacgtgatcaaatccacagggtttaccgggatgacctgcactgtgttccaaaaggtggcagccagcgatagaacgggcctgtcagattacggtagacgcgatcccgagggaaaccttgataaacagctgagttttaaatgtaacgtgtccaatacattcagcagcctggcgcttaagggaaaatttcgatag

SEQ ID NO: 223971 - DNA, 2724 bp, synthetic construct
  misc_feature 1..2724: note = Description of Artificial Sequence: Synthetic coding sequence
  source 1..2724: mol_type = other DNA
atgccaaccgcggcagccccaataatctcaagcgtgcagaaactggtactttacgagactcgcgctcgatactttttggtaggaagcaacaatgctgaaacaaagtacagagtgctgaagatcgacaggacagagcccaaagatctggtgataattgatgaccgccacgtgtacacccagcaggaagtgagggagctcctgggccgactggacctgggaaatagaacaaaaatgggacagaaaggcagttccggtctttttagagccgtctcagccttcggggtggttgggttcgtgagattcctggagggatactatatagtgttgatcaccaaaagacgcaagatggcggacatcggcggacacgccatctacaaagtggaggacacgaatatgatctacattccgaatgacagcgtcagggttacccatccagacgaagccaggtatctgcggatatttcagaatgtggatctctcatcaaacttttacttctcttattcatacgatctctcacacagcctgcagtataacctgacagtgcttaggatgcccttggaaatgctgaagtcagaaatgacacaaaaccgacaagagagctttgacattttcgaagacgagggactgatcacacaaggcggtagtggcgttttcggcatttgttcagaaccatacatgaaatacgtgtggaatggggagctgctggatatcataaagagtaccgtgcatcgagactggcttctttacattatacacgggttctgcgggcagtccaaacttctgatatacggcaggcccgtgtacgtcaccttaatcgccaggcggtcctccaaatttgctgggactcgctttctgaaaagaggagccaattgtgagggggacgtggctaacgaagtggaaacagaacagatcctgtgcgatgcctctgtgatgagctttacagcaggaagctatagttcttacgtccaagttcgtggttccgtccccctgtattggagtcaggacatctcgaccatgatgcccaaaccaccaattaccctcgaccaggctgacccctttgcgcacgtggctgctttacatttcgaccagatgtttcagaggttcgggtctcccattattatcctgaatctggtgaaggagcgggagaagaggaagcacgagagaatactttcggaagagctagtggccgcagtgacctatttaaatcaattcctccctcctgaacacaccatcgtgtatattccctgggacatggctaagtacacaaagagtaagctctgcaacgtcctcgatagacttaatgttatcgctgagtctgtggtgaaaaagacgggattctttgtgaacaggcccgacagttattgctccattttacgtccggatgagaaatggaatgaattggggggatgcgttattccaaccggtcgcctgcaaactggcatactccgcaccaattgcgtcgactgtttggacaggactaacactgctcagtttatggttggaaagtgtgcacttgcctatcagctgtattcactgggtcttatcgataaacctaatttgcaattcgacaccgacgccgttcgactgtttgaggaactctacgaggatcacggtgacaccctgtcgctgcagtatgggggaagtcagctggtccaccgggtgaagacctaccggaagatagcaccctggacgcagcactctaaagacattatgcaaactctgagcaggtattattccaacgcgttcagtgatgcggataggcaagatagcatcaacctctttctgggcgtgtttcaccctactgaaggcaaaccccacctgtgggagctgcctaccgatttctacctgcaccacaagaacactatgcggcttcttcccacacgacgctcctacacttactggtggactcccgaagtcattaaacacctgcctctgccatacgacgaagtgatttgcgccgtaaacctgaaaaagctcatagtcaagaaatttcataagtatgaagaggagatcgacatccataacgagttcttcaggccttacgaacttagtagctttgacgataccttttgcttggcaatgaccagcagtgcccgtgacttcatgccaaaaacagttggcatcgaccctagtccgttcaccgtgcgcaaaccagacgagacaggcaaatcggtgttgggaaacaagagtaaccgcgaggaggctgtactccagcgaaaaaccgcggcatccgcgccaccccctccttcagaagaagcggtgagctcatcaagcgaggatgattccggcacagatcgtgaggaggagggtagcgtgtcccaacggtcgacaccagttaagatgacagacgctggggattctgcaaaggtaaccgaaaacgttgttcagcctatgaaggagctgtatggaataaatctgagcgatggtctatccgaggaagatttcagcatttactctcggtttgtccagttgggacagtcccagcataaacaagataagaacagccagcagccttgttccaggtgctcagacggtgtgatcaagctgacacccatctctgcattttcccaagacaacatatatgaggtccagccgcctcgggtggatcgaaagtccactgaaattttccaggcccacatccaggcatcccaaggcatcatgcagccactgggcaaggaggatagctctatgtaccgagagtatatccgtaacagatatctttag

SEQ ID NO: 223972 - DNA, 3582 bp, synthetic construct
  misc_feature 1..3582: note = Description of Artificial Sequence: Synthetic coding sequence
  source 1..3582: mol_type = other DNA
atgatgttcagatctgataggatgtggtcctgtcactggaagtggaaaccatctcctctgctttttctgtttgccctctacataatgtgcgtacctcacagtgtttggggatgcgccaattgtcgggtagtgctctcaaacccttccggcacattcacaagcccctgctacccaaatgattatcctaactcccaggcctgcatgtggacactgagggcgcctacaggctacatcattcagatcacgttcaacgattttgacatcgaagaggctcccaactgcatctatgacagtctctcgttagacaacggggaaagtcaaactaagttttgtggggctaccgcgaaaggactgagctttaatagctctgctaacgagatgcacgtcagtttcagtagcgatttctctatccagaagaaaggatttaacgccagctatattcgcgtagcggtaagtctgaggaaccagaaagtcattctcccccagacgagcgacgcttaccaggtaagtgtggctaaaagcattagtatcccagagctttcagcctttacgctatgctttgaggcgaccaaggtgggccatgaggactctgattggactgctttcagctactctaatgcaagtttcacccagttactgagcttcggaaaggccaagagcggttacttcctttccatctcggactcaaagtgcctattgaataacgccttacccgtcaaagaaaaagaggacatctttgcagagagctttgagcagttgtgcttagtctggaacaatagtctcggatccatcggcgtcaatttcaagaggaattatgaaacagtgccatgcgacagcaccatcagtaaagttatccctgggaacgggaagctgcttttgggctctaaccagaacgagatcgtaagcctgaagggggatatttacaactttcggctgtggaactttacaatgaatgccaaaattttgtctaatctgagctgtaatgtaaaaggaaacgtcgttgattggcagaatgacttttggaacataccaaacctggccttgaaagccgaatctaacctgtcgtgtggcagttatctaattcccctgcccgcagcagagttagcttcctgtgccgaccttggcacactgtgccaggatggtataatctacaggattagcgtagtcatccagaatatcttgcgccaccctgaggtgaaagtccagagtaaggtggctgagtggctgaactccacgttccagaattggaactacaccgtatacgtagttaacatctcattccatctgtccgccggtgaggacaagatcaaagtgaagaggtcactcgaggacgaacctagactagtgttatgggctttgctggtctataatgctacaaataacaccaatttggaagggaaaatcattcagcagaagctcctaaagaacaatgagtcactggacgagggcctcaggctccatacggtgaatgttaggcaactgggccactgcctggccatggaagagccaaagggttactactggcccagcattcagcccagcgagtatgtcttgccatgtcctgacaagcccggtttctccgcttcccggatttgtttttacaatgccacaaacccgctggttacttattggggtcctgttgatatcagcaattgcctgaaggaagccaacgaggttgccaaccagatcttgaatttgactgcggatggccagaatctcacttccgccaatattacaaatatagtggaacaagtgaagcgcattgtcaataaggaagagaacatcgacatcacacttggaagcaccctgatgaatatcttcagcaacattctaagcagttcagattccgatctcctggaaagctcgagcgaagcactgaagacaatcgatgagttagccttcaagattgatctcaactctacatcacacgtcaacatcaccactcgcaatctggccctgagtgtgagctccctgttgcctgggacaaacgcaatctcaaactttagtattggtctgccttccaataatgaatcctattttcagatggacttcgagagcggccaggttgatccccttgccagcgtgattcttccaccaaatttgcttgagaacctgtcaccagaggactctgtgcttgtgcgacgcgcacagttcacattctttaataaaacgggattatttcaggacgtgggcccacaaaggaaaactctggtttcctacgtgatggcgtgttctatcggaaatatcacgatccaaaacttgaaagatcccgtacaaataaagataaaacatactaggactcaggaagtgcaccacccgatttgcgcattttgggacttgaataaaaacaagtcctttggcggttggaatacctcaggttgtgtcgctcaccgagatagtgatgcatcagaaaccgtttgcctatgtaatcacttcacccatttcggtgttctgatggatctccccagaagtgcttcacagttagatgctcgcaacacgaaggtcttaacttttattagttacatcgggtgtggcatcagcgctatcttctccgctgcgacgctgcttacctacgtggcttttgaaaagctgcggagggattaccctagtaaaattctgatgaacctgtcaaccgcattgctgtttttgaatcttttgttcctattagatggctggatcacctcatttaacgtggacggcctctgtatcgcagttgccgtgctcctgcactttttccttctggctacttttacttggatgggtttagaagccatacatatgtatatagcgctcgtcaaagtcttcaatacatacatccggcgatacatcctgaaattctgtatcataggatggggtctacctgctttggtggtaagcgtcgtgctggcgtcgcggaacaataacgaggtgtacggaaaagagtcttatggcaaagagaagggtgatgagttctgttggatccaggatcccgttattttctacgtaacgtgcgccggatacttcggcgtaatgttcttcttgaatattgcgatgttcatcgttgttatggtgcagatttgtggcagaaatggaaaaaggagtaacagaactctgcgggaggaagtactccgaaacctccggtccgtggtgtcattgacgttcctgctcggcatgacctggggctttgccttctttgcctggggcccactcaacatccccttcatgtatctgttctcgatatttaattctctccaggggttattcatcttcattttccattgcgctatgaaagagaatgtgcagaagcagtggcggcagcacctgtgctgcggacgctttaggctcgctgacaactccgactggtccaagacagctactaacatcatcaaaaagagttccgacaatctaggaaaaagtttgagtagtagttcaataggcagcaactcaacatacctcacctctaagtcaaagtcgagctcgacaacctacttcaagcgcaactcccatacagacaacgtctcatacgagcattcctttaacaaatctggcagtttaaggcagtgtttccatggccaagtgctcgtaaaaaccggcccatgttag

SEQ ID NO: 223973 - DNA, 3669 bp, synthetic construct
  misc_feature 1..3669: note = Description of Artificial Sequence: Synthetic coding sequence
  source 1..3669: mol_type = other DNA
atgatgttccgatccgacagaatgtggtcttgccactggaagtggaagccaagtccacttctgtttctgttcgctctatacatcatgtgcgtgccccattccgtgtggggctgcgccaactgccgcgttgttctttcaaaccctagcggcacgttcacctctccatgctacccaaatgactatccgaatagtcaagcctgcatgtggaccctgcgcgctcccacagggtatattattcagatcacttttaacgattttgacatagaggaagctcccaactgcatatacgactcactatcgttggacaacggagagtcacagactaagttctgtggagccaccgctaagggcctgtcattcaacagttcagccaacgaaatgcacgtgagtttctcctccgacttctccatacaaaagaagggcttcaacgccagctacatccgggttgctgtatccctgcgcaaccaaaaggttatccttcctcaaacctccgacgcctaccaagtatcagtagccaagagcatctcaatccctgaactctcggcatttaccctgtgcttcgaggctacaaaagtggggcatgaggacagtgactggacagcctttagttacagcaacgcatccttcactcagctgctgagtttcgggaaggcgaaatctgggtacttcctgtctatttctgactccaagtgcctcctgaataatgcgcttccggtgaaggagaaggaggacatctttgccgagagcttcgagcaactgtgtttggtgtggaacaactcacttggttcaattggcgtgaatttcaagcgaaactatgagacagtgccctgtgactcaacaatctcaaaggttatccctggcaatggcaagctgctgcttggaagtaatcagaacgagatagtctcgctcaagggagatatatataatttccgcctgtggaattttacaatgaacgctaagattctttcgaacctaagctgcaatgttaaaggaaatgtagtggattggcagaatgacttctggaatatccccaacttagccctgaaagctgagagcaacctgtcctgtggaagctacctgatcccacttccagctgccgaattggcgagttgtgcagatcttggaactctgtgtcaagacggaataatttaccgtattagcgtggtgatccagaacatactccgccaccccgaagtgaaggttcagtccaaggtagctgagtggctgaactctactttccaaaactggaattataccgtttatgtggtgaacatttctttccacctgagcgccggagaggataagatcaaggtgaagagatccctggaggacgagcctcgcctggtcctctgggccttgcttgtctacaatgcaacgaataacaccaacctggagggtaagattattcagcaaaaacttcttaagaacaacgaaagtcttgacgaaggtctgaggcttcatacagtaaacgttcgccagctggggcattgtcttgctatggaggaaccaaagggctactactggcccagcatccagccctctgagtacgtattaccatgtcccgataagcctggatttagcgctagtcggatttgcttctacaatgctaccaaccccttagttacctattggggtccagtcgacatatcaaattgtctcaaggaggcaaacgaagtggccaaccagattctgaaccttacggctgacggacagaaccttaccagtgccaacattactaacattgtcgagcaggtgaagaggatcgtgaacaaggaggagaacattgacatcaccctgggtagcactctgatgaatattttttctaacattctgtcctcctcagacagcgaccttctggagtctagctcagaggcccttaagacgatcgatgagcttgcttttaagattgatttgaacagcactagccacgtaaatattaccacacgcaacctggccctatccgtgtcctccctgctcccaggtacgaatgcaattagtaacttttctataggattgccttctaacaatgaatcatatttccagatggatttcgagtccggacaagtcgaccctctggcttctgttatcctgcctcctaacctcctcgagaatctctcccccgaagattctgttcttgtcagacgggctcagtttaccttctttaataaaactggcctgtttcaggacgtaggccctcagcggaaaaccctggtgagttacgttatggcttgctcgataggcaatatcaccatccaaaacctcaaagatccagtccagatcaagatcaaacacacacgcacccaggaggtccaccatccgatctgcgccttctgggacctaaacaaaaataagagcttcggtggttggaatactagcggttgcgtggcacatagggattcagacgcttcggaaaccgtgtgtttatgcaatcactttacccactttggcgtcttgatggacctgccgcgtagcgcctcacaactcgatgcacggaataccaaggtcctcacgttcatttcctatattggttgcggaatcagcgccatcttttcagcagcaaccctgcttacttatgtagcctttgagaagcttaggagagattatcccagtaagatcctcatgaatctttccaccgctctcctgttcctgaatttgcttttcctgctggatggttggatcacatccttcaacgtagatggcctttgtattgccgtcgccgttctcctgcacttctttcttcttgcaactttcacatggatggggctcgaggccatccatatgtatattgctctggtgaaagtgtttaatacctatattaggcgatatatcctcaagttctgtatcataggatggggactgccagccctggtggtctctgtcgttctggcaagcaggaataacaatgaggtgtacggaaaggaatcctacggaaaggaaaagggagacgaattctgctggatccaagaccctgtcatcttctatgtgacttgtgcaggatatttcggggtgatgttcttccttaacatcgcgatgtttatcgttgtcatggtgcagatctgtggacggaacgggaagaggtctaaccggaccctgcgggaagaagtgcttcggaacctaagaagcgttgtatctctcacattcctgctcggtatgacttggggcttcgcattcttcgcctgggggccattaaacattcccttcatgtacctctttagcatcttcaattcactgcagggactctttatattcatctttcattgtgccatgaaagagaacgttcaaaaacaatggcgtcagcatctatgctgtgggaggtttcgtctggccgataacagcgactggtcaaaaaccgctacgaatattatcaagaaatcctcagataatttggggaaatcactgtcgtcttcctccatcggtagcaacagcacataccttacttctaagtctaagtcttcctcaaccacgtattttaagaggaattcacacaccgattctgcctccatggacaagtctctctccaagctcgcccacgccgacggggaccaaacaagcattatacctgtacatcaggtgatcgataaagtgaagggatactgtaacgcacatagcgacaacttctacaaaaacatcattatgagcgacacgttcagccatagtacaaagttctag

SEQ ID NO: 223974 - DNA, 3753 bp, synthetic construct
  misc_feature 1..3753: note = Description of Artificial Sequence: Synthetic coding sequence
  source 1..3753: mol_type = other DNA
atgatgtttcggtcagatcgtatgtggtcttgtcactggaagtggaaaccttcacctcttttgtttttgttcgcattgtacattatgtgcgtgcctcatagtgtttggggatgtgctaactgtagagtagtgctctctaatccgtcaggcactttcacttcaccctgctatccaaacgactacccaaacagtcaggcatgtatgtggaccttgagagcccctaccggatatattatccagattacctttaatgactttgatatcgaagaagcaccaaattgcatttatgattccctgagcttggacaatggcgaaagccagaccaagttctgcggggctaccgccaaggggctctccttcaactcatcagctaatgagatgcacgtcagtttctcttctgactttagcattcagaaaaaaggattcaatgcttcttatattcgcgtcgctgtgagcctgaggaaccagaaggtcattctccctcaaacctcggacgcttatcaggtgtccgtggccaaatcaatcagcataccagaattgtccgcatttacactgtgtttcgaagcgactaaggtcggtcacgaagatagtgactggactgccttcagttacagtaatgcatcttttacacagctacttagctttggcaaagccaagtcaggttacttcctaagcatttcggatagcaaatgcctcctgaacaatgctctgcctgtgaaggaaaaggaggacatcttcgccgaatcgtttgaacaactgtgcctcgtctggaataactcactcgggtccataggggttaacttcaaacgtaattacgagactgtaccctgtgattctaccatctccaaggtcataccaggcaatggcaagctactcctcggctcaaaccagaacgaaattgtgagtctgaagggagacatctacaactttagactatggaacttcacgatgaacgccaagatcctctctaacctctcctgcaatgtgaagggcaatgtggtcgactggcagaatgacttctggaacatcccaaacctggctctgaaagccgagtccaatttgagttgcggttcctacttgatcccattgccggcagccgagctggcatcatgtgccgacctgggaacgctttgccaggcaacagtgaatagtccatcaactacgccgcctaccgtgaccacaaacatgccagtgacaaatcgcatcgataaacagagaaatgacggcattatttatcggatttctgttgttatacagaatatcctccgccaccctgaggtgaaggtgcagtctaaggtcgctgagtggctcaactcgacttttcagaactggaattataccgtatacgtcgtaaatatctcattccatctgtccgccggagaggacaaaatcaaggtgaaacgatcgttggaggatgagcccaggctggtgctgtgggcgctgctagtatacaacgcaacaaacaatacaaacctcgaagggaaaatcattcaacagaagctccttaagaataatgagagcctcgacgagggcctgcggctacacacagtcaatgtacgccagctcggacattgccttgccatggaggaaccaaaggggtattactggcccagcattcaacccagcgagtatgtcttgccttgccccgacaagcctggatttagcgcctcacgtatctgcttctataatgcgacaaaccccttggttacctactggggccctgtcgacatttcaaactgcctcaaggaagcgaatgaggtggcgaaccagatcctgaacctgaccgcagacggccagaatctcacatcagcgaatattacaaatattgtggagcaggtgaagcggattgtcaacaaagaagaaaacattgacatcactttgggttccacacttatgaacattttcagcaatattttatcctcctctgacagtgacttgctggaatccagcagcgaggcactaaagacaatcgatgagctggcatttaaaatcgacctgaattcaaccagtcacgtcaacataacaactcgcaacctggcccttagcgtctcgagcttgctgccaggtacaaacgctatcagcaatttcagtatcggcctgccgtccaataatgaatcttacttccagatggactttgagtctgggcaggtagatccactagcttctgtgattctgccaccaaacctgctcgaaaatctctcccccgaggattccgtgctggttaggcgcgctcagttcacctttttcaacaaaaccggactcttccaggatgtgggcccacaaagaaaaacgcttgtttcgtatgtgatggcctgttctatcggtaacataaccatccagaacctcaaagatccggtgcagatcaaaatcaagcacaccaggacccaggaggtacaccatcccatctgcgccttttgggacctgaataagaataaatcattcgggggatggaatacttccggatgcgtcgcccaccgagattcagatgcctctgagaccgtatgcttgtgtaatcattttacccacttcggtgttctaatggatctgcccaggagcgcaagccagttggacgctcgaaatactaaagtcctcacttttatttcctacatcgggtgcgggatttccgccatattcagtgccgctactctcctgacatacgtggcttttgaaaagctgcgcagagactatccttctaaaattctgatgaacctgtctactgctctcctcttcttgaatctgcttttcttgctcgacggctggattacgtcatttaatgtggacgggctctgtattgcagtcgcagtactcttgcacttttttcttctcgccacattcacttggatggggcttgaagccatccatatgtacattgctctggtcaaggtgttcaacacgtatatcaggagatacatattgaagttctgtattattgggtggggcctccccgcacttgtcgtttcagtggtgctggcctcaaggaataataatgaggtatacggcaaggaaagctacggaaaagaaaagggtgacgagttctgttggattcaggatcctgttattttctacgtgacctgtgctggatacttcggcgttatgttcttcctaaacatcgccatgtttatcgtcgtcatggttcagatctgtggtagaaacgggaagagaagtaacagaaccctccgggaggaagtgctgcgcaacctgcgatccgttgtcagtctaacatttttattaggcatgacatgggggttcgccttcttcgcctggggccctctaaatattccttttatgtatctgttctccatttttaattctctgcagggcttgtttatctttatttttcactgtgcaatgaaagagaacgttcagaaacagtggagacagcatttgtgttgtggcaggttcaggctcgccgataatagtgactggtcaaagaccgccacgaacatcatcaagaaatcgtcagataacctgggcaagtcactgtccagcagtagtattggatctaattctacttatttgacctccaagagtaaaagttccagcactacctacttcaaacgcaattctcatacagattcagcaagcatggacaaaagcctgtctaaacttgcgcatgcagatggcgaccagacctcaattatccccgtgcatcaggtgatcgacaaagttaaaggatattgcaacgcacacagcgataacttctacaagaatattatcatgtctgataccttctcccactccactaaattttag

SEQ ID NO: 223975 - DNA, 2394 bp, synthetic construct
  misc_feature 1..2394: note = Description of Artificial Sequence: Synthetic coding sequence
  source 1..2394: mol_type = other DNA
atggcgtcttgtcgcgcttggaacctcagagtgctggtggcagttgtttgtgggctgctgacgggaataattctggggctgggcatctggcggattgtcattaggatccagcgcggtaagagcacctctagtagttccacacccactgaattctgcagaaatggcggtacatgggagaacggacgctgtatatgcactgaggagtggaagggtctgagatgcacaatagcaaacttctgtgaaaatagtacctatatgggcttcacctttgctcggatccctgtcggcagatatggtcccagtctccaaacatgcggaaaggatactcctaacgcaggtaacccgatggctgtgcggttgtgctccctctcattgtacggcgaaatcgagctacagaaagttaccattggtaattgcaacgaaaaccttgagacattagaaaagcaggtgaaagacgtcacagcccctctgaacaacattagctccgaagtccagattctgacttccgatgccaataagctcaccgccgagaatattacctcagccaccagggtggttggacagatcttcaacacatccagaaatgcctcaccagaggcaaagaaggtcgctatagtgaccgtgtcacagctgctcgacgcaagcgaagacgccttccaacgggtggctgcaaccgcgaacgatgacgccctgacaacacttatagagcaaatggaaacatactctctgtccctcggcaatcagagtgtggtggagccaaacatagccatccagtctgccaacttcagctccgagaacgccgtgggaccttcaaatgtaaggttcagcgtccaaaagggcgcttccagtagcctggtgagcagctccacattcattcacaccaacgtggatggccttaacccagatgcccaaacagagctccaagttctgctgaacatgacaaagaattataccaagacttgtggcttcgtggtttaccaaaacgacaaacttttccagtctaaaactttcactgctaaatccgacttctcccaaaaaatcatctctagcaagactgacgaaaatgagcaggatcaatccgcatccgtggacatggtgttctctcccaagtataaccaaaaagaattccagctatattcttacgcctgcgtgtactggaatcttagcgcaaaggattgggacacttacggatgtcagaaggacaaggggaccgacggttttctgaggtgcaggtgtaatcacaccactaacttcgcggtcctaatgaccttcaagaaagattaccaatatcctaaatcactggatattctctccaatgtgggatgcgccttatccgttactgggctggccttgacagttatctttcagattgtgactagaaaagtgaggaaaacaagtgtgacctgggtgctggtgaacctgtgtatctcaatgctgatattcaatctattgtttgttttcgggatagagaattccaataaaaatcttcagacgtctgacggggatatcaataatatcgattttgacaataatgatataccacgtaccgacactatcaatatcccaaatcctatgtgcactgctatagcagcgctgctgcattattttctgctcgtgacctttacctggaacgctctctcagctgctcaactgtattatctgcttatcaggacaatgaaaccactcccgagacactttatccttttcatatctctgatcggctggggtgtgccagctatcgtcgtggccataacggtcggagtgatatactctcagaatgggaataatccacaatgggaactggattaccgtcaagaaaaaatctgctggctcgccattcctgagcctaacggcgtgatcaagagccccctactctggagtttcatagtcccagtaacaattattttgatttccaatgtggtcatgtttatcactataagtataaaggtcctgtggaagaataatcaaaacctgaccagcaccaaaaaggtgtcttcaatgaaaaaaattgtgtccacactttccgtggcggtggtattcggaatcacgtggatcctggcctacctcatgctggttaacgatgattcaattaggatcgtgttttcctacatcttttgcctgtttaataccactcagggactccaaattttcatcttgtataccgtacggacgaaggtcttccagagcgaagcatccaaggtgttgatgctcctttcgtcaatcgggaggcgcaaaagcctccctagtgttaccaggccaaggctgagagtgaagatgtacaacttccttaggagtttgccgaccctacatgagcggttccgtctattggagacaagtccgtcaacagaggaaattactctgagcgaaagcgacaatgcgaaggaatccatctag

SEQ ID NO: 223976 - DNA, 1509 bp, synthetic construct
  misc_feature 1..1509: note = Description of Artificial Sequence: Synthetic coding sequence
  source 1..1509: mol_type = other DNA
atgccagtgaagatgctgtttaaagaactccttcttctcttgatgatgatgcctctgcaacactacacaaagacctgtgggtttgtggtgtaccagaatgataagctcttccaatcaaaaaccttcactgctaaatccgacttctctcagaaaatcatatcttcaaaaacggacgaaaatgaacaagaccagtctgcatcagtagatatggtgttctcaccgaagtacaatcagaaagaatttcagctctattcttacgcctgcgtctactggaacctgtcagccaaagactgggacacgtatggctgccagaaggataaaggaaccgacggctttctgagatgtcgctgtaaccatacaacaaatttcgcggtactcatgactttcaagaaggactaccagtatcccaagagcttagatatcctgtccaacgtgggctgcgccttaagcgtgaccggtcttgcactcactgtgatttttcaaatcgtgactagaaaggtccgcaagacgtctgttacctgggtgttagtgaacctgtgtatatccatgctgatcttcaacctccttttcgtcttcgggatcgagaacagtaacaaaaatttgcaaacctcggacggcgacattaataatattgacttcgataataatgacattccgaggaccgacactattaatattcctaatccaatgtgcacggcaatcgccgctctactacattattttctgctggtcacatttacttggaatgccctcagcgccgcacaattgtactatctactgatcaggactatgaaacccctgcctcggcactttatactattcattagcctcataggatggggggtccccgcaatagtcgtggccataacagtcggagtgatctacagccaaaatgggaacaatccccaatgggagctggactatcgccaggagaaaatatgttggctcgccattcccgagccaaacggggtgattaagtcccctctgctatggagttttatcgtccccgtaacaatcatcctgatttcaaatgtcgtaatgttcatcacaattagtattaaggttttgtggaagaataaccaaaatcttaccagcacgaagaaagtgtcctcaatgaaaaaaatcgtctccacattatctgtcgccgtggtttttggaattacatggattctggcatacctcatgttggtaaatgacgatagtattagaatcgtttttagttatattttttgtctgtttaacaccacccaaggtctacagattttcatactgtatactgtacggaccaaggtgtttcagtccgaggcttccaaagtgctcatgctgctcagctctatcggcagaagaaaaagtttgccttctgtgacaaggcctaggttgcgggtgaagatgtataactttctaagatccctaccaacattacacgagcgatttaggctgctcgagaccagcccgagcacagaggagattaccttgtcagagagcgacaatgcaaaggagagcatctag

SEQ ID NO: 223977 - DNA, 1143 bp, synthetic construct
  misc_feature 1..1143: note = Description of Artificial Sequence: Synthetic coding sequence
  source 1..1143: mol_type = other DNA
atgtgtccaatgctgctgaaaaacggctataacgggaacgccacaccagtcaccaccaccgccccatgggcatctctgggcttgagcgctaagacctgtaacaatgtgagcttcgaagagagcagaatcgttttggtggttgtgtattctgcagtgtgtactctgggcgtgcccgctaactgccttaccgcatggctggccctactccaggttttgcagggaaatgtacttgccgtttacctgttgtgcctggccctatgcgagctgttgtacactggaaccctgcctctgtgggtgatttacattagaaaccagcatagatggactttaggactgctggcgtgtaaggtcacagcctacatttttttctgcaacatttacgtcagtatcctgttcctctgctgtatctcttgcgaccgcttcgtcgcagtggtgtatgctcttgaatctcggggtcgtagaagaaggagaactgccattctgatatcagcctgcatcttcattctggtaggcattgtgcactatccagtgttccagaccgaggacaaggaaacctgtttcgacatgctccagatggatagccgcatcgccggttattactatgcaaggttcaccgtgggatttgcaattcctctatcaatcatagcattcaccaaccacaggatctttcggtccataaagcagagcatgggtctgtcggccgcacaaaaggctaaggttaaacattctgctatcgccgtggttgtcatattcctcgtgtgttttgcaccataccacctggtgctgttagttaaggctgccgcattctcttactatagaggagacagaaatgcaatgtgtggtcttgaggaaaggctgtacaccgctagcgtggtattcctatgcctctccactgttaacggggtcgccgaccccattatctacgtactcgcaaccgatcacagcaggcaggaagtgagcaggatccacaaagggtggaaggagtggtccatgaagactgatgtgacgcggttaacacactcacgagacacagaggagcttcagtctcctgtggcactggcggatcactataccttttccagacctgttcaccctcctgggagcccctgccctgcgaaacgactcattgaggagagctgttag

SEQ ID NO: 223978 - DNA, 1116 bp, synthetic construct
  misc_feature 1..1116: note = Description of Artificial Sequence: Synthetic coding sequence
  source 1..1116: mol_type = other DNA
atgcccggtaacgctacacccgtgacaaccactgccccatgggcttcattaggtctgtccgctaaaacgtgcaacaacgtatcgttcgaagagagtcggatcgtcctggtggtggtctattcggccgtctgcacgcttggagtgccggcaaattgtcttacagcctggctggcccttctccaggtgttacaggggaacgttctcgctgtatatctgctgtgcctcgccttatgcgaactcctatatacaggaaccttgccactgtgggttatttatattcggaaccaacaccggtggaccctgggccttttagcctgtaaagtgacagcatacatatttttttgtaacatttacgtgtcaatcttgttcctatgctgcatctcctgtgaccggttcgtggccgtggtttacgcccttgagagcagaggcagacgccgacgccgtacagccattttaatctctgcttgcatcttcatcctcgtaggtattgtgcactatccagtctttcagactgaggacaaagagacgtgttttgatatgttgcagatggacagcagaattgccggatattactacgcgcgtttcacagtggggtttgcaatccccctgagcatcatcgcctttacaaatcaccgcattttccgtagcattaaacagagcatggggctctcagctgcccagaaagctaaagtgaagcactcggcaatcgctgtcgtggtgatcttccttgtgtgtttcgcaccatatcacttggtccttttagtgaaagcagccgctttttcctactacagaggagaccgaaatgccatgtgtgggcttgaggaaagattatatacagcgagtgtcgtgttcctgtgcctgtccacggtgaatggggtcgcagatcctattatttacgtgttggccaccgaccatagtagacaagaagtgagtaggatccataaggggtggaaggagtggtcgatgaaaacagacgtcactcggctgacacacagccgggatacagaagaacttcagagcccagtggccttggccgatcactatacattttctcggcctgtacaccccccaggctccccttgtccagccaagagacttattgaggagagctgctag

SEQ ID NO: 223979 - DNA, 1143 bp, synthetic construct
  misc_feature 1..1143: note = Description of Artificial Sequence: Synthetic coding sequence
  source 1..1143: mol_type = other DNA
atgtgtcctatgctgttgaagaacggatacaacggaaacgccaccccagtgacaacaacggctccgtgggcctctctggggctgagcgcgaagacctgtaacaatgttagctttgaagagagtcgcatcgtattagtggtggtttatagcgcggtatgcacgttgggagtgcctgctaactgcctgaccgcttggttagcactgctgcaggtgttgcagggaaacgtccttgccgtctatctcctgtgcctggcactttgcgaactgctgtacacaggaactctacctctgtgggtcatctatatccggaatcaacataggtggactctgggattgctggcttgtaaagttacagcttatatctttttctgcaatatttacgtcagtatactttttctctgttgtatcagctgcgacagattcgtagcagtggtctatgcccttgagagtcgaggaaggaggcggcgtaggactgccatactgattagcgcctgcatctttatactggtcggcatagtgcattatccagtcttccagacagaagacaaggaaacatgctttgatatgttacagatggattcacgtattgctgggtattattacgctcggttcacagtgggatttgccatccctctgtcaatcattgcatttaccaaccatagaatttttcgtagcatcaaacagtcaatgggcttgagcgccgcacagaaggccaaagtcaaacatagcgcaattgctgttgtagtgatctttcttgtgtgttttgctccctaccacctggtcttgctggttaaggccgcagcattttcatattatcggggtgataggaatgctatgtgcggtctggaggaacgcttatacacagcctcagtcgtttttctctgtcttagcactgtgaatggcgtcgcggatcctattatctacgtgctggcaaccgatcactctcgccaagaggtgtctcggatccataagggatggaaagagtggtcaatgaaaacagacgttactagactgacacactctcgagacactgaggagctgcaatctcctgtggccttggccgaccactatacattctcccgccctgtacaccccccaggttcaccatgtccagcaaagcggctgattgaggaatcctgctag

SEQ ID NO: 223980 - DNA, 33 bp, synthetic construct
  misc_feature 1..33: note = Description of Artificial Sequence: Synthetic coding sequence
  source 1..33: mol_type = other DNA
atgtgtcccatgctgctcaagaacggctattag

SEQ ID NO: 223981 - DNA, 2625 bp, synthetic construct
  misc_feature 1..2625: note = Description of Artificial Sequence: Synthetic coding sequence
  source 1..2625: mol_type = other DNA
atggagaagctgcttaggctgtgttgctggtattcctggctgctgcttttttactataatttccaagtgcggggagtgtatagccgctcacaggatcacccaggctttcaggttctcgcttccgcttctcactattggccactcgagaatgtggacggtattcacgagttacaggatacaacgggcgatattgtcgaggggaaggttaataagggtatttacctcaaagaagaaaagggggtgacactattgtattatggcaggtataactcttcgtgcatctccaaacccgagcaatgtggaccagagggcgtgacattttcttttttctggaaaacccagggggagcagagtagacccattcccagcgcttacggcggacaagtcattagtaatggattcaaggtatgcagttcaggcggacgaggtagcgtggagctgtatacccgcgacaactcaatgacttgggaagcgtccttttctccgccaggcccatactggacacacgtcctttttacatggaagagcaaggaggggctcaaggtgtatgtgaacggaaccctttctacatctgatccctcaggaaaggtgtcccgagattatggcgaatcgaatgtgaacttggtaatcggatccgagcaggatcaagcgaaatgttacgaaaacggagcgtttgatgagtttattatctgggaaagggctctcacaccagacgagatagcaatgtactttacagccgcaatcggaaaacacgccctcttgtcctcgacccttccatctctgttcatgacctctactgcttctccggtcatgcccactgatgcatatcacccaatcattacaaatttaaccgaagaacgaaaaactttccaatctcccggagtgatactcagttatctgcagaatgtgtcactgtcgttgccgtcaaagtcactgagcgaacagacggctttgaatcttaccaagacattcctaaaggctgtcggagaaatcctgctgctgccagggtggatagcacttagcgaggactctgccgtagtgttgtctctgatcgatactattgataccgttatggggcacgtgtcctctaatctccatggctccactcctcaggtgacagtggagggaagtagcgccatggcagaatttagcgtcgcgaagatattacctaagactgtgaattcaagccactatcggttccccgcacatgggcagtcctttatccagatcccccacgaagccttccaccgtcacgcctggtccactgttgtcggcctgttgtaccacagcatgcactattacctgaacaacatttggcctgctcacacgaagatcgctgaggctatgcaccaccaggactgcttgctgtttgcaacttctcacctgattagcctggaggtaagtcctccgcctacgctgtcccagaacttgagtggcagtccgctgatcactgtccacctcaagcacagactcacaaggaaacagcactccgaagccactaactcatcaaatagagtgtttgtctactgtgctttcctggactttagtagtggtgagggagtgtggtccaaccatgggtgcgcattgaccagaggtaacctcacgtattcagtctgccgttgtactcacttgacaaatttcgcaatcctgatgcaagttgtgcctttggaattagctcgcggacaccaagtcgcattaagttctattagctacgtcggctgtagcttaagcgtgctatgtctggtggctacactggtgactttcgctgtcctctcctctgtgtctacaattagaaaccagagataccatattcatgccaatttgtcctttgcggtactggtggctcaggttttgctgctcatcagctttaggctagagcctggaaccaccccctgtcaagtgatggctgtcctgctgcactactttttcctgtctgcttttgcctggatgctcgtcgagggcttgcacttatactcaatggtgatcaaagttttcggaagcgaagattctaagcatcgctactactatggtatgggttggggatttcctctgctaatctgtattatttctctgagcttcgcaatggatagttatggaacatccaacaattgttggctgtccctcgccagtggcgctatctgggctttcgttgcacccgctctgtttgtgattgtggtcaacatagggatactcatcgcggttacgcgcgtgatctctcagatctctgccgataattataaaatccacggagatcctagcgccttcaaactcacagccaaagctgtagcggtgttgcttccaattctggggacatcctgggtgttcggcgtcctggccgtcaacgggtgcgcagttgtttttcaatacatgtttgctacgctgaatagcctccaggggctctttatctttttgtttcattgcctactgaactcagaggtaagagctgcctttaaacacaagactaaagtctggtccttgacttcatcaagcgctagaacaagcaatgcaaaaccctttcacagcgacctgatgaacggcactcgccctggcatggcaagcaccaaactgtcaccatgggataaatcttcgcactcagcccatcgtgttgacttatcggccgtgtag

SEQ ID NO: 223982 - DNA, 687 bp, synthetic construct
  misc_feature 1..687: note = Description of Artificial Sequence: Synthetic coding sequence
  source 1..687: mol_type = other DNA
taacacggagttagcgcacgcgatgtgctcgagtcaaggacccggaagcagcactccgaggcaacaaactctagtaatagggttttcgtttactgcgcgtttctcgacttttccagcggcgagggagtgtggtctaaccacgggtgtgcactcacgcggggaaatctcacatactcagtttgtaggtgcacccacttaacaaacttcgctatcctcatgcaggtggtacccctcgaggtgaacatcggaatcctcatcgctgtgactcgagtcatatcgcagatcagcgcagacaattataagatccatggcgacccaagtgcgttcaaactgaccgccaaagccgttgcagtcttgctgccaatcctgggtacttcctgggtattcggcgtacttgccgtcaacggttgcgccgtggtctttcaatatatgttcgccaccctgaactcactgcaaggtctctttatattcttatttcactgcttgctcaattctgaagtccgcgcagccttcaaacacaagaccaaagtatggagtctgacctccagctccgcgagaacgtccaatgccaaaccttttcattctgacctcatgaacgggactcgcccaggtatggctagcactaagctctcgccttgggacaagagtagtcactcagcccaccgcgttgacctttctgccgtgtag

SEQ ID NO: 223983 - DNA, 2721 bp, synthetic construct
  misc_feature 1..2721: note = Description of Artificial Sequence: Synthetic coding sequence
  source 1..2721: mol_type = other DNA
atggagaaactgctgcgtctgtgctgctggtactcatggttgttgctcttttattataacttccaagtgaggggggtgtactcaaggtcccaggaccatccagggtttcaggttctcgcttctgccagtcactattggccactcgaaaacgtcgacggaatccacgagctccaggacacaaccggcgctagtaggacccataaactgacagtccttccttcccgaaacgccacttttgtgtactctaacgattcagcatactccaacctgtccgcaactgtcgatatcgtggaagggaaggtcaataaaggcatctatttgaaagaggagaagggtgtgaccctgctgtactacggaagatataatagctcttgtatttctaagcccgagcagtgcggacctgagggcgtaactttctctttcttctggaaaactcaaggcgaacagagcaggccaatcccttctgcctacggtggacaggtgatatctaatggcttcaaagtgtgtagctctggcggaagaggttctgtggagttatacacaagggataatagcatgacatgggaagcctccttcagccctccaggcccttactggactcacgtgctcttcacctggaagagtaaggaaggcctgaaagtttatgtgaatgggactttgtctacttccgacccatcaggcaaggtaagcagagactacggagaaagcaatgtcaacctggtgatcgggagtgaacaagaccaggcgaagtgctatgagaatggcgcattcgacgagttcatcatctgggagagagctctgacacccgatgagattgcaatgtactttaccgctgctataggcaaacacgccctgctgtcctctaccttgcccagcctattcatgacatctacagcaagtcctgttatgcccactgatgcttatcacccgataattacaaacctgaccgaggaacgaaaaacttttcagagccccggtgtgatactgtcgtacctccagaatgtgtcactaagtctgccgtccaaatccctcagcgaacaaaccgcactaaatctgactaaaacatttctgaaggccgttggcgaaattctgcttttacctggttggattgctttgagcgaagacagcgcagtcgttttgtctttgatagataccattgatactgttatgggtcacgtgagttctaacctgcacggtagtaccccacaggttaccgtggagggttcctcggcaatggcggagtttagtgtggcaaaaatactgccaaaaaccgtgaacagctcgcactaccgttttcctgctcacgggcagtcttttattcagattcctcatgaggcattccatagacacgcctggagtacggtggttggtttgctgtatcatagtatgcattactatctcaataacatctggcctgcacacaccaaaatagccgaggcaatgcatcaccaagattgccttttgtttgctacgtcccacctgatcagcctggaagtcagtccaccgcctaccctctctcagaacctgagtggtagccccctgatcaccgtccacctgaagcaccgtctcactaggaaacaacattctgaagcaaccaattcgagcaacagggttttcgtgtattgtgcattcttggactttagtagtggcgaaggggtgtggagcaatcatggttgtgccctaacgagaggcaatctcacctacagtgtctgtaggtgcacccacctcaccaacttcgccatcctgatgcaagtggtccctctggaattggcacggggtcaccaggtggcactatctagcatttcctacgtcggctgttccctgtcggtcctctgccttgtcgcaacacttgtcactttcgcagtgctgagctccgtgtcaaccatccggaaccagcgttaccacatccacgccaatctgagcttcgccgtcctggtggcacaggtgttgctgttgataagtttccgccttgagccgggtacaaccccttgccaggtgatggctgtgctactacattacttctttttaagcgcgttcgcctggatgctcgtggagggcctgcatctgtattcgatggtgattaaagtgtttgggagcgaggacagcaagcaccggtattattacgggatggggtggggctttccactgctgatttgtataatcagtctctcatttgccatggattcctatggtacttccaacaattgttggctctcgcttgcctccggtgccatttgggccttcgtggcccctgccctgttcgtgatcgtggtgaatatcggcatcttgatagctgtgaccagagtcataagtcagataagtgccgataactataagatacatggtgacccttccgcctttaaactgactgccaaggccgtcgcagtactgctgccaatactcggtactagctgggtattcggggtactggcagtaaacggatgtgcagtggtcttccagtatatgttcgctacattaaactcattacagggcctctttatcttcctttttcactgtctcctgaacagcgaggtccgcgcagcgtttaagcataagacgaaagtctggagcctgacctcgtcctccgcacgaacttccaatgccaaacctttccactccgacctcatgaatgggacccggccagggatggcttccactaaactgagtccatgggacaagtccagccactccgcccaccgggtggatctgtccgccgtgtag

SEQ ID NO: 223984 - DNA, 1275 bp, synthetic construct
  misc_feature 1..1275: note = Description of Artificial Sequence: Synthetic coding sequence
  source 1..1275: mol_type = other DNA
atgacccaggcagggcgaaggggtcctggaactccggagcccaggcctcggacccaaccaatggcaagcccaaggctgggaaccttttgttgccctactcgcgatgccgcaacacagttggtcctctcgttccagccccgagcttttcatgcgctgtgcctgggatccggcggattacgcctggctctggggcttttacagcttcttcctggccgaaggcccgctggtccaggatctcccgcaactagtcccccagcatctgtgagaattttgagggctgctgcagcctgcgacctgcttggctgcctcggcatggtaataagatcgaccgtttggctcggctttcccaactttgtggattccgttagtgatatgaaccacactgagatctggccggctgccttttgtgtgggctcagctatgtggatccagcttctgtactcagcttgtttttggtggctgttctgctatgctgtggacgcatatctggtgataagaaggagtgctggtctctctactatactactgtaccacatcatggcctggggccttgccacactactatgtgtggaaggagcggctatgttgtactatccaagtgttagtcgatgtgaacgaggtcttgaccatgccatccctcactatgtgactatgtatcttcccctgctcctggttcttgtcgcaaaccccattttgttccagaagacagtgacagccgtggcctccctcctgaaaggccgtcaggggatctacacagaaaatgaacgaagaatgggcgcagtaatcaagatacgattctttaaaatcatgctcgtgctaatcatttgctggctctctaacatcattaatgaatcactgctgttctacttagagatgcagacagacatcaatggcggtagcctgaagcctgtgagaaccgctgctaagactacctggttcatcatggggattctaaatccagctcaagggtttctgctgtctctggcattttatgggtggaccggatgtagtctaggatttcagtccccgaggaaggaaattcagtgggagagcctgacgacaagcgctgccgagggcgctcaccccagccccttgatgcctcacgagaatccagcatccggtaaagtgtcacaggtcggcggtcagacaagtgatgaggcactgtcaatgttgagtgaaggttccgatgccagtacaattgagatacatacagctagcgagagctgtaacaagaacgagggggaccccgctctgccaacgcatggcgatctgtag

SEQ ID NO: 223985 - DNA, 516 bp, synthetic construct
  misc_feature 1..516: note = Description of Artificial Sequence: Synthetic coding sequence
  source 1..516: mol_type = other DNA
atggtgatccggagcactgtgtggttagggtttcccaacttcgtggactcagttagtgatatgaaccatacggaaatatggcctgccgcattctgcgtaggctctgctatgtggatccaactcctttatagtgcttgtttctggtggcttttctgttatgctgtcgacgcctacctggtcataaggcggagcgcaggcctatccaccattctgctttatcatataatggcatggggtctggccactctattatgcgtggagggtgcagccatgctctactatccctccgtgtctcggtgcgaaagggggctcgaccacgctatcccccactacgtaacgatgtatctgcccctcttattggtcctggttgcgaatccgatcctgtttcagaagacagtgaccgccgtggcaagccttcttaaagggaggcaggggatctatactgaaaacgagcgacgaatgggcgcagtgattaaaatccggttcttcaagattatgctcgtgctaattatttag

SEQ ID NO: 223986 - DNA, 864 bp, synthetic construct
  misc_feature 1..864: note = Description of Artificial Sequence: Synthetic coding sequence
  source 1..864: mol_type = other DNA
taaacagccggaccagttaccggctccgcatctaggggcccagctcgaggcccaaaagggatggtgatccgatccacggtgtggttgggcttccccaattttgtcgactccgtgtccgacatgaaccataccgagatatggccagctgccttctgtgtcgggagcgcaatgtggatccagttgctgtatagtgcttgcttttggtggctgttctgctatgccgttgatgcatatttagtaattcgccgttctgcagggctctctacaatcctgctttatcacattatggcctggggcttagccacactcttatgtgtggagggggctgccatgctgtattacccttctgtgtcacgatgcgagcgtgggctcgaccatgctatcccccactatgtgaccatgtatcttcctcttctgctggtgttagtggctaaccctattctttttcaaaaaacagtgactgctgtagcctccttactcaaaggcaggcagggcatctatactgaaaacgagaggcgcatgggggcagttatcaagatcagattctttaaaattatgctcgtcctgataatctgctggctcagcaatataattaatgagtcgttgctgttttacctggaaatgcagaccgatattaacgggggaagcctgaagcctgtccgaaccgccgcaaaaacaacttggtttatcatggggatcctgaatcccgcacaggggttcctgctgagcttagccttctacgggtggaccggatgctccttaggcttccagtcgcctagaaaggagatccagtgggagtcgctgactacgtctgcagccgaaggtgcccatccgtctccacttatgccccacgaaaacccatag

SEQ ID NO: 223987 - DNA, 1215 bp, synthetic construct
  misc_feature 1..1215: note = Description of Artificial Sequence: Synthetic coding sequence
  source 1..1215: mol_type = other DNA
atggcatctccacggctcggaacattctgctgccctacacgcgacgcagctacacagctcgtcctctcttttcagccacgcgcttttcacgccctctgcctgggatctggcggacttagattggcccttggattgttacagctactgcctgggaggcgaccggcaggcccaggaagcccggcaacatcgcctcctgcctcggtccgaatcttgagagctgctgctgcgtgtgatctgctggggtgtctcggtatggtgatccggtctaccgtgtggctgggctttcccaatttcgtggactcggtttcagatatgaaccatacggaaatctggcctgccgctttctgcgtaggcagcgctatgtggatccagctgctttattcagcttgcttctggtggctcttttgttacgccgtggacgcctatctggtcatacgccgatccgccggattatccaccattctcctctatcacatcatggcgtgggggttggcaaccctcctctgtgtggaaggcgcagccatgctgtattacccatccgttagccggtgtgaacgtggactggaccatgccatcccgcattatgtgacaatgtaccttcccctgctgcttgtactggtcgccaatccgatactcttccagaagaccgtaacggccgtcgccagtctgctgaagggaaggcagggaatttatactgagaacgaacgcaggatgggcgcagtcatcaagattcggttttttaaaattatgttggttctaattatttgttggctcagcaatataatcaatgagtctttgctgttctacttagagatgcagacagatattaacggcggttcactgaagcccgtacgcacagccgctaagactacatggtttatcatggggatcctgaatcctgcccaggggtttctgctctcccttgccttttacggttggacaggttgctctctggggttccagtccccccgtaaggagatccagtgggaaagtctgacgacgagcgctgccgagggcgcacatccgagtccacttatgccgcacgagaaccccgcaagcgggaaagtcagtcaagttggcggtcagactagcgacgaggccctctcaatgctgtcagaggggagcgatgccagcacaattgagattcacaccgcttctgagagctgtaacaagaacgagggagaccctgccctgcccacacatggcgacctgtag

SEQ ID NO: 223988 - DNA, 1083 bp, synthetic construct
  misc_feature 1..1083: note = Description of Artificial Sequence: Synthetic coding sequence
  source 1..1083: mol_type = other DNA
atggaccccgaggaaacaagtgtatatttggattattattatgccacctcccccaattccgacataagggagacgcactcccacgtgccctatacctccgtgtttttacccgtgttctatacagctgtgttcttgacgggtgtgctgggaaatctggtgctcatgggagccctgcactttaaaccgggatctcgcagacttattgatatttttatcatcaacctggccgcaagcgacttcatctttctggttacattaccactgtgggtagataaggaagctagtttaggcctgtggcgcactggtagtttcctctgtaaggggtccagctacatgattagtgttaatatgcattgcagtgtattgttacttacgtgcatgtccgtggatcggtatctcgcaattgtgtggccagtcgtttctcggaaattccggagaacagactgcgcctatgtcgtatgtgctagcatctggtttatctcctgcctgctgggacttcccaccctgctgtcaagagaactgacgctgattgatgataaaccttattgcgccgagaaaaaggctacccctatcaagcttatctggagcttagtggcactgatttttacattctttgtacccctgctaagtattgttacttgctattgttgcatcgccaggaaactgtgcgcgcactatcagcagagcggcaagcacaataaaaagctcaagaagtcaattaagattatcttcatagtcgttgctgccttcctggtgagttggctgccattcaatacattcaagtttctggccatagtgagtggtctacgacaggagcactacctgccaagcgccattctccagctggggatggaggtgtctggcccattagcttttgccaactcatgcgtaaatccctttatctactacattttcgattcctatatccgtagagcaatcgtgcactgcttgtgcccatgcctcaagaattacgattttgggtctagcacagagacaagcgattctcatttgaccaaagctctgagcacttttatacacgccgaagactttgccaggagaaggaaacggagcgtaagtctttag

SEQ ID NO: 223989 - DNA, 1830 bp, synthetic construct
  misc_feature 1..1830: note = Description of Artificial Sequence: Synthetic coding sequence
  source 1..1830: mol_type = other DNA
atgtctgacgagcggagactaccaggcagtgccgtcggatggcttgtgtgcggtggtctcagccttctagctaacgcttgggggatcctatccgtgggagcaaaacagaaaaagtggaaaccactggaattcctcctctgcactctcgcagccactcacatgttaaacgtagcagtgcccattgcaacctactccgtcgtccagctgcgacgtcagcggcctgatttcgaatggaatgagggcctgtgtaaagtttttgtgtcgacattttataccctgactttagcaacctgcttctcagtgaccagcctgagttaccatcgaatgtggatggtctgctggcccgtcaactaccggctgtctaacgccaagaaacaagctgtgcatacagtgatgggaatttggatggtcagttttattttgtcggccctgcctgccgtgggctggcatgacacaagcgagagattctacacccatggatgccgattcattgttgccgaaattggactgggatttggtgtctgcttcctgctgctggtgggtggttctgtcgccatgggcgtgatttgtacagctatcgcgttgttccagactctggcagtccaggtgggcaggcaggctgacaggcgggcatttaccgtgccgacaatcgtggtggaggatgcacaggggaagcgacggtctagcatagacgggagcgagcctgccaaaactagtctccagactaccggcctggtgacaacaattgtcttcatctatgattgccttatggggttccccgttctggtggtcagcttctcctcccttagggctgatgcttctgctccatggatggcgctatgtgtgttatggtgctctgtcgcccaggcgttgctcttgcctgtctttttgtgggcctgtgaccggtaccgcgcagatttgaaggccgtgcgggaaaagtgtatggcacttatggcaaatgatgaagagagcgacgacgagactagtctcgagggtggcatcagtcccgacctagtgcttgagaggagtcttgactatggctacgggggagattttgttgccctcgatagaatggccaagtacgagatctccgctctggagggagggctgccccaactgtaccccttgcgaccattgcaggaagataagatgcagtacttgcaagtgcctcccactcgcagattttcccacgacgatgccgatgtgtgggccgctgtgccattaccagccttccttcccaggtggggttctggcgaggatctcgccgcattagcccatcttgtgctacctgccggacccgaacgaagacgcgctagccttctggcgttcgccgaggatgcccctccaagcagggcacggaggaggtccgcagagtccttgttaagtttgaggccttccgcccttgattctgggcctcgcggagcgcgagacagccctccaggtagccctaggaggcgtcctggacccggaccaagaagtgccagcgccagcctgctccccgatgctttcgcccttaccgccttcgaatgtgaaccccaggccctccgcagacctccaggcccattccccgcagcgcctgcagcccctgatggcgctgaccccggtgaggcaccaacgccacccagctccgcccaacggagcccagggcctcggccttcagcacacagccacgctggctcactgcggcctggcctgtctgcttcttggggtgaaccaggcggtctgcgcgcagccggagggggagggtccacatcttccttcctgtcttcaccatcagagtcctccgggtacgctactctacattccgattccttgggctccgcctcttag

SEQ ID NO: 223990 - DNA, 2445 bp, synthetic construct
  misc_feature 1..2445: note = Description of Artificial Sequence: Synthetic coding sequence
  source 1..2445: mol_type = other DNA
atggagcctgagatcaactgctccgaactctgcgattcctttccaggccaagagctggacaggaggccattgcacgacctttgcaagactactatcacgagcagtcaccattcatcaaaaacaatatctagtctttcccctgttctgctcggaatcgtgtggaccttcttgagctgtgggctactccttatactgttcttcctagcgttcaccatccattgtcggaagaataggatagtgaaaatgtcaagccctaaccttaacatcgtgacactgctcgggtcctgcctgacttacagctcagcatatttgtttggtatccaggatgttctcgtcggtagcagcatggagaccttaatacaaacacgcctctccatgctctgtatcggcactagtctggtgttcgggccaattctgggcaaatcttggcgcctctataaagtgtttacacagcgagttccggataagagagtaatcatcaaggatctacagttacttgggctcgttgccgcactcctgatggcagatgtcattctgttgatgacttgggtcttgactgaccctattcagtgtctacaaatcctgagtgtgagcatgaccgtcaccgggaaggatgtgtcttgtacttctacgtctactcacttttgcgcaagccggtactccgacgtgtggattgcgttgatttggggctgtaaggggcttctgttactttatggcgcttacctagccggactgaccggacatgtgagtagccctccggtgaatcaatcactgacaatcatggtcggcgtgaacctcctcgtgctcgccgcaggccttttgtttgtggtcaccaggtacctacactcatggcccaacctagtcttcgggttgaccagcgggggtatatttgtgtgcacaacaaccattaattgtttcatttttatacctcagctcaagcagtggaaggcattcgaggaggaaaaccagaccatccgacggatggcgaagtacttcagcactccaaataagtcgtttcacacacagtacggggaggaggaaaactgtcacccaaggggagagaaaagcagtatggagaggttgctgacagagaagaatgccgtcatagagtccctgcaggagcaagtgaacaacgcgaaggagaagatcgtgaggcttatgagcgctgagtgcacctacgacctccccgagggggcagcccctcctgcgtctagccccaacaaggatgtccaggcagtggcctcggtgcacaccctggcagctgctcagggcccaagcggacatctatcagacttccagaacgacccaggtatggccgcacgagatagccagtgcacgtcagggccttccagttacgctcaatctctggagggacccggaaaagacagcagcttcagtcccggaaaagaagagaaaatatctgactccaaagacttctcggaccatcttgatagtggctgttctcagaagccatggactgagcagagtctgggtcccgagagaggcgatcaagttcccatgaacccatcccaaagtctgctaccggagagaggcggatctgatccacagaggcagcgacacctggagaactcagaggaaccacctgaacgtaggagcagggtatcttccgtgatacgggagaaactccaggaagtactgcaggacttaggacttggacctgaggcatccctgtcgacggcaccttcatgtcaccagcagacatggaaaaatagtgcagctttttccccccagaagatgcccctgagcaaagagttaggtttcagcccctacatggtgaggcgacggagagctgctcagagggcgcgaagccacttcccaggcagtgcaccctcaagcgtcggccaccgcgcaaacaggacagtgcccggtgcccatagccggctgcatgtgcaaaacggcgactcaccaagccttgcgccacaaactacagattcacgagtgaggcggccttcttccagaaagccctccctgcccagcgaccctcaggatcgccctggaacccttgaaggatcgaagcagtctcaaacggagccagaaggggctagggggtcaaaggctgcgtttttaagacagcccagcggaagtggcagagccccttcccccgcagccccatgcctcagtaaagcttcccctgatcttcctgaacagtggcagttatggcccccagttccctctggctgcgctagccttagctcacaacattcttacttcgacaccgagagcagctctagcgacgaatttttctgccgctgtcaccgcccttattgcgaaatttgcttccaatcctcctccgactcttcggatagtggcacctcggacacagatcctgaaccaaccggaggcctggctagctgggaaaagctgtgggccagaagcaagcccatcgtgaactttaaagacgatctcaagccaacccttgtgtag

SEQ ID NO: 223991 - DNA, 2445 bp, synthetic construct
  misc_feature 1..2445: note = Description of Artificial Sequence: Synthetic coding sequence
  source 1..2445: mol_type = other DNA
atggaaccagagataaattgttccgaactgtgcgattcgtttcccggacaggaactcgatcgtcgccctcttcacgacttatgtaagaccacaatcacctcctctcaccactcttccaaaaccatcagcagtctttcacctgtactcctgggaatcgtctggacatttctgtcgtgcggactacttctgatactctttttcctggcatttacgatccactgtagaaaaaatagaatagtgaaaatgtcgtcgcctaacctgaatatcgtgaccctgctgggaagttgtcttacatactcgtctgcttacctgtttgggattcaggacgtcctggtgggctccagtatggagacactgattcaaactcggttgagtatgctgtgcatcgggacatctcttgtctttggccctattttgggaaagtcctggcgcctgtacaaagttttcacccagcgcgtgcctgataagagagtcatcattaaagacctgcagcttctgggccttgtggctgcattgctgatggctgatgtgattctgctgatgacctgggtgctcaccgatcccattcagtgtctccagatcctttctgtgagcatgactgttaccggaaaagacgtcagttgcactagcacctcgacccacttttgtgccagtcggtacagtgacgtctggatagcacttatttggggttgtaaaggactcctcttactgtacggagcatatcttgctggccttacaggacacgtcagtagcccgcctgtgaatcagtcacttactattatggtcggtgttaacctgctggtgcttgccgcaggattgctcttcgtggttacaaggtatctccatagctggccgaatctagtatttggattgacgagtggcggtatctttgtctgcaccaccaccatcaactgcttcatcttcatccctcagctgaagcagtggaaggcctttgaagaagaaaaccagacgattaggagaatggccaaatatttttcaactccgaacaagtcttttcatacacagtacggtgaggaggagaactgtcatccacggggagaaaagtcatctatggagcgtctgcttaccgagaaaaacgctgtcattgaaagcctgcaagagcaggtgaacaatgcaaaggagaagatcgtaagactcatgtctgccgaatgcacttatgacttgcctgagggcgcagcaccacccgcttctagtcccaacaaggacgtacaggcggtcgctagcgtgcacacgctggctgccgctcagggtccttcagggcatctatccgattttcagaacgatccaggaatggcggctcgagattcacagtgcacctccggccctagctcatacgcacagtcgctggagggccctgggaaagactccagtttctccccaggcaaggaggagaagatctccgattctaaggattttagtgatcatctcgactccggctgctcccagaaaccatggaccgaacaatccctaggtccggaaaggggggatcaggtccctatgaaccccagccagagcctgctccccgaacggggaggctcagacccgcagaggcagcgccatctggagaattccgaggagccaccagaaagaaggagtcgcgttagctccgtgattagagaaaagctgcaggaagttctccaggacctgggcttaggacccgaggcctcactcagcaccgcaccatcgtgtcatcagcagacttggaaaaatagcgcagctttttcacctcagaaaatgcccctctctaaagagttgggtttctccccttatatggttcgcagacggcgagccgcacaacgagcacggtcccatttcccgggttccgcacccagctccgttggccatagggctaaccggactgtgcctggtgctcactctcgcctgcatgtgcagaacggcgatagcccaagcctagctcctcagaccaccgatagccgggttcgcagacctagcagcaggaagccatccctgccctcggacccccaggatcgtccagggaccctagagggctcaaagcagtcccagaccgagcccgaaggcgcaagagggagtaaagccgctttcctgcgacagccttcaggcagcgggcgagctccatctccggcagcaccctgtctgtctaaagctagtcctgacctgcccgagcagtggcagctgtggcctccagtgccctccgggtgtgccagccttagcagtcagcacagctactttgacaccgaatcctcgtcgtctgacgagttcttctgtcggtgccaccgtccatattgtgaaatttgcttccagagtagtagcgactcttccgactcaggaacaagtgacacagatcccgagcctaccggaggcctggcctcttgggagaaactctgggcacgttccaagcccattgtgaattttaaggatgatttaaagcccacgctagtctag

SEQ ID NO: 223992 - DNA, 2433 bp, synthetic construct
  misc_feature 1..2433: note = Description of Artificial Sequence: Synthetic coding sequence
  source 1..2433: mol_type = other DNA
atggagcccgagataaattgtagcgaactctgcgattcattccccggacaggaactggaccgtcgtcctctgcacgatctgtgtaaaactaccatcactagctcccatcattcatcaaagacaatctctagcctcagccccgtgttgctgggaatagtatggacttttttgtcatgcggtcttctgctcatcctgttctttttggcctttactattcattgccgcaaaaatcgaatagttaagatgtcgtctcccaatctaaacatcgtcaccttgctcggctcatgcctgacttatagtagtgcctacctctttggaatccaagatgtcctggtgggatcttccatggagacacttatccagacacgcctgagcatgctgtgtatcgggaccagccttgtgtttgggcctatcctcggcaaaagttggcgcttgtacaaagtctttactcagagagttccggacaagagagtaattatcaaagaccttcagcttctcgggctcgtggctgccttacttatggcagatgtgatcctccttatgacctgggtcttgaccgatcctatccagtgcctgcagattctcagcgtaaccggcaaggacgttagctgcacaagcacctctacacacttctgtgctagcaggtattcagacgtatggatcgccctgatctggggctgcaaaggtttgttactactttatggagcgtacctggctgggttaacaggacacgtctccagtcctccagtgaatcagagcctcaccatcatggtcggggtcaacctgcttgtcctcgctgccggactgctattcgtcgtaacaaggtacctccactcatggcccaacctcgttttcggactaacttcaggagggatcttcgtttgtacgaccaccatcaactgttttattttcatcccccagcttaaacagtggaaagctttcgaggaggagaaccagacaattcgacggatggcaaaatactttagcaccccaaacaagagttttcatacacagtacggcgaagaggagaattgtcaccctcgcggagaaaagagtagcatggaacgcctgctcactgaaaaaaacgcagtgatcgaatccttgcaagaacaagtgaataacgccaaggagaaaattgtgagacttatgtccgctgagtgcacgtatgacctgcctgaaggcgcagccccacctgccagctcaccaaacaaggacgttcaggctgtggcatccgtccacacgctcgccgcagcccaagggccttccggtcaccttagcgatttccagaatgatcctggtatggccgctagagactctcagtgtacgtccgggccttcctcttatgcccagagcctcgaggggcctggaaaagattcaagcttcagccctggaaaagaagagaaaattagtgatagcaaggacttctccgaccatctcgactccgggtgctcacaaaaaccgtggaccgagcagtcactgggacctgaaagaggagaccaggtaccaatgaatccttcacagagcctactccctgagaggggcggaagcgatcctcagcgccagaggcatctggagaacagtgaagagccacctgagcgacgtagccgggtgtcgagcgtcatccgcgagaagcttcaggaagttctgcaagacctagggctgggacctgaggcatcactctctacggccccttcgtgtcaccagcagacgtggaaaaattcagcggctttcagcccacagaagatgccactgtctaaagaactcgggtttagcccttatatggtccgcagacgcagggcagcacaaagggctcgctctcatttccctggctccgcaccaagcagcgtaggacatagagctaatcgaactgtgcccggagctcactctcggttgcacgtgcaaaacggagattcaccttctttagctccacagacaaccgacagccgcgtacgcaggcccagcagccgcaaacctagcctgcccagcgatcctcaggaccggcctgggaccttggaaggatccaagcagtcccagactgaaccagaaggcgctagagggtctaaggctgcgttcctgcggcaacccagcggcagcgggcgagccccatcacccgcagcaccatgtctctctaaggcttcgccagacttaccagagcaatggcagctgtggccaccagtcccgtcaggatgcgcctcattgtccagtcaacactcatactttgacaccgaaagctcaagtagtgacgaattcttctgtcgttgtcaccgcccttactgtgaaatttgtttccagtcttcaagcgactccagcgactccggcacatctgacaccgaccctgagcctaccggtggcctcgcctcttgggagaagctttgggctagatctaagcccatcgtgaattttaaagatgatctaaagcctactcttgtctag

SEQ ID NO: 223993 - DNA, 1590 bp, synthetic construct
  misc_feature 1..1590: note = Description of Artificial Sequence: Synthetic coding sequence
  source 1..1590: mol_type = other DNA
atgtctctgaactccagtctcagttgtcgcaaggagctaagcaacctgacagaggaggagggaggggagggcggtgttatcatcactcagtttattgctatcatcgtgatcacaattttcgtgtgcttagggaatctagtaatcgtggtaactctgtacaaaaagtcttatctgctgaccctctcaaacaaatttgtcttctctttaaccctgagcaactttcttctcagtgttctggtgctgcccttcgttgtgacttctagtattcggagggaatggatattcggcgtggtttggtgcaacttctcggctctgctctacctgctcattagctcagcttctatgttgactctgggggtgattgccatagatagatactatgcagtgctctacccgatggtctaccccatgaagatcacaggtaatcgcgctgtgatggccttggtatacatctggttacactctcttatcgggtgcctgccccctctctttggctggtcctcagtggaattcgacgagtttaagtggatgtgcgtcgccgcttggcaccgggagccagggtataccgctttctggcagatctggtgtgccctgttcccttttttggttatgctggtatgctatggatttatcttccgggtcgccagggtaaaggccagaaaagttcactgtggtaccgtcgtgattgtggaggaggacgcacagcgtactggacgtaagaatagctcaaccagtaccagcagttcaggttcccgccgaaacgcattccagggcgtggtgtactcagccaaccagtgcaaggctctgattacaatcctggtggtgctgggcgcttttatggtgacatggggcccttacatggtagtgatcgcatcagaggctctatggggtaagtcatctgtctcaccttcactggagacatgggccacctggttgtctttcgcgagcgctgtctgccatccactgatctatggcctctggaataaaacagttcgcaaggagctgctaggcatgtgcttcggagaccgatactaccgagaaccctttgtgcagcgccaacgtacctccaggctctttagtatcagcaataggattactgaccttggactatccccccacctgactgccctgatggccggagggcagccactcggccactctagcagcacaggtgatacaggcttctcatgctcccaggactccgggaccgatatgatgctgttagaggattatacctctgatgacaacccgcctagtcactgcacatgtccccctaaaaggcgttcctctgtgaccttcgaggacgaggttgaacagattaaagaagctgctaagaactccattctccacgtgaaggctgaagtacacaaatcccttgacagctacgcagccagtctcgccaaagccatagaggcagaggcaaagatcaatctgttcggtgaggaggccctgccgggagtgcttgtgacagccaggacagtaccaggcggtggatttggcggtaggcggggtagccggaccttagtaagccagcgcttgcagctccagtctattgaggagggggacgtgctggctgctgagcaaagatag

SEQ ID NO: 223994 - DNA, 1590 bp, synthetic construct
  misc_feature 1..1590: note = Description of Artificial Sequence: Synthetic coding sequence
  source 1..1590: mol_type = other DNA
atgtccctcaatagctctctgtcctgcaggaaagagttatccaatctgaccgaggaggaggggggagagggaggggtgatcattacgcagtttatagcaatcatcgtgataaccatatttgtctgtctgggtaacctggtgatagtggtgactctctataagaaatcgtatctcctgactttgtcaaacaagtttgtgttctctctgactctgtctaactttttactttcagtcttagtccttccttttgtggtcacaagcagcatcagacgcgagtggatcttcggggtggtgtggtgtaacttttcagcactattgtatctgctgatcagttctgcatcaatgctgactctcggcgtgattgcaatcgatcgatactatgcagtgctataccccatggtgtaccctatgaagatcacaggaaatcgagctgtcatggccctggtctacatttggctgcacagcctgatcggctgcctgccgcctttgttcggatggagctccgtcgaatttgacgagtttaaatggatgtgtgtcgccgcatggcatagagagcccggttataccgcattctggcagatctggtgcgcgctcttcccattcctggtaatgctcgtttgctacgggttcatcttccgtgtagccagggtgaaggccaggaaggtgcactgtgggaccgtggtgattgtggaagaggacgcgcagcggaccgggcgaaagaactctagcacctcaacaagctcaagtggtagccgcaggaacgcattccaaggggtggtttacagtgccaatcagtgtaaggcattaataacaatccttgtggttctcggggcattcatggtgacctggggcccttatatggtggtgatcgcctccgaggccctgtgggggaagagttcagtgagtccttccttagaaacgtgggcaacctggttatccttcgccagcgctgtgtgccatcctctgatatatggcctgtggaacaagactgtcaggaaagagcttttgggcatgtgtttcggcgaccgatattaccgcgagccatttgtccagaggcagcggacaagtagattattctcaatctccaatcgtatcacggacctcgggctctctcctcatcttaccgcactaatggccggaggacagcctctgggacatagctcttccaccggagatacgggcttctcctgtagtcaagattctggcacggacatgatgttgcttgaggactatacttcggacgacaacccaccgagccattgcacttgtcccccaaaaaggcgttcctccgtcacatttgaggatgaggttgaacagattaaagaggccgcaaaaaattccatcctccacgttaaggctgaggtgcacaaaagcctcgatagctacgcagctagcctcgctaaggccattgaggccgaggccaagattaacttgtttggcgaagaggcgctcccgggtgtgctcgtgaccgcgcgaacagtgccaggcggagggtttggaggaaggcgcggtagcaggaccttagtctcacagcggctgcaacttcagtccatcgaggagggtgatgtgctagcagcggagcagcggtag

SEQ ID NO: 223995 - DNA, 1590 bp, synthetic construct
  misc_feature 1..1590: note = Description of Artificial Sequence: Synthetic coding sequence
  source 1..1590: mol_type = other DNA
atgtctttaaacagttcactgtcttgcagaaaagagcttagcaacctgacagaggaggaaggcggtgaaggcggagtgatcatcacacagttcatagctatcattgtgatcaccatctttgtgtgcctcggcaatctcgtgatcgtagtgacactgtataaaaagtcgtacctgctgactttatctaataaatttgtgttttccctgacactgagcaactttttgctgagtgtgcttgtgctgccttttgtggtgacatctagcatcagacgcgagtggatctttggcgtggtttggtgcaacttcagtgctctgttgtacctcctcatttcctccgccagcatgctcacactgggcgtgattgctattgaccggtattacgctgtgctgtatcctatggtgtacccaatgaagattacagggaatagagctgtaatggcactagtctacatttggcttcactcgctgattggctgtctgccaccattatttgggtggtcctccgtggagttcgatgaattcaagtggatgtgtgtggcagcttggcatcgtgaacccggatacacagctttttggcagatttggtgtgccctttttccatttctcgtgatgcttgtttgttacggcttcatctttagagtagccagagtcaaggctaggaaggttcactgcggaactgttgttattgttgaggaggatgctcagcgaacaggaagaaagaattcttcaacctcaacctccagtagtgggagtcggcgaaatgcattccagggagtggtgtacagtgcgaaccaatgtaaggcactgatcacgattctggtggtcctcggcgcattcatggtaacctggggcccttatatggtagtgatcgctagcgaagcactgtggggcaaatcgtccgtttctccaagtctggagacttgggctacctggctcagcttcgcatccgcagtgtgtcatccgctgatctacggcctctggaacaaaacggtcagaaaggaattgctgggcatgtgctttggagaccggtactacagagaaccctttgtacagcgacagaggacctcacgccttttttccatttctaaccggatcactgacctggggctctcgccacacctaacagctcttatggctggaggccaacccctaggtcattcatcgtccaccggagacacaggcttctcctgctctcaagatagcggcaccgatatgatgcttcttgaagactacacatctgatgacaacccaccatcccactgtacatgcccccctaagcgccgttccagcgtcacttttgaagacgaagttgagcagatcaaagaggccgcaaagaacagtatcctgcatgttaaggcggaggtgcacaaatccttggactcatacgcggcaagcctggcgaaagctattgaagctgaggccaagataaacctctttggagaagaagcactgcctggcgtgctcgtgacagctcgcacagtccctggcggtggcttcggtggacgaaggggttcccggacgctggtatctcagcgcctccagcttcagagcattgaggaaggagatgttctagccgctgagcagaggtag

SEQ ID NO: 223996 - DNA, 1590 bp, synthetic construct
  misc_feature 1..1590: note = Description of Artificial Sequence: Synthetic coding sequence
  source 1..1590: mol_type = other DNA
atgtcacttaatagctccttgagctgccggaaggaactatccaatctcacggaagaggaagggggtgaggggggtgtcattattacacagttcatagctattattgttattacaatatttgtctgtttgggtaatctggtgatcgtagtaaccctgtacaaaaagtcttacctgctgacactcagtaacaagtttgttttttccttgactctgtccaatttccttctctccgtcctggtgctgccctttgtagttacttcgtctatccggagggaatggatctttggtgtggtttggtgcaacttttctgctcttttgtacctgctgatttcttctgcttcgatgttaactctcggcgtgatagctatcgatagatattatgcggtgctgtaccctatggtgtatcctatgaagatcaccggcaaccgtgcggtcatggccctggtgtatatatggttgcactccctcattgggtgcctaccccctttgtttggctggagtagtgtggagtttgacgagttcaagtggatgtgcgtcgccgcatggcacagagaaccaggttatacagctttctggcagatctggtgtgccttattcccttttctggtgatgctggtatgttatggatttattttccgcgtggccagggttaaggccagaaaagtgcactgtgggactgtggtgatagtcgaagaagatgcacagagaacagggaggaaaaatagcagtacaagtacatcaagttccggcagcaggcgcaacgctttccaaggagtcgtctattccgcaaaccagtgcaaagcgctcataacaattcttgtcgtgttaggcgcttttatggtgacctgggggccttacatggtggtcatcgccagcgaggcactgtggggaaaatcttcagtcagtcctagcctggagacttgggcaacatggctaagtttcgcctccgcagtatgtcatccactcatctacggactttggaataagacagttcgcaaagaactgttaggtatgtgcttcggggaccgatattacagagagccattcgtgcagcgccagcggacgtcaaggctgttctctattagtaaccgcatcacagatcttggcctgagtccgcacctgactgccctcatggcgggtggacagccgctaggacatagtagctccactggtgacaccggcttctcctgctctcaggactctggcactgatatgatgctgcttgaggattacacctccgacgacaatccaccctctcactgtacgtgccccccaaagcggcgatcctctgtgacttttgaggatgaggtcgagcagatcaaagaagccgctaagaacagcattctgcacgtgaaggctgaggtgcacaagtccctggatagctatgcagccagcctggcgaaagctattgaggctgaggccaagattaatttgtttggcgaggaggctctacctggggtgctggttacagcacgaacagtcccgggaggaggcttcgggggtagaagaggaagcagaacgctggtaagccagaggctgcagcttcaatctatagaggagggagacgtcttagccgctgagcagagatag

SEQ ID NO: 223997 - DNA, 1650 bp, synthetic construct
  misc_feature 1..1650: note = Description of Artificial Sequence: Synthetic coding sequence
  source 1..1650: mol_type = other DNA
atgtccgcccgtggggtagtacagcatgcgttacccactcccaggaggggggctctgactatgagtctgaatagcagcctgtcctgtcggaaggaattgagtaacctgaccgaagaagagggcggtgaaggcggtgttattatcacacagttcattgcgatcatcgtaataaccattttcgtgtgtctaggcaatcttgttatcgtggttactctctacaaaaagagttatttgctcacactatctaataaatttgtgttctcccttacgttgtctaatttcctcctttccgtcttggttctgccctttgtggtgacctcttctatccgaagggagtggatctttggagtggtgtggtgcaattttagcgccctgctgtacctgctgatctcctccgcgtccatgttgaccctcggagtgattgccattgatagatactatgccgttctgtacccgatggtgtatccgatgaagattactggtaaccgggctgtaatggccctggtgtacatctggctgcactcccttatcggctgcctgccgccacttttcggctggtcatctgtggaatttgacgagttcaagtggatgtgcgtggctgcttggcatagggagcccggatatacagcgttctggcagatctggtgtgctctgtttcccttcttagtgatgctagtgtgctacggattcatattcagagtggccagggtgaaagccagaaaagttcattgtggtacagtggtgatagtggaggaggacgctcaaagaacaggacgcaagaatagtagtacgtctacaagctcctctggctctaggcggaacgcttttcagggagtagtgtattccgctaaccagtgcaaagccctgattaccatcctcgtcgtgctaggagcgtttatggtgacctggggcccatatatggtcgttatcgccagcgaggcgctgtggggaaagtccagcgtgtcacctagcctagagacctgggctacatggctttctttcgcatctgctgtctgccatccattaatttacggtttatggaacaaaaccgtgcggaaagagctcctggggatgtgttttggcgaccgttactatcgtgaaccctttgtccagcggcagaggacaagtcgcctcttctccatttctaatcgcatcactgacctcgggctctcacctcatctcacggcactgatggccggtggacagcccctgggccacagttctagtacaggggacacaggattcagttgctctcaggatagtggtactgatatgatgttgctggaagactacaccagtgatgataatcccccttcacactgtacatgcccccctaaaagacgtagctcagtcaccttcgaggacgaggtcgagcaaattaaggaggccgcaaagaactctattttgcacgtgaaagcagaagtgcacaaatccctggatagttatgccgcaagtcttgccaaggccattgaggccgaagccaagatcaatctgttcggggaagaagctctccctggcgttttagtgaccgctcggaccgtgccgggaggcggatttggtggacggagaggttcacggaccttagtgtctcaacgattgcagctgcagagcattgaagagggagacgtactggctgcagagcagcgctag

SEQ ID NO: 223998 - DNA, 1356 bp, synthetic construct
  misc_feature 1..1356: note = Description of Artificial Sequence: Synthetic coding sequence
  source 1..1356: mol_type = other DNA
atgggaggcagacggtgtgtacctggcacgctccccatgcgggctgccccacccggagccaaaaggctgcacgtgccgcttcgggcaaagggcgtgggacgcagcggtcatgcccctcgcctggaatcagtccgcacctcttactacgctgtgctgtatccgatggtttaccctatgaaaatcactggcaacagagcggtaatggcactcgtttacatttggctacatagcctgatcggatgtctgcccccactctttgggtggtcatccgtggaattcgacgagtttaagtggatgtgcgtagcggcatggcaccgggaaccgggatatactgccttttggcagatttggtgtgcactgtttcccttccttgttatgcttgtgtgctatgggttcattttcagggtggcacgagtaaaggctcggaaagttcattgcggcaccgtggtgatagttgaagaagatgcccagaggaccggcagaaaaaattcatcaactagcacatctagtagcgggtcacggaggaacgcctttcagggtgtagtttacagcgccaaccagtgcaaggcactgataacgattctggtggttttgggcgctttcatggtcacatggggtccatatatggtggtgatcgcctctgaggcactctggggcaagagctcagtgagccctagcctggagacatgggccacctggttgtcctttgcctcggctgtgtgtcaccccttgatttacggtctgtggaacaaaacagttcgcaaagagctgctaggaatgtgtttcggggatcgctattaccgggagcccttcgttcagagacagcggacctccagactgttcagtattagtaacagaattactgatctcggactgtctcctcacttaacagccttgatggcaggtgggcagccactgggacactcatcatctactggggataccggcttttcatgctcacaggattcaggcacggatatgatgctcctggaggactacaccagcgacgacaatcccccaagccattgcacctgccccccaaagcgccgaagtagcgtcacttttgaggatgaagtggaacagattaaggaagctgctaagaatagcattttacacgttaaggcagaagtgcataagagcttggacagctatgccgctagcctggctaaggccattgaagccgaagcgaaaattaatctctttggagaggaagccttgccaggtgtgctggtaactgcaaggactgtaccaggaggtggtttcggcggtaggcgcggttcacggaccctggtgtcccagcgcctgcaactgcagagtattgaggaaggagatgtcctcgcagctgaacagcggtag

SEQ ID NO: 223999 - DNA, 1248 bp, synthetic construct
  misc_feature 1..1248: note = Description of Artificial Sequence: Synthetic coding sequence
  source 1..1248: mol_type = other DNA
atgctggtacctgtgggatggatgaacgagtcatactacgccgtgctgtatcctatggtgtaccctatgaaaatcaccggcaaccgggctgtgatggccctggtgtacatatggctacatagcctgatagggtgtctcccacccctctttggctggtcatctgtcgaattcgatgaattcaagtggatgtgtgtcgctgcatggcatagggagcctggatacaccgcgttctggcagatatggtgcgccctcttcccctttttggtgatgctggtatgctacgggttcattttccgtgtggccagggtgaaggcaagaaaggtccattgtggtacagtcgtgatcgttgaggaagacgcccagcgtaccgggcgaaaaaactctagcactagcacttcaagcagcggcagtaggcggaacgcttttcagggagtggtgtacagtgcgaaccagtgcaaggcgttgatcaccatcctggtggtactgggcgcattcatggtgacatgggggccttacatggtcgtgatcgcttctgaagccctgtggggcaagtctagtgtgtcacctagcctggaaacctgggccacctggctcagcttcgccagtgccgtgtgtcatcccctaatctacgggctgtggaacaagacagtgcgcaaggagctgctgggaatgtgctttggggataggtactaccgcgagccgtttgtgcagaggcagagaacttcccgcctgttcagtatatccaacaggattactgacttagggctgagccctcacctgactgccctcatggccggtggtcagccgttaggtcattctagcagcacaggggatactggttttagttgtagtcaggacagtgggaccgacatgatgttgctcgaggactatacgtccgacgacaatcctccctctcattgtacatgtcccccaaaaagacgttcttctgtgacattcgaagatgaggtggagcagattaaggaagcggctaagaattctattctgcacgtcaaggcagaggtccacaaatcccttgactcctatgctgcatctctagccaaagccatcgaggccgaggccaagattaatctcttcggagaggaagctttgcccggtgtgctggtgacggcgagaaccgtcccgggaggtggcttcgggggacgcaggggttcccgaaccctggtgagccagcggttacagctccagtcaatcgaggagggtgacgttctggcagcagagcagagatag

SEQ ID NO: 224000 - DNA, 1104 bp, synthetic construct
  misc_feature 1..1104: note = Description of Artificial Sequence: Synthetic coding sequence
  source 1..1104: mol_type = other DNA
atgtccaaacgcagttggtgggctgggagtaggaaacctccacgggagatgctgaagctttccgggtccgactcctcacagagcatgaatggcttggaagtggcacccccaggtctgatcaccaatttcagcctcgcgacagctgagcagtgtgggcaggagactccactggaaaatatgctgttcgcaagcttttatttactcgactttatactggcgctggtgggcaacaccctggctctgtggttgtttatccgtgaccacaaatcgggtacccccgctaacgtgttcctgatgcatctggctgtggccgacctgagctgtgtgctggtattgccaactcgacttgtgtaccattttagcggaaaccattggccattcggtgaaatcgcgtgccggttaaccgggtttttgttctacctgaatatgtacgcaagcatatattttttaacctgtatatcagcggaccggttcctcgccatcgtccatcctgtaaaatcgctaaagctgcgtcggcctctctacgctcatctggcctgtgcattcctgtgggtggtagtggccgtagctatggcccctctactggtgagcccgcagacagtgcagacgaatcataccgtagtgtgtctccagctgtaccgagagaaagcatctcaccacgcactggtctccctggccgtggcgttcacattccctttcatcactactgtcacctgttacctgttaatcattcgttccttgcgccagggcttgagagtcgaaaagagactgaagactaaggccgtgcgaatgatcgctattgtgctggccatattcctcgtgtgcttcgttccatatcacgttaatcgttctgtgtatgtgctccattatagaagccacggcgcaagttgtgcaacccagcggattctggctcttgctaaccgcatcacctcttgcctcactagcctgaatggtgctctggaccctattatgtactttttcgttgctgagaagtttcggcatgccctttgtaacttattgtgtggaaagcggttgaagggccctccccctagctttgagggaaagacaaatgagagttccttaagcgctaaaagcgaactgtag

SEQ ID NO: 224001 - DNA, 312 bp, synthetic construct
  misc_feature 1..312: note = Description of Artificial Sequence: Synthetic coding sequence
  source 1..312: mol_type = other DNA
atgaacgggctggaagtggctcccccaggactcataacaaacttcagtcttgccacagccgagcagtgcgggcaggagacacctctcgagaacatgcttttcgcttcattttacctgccactgcctcgccagccgcgaatgtgtactgtgaccgggttgacagcaggttctaccgcccgatccaaacagcatctcgaagttgtgttcgcagtcctgcctgcctttaagctacagcggggacgtcgagagcggacaagcaaacccccaattattcctatgtcctcccctgggccatgctgggtccggacatag

SEQ ID NO: 224002 - DNA, 1104 bp, synthetic construct
  misc_feature 1..1104: note = Description of Artificial Sequence: Synthetic coding sequence
  source 1..1104: mol_type = other DNA
atgagtaagaggagctggtgggccggatctcggaaaccaccaagagaaatgctaaaactgtccggtagcgacagcagtcagtcgatgaatggcttagaagtggctcctccgggactgattactaacttctcgctggctaccgccgagcagtgtggacaggagaccccactggaaaatatgctctttgccagcttctacctcctggactttattctggctctggtagggaacacactggcactgtggctgtttattcgcgaccacaagtctgggacccccgctaacgtgttccttatgcatctggccgtggccgatctatcctgtgtgctcgtgctgccaacgcgcctagtgtatcacttctcgggcaatcactggcctttcggagaaatagcctgtaggctaacaggcttcctgttttatctcaacatgtatgctagcatatacttcctgacttgtatttccgcggacagatttctggcgatcgtgcatcccgtcaaatccctcaagctgaggaggccactgtatgcccatctggcctgcgcctttttatgggtggtcgttgcagtggccatggccccactgctggtaagtccccaaacagtgcaaaccaaccacactgttgtatgcttgcagttatatagggaaaaagcctcccatcatgccctagtttcgctggcagtggcattcacatttccctttattaccactgtaacttgctatctgttgattattaggtccctgcgacagggcttacgcgtcgaaaagcgactgaaaacaaaagcagtccgtatgatcgcaattgtcctggcgatctttctcgtgtgtttcgtgccgtatcatgtcaatcgatctgtgtacgtgctacattaccgttcccacggcgcatcttgcgcaacgcagcggatcttggctctcgccaacagaatcactagctgtctgacatcgctgaacggggctctggaccctatcatgtacttttttgtcgccgagaagttccgacacgccctgtgcaacttgctgtgcggcaaaagactcaagggaccaccgccttcattcgaaggcaaaacaaacgagtcaagtctctctgctaagagcgaattgtag

SEQ ID NO: 224003 - DNA, 411 bp, synthetic construct
  misc_feature 1..411: note = Description of Artificial Sequence: Synthetic coding sequence
  source 1..411: mol_type = other DNA
atgagtaagaggagctggtgggccggttccaggaagccgccaagagagatgctgaagctctcaggaagtgacagcagccagtccatgaatggactggaggttgctcccccaggtctcattactaacttctcattggcaactgctgagcagtgcggacaggagactccactggagaatatgttgtttgccagcttctatctgctggactttatcctagccctcgtgggcaatacccttgccctttggctgtttattagggatcataagagtggcaccccagcgaacgtcttcctgatgcacctggctgtggctgacttgtcctgcgtgctggtgcttcccactagattagtctatcactttagtggaaatcactggccattcggtgaaatcgcatgtaggctgacgggctag

SEQ ID NO: 224004 - DNA, 1104 bp, synthetic construct
  misc_feature 1..1104: note = Description of Artificial Sequence: Synthetic coding sequence
  source 1..1104: mol_type = other DNA
atgtctaaacgttcatggtgggcaggttccagaaaacctcctcgcgagatgctaaaactctccggatctgattcaagtcaatccatgaacggcctggaagtggcccctccaggcttgattactaatttttctctggctaccgccgagcagtgcgggcaggagacaccactggagaacatgctcttcgcctcattctatctattggactttattcttgccctggtcgggaataccctcgcactgtggctgttcattcgggaccacaaaagcggtacgccagctaatgtgttcctaatgcacctcgctgtggcagacctgtcgtgtgtcttagtgctgcccacccggctcgtgtaccatttcagcggtaatcactggccattcggtgagattgcctgcagacttacagggttcctgttctatctcaacatgtacgcttccatttacttcttaacctgcatatcggccgatcgatttctggccatcgttcatcctgtgaagagtttgaagctgagacgtccgttgtatgcgcacttggcctgcgctttcttgtgggtggtagtggctgtcgctatggcccctctgctggtaagcccccaaaccgtgcagaccaatcacacagtggtgtgtttacagctatatcgcgagaaagcgtctcatcacgccctagtgtcgcttgccgtagccttcacttttcctttcatcactacggtgacgtgctacctccttattattcggagcctgaggcaagggctgcgcgtcgagaagcgcctaaaaaccaaggctgtgaggatgatcgccattgtcttggcaatattcctggtgtgtttcgtcccgtatcacgttaaccgatccgtttatgtcttgcattacagaagtcatggcgcatcctgtgctacacagagaattttagcattagcaaaccgaatcacgtcatgccttacatctctcaatggtgctctggaccctataatgtacttctttgtcgctgaaaagttccggcacgctctatgtaacctcttatgtggaaaacgcctgaagggaccacctccatcattcgagggcaagaccaatgagagctccctgagtgccaagtcagagctgtag

SEQ ID NO: 224005 - DNA, 1338 bp, synthetic construct
  misc_feature 1..1338: note = Description of Artificial Sequence: Synthetic coding sequence
  source 1..1338: mol_type = other DNA
atggcagctccgacacccgctagaccagtgttgactcacttactcgtggcactgtttgggatggggtcttgggctgccgtgaatggcatatgggtggaactaccggttgtcgttaaagagttgcctgagggatggtctcttccgagctacgttagcgttcttgtggccctgggcaatctgggattacttgttgtgaccttatggcgaagactcgcgccaggcaaagacgaacaggttcctattagggtggtgcaagtgctaggtatggtcggaacagctcttcttgccagcctatggcatcatgtagccccagttgccggacagctgcactccgttgccttcctggcactggctttcgttttggcactggcgtgctgcgccagtaacgtaactttcctcccctttctgagtcacctgcccccacgcttcctgaggtctttcttcctgggacaagggctgagtgccttgttgccttgcgtactcgctctcgtgcagggggtggggaggctcgaatgccctccggctcctataaatggcacacccggaccaccccttgactttttggaacgattccctgcatccacctttttttgggcacttacagcgcttcttgttgccagtgctgcagccttccagggcctcctgctgctgctcccgccacctccttctgtgccaacaggcgagctgggttctggcctacaggtcggtgcccctggggctgaggaggaggttgaggagtcatctccactccaggagccaccaagccaggcggcaggtactactccgggtccagatccgaaagcttatcagcttctgtctgctcggtctgcttgcttgctgggtctactcgcagccacaaacgcccttacaaacggtgttctcccagcagttcagtcatttagttgtttgccgtacggaaggctggcataccatctggctgtagtcctgggctctgctgcaaacccactcgcctgtttcttggctatgggagtgttgtgccgcagtctggccggactcggagggctctccctgctgggtgttttctgcggcggatacttgatggcccttgctgtgctgagtccatgcccacctctggtgggtacatctgccggagtagtgcttgtcgtgctgtcctgggtgctgtgcctgggcgtgttttcatacgtgaaagtagccgcaagcagcctgctccacggcggaggaaggcctgctctgcttgcagcaggcgtcgccattcaggtcggcagcctgttaggggctgtggctatgttcccccctacctctatttatcacgtgtttcatagtcgtaaggactgtgccgacccctgtgattcctag

SEQ ID NO: 224006 - DNA, 1338 bp, synthetic construct
  misc_feature 1..1338: note = Description of Artificial Sequence: Synthetic coding sequence
  source 1..1338: mol_type = other DNA
atggcagccccaacacccgcacgacccgtgcttacccacctgcttgtcgccctgtttggtatgggtagctgggccgctgtaaatggaatctgggtggaactgcccgtggtcgtaaaggaacttcctgaaggctggtcgcttcccagctacgtgtccgtgctcgtggcattgggtaatctcgggctcctagtggttactttgtggcggaggctagccccagggaaagatgagcaggtcccaatccgcgttgtgcaggttctggggatggttggtaccgccctgcttgcttcactctggcatcatgtggctccagtggcagggcagttgcattctgtagcctttctggccctcgctttcgttcttgccctggcctgctgcgcctctaatgttactttcctccccttcttgtcgcacctaccacctcgtttcctgcggagcttttttctgggccagggtttatcagccctgcttccgtgcgtgctcgccctagtccagggagtgggcaggttggagtgtccacccgctccaattaacggcacacccggacccccactggactttctggagaggttccctgcctctacttttttttgggcacttacagctctgctggtagcttcagctgcagcattccagggtctacttctcctgctgccccctccgccttcagtgcccactggtgagctgggatccggcctccaggtgggtgctccaggggcagaggaggaagtcgaagagtctagcccgctgcaagagccacccagccaggccgctggaacaacacccggtccagaccccaaagcataccagctcctctccgcacgctctgcttgccttctgggtctgcttgccgcaactaatgcgctgaccaatggtgtcctgccggctgtccaatctttctcctgtctgccctatggccgactcgcgtaccatcttgcggtggtgctgggcagcgctgcaaatccactggcatgctttttagcaatgggagtgctgtgtcgcagcctggcaggactcggtggcttaagtctcctcggcgtgttttgtggcggataccttatggccctagccgtactgagcccctgcccgccactggttggaacaagtgctggggtggttctggtcgtattgtcctgggtgctctgccttggagtgttttcttatgtgaaggtcgccgcttccagtctgctgcatggcggaggacgtcccgcactgctggcagccggagtggccattcaggtgggcagcttactgggggcagtggctatgttccctcctacctctatctaccacgtgtttcacagccgtaaggactgcgcagacccttgcgattcttag

SEQ ID NO: 224007 - DNA, 1338 bp, synthetic construct
  misc_feature 1..1338: note = Description of Artificial Sequence: Synthetic coding sequence
  source 1..1338: mol_type = other DNA
atggctgccccaacacctgctcggccagtccttacacacctgttggtggcgctgtttggaatgggatcatgggcagcagttaatggcatatgggtcgagctccccgtagtggtgaaggagctgccagagggctggagtctgccttcttacgtgtcagtgctggttgcgctgggcaacctgggcctcctagtggtgaccttgtggcggaggctcgcccctggcaaagatgagcaggtaccaatcagagtggttcaggtgttaggtatggttggcacagccctcctcgcctcactgtggcaccacgtcgccccagtggcgggtcagcttcatagcgtagcttttctggctctggcattcgtgctcgccctggcctgctgtgcctcaaacgtgaccttcctgcctttcctgagccacctcccccctaggttcttgcgctccttctttcttggtcagggcctcagcgctttgcttccatgcgttctggccctggtccagggagtgggtcggcttgagtgcccccctgcccctattaatggcacacccggacctcccctggattttttggagaggtttcccgctagcacgtttttctgggccctgactgcgttactcgtcgcttcggcagctgcctttcagggactacttttgctgctgccccctccccctagtgtgccaaccggtgagctgggcagtgggttgcaggtgggagctcctggtgccgaggaagaggttgaagagagctctccactccaagaaccccctagtcaagccgctggcaccaccccaggacctgatcccaaggcttatcaactgctttcagcccgttcagcatgcttgctggggctgctggccgcaactaacgccttgaccaatggggttctaccggcagttcagagtttttcctgcctcccttatggacgcctagcttaccacctggccgtggtgctggggagtgctgccaatccactcgcgtgttttcttgccatgggagtcttgtgtcgatccctggctgggctcggcggactgagccttctcggggtgttctgtggtggctacctgatggctctcgctgtactaagcccgtgccccccattggtgggcacctccgctggggtggtgttggtcgtgctgtcctgggttctttgcctaggtgtgttcagctacgttaaagtcgctgctagctcgttactgcacggcggaggtcgaccagcactccttgctgctggcgtggctatccaagtggggtctctcctgggggcagtcgcgatgtttcctcctactagtatataccacgtgtttcatagccgcaaagactgtgccgatccttgcgattcttag

SEQ ID NO: 224008 - DNA, 1338 bp, synthetic construct
  misc_feature 1..1338: note = Description of Artificial Sequence: Synthetic coding sequence
  source 1..1338: mol_type = other DNA
atggccgcaccgactcctgcaaggccagtacttactcatcttttggtcgctcttttcggaatgggctcttgggctgctgtgaacggtatctgggttgaactacctgtcgtggtcaaggagctccctgaggggtggagtctgccgtcctacgttagcgtgctggtagccctcggaaatctgggccttctggtggtcactctttggcgcagactggctcccggtaaagacgaacaagtaccaattcgggtggttcaggttttgggtatggtgggcactgccttgcttgccagcctatggcaccacgttgcgccagtggccggacagcttcactcagtagcgtttcttgctctcgcattcgtgctcgcccttgcgtgctgcgcttcgaacgtaactttcctgcctttcctgtcccaccttccaccacggtttcttcggagcttttttctgggccaaggactgagtgctctcctaccatgtgtgctggcccttgttcagggggtgggtcgcctggaatgcccccctgcccctataaatgggacccctggccctcccttagactttctggagaggttcccagctagcacttttttttgggctctgaccgcgctcctcgtggcctctgctgctgctttccagggcctgcttcttctgctcccaccccctcctagcgtgcccactggcgagctaggatcagggctgcaggtgggagcacctggagctgaagaagaagtcgaagagtcctccccccttcaggaacccccttctcaagcggctggaactacacccggacccgacccaaaagcttatcagctgctcagcgctcggagcgcttgcctcctcggattactagcggcaactaacgcccttaccaacggcgtgcttcccgctgtgcagtcttttagttgccttccatacggcagacttgcgtaccacctggccgtcgtgctgggctctgcagcaaatccactggcttgttttctggctatgggggtcctatgccggtctttggctggcctcggaggcctttctctgctgggggtgttttgcgggggatacctcatggccctcgcggtgttatctccctgtcctccgctcgtaggaactagcgctggggtggtgcttgtagttctctcttgggtcctgtgtctgggggtgttcagctacgtgaaagtggcagcatcatcactcttgcatgggggtggcagaccagctctgctggctgcaggcgtcgccatccaggtggggtccctgttaggggctgtagccatgttccctccaacttcaatctaccacgttttccattctcgcaaagactgcgccgatccctgcgatagctag

SEQ ID NO: 224009 - DNA, 1338 bp, synthetic construct
  misc_feature 1..1338: note = Description of Artificial Sequence: Synthetic coding sequence
  source 1..1338: mol_type = other DNA
atggccgcacccacccctgccaggcccgtcctgacacacctgttggttgccctttttggaatggggtcttgggctgcagtcaacggcatctgggtcgagctgcctgtggtcgttaaagaactgccggaaggatggagcttgccgtcgtacgttagtgtgctggttgccctgggaaacctcggactcctcgtggtgacactctggcgcaggctcgcaccaggcaaagacgagcaagttccgattcgggtcgtgcaagtgttgggaatggtgggtaccgcactgctggcctctctgtggcatcatgtagcacccgtggcgggtcagctgcacagtgtggccttcttagctcttgccttcgtcctggctcttgcttgttgtgccagtaacgtgacttttttgcccttcttgagtcatttgcccccaagattccttcgctcttttttcctggggcaagggttatcagccctcctgccctgcgtgctggccctggtgcagggcgtggggagattagagtgccccccagcaccaattaacggtacgccgggtcctccactggattttctcgagagatttccagcttctacatttttttgggccctgactgctctgctggtggcgtccgctgccgcttttcaagggttgcttttgttacttcccccaccgccttccgtgcctacaggcgagcttggaagcggacttcaggtgggcgcacccggagctgaggaggaggtggaagagagcagcccgctacaggaacctccctcccaagcagcgggaaccacacctggacccgatcccaaggcttaccagcttctgtccgctcgatccgcttgccttttgggcctgctagctgccactaacgcgctgacgaacggggttcttccagctgtccagtcattctcttgcctcccttacggcagactcgcataccacctggccgtggtgctggggagcgcggcaaacccattagcgtgctttctcgccatgggcgtgctgtgcagatctctggctgggttgggcggacttagtctgttgggagtgttctgcggagggtaccttatggccctggccgttctgtccccatgtccaccattggtgggtacttccgccggagttgtgctagtggtactgtcctgggtgctctgtctgggcgtgttctcatatgtgaaagttgcagcttcatctctgctacacggagggggacgccctgccctgcttgcggcaggcgtagcgatacaagtgggcagcctccttggagccgtggctatgttccctcctacaagcatctatcacgtcttccactctcgcaaggattgtgctgacccctgcgactcctag

SEQ ID NO: 224010 - DNA, 1074 bp, synthetic construct
  misc_feature 1..1074: note = Description of Artificial Sequence: Synthetic coding sequence
  source 1..1074: mol_type = other DNA
atggtcgggacagccctgctggcttcactttggcaccatgtggcacccgtagcgggtcaactccactccgtggcatttctggccttggccttcgttctggccctcgcttgttgtgcctccaacgtgacttttctgccgtttctttcccatttacctccacgtttcttaaggagctttttcctggggcaggggctctcagctctacttccatgtgtgcttgctctggtgcagggggtgggcaggctggagtgccccccagcaccgataaatggaacgccgggaccacccctcgactttctggagcgttttccggcaagcacatttttttgggcccttacagcactgctcgtggcctctgctgccgcatttcagggactccttttgctgctcccccctcctccatcggttccgaccggggaactggggtctggactgcaggtcggggcaccaggggctgaggaggaggtggaagagagttctccactgcaggaacccccaagccaggccgctggtacaacccctggtccagaccctaaagcttaccaattgctgagtgcacgatctgcatgcctgttgggcctgctggcagcaaccaatgctttaaccaacggcgtgctgccagctgttcagagcttcagttgtctgccctatggcaggttagcctaccacctggcagtggtgttagggtccgcggctaatccactggcgtgtttcctcgccatgggcgtgctttgtaggtcactggcgggtcttggaggcctgtcactgctgggggtcttctgtgggggttatcttatggccctagcggtgttgagtccctgtcccccactggtcggcacttccgctggagttgttctggtagttctgtcctgggtcttatgtctcggagtgttttcgtacgtgaaggtcgccgcatcatctctcctgcatggaggcggacgaccagctctgctggcggcaggagtggcgattcaagtggggagcttacttggcgctgtcgctatgtttcccccaacgagtatttatcatgtgttccattcacgaaaggattgcgcggacccgtgtgattcatag

SEQ ID NO: 224011 - DNA, 1347 bp, synthetic construct
  misc_feature 1..1347: note = Description of Artificial Sequence: Synthetic coding sequence
  source 1..1347: mol_type = other DNA
atggcagccccaaccctcggcagattagtactcactcaccttttggtcgctctattcggaatggggagctgggctgcagtgaacggtatttgggttgaactgcccgtcgtggtcaaggacctccccgagggttggtccctgccatcctacctctccgtggttgtagcgttgggtaatctgggtctgctggtagttacgctgtggcgccaattggctcctgggaaaggagaacaggtaccaatccaggttgttcaagtgctgagtgtggtcgggacagctttgttggctccactctggcaccacgtggccccagtcgccggtcagctccactctgtcgctttcttgacgttggcactggtgctggccatggcctgctgcactagcaatgtcacattccttccctttctgtcacacctgccacctccatttctccggtccttctttctgggtcaaggcttgtcagcactgctcccttgcgtgttggccctggtgcagggagtgggcaggctagagtgccccccagcaccaactaatgggacctcgggcccacctctggacttcccagagcgttttcctgccagcactttcttctgggcactgaccgcccttctggttacctcagctgcagccttccggggactgctgttacttctgccctcgctgcccagcgtcactactggtggatccggacctgagctgcagctggggtcccccggagctgaggaagaggaaaaggaagaagaggaggccctgcctctgcaggaaccaccttcccaggccgcaggtaccatcccaggaccagatccggaggctcatcagctgttcagcgcacacggtgcattcttgttagggctgatggcgtttactagcgctgtgacaaatggtgtgctaccatctgtgcagagtttttcttgccttccttatggacggttggcctatcacctggccgtggttttggggagtgctgccaaccctctagcctgctttcttgccatgggagtgctttgccggtctctagctggactagtcgggctgtctcttctcgggatgctttttggggcttaccttatggctcttgcaatcttatccccttgtccccctctggttggtacaacagccggtgtcgtcctcgtagttttgtcttgggtactctgtctgtgtgtcttttcctatgtgaaggtggcagcctcttctctgcttcacggcggaggaagaccagctttgctggctgctggtgtggccatccaggttggcagtctgttaggtgccggtgccatgttccctcccacgagcatctaccacgtgttccaatcccgcaaagactgcgtggatccatgtggtccctag

SEQ ID NO: 224012 - DNA, 1347 bp, synthetic construct
  misc_feature 1..1347: note = Description of Artificial Sequence: Synthetic coding sequence
  source 1..1347: mol_type = other DNA
atggccgctcctacactgggaaggctcgtgttgactcatctgctcgtcgcgctctttggaatggggagctgggcggcagtgaacgggatttgggtcgagctgcccgtggtcgtgaaagatctgccagaagggtggtccttgccttcctacctgtcagtggttgtggcactggggaatctgggactcttggtagttaccctctggcgccagctcgcacccggaaaaggagaacaggttccaatacaggtggttcaagtcttaagcgtagtgggcacagccttactcgcaccactgtggcaccacgtggctcctgtcgcgggtcagctgcattccgtagcattcttgacacttgctctggtgcttgccatggcctgttgcacaagtaatgtgacatttctgccatttttatcacatttacctcccccttttttacgctcgtttttcctgggacagggattgtctgcgctgttaccatgcgtgctggcactggtgcagggtgttggtcggctggagtgccctccagcccctaccaacggtacctcgggaccccctctagacttccctgaaaggtttcccgcatccactttcttctgggcccttactgccctgttggtaacctccgccgcagcgtttcgaggacttctgttgctcctcccctctctcccaagcgtaactaccggaggttctggaccagagttacagcttggcagcccaggagccgaggaggaagagaaggaggaagaggaagccctacccttacaggaacccccatcccaagctgccggaactatccccggtcccgaccctgaagctcaccagcttttctccgcccatggggcattcctgttgggattgatggcgtttacttcggctgtgacaaacggcgttctgccttcagtgcagagcttctcctgtctgccatacggtcgtttagcctatcacctggctgtggtgctcgggtctgcggcaaatccccttgcctgttttttagcaatgggggtactgtgccgaagtctggccggtttggtcggacttagcctgctgggaatgctattcggcgcatatttgatggctctggccatcttgtctccatgtccgccactcgtcggaaccaccgcaggagtggtccttgttgtgttatcctgggttctgtgcctgtgtgtgtttagttatgtcaaggtcgcagcatcctctctgttacacggcggaggtagacccgctcttctcgccgcaggagtcgctattcaggtgggcagtctgctgggcgctggcgctatgttccctccaacatcgatctatcacgtcttccagagccgtaaggattgcgtggatccctgtggaccctag

SEQ ID NO: 224013 - DNA, 1053 bp, synthetic construct
  misc_feature 1..1053: note = Description of Artificial Sequence: Synthetic coding sequence
  source 1..1053: mol_type = other DNA
atggccgcacccactttggggcgactggttttaacacacttactggttgctctttttggcatgggctcttgggccgcagtcaacgggatatgggtcgagctccctgtcgtcgtgaaagacttgccagagggatggtcgttaccctcttacctgagcgtggtcgtggcactcggcaacctgggcctgctagtggtaactctttggcgacagctagcgcctggtaagggggaacaggtgcccatacaggtagtccaggtgctgagtgtcgtcggtacagctttgctcgctcctttgtggcatcacgtggctcccgtggcaggacagctgcacagcgtggccttcctaacacttgcactggtgttggctatggcttgttgcacatccaacgtaacgtttttgccgttcctctcacacctgcctccaccattcctgcgcagcttttttctcggtcagggcctcagcgcgcttttgccttgtgtcttagccctagtgcagggtgtgggcagacttgaatgtccacctgcaccaaccaatggcaccagcggtcccccacttgacttcccggaaaggttcccagcgtctacctttttttgggctctgaccgcacttctggtgacgagcgctgcggctttccggggactgctcttactgttgccttctctcccctcggtaactactggaggctctgggcctgagttgcagctcggcagcccaggtgcggaagaggaggagaaggaggaggaagaggccctccctctccaggaaccaccaagtcaggcagctggtactattcccggtcctgaccccgaggctcatcagctcttttcagcacacggcgcttttttgctgggattgatggctttcacatccgcagtcaccaatggggtattaccaagtgtgcagtcgttctcttgtttgccttatgggagacttgcctaccaccttgccgtggttctggggtcggccgctaacccactagcctgttttctcgcaatgggtgtgctgtgccgatgctgtcggggttgctgcgtctgcgtttgctctcacatgtag

SEQ ID NO: 224014 - DNA, 1413 bp, synthetic construct
  misc_feature 1..1413: note = Description of Artificial Sequence: Synthetic coding sequence
  source 1..1413: mol_type = other DNA
atgcctgcgcctctcctgttaataagtcggactctagggaactttatggtgctgtggagtacctgtaggaccactgtgtttaaaagcgttactaaccggtttatcaaaaacctggcgtgctccggaatttgcgcctcactggtgtgtgttccttttgatatcatcctgagcacatccccacattgctgttggtggatttataccatgttgttttgtaaagtggtcaagttcttgcacaaagtgttctgttccgtcaccatactgagttttcctgcgatagccttggacagatactactcagttttgtatcccctggagcgcaagatttccgacgctaaatctcgggagctcgtgatgtatatctgggcgcacgccgtcgtcgcttctgtgcccgtcttcgcagtgaccaatgtggccgatatctacgccacatcaacctgtaccgaggtgtggtcaaattctctgggtcatctggtctacgttctggtgtataatataactacagtcatcgtaccagtcgtggtggttttcctcttcctcatcctgatacgtcgcgctctcagtgcctcgcaaaagaagaaagtgattatcgctgcattgcgtacaccgcagaacaccatttctatcccctacgcgtcccagcgcgaagctgaattgcacgccactcttctcagcatggtgatggtgtttatcctttgctctgtgccatacgccacacttgtagtgtaccagactgtgctcaatgtacctgatacgagcgtattcttgttgctgaccgctgtctggctgcccaaggtctctttactagcaaacccggtgctgttcttgacagttaataaaagtgtgaggaagtgtctgattggcacgctggttcagctacatcatcgatattcaagaaggaacgtggtatcgacggggtcggggatggcggaggcttctctagagccatccattcggagcgggagccagttgctggagatgtttcacatcggccagcagcaaatatttaagccgactgaggatgaagaggagtctgaggccaagtatatcggtagtgccgactttcaagctaaagagatattctctacttgcctcgaaggcgagcaggggccacagtttgctccctctgccccaccgctatcgaccgtagactccgtgtcacaggtagcaccagccgctcctgtcgaaccggagacgttcccagataaatacagcctgcaatttggcttcggaccttttgagctgccccctcagtggctgagtgaaacccggaatagcaagaagagactcctgccaccccttggcaatacccccgaagaattaatccaaacaaaagtgccaaaagtgggacgggtcgaacgcaagatgtccagaaacaataaggtaagcatcttccccaaggtggacagctag

SEQ ID NO: 224015 - DNA, 1548 bp, synthetic construct
  misc_feature 1..1548: note = Description of Artificial Sequence: Synthetic coding sequence
  source 1..1548: mol_type = other DNA
atgggccataacggatcgtggatctcccccaatgccagtgagccccacaacgcttctggggctgaggctgctggcgtgaaccggtctgccctaggagagtttggcgaagctcagctgtatcgccagtttactactactgttcaagtggttattttcatcggcagtttattggggaatttcatggttctctggagtacctgccggacaacggttttcaaaagtgtgacgaatcgatttatcaagaaccttgcatgtagtggcatctgcgcctccctggtttgcgttccctttgacatcatcctgtcaacttcaccccactgttgctggtggatttatacaatgctgttttgcaaagtcgtgaagtttctgcacaaagtgttttgctcagtaaccatcctgagtttcccggcaatcgccctggaccggtactattccgtactgtatcccctggagcgaaaaatttctgatgccaaaagccgcgaactggttatgtatatatgggcccacgcggtcgttgcctcagtgcccgtttttgctgttaccaatgtagcagacatatacgccactagcacttgcaccgaagtgtggtccaactccctgggccatctggtctatgtgttggtgtataatattaccaccgttatagtgcctgtcgtcgtagtcttcctttttctcattctgatcagaagggctctgtccgcttcccagaaaaaaaaagtaatcatcgccgctctgcggacgccccagaatactatctccattccatacgcatcccagcgcgaagctgagttacacgccactctcctctcaatggttatggtttttattttatgttcagtgccctacgctacattagtcgtgtatcagacagtcctgaatgtgccagacacttctgttttcctgctcttaaccgcggtctggctgcccaaagtgtccctcctggctaatccagtgctctttttgacagttaataagagcgtgcgcaaatgtctgatcggaaccctggtgcagctccaccaccggtatagtcgaagaaatgttgtcagcactggctcaggtatggcggaagccagtctggaacccagtatccgatccggttcccagttgttagaaatgttccatataggacaacagcagatctttaagcccacagaggatgaagaagagtcagaggcgaagtacattggatccgccgactttcaggccaaggaaatcttcagcacctgcttggagggcgagcagggaccgcagttcgccccatctgcgccaccactgtcgaccgttgacagtgttagtcaggtggcacccgctgctcccgtagagcccgagacttttccagacaagtatagcctgcaatttggcttcgggccattcgagctcccaccacagtggctcagtgaaacacgcaatagtaaaaaacggcttcttccaccactgggaaatacgccagaggagctgatccagactaaagtgcccaaggtcggtcgggtggagcggaagatgtcaaggaacaataaggtttctatctttccaaaagttgactcatag

SEQ ID NO: 224016 - DNA, 1548 bp, synthetic construct
  misc_feature 1..1548: note = Description of Artificial Sequence: Synthetic coding sequence
  source 1..1548: mol_type = other DNA
atggggcataatggctcatggatctcacccaacgcctccgaaccacataacgcttccggtgccgaagcagccggagtgaacagaagtgcactcggtgaattcggtgaggcgcagctataccgccagttcactactacggtgcaggtggtgatatttatcggtagtctgctcgggaatttcatggtactctggagtacttgccgcactacagtgttcaagagtgtgacaaatcgcttcatcaaaaatctggcctgttctggcatttgcgccagcttggtatgtgtgcctttcgatattattctgagcacgagtccacattgttgttggtggatttacacaatgctgttttgcaaggttgtaaaattcctacataaggtgttctgcagcgtgacaatcctgtcttttcccgctattgcactggacagatactattctgtcttgtatcccctggaaaggaaaatcagcgacgccaagagtcgggagcttgtcatgtatatctgggcccatgctgtcgtggcttcagtgcctgtgtttgcagtgactaatgtcgccgacatatacgcaacttctacttgcacagaggtttggagcaactcgctcggccatcttgtgtacgtactcgtgtataatataaccaccgtgattgtgccagtggtggtggtcttcctctttctgatcctgattcgcagggcactgagtgcatcccagaaaaaaaaagtgataattgccgctcttagaactcctcagaataccatcagcattccttatgcttcccaaagggaagcagaattacatgcaactctgctttcaatggttatggtgtttattttgtgctccgtgccatacgctactcttgtagtctatcagacagtgttgaatgtgcccgacacttcagtgttccttctgctcaccgctgtctggctacctaaggtctcactcctggcaaatcctgtgctcttcctcacagtgaataagtctgtacggaaatgtctgattggtaccctggtgcagctacaccatagatatagtagaagaaatgtggtgtccaccggatccggcatggccgaggcatctttggaaccatcaattcgctccgggagccagttgctggagatgttccacataggacagcaacaaatttttaagccaaccgaagacgaggaagaatccgaggcgaagtacattggctcggcggatttccaggcaaaggagatcttcagtacttgcctggaaggcgagcagggccctcaatttgcaccttccgcccctcccctatccacagtggatagtgtgtcacaggtggctcccgcagcccctgtcgagccagagacttttccagacaagtatagcctgcagtttggattcggccctttcgagctgcccccacagtggttgagcgaaaccagaaactcaaagaaacgtctgcttccccctctggggaatacccccgaggaactgatccagaccaaagtgccaaaggtcggcagggtggaaaggaaaatgagtcgcaataacaaggtgtctatcttccctaaggtggatagctag

SEQ ID NO: 224017 - DNA, 996 bp, synthetic construct
  misc_feature 1..996: note = Description of Artificial Sequence: Synthetic coding sequence
  source 1..996: mol_type = other DNA
atgatcaccctgaataatcaagatcagcccgtccctttcaactcctcccatcccgatgagtacaagattgccgctctcgtgttttattcttgtattttcatcattgggctgttcgtaaacattacagcactctgggttttcagttgcacaactaagaaacggaccactgtcaccatctacatgatgaatgtcgccctagtggacctgatctttattatgaccctgcctttccgaatgttctactacgccaaggatgagtggccattcggcgagtacttttgtcagatactgggggctctgaccgtattctatccttctattgccctttggttgctggcttttataagcgccgaccgttatatggccattgtacagcctaagtatgccaaggaattgaagaatacctgcaaagctgttctggcctgcgtaggcgtctggatcatgaccttaaccacaaccaccccgctccttctgctctataaagaccctgataaggattcaacacctgcaacttgcttaaaaatctcggatatcatctatctgaaagcagttaacgttttgaacctgacccgtttaacgttctttttcctcattcccctgtttatcatgattggttgctacctggtaataatccataatctcctacatgggcgtaccagtaagctgaaaccaaaggtgaaggaaaagtcaatcagaattattattacgctcctggtacaggtcctggtttgttttatgccctttcacatttgtttcgcgttcttaatgctcggaactggagaaaactcatacaatccttggggggcatttacaacctttcttatgaatttgtccacctgcctggatgtgatcctgtattacatcgtgagcaagcagtttcaggctcgtgtgattagcgtcatgttgtaccgtaattatctgcgctccatgcgcagaaaatcattcagaagcggcagcctcaggagccttagcaatatcaactcagaaatgttgtag

SEQ ID NO: 224018 - DNA, 996 bp, synthetic construct
  misc_feature 1..996: note = Description of Artificial Sequence: Synthetic coding sequence
  source 1..996: mol_type = other DNA
atgatcaccttgaataaccaggaccagcccgtgcctttcaatagtagccaccctgatgagtataaaattgcagcactagtgttctactcgtgtatttttataatcggtctcttcgtgaatatcaccgccctgtgggtgttttcatgcaccacgaaaaagaggaccacggtaaccatttacatgatgaatgtcgctctcgtggacctgatatttattatgactctgccttttaggatgttctactatgctaaggacgagtggccttttggtgaatacttctgccagatattgggagctttaaccgtgttttacccctcaatagccttgtggctgctggccttcatatcagccgatagatatatggccattgtgcagcccaaatacgcgaaagagctcaaaaatacatgcaaagcagtactagcttgtgtcggagtctggattatgaccctcaccactaccacaccactgcttcttctgtacaaggacccagacaaggactccactcccgcaacgtgtcttaaaatctcagatattatttacctgaaagccgtaaacgtgttaaaccttactcggctcaccttcttcttcttgatccccctgttcatcatgattggctgttacctggtgatcatccacaatcttctccatggccgaacctcaaagttgaaacctaaagtgaaagagaagagtattcgaatcatcattacactgctcgttcaagtccttgtctgtttcatgccattccatatctgtttcgcttttcttatgctgggaacaggtgagaactcttataacccctggggcgcttttacaacctttctgatgaacttatctacctgtctcgacgttatcttatattacatagtctccaaacagttccaggctagagtgatcagcgttatgctgtatcggaattacctgcgctctatgcggaggaaatcctttaggtctgggagcctacgcagcctcagtaacataaatagtgaaatgttatag

SEQ ID NO: 224019 - DNA, 996 bp, synthetic construct
  misc_feature 1..996: note = Description of Artificial Sequence: Synthetic coding sequence
  source 1..996: mol_type = other DNA
atgataactctgaacaaccaggatcaacctgtgccatttaactcatcccaccctgatgagtacaaaattgcggctctcgtgttttattcctgcatatttataatcgggctttttgtgaacattaccgccctctgggtgttttcttgtacaacaaagaagcggacaaccgtaactatatatatgatgaatgtcgcccttgtagacctgatttttatcatgacactcccctttcgtatgttttattatgctaaggacgagtggccctttggcgagtacttctgtcaaatcctgggggctctgactgtgttctatccgtcaatcgccctgtggctgctcgcttttatctctgcagatcgctacatggcaatcgtccagcccaagtacgcgaaagagctgaagaacacctgtaaggccgtcttggcctgcgttggcgtgtggatcatgactcttactaccacaactccactcctgttgctctacaaggaccccgacaaggacagcacaccggctacctgccttaagatcagtgacattatatatttaaaggccgtgaatgtcctaaacctgacccggttaacttttttctttctcatcccactctttatcatgatcggttgttacctcgttattatacacaacctactgcatggaagaacatccaaactgaagccaaaggtgaaagaaaagtctatcagaatcattataaccctgctggtgcaggtgctggtctgcttcatgcccttccatatctgttttgcattcttgatgcttggtaccggggaaaattcctataacccctggggtgccttcactacattcctcatgaacctatccacctgtctggacgtgatcctgtactacatcgtgtcgaaacagtttcaggcaagggtgatcagcgtcatgctctataggaattatctgcggtcgatgcgccgaaaatctttccggagcgggagtctgcgttcactgagcaacataaatagcgaaatgctgtag

SEQ ID NO: 224020 - DNA, 297 bp, synthetic construct
  misc_feature 1..297: note = Description of Artificial Sequence: Synthetic coding sequence
  source 1..297: mol_type = other DNA
atgattactcttaacaaccaggatcagccagttccgttcaattcctctcatcccgacgagtacaagatagccgcactggtcttttacagttgcatcttcatcattggcttatttgtgaacataactgccctctgggtgttctcgtgtacaactaagaagcgtaccacagtcacaatctacatgatgaatgttgccttggtggacctgattttcattatgacgctccccttccgcatgttctactatgcaaaggatgaatggccgttcggggagtatttttgtcaaatcctgggttag

SEQ ID NO: 224021 - DNA, 1086 bp, synthetic construct
  misc_feature 1..1086: note = Description of Artificial Sequence: Synthetic coding sequence
  source 1..1086: mol_type = other DNA
atggacattcagatggccaacaacttcacaccaccttcagcaaccccacaaggtaacgactgcgatttgtacgcacatcattccaccgctcgcatcgtcatgccgctccactactctctggtgtttataattgggctggtgggcaacctcctggctttagtcgtgatcgtccagaatagaaaaaaaattaatagcaccacactgtattctacgaacctcgtgatctctgacatcctgttcactaccgcactgcccacaaggatcgcttactacgcaatggggtttgactggcggatcggcgatgccctgtgccgcatcactgcattagtgttctatataaatacttacgcaggagtgaattttatgacatgcttaagtatcgataggtttatcgcggtcgtccaccccctgagatacaataagatcaagagaatcgagcatgcaaagggagtctgtatcttcgtgtggatcctggtgtttgctcagacgctaccattactgatcaaccctatgtccaaacaggaagccgaacgcattacctgcatggagtaccctaactttgaggagactaagagcctaccttggatcttgctgggcgcttgttttataggatatgtgctgccactgattattattttaatctgttatagtcagatctgctgtaagcttttcaggactgccaagcaaaacccacttacagagaagtccggtgtgaacaagaaggcactaaataccatcatcctgatcatagtagtgtttgtgctgtgtttcaccccttatcatgtggctattatccagcacatgataaaaaagttgaggttctccaacttcctagaatgtagccagcgccatagtttccaaatttctttgcatttcactgtctgcctgatgaatttcaactgctgcatggatccctttatctatttttttgcttgtaagggctataagcggaaagtgatgaggatgctcaaacgccaggtcagcgtgtccataagctctgctgtcaaatccgcccctgaggaaaattcaagggaaatgacagaaacgcagatgatgatccacagcaagtcttccaacggtaagtag

SEQ ID NO: 224022 - DNA, 1248 bp, synthetic construct
  misc_feature 1..1248: note = Description of Artificial Sequence: Synthetic coding sequence
  source 1..1248: mol_type = other DNA
atggtcttcgcacataggatggacaatagtaagcctcaccttatcatccccacgctcctggttccgttacaaaatcggtcgtgtaccgaaacagccacccctctgccttcccagtacctgatggagctttccgaagaacactcttggatgagcaaccaaacagaccttcactacgttttgaaaccaggggaggtggccacggcatctattttttttgggatcctgtggctcttctccattttcgggaattcattggtctgtctggtgattcaccggtcacgacggactcagagtacgacaaactatttcgtggtgtccatggcttgtgccgatttattaatctccgttgctagcacaccgttcgtcctactgcaattcacaacaggacggtggacactgggtagtgctacctgcaaagtggtccggtacttccagtatctaacccctggggttcagatttacgttttgctgtccatttgcatcgatcgcttttacaccatcgtgtaccccctctcattcaaggtgtctagagagaaggctaagaagatgattgcagcctcatgggtctttgacgccggtttcgtgacccctgtgctgtttttctatggctctaattgggatagccattgtaattactttttgcctagttcgtgggaagggaccgcctataccgttattcattttcttgtgggctttgtcatcccttccgttctgattattctgttttaccagaaagttatcaagtatatttggcgaattggtactgatggccgtacagtacggcgaaccatgaatattgttccgagaacaaaagtgaagacaatcaaaatgtttctgattttaaaccttctgtttctcctgtcttggttgcccttccacgtcgcacagctatggcacccccacgagcaggactacaagaagtcctccctcgtattcaccgccatcacttggataagcttctcgtcgagtgcctctaagcctacactttacagtatttataacgccaacttccgtagggggatgaaggaaactttttgcatgtcaagtatgaagtgttatcgcagcaacgcgtatacgataacaacttcctcacggatggctaagaagaattacgttggcatttctgagattccgagtatggctaaaacaatcacaaaagatagtatctacgattccttcgatagagaggcaaaagagaaaaaattagcttggccaattaatagcaatcccccaaacacattcgtatag

SEQ ID NO: 224023 - DNA, 1248 bp, synthetic construct
  misc_feature 1..1248: note = Description of Artificial Sequence: Synthetic coding sequence
  source 1..1248: mol_type = other DNA
atggtgtttgcccaccgcatggacaactcaaaaccacacctgattatacctacactcttggtgcccctgcagaatagatcgtgcaccgaaaccgctactcccctgcccagccagtatctgatggagttgagcgaggaacattcctggatgtccaatcaaactgatctccactacgtgctcaagcccggtgaggtggccacagcttccatttttttcggcatcttatggctgttcagcatctttggaaatagcctggtctgccttgtcattcatagatcaagacggactcagtcgaccactaactacttcgttgtctctatggcatgcgccgacctgttgatcagtgtcgcctccacaccattcgtgctcttgcagttcacaacaggacgttggactctcggttcagccacctgtaaagttgtccggtacttccagtatttgactcctggcgttcagatatatgtgctgctaagtatttgtatcgatcggttctatactattgtctacccactgtcctttaaggtgagcagggaaaaagcgaaaaagatgattgccgcttcatgggtgtttgacgccggattcgtaacaccagtgctcttcttttacggatctaattgggactcccactgcaattacttcttgccttcaagttgggaggggaccgcttacacagttatccattttctagtgggatttgtcatcccctccgtgctgattatcctcttttaccagaaggtgattaagtacatatggagaataggcactgacgggagaactgtgaggcgaacaatgaatattgtcccccgaactaaggtcaaaaccattaaaatgttcttgattctgaatctcctgttcctgctctcatggctcccctttcacgtggcgcaactgtggcatccccacgagcaagactacaaaaaaagttcattagtgtttacagccattacatggattagcttctcaagcagcgcttcaaagccaactttgtatagcatttataatgctaatttccgtcgaggtatgaaagagactttctgtatgtcttcaatgaaatgttaccgctcgaatgcctacaccatcacaactagctctcgcatggcaaagaagaattatgtgggtattagcgaaattccttcaatggcgaagaccattactaaagactcaatatacgactcattcgacagagaggccaaagagaagaagctggcctggcctatcaactcaaatcctcctaatacatttgtgtag

SEQ ID NO: 224024 - DNA, 180 bp, synthetic construct
  misc_feature 1..180: note = Description of Artificial Sequence: Synthetic coding sequence
  source 1..180: mol_type = other DNA
atggtatttgctcaccggatggacaattctaaacctcatctgattattcccacattgctagtcccattacagaatcgaagttgtactgagaccgcgacacccctcccatcccagtacttgatggagctgtcagaagaacactcctggatgtcgaatcagacggacttacactatgtgtag

SEQ ID NO: 224025 - DNA, 1077 bp, synthetic construct
  misc_feature 1..1077: note = Description of Artificial Sequence: Synthetic coding sequence
  source 1..1077: mol_type = other DNA
atgccctccgtgtctcctgctgggccttctgcaggtgctgttccgaacgccactgccgtgaccaccgtgaggacaaacgcctctggactggaggttcctctgtttcatttgtttgcccgactggatgaggagctgcacggcacttttcccggactgtggctggcacttatggctgtgcacggggctatcttcctggcgggactggttctgaatggcctggccctgtacgtgttctgttgccgcactcgcgcaaaaaccccctcagttatttacaccatcaatcttgtggtgacagaccttcttgtcgggttgagcctcccaacaagatttgcagtatattacggagcacggggatgcctacgctgtgcatttccacacgtcctgggttacttcctcaacatgcattgcagcatcttgttcctcacctgcatttgcgtcgacagatacctggccattgtgcgccctgagggatcccgcaggtgcaggcagcccgcatgcgcacgggctgtatgcgccttcgtttggctcgcggcaggagcagtgacgctgagcgtactgggagtaacaggcagccggccttgttgccgtgtgtttgctttaactgtcctggagtttctcttgccactgttagttatttccgtgtttacaggcagaattatgtgcgctttatcccgcccaggtctgctccatcagggcagacaaaggagagtacgagccatgcagttactgctgacagtgctgatcattttcctggtgtgcttcaccccctttcacgcacgacaagtcgccgtagcactctggcccgacatgcctcaccacacctcactagtagtgtaccacgtggccgtcactctttccagtctgaattcctgtatggaccctatagtatattgttttgttacctctggatttcaagccacagtgagagggctcttcggccagcacggcgaaagggaaccctcctccggggatgttgtcagcatgcaccgctcatcaaaaggtagcggacgacaccatatcctttctgctggccctcacgctctaacacaggccctggctaacggccctgaggcctag

SEQ ID NO: 224026 - DNA, 1050 bp, synthetic construct
  misc_feature 1..1050: note = Description of Artificial Sequence: Synthetic coding sequence
  source 1..1050: mol_type = other DNA
atgaactctaccctcgacgggaatcaaagcagtcaccccttctgtctgcttgcgtttggatacctggagaccgtgaacttttgcctgctggaggtgctcataatcgtcttcttgacagttctgatcatctcaggaaacatcatcgtcatattcgtgtttcattgcgcccctttattgaaccaccatacgacgtcttactttatacagaccatggcctacgccgacctctttgtcggggtcagctgcgtcgttcctagtctatcactactgcatcaccccctccctgtggaagagagtctaacctgccagatattcggattcgtggtaagcgtcctcaagtcagttagcatggcgtctcttgcttgtatttcaattgaccggtatatcgccattaccaagccattgacctacaacacattggttacaccttggcgattaaggctctgcattttcctcatttggttatattctacactcgtctttctgccttcattttttcattggggtaaaccagggtatcacggcgacgtcttccagtggtgcgcagaatcttggcacacagattcttactttaccctcttcattgtcatgatgctttacgcccctgccgctcttattgtgtgtttcacatatttcaatatcttccgcatttgccagcagcatactaaggacattagtgaaagacaagccagattttcctcacagtcgggggagacgggcgaggtacaggcctgccccgacaagagatacgctatggtattgttccggatcactagtgtattctacattttgtggttaccctatatcatctatttccttctggaatcgagcacgggccactcaaaccgatttgcttcgtttctaacaacctggctggctatttcgaattctttttgtaactgcgtaatttactccctatccaatagcgtattccaaaggggcctgaaaagactctctggggctatgtgtaccagttgtgcaagtcagactaccgccaacgacccatatacagtgcgttcaaagggaccgctaaatggttgtcacatctag

SEQ ID NO: 224027 - DNA, 753 bp, synthetic construct
  misc_feature 1..753: note = Description of Artificial Sequence: Synthetic coding sequence
  source 1..753: mol_type = other DNA
atgaattccacgttggacggcaaccagtctagccacccgttctgtctcctggcctttgggtacctggaaacggtgaacttctgtttgctggaggtgttgataatcgtgtttctgaccgtcttgatcatttcaggcaacatcattgtaatatttgtgtttcactgcgccccattactgaatcatcataccacttcttattttatccagaccatggcctacgccgacctgttcgtgggagtgtcgtgcgtagttccgtctctatcactgctccatcacccgctgcctgtggaggagtccttgacgtgtcaaatttttgggttcgttgtaagtgtattaaagtccgtgagtatggcctcccttgcatgtatctctatcgaccgctacatagccataactaagccactgacctacaacactctcgtcacaccctggaggctgcgactgtgtatatttctcatctggctgtattccactttagttttcctgcccagtttctttcactgggggaaaccaggataccatggggacgtgttccagtggtgcgctgaaagttggcataccgacagctacttcactctctttatcgtcatgatgctatacgcgccagccgctcttattgtgtgtttcacctattttaacatcttccgaatctgtcagcagcatacaaaagatatctcagagaggcaggcacgcttcagttcacaaagtggagagacaggagaggtgcaggcctgccctgtaagcaaccactag

SEQ ID NO: 224028 - DNA, 1302 bp, synthetic construct
  misc_feature 1..1302: note = Description of Artificial Sequence: Synthetic coding sequence
  source 1..1302: mol_type = other DNA
atgtgcttctccccaattctagagatcaatatgcagtctgaaagtaacatcacagttagggatgacattgacgacattaacacaaacatgtatcaacctctgtcataccccttgtcttttcaggtgtccctgaccggctttctgatgctggaaatcgttcttggtcttgggtctaaccttacagtactagtcctgtactgcatgaagtccaacctcatcaattctgtgtccaacattattaccatgaatttgcatgtgctggacgttataatctgtgtagggtgcatccctctaacgattgtcatcctcctgctcagcttagagtctaacaccgcactcatttgctgttttcacgaagcgtgtgtgagtttcgcatccgtatcgactgccattaacgtcttcgccatcaccttggatcgctacgatatctctgtgaagcctgcgaaccgtatcttgaccatggggcgagctgtgatgcttatgatctccatttggatattttcctttttctcgttcctgatcccctttatcgaggtcaacttcttcagtctgcagtctgggaacacctgggagaacaagacgctgctgtgtgtttctactaatgaatattatacggaactgggcatgtattatcacctgcttgtgcagatcccaatttttttcttcacggtggtagtgatgctcattacttacaccaagattttacaggcattgaatattagaattgggactcgattctccactggtcaaaagaaaaaagccagaaaaaaaaagacaatcagtttaactactcagcacgaggccaccgatatgtcacaatctagcgggggaagaaacgtggtctttggggtgcgcacgagcgtctccgttatcatagctctgcgacgagctgtaaaaagacatagggaacgacgagagcgtcagaagcgggtctttcgaatgtctctgctgataatttcaacatttctgctttgctggacccctatatccgtcttaaatacaaccattctgtgtctgggacccagtgacctcctcgtaaaactgcgactgtgctttctcgtaatggcatacggtactaccatcttccatccgctgttgtatgcttttactaggcaaaaattccagaaggtcctgaagagcaaaatgaagaagcgtgtcgtgagtatcgttgaggccgatccactgccgaataacgccgtcatccacaatagttggattgacccaaagagaaataaaaaaatcaccttcgaggatagcgagatccgggagaagtgcctggtgccacaagtcgtcacggactag

SEQ ID NO: 224029 - DNA, 1086 bp, synthetic construct
  misc_feature 1..1086: note = Description of Artificial Sequence: Synthetic coding sequence
  source 1..1086: mol_type = other DNA
atggctcccactgagccctggtcgccctcccctggctctgccccttgggactacagcggacttgacggcctcgaggagctagaactctgcccagccggagaccttccgtacggatacgtgtatatccccgcattgtatctcgccgcattcgcggttggactgctgggcaacgcttttgtggtgtggttactggccggtaggagagggccacgtaggctcgtggacacgttcgtcctccacttggcagccgcagatttaggcttcgtgcttacactgccactgtgggccgctgccgcagctctgggaggaaggtggccattcggggatgggctatgtaaactaagctcgttcgctctagctggcaccaggtgtgctggagctttactccttgcaggaatgtccgtcgatcggtacttggcagttgttaagctgctggaagccagaccgttgcggactcctcgatgcgcattggcatcatgctgcggcgtctgggcagtggccctcctagccggtcttcccagcctcgtttatcggggtctgcagccgctcccagggggacaggattcacagtgtggtgaagagccctcccatgcctttcaggggctctctcttttgctacttctcctgacctttgtgttgcccctggtcgtgactctcttttgctactgcaggatcagtcgtaggctcaggagaccaccacacgtaggacgcgctcggaggaattctctcaggatcatattcgcgatcgaatcaacattcgtgggctcatggttgcctttttcagctctgagagctgtattccatctagctaggttgggagccctgcccctgccatgtccgctgctcctagcactgcgctggggcttgactatcgccacgtgcctggcatttgtcaatagttgcgccaaccctcttatctatttgttgttggaccgatcgttccgcgctagggctctcgatggagcctgtgggaggaccggtcggctagccagacgcatcagtagcgcttcatctctgagtagagatgattcttctgtatttaggtgtcgggctcaggcggcaaatacagctagcgccagctggtag

SEQ ID NO: 224030 - DNA, 1014 bp, synthetic construct
  misc_feature 1..1014: note = Description of Artificial Sequence: Synthetic coding sequence
  source 1..1014: mol_type = other DNA
atgaactcatgggatgctggactggccggtctgctggtgggtaccatgggagtgtccttactgtccaatgcattggtcctgctctgtttgctccacagcgccgatattcgcaggcaagctccggcactctttaccttgaatttaacgtgcggcaatctcctctgcactgttgtgaacatgcccctcaccttggctggcgtcgtggcccagagacaacccgctggagataggctgtgtcggctggctgcctttctggacaccttccttgctgccaacagcatgctgtcaatggcagccctgtccatagatagatgggtggccgttgtcttccctttaagctaccgcgctaagatgcgccttagggacgctgcgctaatggtcgcctacacgtggttacatgctctgactttcccggcagcagcactcgcgctttcctggctaggcttccaccagctgtacgcttcctgtacgctgtgttcaagacgaccagatgagcgcctgagattcgcagtgttcaccggtgcgtttcacgcgttatctttcctgctgagcttcgtagtcctatgctgcacttacttgaaagtgttaaaagtggcccgtttccactgtaagcggatagatgtgattacaatgcagactttggtactgttagttgatttacacccctctgtgagggagcggtgcctggaggagcaaaagcggcgtaggcaaagggctacgaagaagattagcactttcattggtactttcctggtgtgcttcgccccatatgttatcaccagactggtggagctttttagcacagtgcccatagggtcccactggggagtgctgagcaagtgtctcgcatacagcaaggcagcatcagatcccttcgtgtacagtctgctgcgccatcagtataggaaatcttgcaaggaaatcttgaaccgcctgctgcaccgcaggtcaatacactcgagcggacttacaggggactcccactctcagaacatccttcccgtctctgaatag

SEQ ID NO: 224031 - DNA, 1128 bp, synthetic construct
  misc_feature 1..1128: note = Description of Artificial Sequence: Synthetic coding sequence
  source 1..1128: mol_type = other DNA
atggcgaatgcttctgagcctggcggatccgggggaggcgaggcagctgctttggggctcaaattagccaccctgagcctgttgctttgtgtctcccttgctggtaacgtgctgttcgccctgctgatcgtacgcgagagatcactgcatcgggctccttattatcttctgctggacctctgcctggccgacggactgcgggctttggcctgtctgcccgctgtcatgctcgctgcacgccgtgcagctgctgcagcaggcgctccacctggggctcttggctgtaagttgctggcctttctggctgccctgttttgcttccacgcggctttcctgttactgggcgtgggcgtgacgcgctatttggccatagcacaccaccgtttctacgctgagcggctggccggttggccctgcgccgcaatgctggtgtgcgcagcttgggccctagcgctggccgctgctttcccacctgttttagatggaggcggagatgacgaagacgccccttgtgcacttgaacagcgcccagatggcgctcctggcgcactggggtttttacttctgctggccgtggtggtcggtgcgacccacctggtttacctccggctgctattcttcattcatgaccgtagaaagatgcgaccagccagactggtcccagccgtctcccacgattggacatttcacgggcctggggctacaggacaagccgctgctaattggactgccggattcggcagggggcctacaccaccagcactagtgggaatcaggccagccggtccaggtaggggcgctcgaaggcttttggtgctggaggagtttaaaaccgagaagaggctttgtaagatgttttatgcggtcacacttctgttcctgcttttatgggggccttacgtggtggccagctaccttcgagtcttagtcaggcctggagccgtaccccaagcttaccttactgcgagtgtgtggctgacttttgcacaggcaggtatcaatcctgtcgtctgcttcctgttcaatcgggaactgcgcgattgcttcagggcccagtttccctgttgtcaatcaccaaggaccacacaggctacccacccctgcgaccttaaggggatcggcctatag

SEQ ID NO: 224032 - DNA, 993 bp, synthetic construct
  misc_feature 1..993: note = Description of Artificial Sequence: Synthetic coding sequence
  source 1..993: mol_type = other DNA
atgatgtggggtgcagggtcgcctctggcctggttgagcgccggatctggcaacgtgaacgtgtctagcgtgggtcctgcggagggacccaccgggccagctgcccctctgcccagccccaaggcgtgggacgtcgtgttatgcatttccggcacactggtgtcatgcgaaaacgcacttgtggtggcgattatcgtgggcacgcctgccttccgggctcccatgttcttgttggttggctctctggccgtggccgatctgttggctggactcggtcttgtgctccacttcgcagccgtgttctgcattggcagcgccgagatgtccctggtcctggtcggagtgctagccatggccttcactgcatcaataggaagcctcctcgcgataaccgtggatagatacctctctctctataacgcactcacctactatagcgagacaacggtcactaggacatatgtgatgctcgctcttgtttggggtggggctctgggcctcggattactgccagtcctggcctggaactgtctcgatggcctgacgacatgtggcgtggtttaccccttgtctaagaatcatttggttgtattggccatcgccttcttcatggtctttggaattatgctgcagctgtatgcgcagatctgcaggatcgtgtgtagacacgcacagcaaatagccctgcagaggcacctgcttcctgcctcacattatgttgctacaagaaaaggtatcgcgacccttgccgtggtccttggagccttcgcggcttgctggctaccatttactgtgtactgcctccttggagacgcgcacagcccccctctttatacgtatctcaccctactgcctgcaacttataatagcatgatcaaccccatcatttacgcgttccgaaatcaggacgtgcagaaagtcttatgggccgtttgttgttgttgtagcagtagtaagattccattcaggagcaggagcccttccgacgtgtag

SEQ ID NO: 224033 - DNA, 960 bp, synthetic construct
  misc_feature 1..960: note = Description of Artificial Sequence: Synthetic coding sequence
  source 1..960: mol_type = other DNA
atgccttttcccaactgtagcgcaccttccactgtggtcgccaccgctgtgggagtgctgctgggactagaatgcggactgggcttattggggaacgcggtcgccctttggacctttttgtttcgggtaagggtgtggaagccatacgccgtctatctcttgaatctcgcgctggccgacctcctgctggctgcgtgtttgccgtttctcgctgcattctacttgagtctccaggcttggcacttggggagggttgggtgttgggcactacacttcttactggatcttagtcgatcggtagggatggcctttttggccgctgtggccctggatcggtatctgagggtggtgcacccccgactgaaggtgaatctcctttccccccaggcagccctgggtgtgtcaggtctcgtatggctcttaatggtggctctgacttgtccaggcctgctgatttccgaggcagcccagaacagcacccggtgccactccttttacagcagggccgatgggagtttctcgatcatctggcaggaggcgttgagttgcctacagttcgtcctgccctttggcttgatagttttctgtaatgccggaatcataagagcccttcaaaaacggctgagggaaccagagaaacagcctaagcttcagcgcgcacaggcactagtaacattagtggtggtgctgttcgccctctgcttcctaccctgtttcctggccagggtcctgatgcacattttccagaaccttggctcatgccgtgccctgtgcgcagttgcacatactagcgatgtcactggctccctgacatatctgcattcagtgctaaacccggttgtctattgtttttctagcccaaccttcaggtcaagctaccgcagggtatttcatacccttaggggtaaaggccaggcagccgagcctccagatttcaatccccgtgactcttattcctag

SEQ ID NO: 224034 - DNA, 1071 bp, synthetic construct
  misc_feature 1..1071: note = Description of Artificial Sequence: Synthetic coding sequence
  source 1..1071: mol_type = other DNA
atgaatggcgtctccgagggaacaagaggctgctccgatcgtcagcccggagttctgacacgcgaccggtcctgttctaggaaaatgaatagcagcggctgtctctctgaggaggtgggatccctgcgcccactgactgtggttatactgtcagcttccattgtggtaggagtcttagggaatgggctcgtgctgtggatgacagtcttccgcatggccaggaccgtaagcaccgtttgtttctttcaccttgctcttgcagattttatgctctccctcagtttacctatcgctatgtactacattgtttcgcgccagtggctactaggcgaatgggcatgcaagctctatataactttcgtgtttttgtcttattttgcaagcaactgcttactcgtgttcatttccgtcgacaggtgcatcagtgtgctgtacccagtttgggcattgaaccataggaccgtgcaacgggcatcatggctggcattcggagtatggctgcttgctgctgctctgtgcagcgcgcatctaaagtttagaactactcgaaaatggaacggatgcacccattgttacctagccttcaattccgacaacgagacagctcagatctggattgaaggagtagtggagggacacatcatcggtacaatagggcatttcctgctaggattcctcggccctctcgcgataattggcacttgcgctcatctcatacgggctaagctgctcagggagggctgggttcatgccaataggcctaagagattactgctcgttttagtatccgccttctttatcttttggtcccccttcaatgtcgttctgctggtacacttatggagacgggttatgttgaaggagatctatcatccccgtatgctgctcatcctgcaggcgagcttcgctcttggctgtgtgaatagttcgctgaacccattcttgtacgtgttcgtggggcgagattttcaggaaaagtttttccagtccctgacgagcgctctcgccagagcctttggggaggaggaatttctctcctcatgcccaaggggtaacgccccacgggagtag

SEQ ID NO: 224035 - DNA, 1146 bp, synthetic construct
  misc_feature 1..1146: note = Description of Artificial Sequence: Synthetic coding sequence
  source 1..1146: mol_type = other DNA
atgaggtcacacaccatcactatgactacgaccagtgtcagttcttggccctactcgtctcaccgtatgaggttcattacaaaccattccgaccaaccccctcagaacttcagcgcaacaccaaacgtaacgacttgtcctatggacgagaagctcctctcaaccgtcctgactacatcctactctgtgatctttatcgtcggacttgtggggaacattattgccttgtacgtgtttctgggtattcataggaaacgtaattctatccaaatctatctgctcaatgtcgctattgccgacctgctcctcatcttttgcctgccgtttcggataatgtaccacattaaccaaaataagtggacgttgggcgtcatactgtgtaaagtagtaggtacacttttctacatgaacatgtacattagtatcatcctccttggtttcatctctctagataggtacatcaagatcaaccgctcaatccagcaacggaaagccatcacaacaaagcagtctatatacgtctgctgcatcgtttggatgctcgccctcggcggtttcctgacaatgatcattcttaccctgaagaagggagggcacaattcaaccatgtgctttcactaccgggacaagcataacgccaagggcgaggcaattttcaattttatcctcgttgtaatgttctggctgatctttctgctaataattctatcgtacattaagatcgggaagaacctcctccggatttccaagaggcgctcaaaatttcctaattccgggaaatacgccacaactgctaggaatagtttcatcgtgcttatcattttcactatttgttttgtgccttatcacgcttttcggttcatttacataagcagccagctgaatgtgtcaagctgctattggaaggaaatcgtccacaagacaaatgaaatcatgctggttttaagctccttcaattcctgtttggaccccgttatgtatttcctgatgtcatctaatatcaggaagataatgtgccagcttctcttcaggcgatttcagggcgagccaagcaggagtgagagcactagcgagtttaagccgggatacagcctccatgacactagcgtggccgtgaagattcagtccagctctaagtccacttag

SEQ ID NO: 224036 - DNA, 1146 bp, synthetic construct
  misc_feature 1..1146: note = Description of Artificial Sequence: Synthetic coding sequence
  source 1..1146: mol_type = other DNA
atgaggagccataccattactatgaccaccacctccgtgagctcctggccttactcttcccatagaatgcgcttcataactaatcactcagatcagccaccccagaatttctctgcgacccctaatgtgacgacctgtcctatggatgaaaagttgttgtcaaccgtgctcactacttcatatagtgtcatttttattgtcggattggtcggaaatataatagccttgtacgtttttctgggtatacaccgaaagaggaactccattcagatttatctgctgaacgtggctatcgctgacctgctgttgatcttttgtctgcccttccgaatcatgtaccatatcaatcaaaacaaatggaccctgggcgtgattctttgtaaagtggtgggcactctgttttacatgaacatgtatatttccatcatcctgctggggtttatcagtcttgacagatacatcaagatcaacagaagtatccagcagcggaaggccatcaccacaaagcaatccatctatgtgtgttgcatcgtttggatgctagccttagggggattcctgaccatgataatattaacactaaaaaaggggggacacaactctacaatgtgctttcactatagagacaaacacaacgctaagggagaagcgatattcaatttcatcctcgtggttatgttttggctgatcttcctgctaattatactgagttacatcaaaattggaaagaatctgctgcgcatctctaaacggagaagcaaatttcccaattctggtaagtatgcaaccacagccaggaactccttcatcgttttaattatttttaccatctgtttcgtcccttatcacgcatttcgatttatttacatcagttcccagctgaacgtgagctcatgctactggaaggagatcgtacataagaccaacgaaataatgctggtgcttagcagctttaattcctgccttgaccccgtgatgtattttctgatgtccagcaacattaggaaaatcatgtgtcagttgttatttcgcaggttccagggagaaccttcaagatccgagagcacctccgagtttaagccgggttactccctgcatgatactagcgtggctgttaagattcaaagctcctccaagtctacttag

SEQ ID NO: 224037 - DNA, 1005 bp, synthetic construct
  misc_feature 1..1005: note = Description of Artificial Sequence: Synthetic coding sequence
  source 1..1005: mol_type = other DNA
atggatgaaaagctcctgtccacagtgctgacaacgagctatagcgtgatcttcatagttgggctcgtgggcaacatcatcgcgttatatgtattcctcggtattcataggaaacgcaattcaattcagatatacctcctgaatgtggctatcgcagatttgctgttgatcttttgtttaccttttcgaatcatgtatcacatcaaccaaaataagtggaccttgggagtcatcctgtgtaaagttgttggtactcttttctacatgaatatgtacattagcatcattctgctgggcttcatcagcctggacaggtatatcaagatcaaccggtctatacagcagcgtaaggctattaccaccaagcagtccatctacgtttgctgcatcgtgtggatgctcgccctgggcggattcctcactatgatcattctgacccttaagaaggggggtcacaactcaaccatgtgcttccattacagagataagcataacgccaaaggcgaagctattttcaactttatcctggtggttatgttctggttaatctttctgctcatcattctgagctatatcaagatcggaaaaaacctgctccgcatttcaaagagaagaagcaaatttccgaatagcgggaaatacgccactacggctcgaaacagtttcatcgtcctgatcatcttcactatatgttttgtgccttaccacgcgtttagatttatatacatatcttcacaattgaacgtcagctcttgctattggaaagagatagtacacaagacgaatgagatcatgctagtcctttcttcttttaacagttgcctagatccagtaatgtattttctcatgagcagcaatatacgcaaaattatgtgccaactcctctttaggcggttccagggtgaaccatcaagaagtgaatccacatcagaattcaaacctggctactcgctgcacgatacatcggtcgctgtgaaaatacagtcatcaagcaagagcacctag

SEQ ID NO: 224038 - DNA, 930 bp, synthetic construct
  misc_feature 1..930: note = Description of Artificial Sequence: Synthetic coding sequence
  source 1..930: mol_type = other DNA
atgaatgggacatataatacctgcgggagttctgatctgacatggcccccagcaataaagctagggttctacgcttatctcggcgtacttctggtgttgggcctcctgctcaacagtctggccctctgggtgttctgttgcagaatgcagcaatggacagagacacgaatctacatgaccaacttggccgtagcagacctctgcctcctctgcacccttcctttcgttctccatagcttacgcgacacatccgacacacctttatgtcagctcagccaaggtatctacctgaccaaccgttacatgtctattagtctggtcacggccatcgccgttgaccggtatgtcgcagtgaggcatccgttgcgcgcaaggggattgaggagccccaggcaagcagcagctgtgtgtgcagtcctgtgggtgctagttataggatctctggtggccaggtggcttctcgggattcaggaaggagggttttgttttcgcagcacgagacataacttcaactccatggcttttcctttactaggcttctacctgcccctcgccgttgtggttttctgctccttgaaggtggttaccgcccttgctcagagaccgcctaccgatgttggacaggccgaagccacacgcaaggctgcacggatggtctgggccaatcttctggtatttgttgtctgtttcttgcccttgcacgtgggtttgaccgtgagactcgccgtgggttggaacgcttgcgccttgctcgagactatacgccgtgccttgtacatcacatccaagctttcagatgctaattgttgccttgacgccatttgctattactatatggccaaggaattccaggaagcgtccgcactggcggtggctccctcagcaaaagcacacaagagtcaggatagtttgtgtgtgacactggcatag

SEQ ID NO: 224039 - DNA, 930 bp, synthetic construct
  misc_feature 1..930: note = Description of Artificial Sequence: Synthetic coding sequence
  source 1..930: mol_type = other DNA
atgaatggaacctataatacatgtggcagctccgacctgacttggccaccagcgattaaattaggtttctacgcctatcttggggtgctgctggtgttgggtctgctgcttaacagcctggccctgtgggttttctgctgtcgtatgcagcagtggaccgaaacccgaatttatatgaccaatctggccgtcgctgacctgtgcttactatgtacgctaccatttgtgctccacagccttcgggatacttcagataccccactctgtcagctctctcagggaatctatctgaccaaccgctacatgagcatatccctcgttacagcaattgctgtcgacaggtatgtggccgtgaggcaccctctcagggccaggggactacgtagccccagacaggctgcagctgtatgcgcagtactgtgggttcttgtcattggtagccttgtggccaggtggctcttaggcattcaagagggcggtttttgttttcggtctaccagacacaacttcaattcaatggcgttccccctgttgggattttacctgcctttggctgtcgtggtgttctgcagtctgaaggtcgtcaccgccctagcccagaggccacccaccgacgtggggcaagctgaagccactcggaaagcagccagaatggtctgggctaatctgctggtgttcgtagtgtgcttcctgccactgcacgtcggcctgacagtccgcttagccgtgggatggaacgcatgcgccctgctggagaccatcagacgcgctctgtatatcacaagcaaattatccgatgcgaattgttgtctcgacgcaatttgctactattacatggccaaggagttccaagaggcctccgccctcgcagtggcacctagcgcaaaggcacataagagtcaggactctctgtgcgtcacgttagcatag

SEQ ID NO: 224040 - DNA, 930 bp, synthetic construct
  misc_feature 1..930: note = Description of Artificial Sequence: Synthetic coding sequence
  source 1..930: mol_type = other DNA
atgaacgggacatataacacatgtgggtcatctgacctgacatggcccccagccatcaaattagggttctatgcctacttgggtgtactgctcgtactgggcctgttgctgaattcactggccttgtgggtattttgttgtcggatgcagcaatggacagagacccgcatctatatgacaaacctagcagtcgccgacctctgcctgctgtgcacactgcccttcgttctccacagcctgagagatacatctgatactccgctgtgccagctatctcagggtatttacctcaccaaccggtacatgagtatctccctggtaaccgccatcgctgtagaccgttatgtggccgtgagacatcccttgcgagcccgaggactgaggtcccctcgccaagccgctgctgtgtgcgctgtcctgtgggtcttagtgattggctccctcgttgccagatggctgctaggaatccaagagggcggattctgtttccgctcaactcgccacaacttcaatagcatggctttccccctcttggggttctacttgcccctggctgtggtggtcttttgctccctaaaggtggtaacagcactggcacagcgcccacccaccgacgtgggacaggctgaggcaaccaggaaggccgcacgcatggtgtgggcaaatctcttggtattcgttgtgtgtttcctacctctgcacgtaggactaaccgtgcggttagcagtgggttggaatgcatgcgctttgctcgagaccataagacgggcactctatataactagcaagttgagcgacgctaattgctgtctggatgccatttgctactactacatggcaaaagaattccaggaggcctcagcattggcagtggccccatccgccaaagctcataagtcccaggattcactgtgtgttactctggcatag

SEQ ID NO: 224041 - DNA, 930 bp, synthetic construct
  misc_feature 1..930: note = Description of Artificial Sequence: Synthetic coding sequence
  source 1..930: mol_type = other DNA
atgaacggaacttacaacacgtgtgggtccagcgacctgacgtggcccccagctatcaagctgggattttatgcctatctgggcgtgttattagtgttaggtcttctcttgaatagcctagccctgtgggtgttttgctgtcgcatgcagcagtggactgagacgcgcatttatatgacaaacctggctgtggccgacctttgcttgctgtgtactctcccattcgtgctgcactctctgagggacaccagtgacacacccctttgccagctgagtcaaggtatctatttaaccaatagatacatgagcatcagcctcgtaactgccatagccgtggatagatatgtcgcagtgcggcaccccctgagagctcgagggctcaggagccctcggcaagccgcagcagtgtgtgcggtgctctgggtcctggtaataggcagcctcgtcgctcggtggttgttaggcattcaggagggaggcttctgtttccgctcaacaaggcataactttaactcaatggccttccctcttctcggcttctaccttcctctcgctgtagtggtgttctgttcactgaaagttgtaaccgccctcgcacagcggccaccaacagatgtgggccaggcagaagcgacaaggaaggctgcgcgtatggtctgggccaacctactggtcttcgtagtgtgttttctaccccttcatgtaggactgactgtgcggttagccgtagggtggaacgcctgtgcactgcttgagacaatacgcagggccctctatatcacctcgaaactgtctgatgcaaactgctgcctcgatgccatttgctattattacatggccaaggaattccaggaggcaagcgcgctggcagtggcgcctagcgcaaaggctcataagagtcaggattccttgtgcgtgaccctcgcctag

SEQ ID NO: 224042 - DNA, 1023 bp, synthetic construct
  misc_feature 1..1023: note = Description of Artificial Sequence: Synthetic coding sequence
  source 1..1023: mol_type = other DNA
atgctgtctgggtcccgtgcggtccctacaccacaccggggttccgaggaactgcttaagtatatgcttcattcaccttgtgtctctctaactatgaacggcacctataatacatgtggcagctcggacctgacgtggccccctgctattaagctgggcttctacgcttacctgggtgtgctactggttctagggttacttctgaactccctcgccctttgggttttttgttgtcggatgcagcagtggacagaaacccggatctatatgacaaacctcgcagtggctgatctctgtctgttatgtactctccccttcgtgctgcatagcttgcgggacacatccgacactcctctgtgccaactatcacaggggatctatctgacgaaccggtacatgtcaatctcccttgtcaccgccatcgcagtcgacaggtatgtagcagtgcgacacccactgagggctagggggctgcggtcccccagacaggcagcagctgtgtgcgcagtgttatgggtgctggtgattggtagtctcgtggccagatggctgctgggcatacaggaaggcggattctgtttccgcagcacccgccacaacttcaatagcatggctttccctctgctgggtttctacttgcccttggccgtggtagtgttctgctcactaaaggtggtcaccgccctggcccaaagacccccaacagacgtgggccaggcagaggctacaagaaaagctgcacgtatggtttgggccaacctcctcgtcttcgtcgtgtgtttcctgcccctccacgtgggactgaccgtgcggctggcggtcggatggaatgcctgcgcgctgcttgagaccatacgcagggccctgtatatcaccagtaagctctcagatgctaactgttgtcttgatgccatctgctactactacatggccaaagagttccaagaggccagtgctttagcggtagcaccctctgccaaggctcataaaagccaggactccctgtgcgttactctggcttag

SEQ ID NO: 224043 - DNA, 1842 bp, synthetic construct
  misc_feature 1..1842: note = Description of Artificial Sequence: Synthetic coding sequence
  source 1..1842: mol_type = other DNA
atgagggccccaggggctctcctggccagaatgtctcgactgctgctgttgctgctgttgaaagtttcagccagtagtgccctcggagtggcccctgcatctcgcaacgagacatgccttggcgaatcttgcgccccaacagttattcaaagaaggggtagggatgcctggggccctggcaatagcgcccgagacgtcctgcgcgctcgggctccaagagaagaacagggagccgctttcttggctggcccaagctgggatctgcctgcggctccaggcagggatccagccgcaggacggggagccgaggccagtgctgcgggaccccctggcccaccaacacggccacccggaccgtggcggtggaagggagctaggggccaagaaccatctgagactctcggcagaggtaatcctaccgcactgcagctgttcctgcaaatctccgaggaagaggagaagggccctagaggcgcaggcataagcggcagaagccaggagcaatccgtgaaaacagtgcccggagcctcggaccttttttactggccaaggagggcgggtaagctgcagggatcgcaccacaaacctcttagtaagacagcgaacggactcgcagggcacgaggggtggaccatagcgctgcctggacgcgcacttgctcagaacggctcgttgggggaggggattcatgaacccggaggaccccgacggggtaattcaacaaacaggcgggtacggctcaagaaccccttctatccgctcacccaggagtcgtatggcgcatacgcagtgatgtgcctgtctgtcgttatcttcggaacaggcattatcggaaatttggcagttatgtgtattgtgtgccataactattatatgagatcaatctctaacagtttgctcgccaatctggccttttgggattttctcattatctttttttgccttcctctcgtcattttccacgagcttaccaagaagtggttactcgaagacttttcatgtaaaatcgttccttacattgaagtcgcctctttgggcgtgaccacgttcacactgtgcgctttatgtatcgaccggttccgagccgctactaatgtgcagatgtactatgagatgattgagaattgttcatctactactgccaaactcgccgtgatctgggtgggagctcttctcctcgctctgcccgaggtagtgctccgccagctcagcaaggaagacctcggcttcagcgggagggctcctgctgagcggtgcattataaagatcagtcccgatctgcctgacactatatacgtgctcgcgctaacatacgactctgctaggctttggtggtatttcggttgttacttttgtctgcccactctgtttacgatcacctgttctctggtgaccgctcgaaaaattcggaaagcggagaaggcctgcactcggggaaataaaaggcaaatacaactcgagtcgcagatgaattgtaccgtcgttgcactcacgatcctttacgggttctgtatcatccctgagaatatctgcaacattgtgactgcgtatatggctacaggggtcagtcaacagacaatggacttacttaacatcatcagtcagtttcttcttttctttaagtcatgcgtgacacccgttttgttgttttgcctttgtaagccttttagcagggcgtttatggaatgctgctgttgctgttgtgaggagtgtatccagaaatcctctaccgtgaccagtgatgataacgacaacgaatatactaccgaactggagcttagccccttctccaccattcgacgggaaatgtcgacttttgcatccgtgggaacacattgctag

SEQ ID NO: 224044 - DNA, 1362 bp, synthetic construct
  misc_feature 1..1362: note = Description of Artificial Sequence: Synthetic coding sequence
  source 1..1362: mol_type = other DNA
atggctagcccatccctgcccggttcagattgttctcagataatcgaccattcccacgttccggaatttgaagtagccacgtggatcaaaatcactctgattctggtgtacctcataatcttcgtaatgggtcttttaggcaacagcgctacaattcgcgttacacaggttctacagaagaaggggtacctgcagaaggaggtcactgaccacatggtgtctttggcttgtagcgacatcctggtgtttcttattggtatgccaatggagttttactctatcatctggaatcccctaacgaccagctcttatacactttcttgtaagttacacacattcctgttcgaggcctgttcatatgcaacactccttcacgtcttgacactcagttttgagcgatacatcgccatttgccacccgtttcgatataaagctgtctccgggccttgtcaggtcaaacttctgatcgggttcgtgtgggttacgtctgcactggtcgcattaccccttctatttgctatggggaccgagtatccccttgtgaatgtgccttcacacagaggcttaacgtgcaacaggagcagtactaggcaccacgaacagcccgagaccagtaatatgagtatctgtactaatttgagctccagatggacagtgttccaatcttccatttttggagctttcgttgtctatctggttgtgctgttgtctgtggccttcatgtgttggaatatgatgcaggtgctgatgaagagccagaaaggcagcctcgccggaggaacgcgtcctcctcagctgaggaaatcagaatctgaagagtcccggaccgccaggaggcaaacaatcatcttcctgcggttgatcgtggtaactctggcggtttgttggatgcccaatcagattaggcggattatggccgcagcaaaaccgaagcacgactggacaaggtcgtattttcgggcttatatgatcctcctgcctttcagtgagacctttttctacctgtcctccgtgattaatcccctgctgtatactgtgagcagtcagcagttcagacgagtattcgtacaggtactttgttgtaggctgtcccttcagcacgctaaccatgagaaaaggctccgggtccatgcccatagtacaactgactctgctcgcttcgtacagcgacccctcttgtttgccagccgccgtcagagtagcgccagacggacagagaagattttcttaagtacttttcagagcgaggccgaacctcaaagtaaatcccagtcactcagtctggagagtttagaacctaactcaggggctaagcctgcgaattccgccgcagaaaatgggtttcaggaacatgaggtgtag

SEQ ID NO: 224045 - DNA, 1089 bp, synthetic construct
  misc_feature 1..1089: note = Description of Artificial Sequence: Synthetic coding sequence
  source 1..1089: mol_type = other DNA
atgggcaaccatacctgggagggctgccacgttgactcaagggtggaccatctttttcccccttccttgtatatcttcgtaattggagtagggctgcctaccaactgcttggctctctgggccgcatatcggcaggtgcagcagcgaaacgagctcggcgtttaccttatgaatttgtccatagctgacctactgtatatatgcaccctccccttgtgggtcgattatttcctgcaccatgataactggatccatggtccaggcagttgtaagctgttcgggtttattttttatacaaacatctacatctccatcgcgttcctctgctgcataagtgtcgatcgctatctggctgtggcacatccactccgcttcgccagactgcggagagtaaagaccgcagtggcggtttctagcgttgtgtgggccactgagctcggggctaattcagctcctttgttccacgatgagctctttagggacagatacaaccacactttctgcttcgaaaagttcccaatggagggctgggtcgcctggatgaatctgtatagggttttcgtagggtttctgtttccttgggctctgatgctgctgtcctaccggggaatcctgcgggcagttcggggaagcgtttcaacggagagacaggagaaggcgaaaattaagagattggctctgtcactgattgcgatcgtattggtgtgttttgccccatatcacgtgttgctgctgagtaggtctgctatttatctgggccgtccatgggattgcggcttcgaagagcgggttttctctgcttaccacagtagcctagctttcacatccctgaactgtgtagctgaccctattctgtattgcttggtaaacgagggagcacgttccgacgttgcaaaagcccttcacaaccttctgcgttttttggcctccgataagccgcaggaaatggccaacgcctccctcaccctggaaacccccttgacctccaaacgcaatagcacagccaaggccatgaccgggagctgggcagccactccgccttctcagggggaccaggtccagcttaagatgcttcccccagcccaatag

SEQ ID NO: 224046 - DNA, 1041 bp, synthetic construct
  misc_feature 1..1041: note = Description of Artificial Sequence: Synthetic coding sequence
  source 1..1041: mol_type = other DNA
atggataccggcccagaccaaagttacttctccggaaaccattggtttgtcttttctgtgtacctgttaacttttcttgttggcctgccactgaatctgttggcactagtggtgttcgttggcaagctccgctgtcggccagtcgccgtcgacgttctgctgctgaatcttacagcaagtgacttgttgttactgctgttcctgccgttcaggatggtggaggcagccaacggcatgcactggcccctgccttttatcctgtgtcctctgtccggattcatttttttcaccacaatttacctcacagcactgttcctggctgctgtcagcattgaacgctttctaagtgtggctcaccctctctggtataaaactagaccacgcctagggcaagcgggacttgtctcagtggcgtgctggctgttggcgtctgctcattgtagcgtggtgtatgtgatagagttctccggcgatatctcccactcccaggggaccaatgggacgtgttacctggaattttggaaagatcagctggccatcctcttaccagtccgcctggagatggctgtggttctgttcgtggttccgctgataatcacatcttattgttatagcaggctcgtgtggatactggggcgaggaggctcccaccgcaggcagcgcagggttgccggtctggtggcggcaactctgctgaattttctggtctgttttggaccttacaatgtaagtcatgtggtggggtacatttgtggagaatcaccagtgtggcggatatacgttacccttctgagcactctgaattcctgtgttgatccctttgtatactatttctcctcgtctggctttcaagccgactttcatgaactgctgagacgattgtgtggactgtggggtcaatggcaacaggaatcatctatggagctgaaggagcagaagggaggagaagaacagcgcgctgacagacccgctgaaaggaaaacatctgagcactcccaggggtgtggaacaggagggcaggtggcctgtgctgaaaattag

SEQ ID NO: 224047 - DNA, 1119 bp, synthetic construct
  misc_feature 1..1119: note = Description of Artificial Sequence: Synthetic coding sequence
  source 1..1119: mol_type = other DNA
atggcctgcaattccacctctctcgaggcctatacttatttactgctaaatacctccaacgcgagtgattctggctctacacaactgccggcaccgctccgaatctcattagccatcgttatgttgctgatgacagtggttgggttcttgggcaataccgtcgtgtgcataatcgtgtatcagagacccgctatgcgatctgccattaatctcctactagccaccctcgctttttccgatattatgctgtctctttgctgtatgcccttcaccgcggtcactctcatcactgttcggtggcacttcggagaccacttctgtagattgagtgccaccctctactggttttttgtgctggagggcgtggcgattctcctgattatatccgtggatcggttcctcatcattgtccaacggcaagacaagttaaatccgagacgcgctaaagttattattgctgtgagctgggtgttgagcttctgcattgctgggccatccctgaccggatggactttggtggaggtgcctgctcgcgcacctcaatgcgttctcggttataccgagctgcccgctgacagggcgtacgtggtgactttggtcgtggctgtgttcttcgcgccattcggagtcatgttgtgcgcctatatgtgtattctcaatacagtgaggaagaacgctgtgcgtgtccacaaccagtccgattctctggatttgcgccagctcacccgggctggtctcaggcggcttcaaaggcagcagcaagtgtctgtcgacttatcgttcaagaccaaggcattcactaccattttgattctcttcgtgggattttcattatgctggctcccacatagcgtatactctctcctatccgtattctcacagcgattctactgtggctcatcgttttatgccacctctacctgtgtgctctggctttcttatctaaaatccgtgttcaatccgatcgtgtattgctggagaatcaagaaattccgcgaagcttgcatcgaactcctcccccagacatttcagattctccctaaggtgccagaacggattaggcgccgaatccaaccatccacagtttatgtgtgtaatgaaaatcagagcgccgtgtag

SEQ ID NO: 224048 - DNA, 837 bp, synthetic construct
  misc_feature 1..837: note = Description of Artificial Sequence: Synthetic coding sequence
  source 1..837: mol_type = other DNA
atgtctgcaccaggctctccagatcaggcttacgattttctcctgaagttcctgctggttggcgaccgcgacgtgggcaaatcagagatcctggaatcattgcaggatggcacagccgagtctccctattcccacctgggagggattgactataaaaccaccactattctcctggatggccagagagtgaaactcaagctgtgggacacctccggccaaggaaggttttgtactatctttcggtcctattcccggggagcccagggagttatattagtctacgacattgccaatagatggtcctttgaaggcatggatcggtggattaagaagattgaagagcacgctccaggagttccaaaaatactcgtcggtaataggctccatctggcattcaagcggcaagtgccgagggagcaggcgcaggcctatgccgaaaggctgggagttactttttttgaggtttcacctttgtgtaattttaatattatagaatcattcaccgagttagccagaatcgttctgttacgccatagactcaactggttaggacgccctagtaaagtcctgtctcttcaagacctgtgttgtcggacaattgtctcttgtacgccagtgcacttagtggacaagctaccactccccatcgcgctgcgcagccatttgaaatcattcagcatggccaagggcctgaacgccaggatgatgcgcggtctgagctattccctcacgacttcaagcacacacaagaggtcaagcctgtgtaaagtgaaaatcgtttgcccaccacagtcaccacctaagaactgtacccgaaattcatgcaagatcagctag

SEQ ID NO: 224049 - DNA, 585 bp, synthetic construct
  misc_feature 1..585: note = Description of Artificial Sequence: Synthetic coding sequence
  source 1..585: mol_type = other DNA
atggtcattcttgctgtcacaaaaaataagaaactgcggaattccggtaacatctttgtggtaagcctttcagtcgctgacatgttggtcgcaatttatccatatccattaatgctgcacgcgatgtccatcggcggttgggacttgtcccaactgcaatgtcaaatggtgggctttatcaccggactgagcgtggttgggtcaatttttaatatcgtggccatcgcgatcaatagatattgttacatctgccattcattgcagtacgagcgcattttctctgtgagaaacacatgcatctacttggttatcacttggatcatgaccgttttagccgtattaccgaacatgtatatcggaactatcgaatacgaccccagaacctacacttgtatctttaattacttgaacaaccctgtgttcacagtgaccattgtgtgtattcattttgttctgcccctgttgatcgtcgggttttgctatgtgcggatttggactaaagtgttggctgctcgggatcccgcagggcagaaccccgacaaccaactggccgagccaacgagcacagccgcttcaacactgtag

SEQ ID NO: 224050 - DNA, 1086 bp, synthetic construct
  misc_feature 1..1086: note = Description of Artificial Sequence: Synthetic coding sequence
  source 1..1086: mol_type = other DNA
atgaacgagtcccgttggacggagtggaggatcctgaacatgagttcgggaatcgtcaatgtgtctgagcgtcatagctgcccactgggattcggacattattccgtggttgacgtgtgcatcttcgaaacggtggtcatagtgcttctgacgtttctgattatcgccggtaacctcacggtaattttcgtttttcactgcgcacccctgctccaccactatacaacctcctatttcatccagaccatggcctacgccgacctgtttgtgggggtgagttgtctcgtgccaactctcagtctgctgcactacagcaccggtgtgcacgaaagtcttacatgtcaagtgtttgggtacattatatccgttctcaagagtgtgtctatggcctgtcttgcttgtatttcggtggaccggtacctggccattactaagccgctttcttataatcaattagtcacaccatgcaggctacgcatatgtatcattcttatctggatctactcctgcctgatctttttaccgtccttcttcggttggggtaaaccgggataccatggagatatattcgagtggtgtgctacatcctggctgactagcgcatattttactgggttcattgtgtgtctcttgtatgccccagcagcgttcgtggtatgtttcacctacttccatatctttaagatctgtaggcaacacactaaagagatcaatgacagacgtgcgaggttcccatcccatgaggtggacagctcacgggagacaggccactcaccagatcgaaggtacgcaatggtactatttaggatcacaagcgtgttttatatgctttggcttccctacatcatttattttctgcttgagagctcaagggtgctcgataatccaactctgagcttcctgacgacctggctggctatttccaactctttctgcaattgtgttatttactcgctatctaacagtgttttcaggctgggccttaggcgtctgagtgagaccatgtgtaccagctgcatgtgcgtgaaggaccaggaggcccaggaaccaaaacctaggaagagagccaactcatgttccatttag

SEQ ID NO: 224051 - DNA, 960 bp, synthetic construct
  misc_feature 1..960: note = Description of Artificial Sequence: Synthetic coding sequence
  source 1..960: mol_type = other DNA
atgtcccagcagaacacatccggcgactgcctctttgacggtgtcaacgaattaatgaaaactctacagtttgccgtacacatccccactttcgttcttggcctgctgctgaatctcctcgccattcacggcttcagcacttttcttaagaatagatggccagattacgccgctaccagcatttatatgatcaatctcgctgtatttgacctgctgctggtattaagccttcccttcaaaatggtcctctcccaagtgcagagcccctttccttctctgtgtactctcgtggaatgtttatatttcgtctccatgtacgggtcagtattcactatctgttttatttccatggacaggtttctcgccatcaggtatccactgttggtcagtcatttaaggtctcctaggaaaatcttcgggatctgctgcactatatgggtacttgtgtggacgggatcgatacccatatactcctttcacggaaaagtggagaagtacatgtgctttcataacatgtcggacgacacttggtccgctaaggtcttcttcccactggaggtgtttggctttctgctgccaatgggaatcatgggcttttgttgcagccgttccatccatatactcctaggacgtagagatcacacacaagactgggtccagcagaaggcttgtatttatagcatcgctgccagccttgccgttttcgtggtgagcttcttgccagtccatctcggattcttcctgcagttcctcgttagaaattctttcatagtggaatgccgggcaaaacaaagtatcagcttcttcttgcaactttcaatgtgttttagcaatgtgaactgctgcctggacgtattttgttactacttcgtgatcaaggaattcaggatgaatatccgcgcacacagacctagtcgtgtccagttagtactccaggacacgacaatctcgcgcggttag

SEQ ID NO: 224052 - DNA, 960 bp, synthetic construct
  misc_feature 1..960: note = Description of Artificial Sequence: Synthetic coding sequence
  source 1..960: mol_type = other DNA
atgagccagcaaaacacttccggggactgcctgttcgacggggtgaacgagctgatgaaaactctgcagttcgcggtccatatccccacctttgtcttgggtctgttactgaacttactggcaattcacgggttctcaacatttctgaaaaatcgatggcctgactacgccgcaacctctatctatatgattaacctggctgtgtttgatcttttgctggtactctccctgccatttaagatggtgttgagtcaagtccaaagcccttttcccagcctctgtaccctggttgaatgtctctatttcgtaagtatgtatggttccgtgttcacaatctgcttcatcagcatggaccgcttcctggcaattaggtaccctctgctagtctctcacttgaggtctcctagaaagatttttggcatctgctgcaccatctgggtcctggtgtggactggctctattcctatctatagttttcatggaaaggtggaaaagtacatgtgttttcacaacatgagcgacgatacctggagcgctaaagttttttttcctcttgaggtctttggctttctgttacccatgggaataatgggcttttgctgttcaaggagtattcacattcttcttggcaggagagatcacacgcaggattgggtgcagcagaaggcctgtatctattccatagcagctagcttggccgtgtttgtggtgtcattccttcccgtgcacctcggatttttcttacaattcctggtacgaaattcctttatcgtggagtgccgagctaagcagagtatctcttttttcctgcaactgtccatgtgctttagtaacgttaactgttgtctggacgtgttttgttattacttcgttattaaagagttccggatgaatatccgcgcacatcgacccagcagagtgcagctggtcctgcaggacaccacgatcagtcggggttag

SEQ ID NO: 224053 - DNA, 729 bp, synthetic construct
  misc_feature 1..729: note = Description of Artificial Sequence: Synthetic coding sequence
  source 1..729: mol_type = other DNA
atgtcccagcagaacaccagtggggattgcttattcgatggggtgaacgaactcatgaagacattgcaatttgcagtacatatccccacatttgtgctcggcttactgctcaacctgctggcaatccacggcttctctacttttctgaagaacaggtggcccgactacgccgcaacctcaatctatatgatcaacttagccgtcttcgaccttctcctcgtcctgagccttccttttaagatggtattgtcacaggtgcagagcccctttccctcgctctgcaccctcgtagagtgcctatacttcgtgtccatgtacggcagtgtctttacgatctgctttatcagtatggacaggtttttggctatacggtatcccctgctggtcagccacctgcgttcccccagaaagatttttggcatctgctgtaccatttgggtcctcgtctggaccggaagcatccctatttattctttccacggaaaggtcgaaaagtacatgtgctttcacaatatgtctgacgatacatggtcagccaaggtcttctttcctttggaggtcttcggtttcttgttgcccatgggaattatgggcttctgttgctcacggtcaatacacattctgttaggtcgcagggatcacacccaggactgggtgcaacagaaagcatgtatttatagcatcgctgcctcgttggccgtgttcgtcgtgtcatttctgcctgtatag

SEQ ID NO: 224054 - DNA, 960 bp, synthetic construct
  misc_feature 1..960: note = Description of Artificial Sequence: Synthetic coding sequence
  source 1..960: mol_type = other DNA
atgtcccagcaaaacacatccggggattgtctgtttgacggtgttaacgaactaatgaagaccttgcagtttgcagttcacattcctaccttcgtgctgggcctgctgttaaatctattagccattcatggcttctccacctttctcaaaaacagatggccggactatgcggctacatcgatctatatgatcaacctggctgtgttcgaccttttgcttgtgctgtcactaccttttaaaatggtgttgtcccaggtgcagtcccctttccccagtctgtgtacattggtggaatgcctgtactttgtttccatgtatggctctgtgtttaccatctgttttatctcgatggacagatttctcgcaatcagatacccccttttggtgtcccacctacgatctccgcgaaagattttcggaatttgctgtactatctgggtgttggtgtggaccggttccatccccatttacagctttcacggaaaggtagaaaaatacatgtgcttccacaatatgagtgacgatacgtggtccgctaaagtgttttttcctctcgaagtgtttgggtttcttctcccgatgggcattatgggtttctgttgtagccgctctatccatatcttgctgggacgcagggaccacacacaagactgggtgcaacagaaagcatgtatctatagcattgccgcaagtctcgccgtcttcgttgtgagttttctcccagtacacctggggttctttctccagtttttagttcgcaactcctttattgtggagtgccgtgcaaagcaatccatctcattcttcttgcagttaagcatgtgtttctcaaacgtgaattgctgccttgacgtgttctgctattacttcgtgataaaagaatttcggatgaatattcgagcacatcggccaagccgggtgcaactggtgttacaagacaccactatctctcgaggctag

SEQ ID NO: 224055 - DNA, 1572 bp, synthetic construct
  misc_feature 1..1572: note = Description of Artificial Sequence: Synthetic coding sequence
  source 1..1572: mol_type = other DNA
atgacaccgcagtctctcctgcagaccacacttttccttctgtccctgctctttcttgtgcagggggctcacgggagaggccaccgggaggacttccgcttttgcagccagcagctgcagagcttggaaagcaagctcacaagcgttcgcttcatgggcgacatggtgagttttgaagaggatcggattaacgctacagtgtggaagctgcagcctactgcaggactgcaggacctccacatccacagccgtcaggaagaagaacagagcgaaatcatggaatactcagtcctgctccctcgcaccctctttcagcgaactaaaggtaggtccggcgaagccgaaaagcgattgctcctcgtggacttttcttctcaggcccttttccaggacaaaaactcttcgcaggtgcttggtgaaaaggtcctgggcatcgtggtacagaatactaaggtagcgaatttgactgaacctgttgtactcacattccagcatcagctgcagccgaaaaatgtcaccctgcaatgcgtgttctgggtggaagatcctacattatcaagtccagggcattggtctagcgcgggttgtgagactgtgcggcgagagacacagaccagttgcttttgtaaccacttgacatatttcgccgtcctgatggtgagctcggttgaagtggatgccgtgcacaagcactacctatcactgctgtcttacgtcgggtgcgtcgtgagcgcattggcctgtctggtgacaatagctgcatacctctgttctagggtacccctgccttgccgccgaaaacctcgagactatactattaaggtccacatgaacctcctgcttgctgttttcctgcttgacacaagcttcctactcagtgaacccgttgcgttgaccgggagcgaggccggatgcagagccagcgccattttcctccacttcagtttactgacctgcttatcttggatggggttagaaggctataacctgtaccgacttgtggttgaggtattcgggacctatgtcccaggctacctcctgaagctatcagccatgggctgggggtttccgatttttttggtcaccctggtcgctctggtggacgtggacaattatggaccaattatccttgctgtgcaccgtaccccggagggggtgatttaccctagcatgtgctggatacgtgacagcttggtgtcctacataactaatttaggactgttctctctggtattcctgtttaacatggcaatgctcgctactatggtggtgcagattctgagattgaggccgcacactcagaaatggtcccacgttctgaccttgctaggtctttcactcgtgttgggcctcccatgggccctgatttttttctcatttgcaagcggtacttttcagcttgtggtgctctacctgttcagcatcataacatctttccaaggatttctgatctttatctggtactggagcatgaggctgcaggcgagagggggtccttcaccgctcaagtctaattcagactctgcaagactcccaatatcctcaggatctactagcagttctagaatctag

SEQ ID NO: 224056 - DNA, 2082 bp, synthetic construct
  misc_feature 1..2082: note = Description of Artificial Sequence: Synthetic coding sequence
  source 1..2082: mol_type = other DNA
atgacaccccagtcattgctgcaaactactctgttcctgctgagcctcctgttcttagtccagggagctcacggccgaggccatagggaagatttcaggttttgttcacaacgcaaccagacccacaggagctctcttcactataaaccaacacccgacctgcgcatcagtatcgaaaacagcgaggaagctctgaccgtccacgcaccattccccgcagctcacccagcctctaggagcttcccggatcctagaggactctaccacttttgtctctactggaaccggcacgcgggaaggctgcacctgctctatggcaagcgtgactttctcctgtcggataaggcttcatcgcttttgtgcttccagcaccaagaggagtctttggctcaaggcccacccctattagccacctctgtgacttcttggtggagtcctcagaatatctccttaccatcagccgcatcatttacattctcattccacagccctccgcacacggcggctcacaatgcatctgtcgacatgtgtgagttgaaaagagaccttcagttgctgtcgcaattcctgaaacacccacagaaagcatcccgtaggccctcagccgctcccgctagccaacagctgcagagtctggaaagcaagcttacctcagtgagatttatgggcgacatggtctccttcgaagaggaccggatcaatgcgacagtttggaagctgcaacccactgccggactgcaggacctgcacatccatagccgacaggaggaggaacaatcagagatcatggagtatagcgtactcctcccccgaactctcttccagcgcaccaaaggacggagtggagaggctgaaaagcgtttgctgctggtggacttctcctctcaggcactattccaggacaaaaactctagccaggtcctgggagaaaaggtcctgggcatcgtggtccaaaataccaaggttgccaacctcaccgagcccgtggtattgacattccagcaccagctgcagcctaaaaacgtgacccttcagtgcgttttttgggtggaggatccaactcttagtagtcccggacattggtcaagtgctggatgcgagaccgtgcgcagggagacccagacgtcttgcttttgcaaccacctcacatacttcgccgtgctgatggtgtcatccgtggaggtcgacgctgtgcataagcactatctgtcccttctttcttacgtgggatgcgtggtgtctgccttggcatgtctggttacaatcgccgcttatctttgctctcgagttcctttgccatgtaggagaaagccacgcgactataccattaaagtccacatgaacttactgctggctgtcttcctgctcgacacaagcttcctcttgtcagagcctgtggctttgaccggttccgaagccggatgcagagccagcgctatcttcctgcattttagtctgttgacctgtcttagctggatgggcctcgagggttacaacttgtatcggctggtggtcgaggtgttcggcacctacgtgcccggatatctactgaaactctccgccatgggctgggggtttcctattttcctggtcaccctggtggcacttgtggacgtggacaactacggaccgataatactcgctgtgcatagaacccccgaaggagttatatatccatccatgtgctggatccgcgactccctggtgagctacatcaccaatttaggactgttttccctggtttttctttttaacatggccatgcttgccaccatggtcgtccaaatattgcgattgcgcccacacacccagaagtggtcccacgtgcttaccttattagggctgagcttagttctgggcttgccttgggcattgattttcttcagctttgcctcaggcaccttccagctggtggtcctctatctgtttagcatcatcacctcattccaggggtttctgatctttatttggtactggtccatgagattacaggcgagaggagggccttcaccgctgaagagcaatagcgactccgcacgactgcctatttccagcggtagcacaagcagctcaaggatctag

SEQ ID NO: 224057 - DNA, 2082 bp, synthetic construct
  misc_feature 1..2082: note = Description of Artificial Sequence: Synthetic coding sequence
  source 1..2082: mol_type = other DNA
atgacaccacaaagccttctccagactacattgttcctgttatccctgctgttccttgtccagggtgcccacggacgaggtcacagggaggatttccggttctgctctcagagaaatcaaacgcatcgctccagtctccactacaaacctacgcctgacttgaggatctccattgaaaactcggaagaggccctgacagtgcacgcaccgttccctgccgcacatcccgcttcccgtagcttccccgaccctcgcggtctgtatcacttctgcttgtattggaataggcatgccggaagattgcacctgctgtacgggaagcgggactttctgctcagcgataaggcgtcttccttattgtgctttcagcaccaggaggagagtctggcacaaggtccacctctgctcgcaaccagtgtgacctcttggtggtctccgcagaacatttccttgcccagtgccgctagtttcaccttctcctttcactccccgccacatactgctgcacacaacgcctccgttgacatgtgtgaactgaaacgcgaccttcagcttctgagtcagtttctgaagcatcctcagaaggcttctagacgcccttctgctgccccagccagccagcagcttcagtcactggagagcaagctgacaagcgttcggttcatgggcgacatggtctcttttgaggaggaccgtattaacgccactgtttggaagctgcagcctaccgccggtctccaagacttgcatattcatagccgccaggaggaggagcaatcagagatcatggaatattcggtgctgctaccaaggacgctgtttcaaaggaccaaaggcaggtctggggaagctgagaaacggctcctgctggtcgacttttcgagccaggccctctttcaggacaagaattcgagccaggtgctcggggagaaggtgctgggaattgtcgtgcagaatactaaagtggctaacctgacagaaccggtggtcctgacgtttcaacaccagttacagcccaagaacgtgaccctgcagtgcgtattctgggtggaggaccccaccctgagctccccgggacactggagcagcgctggatgcgagactgtgagaagagagacacaaacgtcctgcttttgtaaccacttaacatatttcgcggtcctgatggtttcttctgtggaagttgacgctgtgcataaacattacttgagccttctgtcttacgtgggttgcgtcgtgtccgctctagcgtgcctggtgaccatcgctgcctacctgtgctcgagagtccctttaccttgcaggagaaagcccagagattacaccatcaaggtacacatgaacttgctgctggcagtatttctgcttgatacttctttcctgctgtccgaacctgtggctcttacagggtccgaggctggctgccgtgcctcagccatttttctacatttcagcctgcttacatgcctttcctggatgggtttagagggatataacctgtatagactcgtggtggaggtctttggtacctatgtccctggctacttattgaaacttagtgccatggggtggggctttcctatattccttgtgactctggtcgcactagttgacgttgacaactacgggccaatcatattagcagtgcacaggactccggaaggagtcatctacccgtcaatgtgctggatccgggactcacttgtttcatatatcacaaatctggggctattctcgcttgtgttcctctttaatatggcgatgcttgccacaatggtggtgcaaatattgcgcctgcgaccccatacgcagaagtggagccacgtactgaccttactcggcctatctctggtcttggggcttccatgggccttgattttcttctcttttgcctccggaacctttcaactggtcgtcctgtatctgttcagcatcattaccagtttccagggtttcttgatctttatttggtactggagcatgaggctgcaggcacgcggtggcccttccccactgaagagtaatagcgacagtgctcgactccctatttctagcggaagtacatcctcttccaggatatag

SEQ ID NO: 224058 - DNA, 2064 bp, synthetic construct
  misc_feature 1..2064: note = Description of Artificial Sequence: Synthetic coding sequence
  source 1..2064: mol_type = other DNA
atgacgcctcagtctctgctgcagactacactgttcctcctcagcctgctgttcctggttcaaggcgcacacggcagaggccatagggaggatttccgtttctgctcacagaggaatcaaacgcacagaagctccttgcattataaacccactcctgacctacgcatatccatagaaaacagcgaggaggccctgaccgtgcatgcacccttccctgcggctcatcccgcttcaaggagtttccctgaccccagggggctgtaccacttttgcctctattggaaccgacacgctggcaggctccatttgctgtatggcaaaagagactttctgctgagcgacaaggcgtcttccctgctatgctttcagcaccaggaagaatctctagcacagggccctcctctgctggcaacaagcgtgacatcatggtggagcccccagaatatttctctgcctagcgccgcatcattcacattttcttttcatagcccaccccacaccgctgcacataatgcgtccgtggatatgtgcgaattgaagcgcgacttgcagctgctcagccaattcctcaaacatcctcagaaggcatctagacgaccatcagccgctccagcctcccagcagctgcagtccctggagtccaaactgaccagcgttcggttcatgggggacatggtctccttcgaggaggacagaataaacgctacagtgtggaaactccaaccaacagctgggctgcaggacctgcacattcattccagacaggaggaggagcaaagcgagatcatggaatatagtgttttgcttccacgaactctgttccagcgtacaaaaggtaggagcggcgaagccgagaaacgcctgctgcttgtcgatttctcttcgcaggctctctttcaggataagaactcatctcaagtgcttggggagaaagtacttggcatcgtggtgcagaacacaaaggtggctaatctgacagagccagtcgtattgacatttcaacatcagctacaacctaaaaacgtcacccttcagtgtgttttttgggtggaggacccgaccctgagtagccccggacattggagctcagctggctgcgaaactgtcaggagagaaacacagacttcttgtttttgtaaccacctgacctattttgctgtgctgatggttagttcagtcgaggtcgatgctgttcataaacactacctgtctcttctgtcttacgtgggctgtgtggtgtccgctctcgcctgcctggttaccattgcagcctacctctgctctcggaggaaaccaagagactacactatcaaggtacacatgaatctattgctggccgtttttttgttggatacaagctttctcctgagcgaacccgttgccctcaccggctcagaagccggatgtcgcgcaagcgccatctttctccacttttcgctccttacctgcctatcctggatgggcctggagggatataatttgtaccgcctggtggtcgaggtcttcggaacatacgtgcccggatacctcctcaagctttccgctatggggtggggtttcccaatatttctcgtcactttggttgcgctagtggatgtcgacaattacggtccaatcatcttggctgtacaccgaacacccgaaggagtgatctatccttccatgtgttggataagggattctctggtaagctatatcacaaacctcggcctgttctccctcgtttttctgtttaacatggcgatgctggccaccatggttgtccagattctgcgactgcgaccgcacacgcaaaagtggagccatgtgctaacgcttctagggctgtctctggtgctcggtttaccctgggcattgatcttcttctcctttgctagcggcacttttcagctggttgtgctgtatctgttcagcatcattacatcattccagggcttcctgatcttcatttggtactggagtatgcggctacaagctcggggtggcccaagtcctttgaagagcaattctgatagcgctcggctgccgatctcgagcggatctaccagcagcagtcgtatctag

SEQ ID NO: 224059 - DNA, 2082 bp, synthetic construct
  misc_feature 1..2082: note = Description of Artificial Sequence: Synthetic coding sequence
  source 1..2082: mol_type = other DNA
atgacaccacagagtctgttgcagaccacactttttctactgtcactgttgttcttggtacagggcgctcatgggaggggccatcgggaggatttccgattctgcagtcagagaaaccagacccaccgttcaagcttgcattacaagcccacacctgacctcaggatttccatcgaaaattcagaagaggctctaacagtccatgcccctttcccggcagctcaccctgcttcccgttccttccccgacccacggggtctataccatttttgtttgtactggaacaggcatgcaggaaggcttcatctgctctatggtaaacgagacttcctcctgtctgacaaggcgtccagcctcttgtgcttccaacaccaggaagaatccctagcgcagggtcctcctttattggccaccagcgtgactagctggtggtctcctcagaacatctcactaccttctgctgcctccttcacttttagttttcattctccccctcataccgctgcgcacaacgcttctgttgatatgtgcgaattgaaacgcgatcttcaactgctctcccagtttctaaagcacccacagaaggcttcccgtaggccctcagctgctccggcttctcagcagttgcagtccctggagagcaaattgacttccgtgcgctttatgggagatatggtgagcttcgaggaagaccggattaatgcaactgtctggaaactccaacctacggcaggcctgcaagacctgcatattcacagccgccaggaggaagagcagtcagagattatggagtatagcgtgctcctccccagaacattattccagaggactaagggtaggtccggagaggcagagaagaggcttttgctagtggacttcagctcccaagccctctttcaggacaaaaacagcagccaggtgttgggtgagaaagtgttggggattgtcgttcagaataccaaagtggccaatctgacagagcctgtggttctcacgttccaacaccagttacagccaaaaaatgtgacgctgcagtgtgtcttttgggttgaagaccctacgttaagctcccctgggcattggtcatcagcgggatgtgagaccgtgcggagagaaactcagacaagttgtttttgtaaccacctgacatattttgcggtccttatggtctcctccgttgaggttgacgccgttcacaagcactacctgtcactcctgtcgtacgtgggctgcgttgtgagcgccttggcttgtctggttacaattgctgcctacctctgcagccgggttcctctcccctgtcgaaggaagcctcgtgactacacaattaaagttcatatgaatttactcctcgccgtgtttcttttggatacctcttttctgctctccgagccagtagccctcacgggttccgaggctggctgtcgcgcttccgcaattttcctacatttttccctgcttacttgcctgtcttggatgggcctggaaggatacaacctgtaccgactagtggtggaggtcttcggcacctacgttccaggctatctgcttaagctgagtgcgatggggtggggtttcccgatctttctcgtgaccctggtcgcgttagttgatgtggacaactatggacctattatcctggccgtccaccggactcctgaaggagtcatctatccctccatgtgctggatccgtgatagcctcgtgtcttacattacgaatctgggactgtttagtctggtttttctcttcaacatggctatgttggctacaatggtggtgcaaatcctgagactccgcccacacacccagaagtggtcgcatgtcttgactctgctgggcttgtccttggttcttggcctcccttgggccctgatctttttttctttcgctagtgggactttccagctggtagtcctgtatctctttagcattatcacgtcattccagggatttctgatcttcatttggtactggtcgatgcgtttgcaggccagaggtgggccatctcccttaaaaagtaacagcgatagtgctcgtctcccaattagctccggaagtacgagttcgagccgaatctag

SEQ ID NO: 224060 - DNA, 2064 bp, synthetic construct
  misc_feature 1..2064: note = Description of Artificial Sequence: Synthetic coding sequence
  source 1..2064: mol_type = other DNA
atgactcctcagagcctgttacagacaacgctctttctcctgtcgttactgtttttggtgcagggcgctcacggcaggggccaccgagaagactttagattctgtagccaacgcaatcaaacccaccggagcagcctccattataagcccacccccgacctccggatctctattgaaaactcagaggaggccctcacagtgcatgcaccatttccagcagcacatccagcgtcacgaagcttcccggatccgagaggcttgtatcatttttgtctgtattggaatcggcacgcgggacgcttacacctgctctacggaaagcgggatttcctcttgtcagataaggctagcagcctactgtgctttcagcaccaagaggagtccctggcacagggaccccctctgttggctacgagtgtgacttcctggtggtcccctcagaacatcagcctcccaagcgctgcttcatttaccttttcttttcatagcccgccacacactgcagcgcataacgcttccgttgatatgtgtgaactaaagagggatctacagcttctcagccaatttttgaagcacccgcagaaggcttctagacgcccttccgctgcccctgcctctcagcagttgcaaagtttagagagcaagctaacttccgtccgattcatgggcgacatggtttctttcgaggaggacaggattaacgccactgtatggaagctgcagcccacagccggtctgcaggatttacacatacactctaggcaggaggaggagcagagcgaaattatggagtattctgttctgctcccaagaacattgttccagaggacaaaaggacggtcaggcgaggctgaaaagaggctacttcttgtcgacttcagctcccaagctcttttccaagacaaaaattcctcccaggtgctgggtgagaaggtattaggcatcgtcgttcagaatactaaggtagccaacttaaccgaacccgtggtgttaacctttcagcaccaactgcagcctaaaaatgtgactctacagtgtgtattctgggtcgaagatcctactctcagctcccctggccattggtctagcgccggttgcgagacggttcggagagagacccaaacttcctgcttttgtaatcacctaacatacttcgccgtcctgatggtcagcagcgttgaggtcgacgcggtgcataagcattatctgtcattactttcttatgttggatgcgtagtatccgcactggcgtgtctcgtgactatagcggcttacctgtgcagtaggagaaaacccagagactatactattaaggttcacatgaacctgttacttgccgtctttctgctggacacctcctttctactcagcgaacccgtcgcgttgaccggaagcgaggcgggatgcagggctagcgcaatattcctgcacttctccctacttacctgcttgagctggatgggactcgaggggtacaatctgtaccgactggtagttgaggtctttggaacgtacgtgccagggtatctgctgaaactgagtgcaatgggatgggggtttcctatcttccttgtgaccttggtcgctctggtggacgtggacaattacggaccaatcatcttggccgtacacagaacccctgagggcgttatctatccttcaatgtgttggatccgggattcgttggtgtcatacattacaaacctgggcctgttcagtctcgtcttcctgttcaacatggcaatgttagctactatggtcgttcagattctgcggctgagaccccatacccaaaagtggagccacgtgctgaccctgcttggactgagcctggtcctcggcctcccatgggcgcttatctttttctcatttgctagtggaacattccagttggttgtgctgtacctattttcaatcatcaccagctttcagggcttccttatcttcatttggtactggtctatgagactgcaggccaggggtggaccatccccactgaagtccaactccgattctgcgaggctcccgatctcttctggatccacgtcaagctctcgcatttag

SEQ ID NO: 224061 - DNA, 2064 bp, synthetic construct
  misc_feature 1..2064: note = Description of Artificial Sequence: Synthetic coding sequence
  source 1..2064: mol_type = other DNA
atgactccacagtccttacttcagaccactctgttcctcctgtcattgctgtttctagtgcagggagcgcatggtcgcggacaccgggaagacttccgcttctgctcccagaggaatcaaacacacaggtccagcttgcattacaaacctacacctgaccttcggatctcaattgagaactctgaagaagctctcacagtgcatgccccatttcctgcggctcatccagccagtcggtctttccccgacccaaggggtctttatcatttctgtctgtattggaaccgacatgcagggagattgcaccttttatatggaaagagggactttttgttgtctgataaggccagttcccttctgtgctttcagcaccaagaggagagtctggcccagggcccaccacttctggcgactagtgtgaccagttggtggtctccacagaatatctcacttccctccgcggcatcattcacattctcctttcacagcccacctcacacagcagcccataacgcgagtgtggacatgtgcgagcttaaacgcgatctgcagctactctctcagttcttgaagcacccacagaaggcctcacgaaggccttccgcagcccctgcctcccagcaactgcaatcactggaatctaaactcacctcagtaaggttcatgggtgatatggtctcgttcgaggaggaccgcatcaacgcaacggtttggaaactccaacctacagccggactgcaggacctgcacatccactcaagacaggaggaggaacaatctgagatcatggagtacagcgttctcctccccagaacactcttccaacgcacgaaagggaggtctggagaagccgagaagcgcttactactggtggacttctcgtcccaggccctgttccaggataagaactcttctcaggttctaggtgagaaggtactcggcattgtcgttcagaatactaaagtggctaacctcacagagcccgtcgtgctcaccttccagcatcagctccaacctaagaacgttaccctgcaatgcgttttctgggtggaggaccccaccctctcttctcccggtcactggagctcggctggttgcgaaaccgtgaggagagaaactcagactagctgcttctgtaatcacctcacatatttcgccgttctcatggtgagctccgttgaagttgacgccgtccataagcattacttatcattgctgtcctacgtggggtgcgtggtgtccgccctggcgtgcttagtgaccattgctgcttacttatgcagccgtcggaaacccagagactatactattaaggtacacatgaacctgctgctcgccgtgttcctgttagatacatcattcctcctgtccgagccagtggccctcaccgggtctgaagctggatgccgggcaagcgccatctttctgcatttctcacttctgacgtgtttgtcatggatgggtctcgaagggtacaacctttaccgtctggtcgtggaagtcttcggaacttacgttccgggataccttttgaaactgtcagccatgggttggggctttcccatctttctggtgactctagtagcgttagtggatgtggataactacggtcccatcatcctggccgtgcataggacccctgaaggcgttatttacccctccatgtgttggatacgagatagtttggtatcctacattactaatttggggctgttcagtcttgttttccttttcaatatggccatgcttgccacgatggtggtccagatcctgcggttgcgccctcatacccagaagtggtctcacgtcctcactttgttggggctgagcctggtgctgggcctgccttgggcactcatattctttagctttgctagcggcacctttcaacttgtagttttgtatctgttttccattattacttcatttcagggattcctcattttcatctggtattggtcaatgcggcttcaagcccgaggcggaccatcacccctgaaatctaattccgactccgctcggttgccgatttcttccggatcgacctcctcctctcggatttag

SEQ ID NO: 224062 - DNA, 1539 bp, synthetic construct
  misc_feature 1..1539: note = Description of Artificial Sequence: Synthetic coding sequence
  source 1..1539: mol_type = other DNA
atgtgtgaactgaagcgtgatttgcagctcttgagtcaatttctgaagcacccacagaaggcttcacgcaggcctagtgcagcccctgcgagccagcagttgcagtctttggagtccaaactgacgagtgttagatttatgggggatatggtgtcgttcgaagaggaccgtattaatgccaccgtgtggaagctgcagccaactgctggtttgcaggaccttcatatccatagtcgccaagaggaagaacagtccgagataatggaatactccgtgctgctgcctagaaccctgttccagcgcaccaagggcaggagtggcgaagctgagaagcgactgctgctagttgatttcagctcacaggccctgttccaggataagaacagttcccaggtgttaggagaaaaagtactgggcatcgtggtccagaataccaaggtcgcaaatctcaccgaacccgtcgtacttactttccagcaccagttgcagccgaagaacgtgacactgcaatgcgtattctgggtggaggatcctacccttagtagccctggacactggagtagtgcaggctgcgagaccgtccgacgggagactcagacatcctgtttctgtaaccacctcacttatttcgccgttctcatggtttccagtgtggaagtggatgccgttcataaacattacctgtctctgctgagttatgtcgggtgtgtggtgtccgccctagcctgcctggtgactatcgcggcttatctgtgttcacgaaggaagcctcgcgactatacaatcaaggtgcacatgaacctcctgttggccgtgttcctgctcgatacgtccttcctcttgagtgagcctgtggccttgaccggttcggaggccggatgcagagcatcagcaatcttcttgcatttttcactgttaacctgcttgtcatggatggggttggagggctacaacctctatcgactcgtggtcgaagtcttcgggacttatgtgccaggctacctgcttaagctgtctgcaatgggctggggttttcctatattcctggtaaccctggtcgccttggttgatgtcgacaattatggccctattattcttgctgtgcaccggacccccgagggggtcatttacccatctatgtgctggatcagagatagccttgtgtcttatatcactaatctcggtctattctccctggtattcctgttcaatatggcaatgcttgccaccatggtggttcagattctgcgactgcgccctcacactcagaagtggtctcacgttctgacactcctcggcctgagtcttgttctgggcctgccctgggctttgatctttttcagcttcgcctcaggtactttccagctcgtagtgctgtacctgttcagtatcatcacgtccttccagggctttctgatctttatatggtactggtccatgaggctccaagcccgaggcggaccctctcccctgaaatctaactctgactccgcgagactgcccatctcttccggctcgacctcaagcagccggatctag

SEQ ID NO: 224063 - DNA, 2064 bp, synthetic construct
  misc_feature 1..2064: note = Description of Artificial Sequence: Synthetic coding sequence
  source 1..2064: mol_type = other DNA
atgacaccccagagtctgctccagactacattgttcttgctttctctcctgttcctggtgcagggagcacacggacgcggtcatcgtgaggacttccgattttgttcacagaggaatcagacacataggagctccttacactacaagcccactccagaccttcgtatctctatagaaaactccgaggaagctcttacggtccacgcgcctttcccagcggcacatccagcttcacgatccttcccagatccaagaggcctgtaccatttttgtctgtactggaacagacacgccggtagattacatctgctgtacgggaagagagacttcctgctgtcagataaggcaagctcattgctctgttttcaacatcaggaagagtccctagcccagggacctccccttcttgccacaagcgtgacctcttggtggagtccccagaatatcagcctcccaagcgcagcttcatttactttttcgtttcattctcctcctcataccgcggctcataacgccagcgttgacatgtgcgagctgaagcgcgacctgcagctgctgagccagttcctgaagcatccccaaaaggctagccgaagacctagtgctgcaccagcctctcagcagctgcagagcctggaatctaaacttactagtgtgagattcatgggagacatggtgtcatttgaggaggaccgtataaatgccaccgtttggaagctgcagcctaccgctggccttcaggatctccacattcatagtcggcaggaggaggagcagagtgagattatggaatactctgtgctgcttccgcgtactctatttcaacgcactaagggacggagcggagaggctgagaagcgtctcctgctggtggacttctcatcccaagcgttgtttcaagacaaaaattcatcacaggtgctgggcgagaaagtcttgggcatcgttgtgcagaacaccaaggttgccaacctcacggagcctgtggtgttaacctttcagcatcagctgcaacccaagaatgtcactctgcagtgcgtgttttgggtagaggatccaaccttatcttctcccggtcactggtcaagtgcaggttgcgaaacggtgcgcagagagacccagacgtcttgcttctgtaaccatctgacttatttcgcggtgctgatggtgtcaagcgtagaggtggacgccgtgcataagcattacctcagcttactttcatatgtgggctgtgtcgtctccgccctcgcatgccttgtgacaatcgctgcctatttatgcagccggcgaaaacctcgcgactatacaataaaagtgcacatgaatcttcttctggcggtgtttcttttagataccagcttcctgctctccgaaccagttgccctcactggaagcgaagctggatgccgcgcaagcgcaatatttctccacttctctctgctaacatgtctaagttggatggggttggaaggctacaacctctatcgactggttgtagaagtgtttggaacatatgttccgggatacttactgaagctttcggcgatgggttgggggttccccattttcctcgtgacccttgtcgcccttgtagatgtggataactacggacccataattctcgctgtgcaccggacgcctgagggtgttatctatccttctatgtgctggattagagatagcctggtgagttacataacaaaccttggacttttttcccttgtgtttttattcaacatggctatgctggctactatggtagtgcagatactgcggctgcgtcctcacactcaaaaatggagtcacgttctgactctcctcggtttaagcctggtgctcggtttaccatgggcactgattttcttcagcttcgcatcaggcacctttcagctggtggttctctatttattctcaatcattacatcttttcaaggatttctaatttttatttggtattggagcatgaggctgcaggcccgagggggaccttcccccctgaagagcaattccgatagcgccagactccctatcagctcaggtagcacatcatcctcacgaatttag

SEQ ID NO: 224064 - DNA, 2064 bp, synthetic construct
  misc_feature 1..2064: note = Description of Artificial Sequence: Synthetic coding sequence
  source 1..2064: mol_type = other DNA
atgactccccagtccctgttgcagaccactctgttcctgctttcgctactcttcctggtgcagggagcccacggcagaggacacagggaggacttcagattttgtagccagagaaaccagactcatcgcagcagtctgcactataaacctacaccagacctacgcattagtatcgagaatagcgaggaggccttaaccgtccacgctccctttcctgcggcacacccagcttcaaggtcttttcctgacccacggggactgtatcacttctgtttgtactggaataggcatgctggccgacttcatttgctgtacggtaagcgcgacttccttttgagcgacaaggcttctagcctcctctgtttccagcaccaagaggaatcactcgcacagggaccgcctttgctagccacgtccgtgacatcatggtggtcaccacagaacatctctttaccaagcgctgcatcctttaccttctctttccatagcccacctcacacagccgctcacaatgcctctgttgatatgtgtgagctaaagcgggatctgcagctgctctctcaatttctcaagcacccacagaaggccagcaggaggcccagcgcagctcctgcctctcagcagctgcaatccttagaatccaagctgacatccgtacgatttatgggggacatggtgtcttttgaagaagaccgcattaatgcaacggtgtggaaactacagccgacagccggacttcaggacctacacatacactcccgacaggaggaggagcagtctgaaattatggagtatagcgttttgctcccaagaacactgtttcagcggacgaaaggtcgctcaggcgaggccgagaagcggctcctactggtcgacttttcctcacaagcactcttccaggacaaaaatagctctcaggtcttaggtgagaaggtgctgggcatcgtggtgcagaacaccaaagtggctaatctgaccgagccagtggtcctaacctttcagcaccaactgcagccaaagaatgttaccctgcagtgtgtattttgggttgaggatcctaccctcagcagccccggtcattggagtagtgccggttgcgagactgtgagacgggagactcaaaccagctgtttttgtaatcacttaacctatttcgcggtgttgatggtgtcttccgtcgaggtagatgccgtacacaaacactacctgagcctcctctcgtacgtgggatgtgtagtatctgccttagcctgcctcgtgaccatcgcagcgtatctctgtagtagaagaaaaccccgtgattacacaatcaaggtgcatatgaatctgctgctggccgtgtttctcctcgacacttctttcctcctttctgagcccgtcgccttaacagggtctgaagccggatgtcgagccagtgccatttttctgcattttagtctactaacttgcctctcctggatgggcttagaaggatataacctgtacagactggtagtcgaggtgttcggaacttatgtacccggatacctgctgaagctgtccgctatgggttggggtttccccatttttttagtgactctcgtggcccttgttgatgtcgacaattacgggcctattattctggccgtgcacagaactccagaaggggtaatttatccatccatgtgttggatccgggactctctagtcagttatatcacaaatctgggtttgttcagcctagtctttctttttaacatggctatgctagccacgatggtggtacaaatcctgcgtctccgaccgcacacccaaaagtggtctcatgttctgacgctattggggctctctctggtgctgggattgccatgggccttaattttctttagtttcgcctctggcacgtttcagctggtcgtgctctacctgttctctatcattaccagttttcagggcttccttatattcatatggtactggtcaatgcggctgcaggcaagagggggaccgtcgccactcaaatcgaacagtgactccgcccgactgcctatctcctccggtagtacatctagctctaggatctag

SEQ ID NO: 224065 - DNA, 1089 bp, synthetic construct
  misc_feature 1..1089: note = Description of Artificial Sequence: Synthetic coding sequence
  source 1..1089: mol_type = other DNA
atgaacgcgtctgccgcttcattgaacgacagccaggtggtggtcgtggctgctgaaggcgctgcggcagcagccactgccgcaggaggtcccgacacgggtgagtggggccctcccgcagctgccgcactcggcgctgggggaggggcaaacggttccctggaactgagctctcagctgtccgcaggaccccctggactgctgcttccagcggtcaacccttgggacgtccttctgtgtgtgtcgggcactgtaatcgcgggagagaatgccctggtggtcgctctgatagcttccacacctgccctgagaaccccaatgttcgttctggtgggatctcttgcgaccgccgatctcttggccggatgcggcctcattctgcatttcgtatttcagtacctcgtaccaagcgaaacagtatcccttctgaccgtggggtttcttgtggcttccttcgccgcatctgtttccagcttactggccatcaccgttgacagatatttgtccctctacaatgctctaacgtattatagcaggcgaactcttctgggcgtgcatctcctgctcgcagccacctggactgtgtctttgggcttaggcttgttgccagtattgggctggaactgcttggcggaaagggccgcatgttccgtcgtgcggccattggccagaagccacgtggccctgctaagcgctgcattctttatggtctttggaatcatgcttcacctatacgtcaggatatgccaagtggtctggagacacgcccaccagatcgcactccaacagcattgtctcgcacctccccatttagccgcaactagaaaaggagtcggtactttggcagtggtcctgggaacatttggcgctagttggttacctttcgccatctactgcgtcgtgggctcacacgaggatccggcagtctatacttatgctacactgctccccgcaacgtacaactctatgataaaccccatcatctatgcatttagaaaccaggaaatccaacgtgcactctggctcttgctgtgtggatgttttcagtccaaagtccctttccgatcacgctcaccctccgaagtctag

SEQ ID NO: 224066 - DNA, 1134 bp, synthetic construct
  misc_feature 1..1134: note = Description of Artificial Sequence: Synthetic coding sequence
  source 1..1134: mol_type = other DNA
atgactttgcttgcctggtgtaccaggggtgccaaccccgctgcaatgaacgcctcagccgcatctctgaatgattctcaggtggtggtggttgcagccgaaggcgcagcagcagctgctaccgcagccggaggccctgataccggcgaatggggccctcctgctgccgcagcccttggtgctggaggaggggctaatggtagcctggaactttccagccagctgtcagcaggccctccagggctgctgctccctgcggtgaacccttgggacgtactcttgtgcgtgtctggcaccgtaatcgcgggtgaaaacgcccttgtagttgccctgattgctagtacaccagcactgcgaacccctatgtttgttcttgtcggctccctggcaaccgccgacctcttggctggatgtgggttgattctgcactttgtcttccagtacctagtcccatccgagaccgttagcctgctcactgtgggctttcttgttgctagctttgctgcctcagtctcgtcacttctggccataaccgtcgatagatacctgagcctctataatgcacttacttactattcgagaaggaccctgctgggcgttcacttattactggcggcaacctggacagtaagccttggattgggtctcttgccggtcttaggatggaactgtctggccgaacgggcagcctgtagcgtggtgcgccctcttgctcgcagtcatgtggccctgctcagtgccgcattttttatggtgttcggaatcatgctccatctctatgttcgtatttgtcaggttgtctggcgccacgcacaccagatagctctccagcagcattgcttagctccgcctcacctcgcggctactcggaaaggggtcggaacactcgcggtggtactgggtaccttcggcgcatcctggctcccatttgcgatttactgcgtggtcggctctcacgaggatccagcagtttacacatacgcaacgctgctacctgcaacctataattctatgataaaccccataatctacgcttttcggaaccaagaaatccagcgagccctgtggttactactgtgtggttgcttccaatcaaaggtgccctttcgctctcggtcgccctctgaagtgtag

SEQ ID NO: 224067 - DNA, 1023 bp, synthetic construct
  misc_feature 1..1023: note = Description of Artificial Sequence: Synthetic coding sequence
  source 1..1023: mol_type = other DNA
atgaacgcctctgcagcctctctcaatgactcccaagttgtggttgtggctgctgagggagccgcagccgctgcaacagcggcagggggtccagatacaggagaatggggccctcccgcagctgctgccctcggagcagggggtggtgcaaacgggagtctcgagctgtcatcacagctcagcgccggacctccaggcctgctgcttcccgcagtcaacccctgggacgtgctgctttgtgtcagcggaactgttatagccggagaaaatgcgctcgtagtagccctcatagcaagcacccccgcactgagaacccctatgttcgtcctggtcggatctctggctactgccgacctcctggctggttgcggactgatcctgcatttcgtatttcagtacctggtgccatctgagaccgtatcactgttgaccgtaggctttcttgtcgcaagcttcgcagcatccgtcagcagtctgctggcaataaccgtggaccgttacttgtccttgtataatgctctgacctactactctcggaggactttgttgggcgtgcacctcttattggccgctacgtggaccgtcagcctgggactcggactgctccccgtcctaggatggaactgtctcgctgagcgggctgcttgttctgtcgtgaggccgttggcgagatcacatgttgccttgcttagtgccgcattcttcatggtttttggtataatgctgcacttgtatgtgagaatctgccaggtagtgtggcgccacgcacatcagatagcactacagcagcattgcttggccccaccccatcttgcggcaacacggaagggagtggggactctcgcagtggtgctggggaccttcggggcttcgtggctgcctttcgcaacatataacagcatgattaaccccattatttacgctttcaggaaccaggaaattcaacgagctctttggctcctgctgtgtgggtgtttccaatccaaggttccattccgctcccggagccccagcgaggtgtag

SEQ ID NO: 224068 - DNA, 1740 bp, synthetic construct
  misc_feature 1..1740: note = Description of Artificial Sequence: Synthetic coding sequence
  source 1..1740: mol_type = other DNA
aacccacggctgactgtgttggaaagggttgagggatacggcgagcaagaatggcagaaaggggatgggaaaggaagaggcgaaggccatagtgagagcggtgtgctctccggttcaggctcttgcacctcgcatgtgtcatgtttcctggcggtcactaaagccgatccggctgccacttcggggcaaaagggtgatgagttgctcatcctgcagctccctggcctggctctctgcacccaaaccaacctcccaaaacgcttacagtgggaggtgcctccaacaaagccaggaagtcttggcctgggctctccttcccagggacggtggactcgcatgggggatggccctcaggaagtgccatgggtacctagcttcgggcctatggaatcgagccctatcccccaatcttctggaaattcgagcaccttggggagggtgccccagactcccggtccttcaactgcaagtggcgtgccagaggtgggtctccgcgatgtggctagcgaatctgtggcgctgtttttcatgttgcttttggatctaactgcagtggctggaaatgctgccgtgatggcagtgatcgctaagactcccgcactgaggaagttcgtgttcgtgtttcacctctgcctggtagacctgttggccgctctcacacttatgcctcttgccatgctaagtagttcagcactgttcgatcacgccctgttcggtgaggtggcttgccgtttgtatttgtttctctccgtttgcttcgtctccctggctatcttaagtgtgagcgcaataaacgttgagagatattactacgtagtccatcctatgcggtacgaggtgcgcatgacgcttggcctggtggcgtcagttctggtcggtgtctgggtgaaggccctggcaatggcttcagtccccgtgctcgggagggtgtcctgggaggagggtgctccctctgtgccccctggctgtagcctgcaatggtctcattccgcatactgccagctttttgtggtagttttcgccgttctgtattttctactgcccctcttactgatcctggttgtgtactgctcaatgttccgtgttgcccgagtcgctgctatgcagcacggcccactcccaacctggatggagaccccccgacagcgctccgaaagcctcagctcccgcagtacaatggtgaccagctcgggtgcccctcaaacaacaccacaccgaacctttgggggaggcaaggccgcagtggttctgctagctgttggtggccagttcctcctgtgctggctcccttacttcagttttcacctctatgtggcccttagtgcccagcccatatccactggtcaggttgagtccgtggtaacctggatcgggtatttctgtttcacctctaatccatttttttacggatgcctgaatcgccaaataagaggagaactgagcaagcaatttgtgtgtttcttcaagcccgctccggaggaggagctccgcttgccctcaagagaggggtcaatcgaggaaaatttcctccagtttttgcagggcaccgggtgtccgagtgaaagttgggtatcacgaccactgccctcacccaaacaggaaccacctgcagtcgacttcagaattcctggccagatagccgaggaaacctctgaatttctggaacagcagcttaccagcgatataataatgtctgattcctacctacggcctgccgctagtcccaggcttgaaagttag

SEQ ID NO: 224069 - DNA, 1356 bp, synthetic construct
  misc_feature 1..1356: note = Description of Artificial Sequence: Synthetic coding sequence
  source 1..1356: mol_type = other DNA
atggagtcatctcctatcccgcagtcctcgggcaactcaagtaccctaggacgggttccacagaccccgggacccagcacagccagcggagtgcctgaggtgggcctacgcgacgtggccagcgaaagcgtcgcacttttcttcatgctgctcctggatctgacagccgtggcaggcaatgcggcagtgatggcggtgattgccaaaaccccggctcttcgtaagtttgtgtttgtctttcacctatgtcttgtggaccttctggctgccctcacgttaatgcctctggctatgctgagctcctctgcactatttgaccacgccctcttcggcgaagtggcctgcagactataccttttcctgtccgtctgttttgtctcactcgcaatcctgtccgtctccgctatcaacgtggaaaggtactactacgtggtccacccgatgcgctacgaggtgcgaatgaccttgggcctggtagccagcgttttggtgggcgtgtgggtgaaagccctggcaatggcttccgttcccgtgttgggtcgagtatcttgggaagagggagccccatccgtcccaccaggctgtagcctccagtggagccactctgcctattgccaactgtttgttgttgtcttcgccgtgttatactttctgctacctctgttgttgattcttgtggtctactgttctatgttcagagttgctagagtggctgcgatgcagcatggacccctacctacatggatggagacgccacgccagcggtctgaatcactctcttcgagatccaccatggtcacctcaagtggagcacctcagactaccccacatcgaacttttgggggtggtaaagcagctgtcgtactccttgccgtgggtggacagttcttgctgtgctggttgccttacttctccttccacctctacgtcgccctcagcgcgcagcccatttctaccggccaggtcgagtcagtggtcacttggattgggtacttttgcttcacaagtaatccattcttctatggctgtctgaatcgacagataaggggcgaactgagcaaacaattcgtgtgctttttcaagcctgcacctgaagaggagctgcgccttccttctcgggagggctcaattgaggagaactttctgcaattcctacagggcactggctgtccttcggagagctgggtctcaaggcctttgcccagccccaaacaggagccgcctgcagtggatttccgtatccccggtcagatcgccgaagagacatcagagttccttgagcaacagctaaccagtgacatcataatgtccgattcctacttgcgccctgctgcctcgcctcgcctcgagtcatag

SEQ ID NO: 224070 - DNA, 1356 bp, synthetic construct
  misc_feature 1..1356: note = Description of Artificial Sequence: Synthetic coding sequence
  source 1..1356: mol_type = other DNA
atggagtcctccccaatcccacagtcctcaggaaactcatccaccttaggacgggtgccacagacgcccggtccaagcacagcctctggcgtgccagaggttgggctccgagacgtggcctccgagagcgtggctttgtttttcatgctcttgcttgacctcaccgcagtcgccggtaacgccgcagtgatggccgtgatagcaaaaacacctgctttgcgcaagttcgttttcgtgtttcatctatgtctagtcgacctcctcgccgctctgacccttatgccactggccatgctgtcttcctccgccctgtttgaccacgccttgtttggggaagtggcctgtaggctctacttgttcctcagcgtatgtttcgtttctttggcaatcttgagcgtgagcgccatcaatgtagaaaggtactactacgtggtccatccgatgcgttacgaggtgaggatgacccttggactggtagcctcagtactggttggcgtttgggttaaggccttggccatggcttccgttcccgtcttggggagagtctcttgggaagagggggcaccttcggtccctcccggttgcagcctgcaatggtcccattccgcctattgccaactgttcgtggtggtctttgcggttctctattttttgctaccgttgctgctcattctggtcgtttattgcagcatgttccgagtggcacgcgtggcggctatgcaacacggccctttgcccacgtggatggaaactcctagacagcgaagcgaatcacttagctcccgtagcaccatggtcacatcaagtggagctcctcaaacaaccccacatagaaccttcggcggtggtaaggcagcagtagtactgctggctgtgggcggacaatttctcttgtgttggctgccctatttttcctttcatctctatgtggccctgagtgcccagcctatctccaccggacaagtggaaagcgtcgtcacttggatcgggtacttttgctttaccagcaatccattcttttacggctgcctgaaccgccagatccggggtgaactttccaaacagttcgtatgctttttcaaacccgcacctgaagaggagctccgtttgcctagccgggagggaagcatcgaggagaatttcctgcagttcctacaaggcactggatgtccttccgaaagctgggtctcaagaccgttgccttcccccaaacaggagccaccagctgtggacttccggattccagggcaaatcgccgaggagacatcagagttcttggaacagcagttgacttctgacattattatgtccgattcttacctgaggccggctgcttccccaaggctggaatcatag

SEQ ID NO: 224071 - DNA, 1356 bp, synthetic construct
  misc_feature 1..1356: note = Description of Artificial Sequence: Synthetic coding sequence
  source 1..1356: mol_type = other DNA
atggaatccagccctataccgcagtcttctggaaactctagtactctgggacgcgtgcctcaaacccccggacccagtacagcctcgggagttccggaggtgggacttcgagatgtagcgtctgagtcggtagccttatttttcatgcttttattggatctgaccgcggttgcaggtaatgctgccgtcatggccgtaattgccaaaactcccgcactaagaaagttcgtctttgtattccacctctgtttggttgatctgctggccgctttaacccttatgccgctcgccatgctgagtagctccgccctgttcgatcatgccctgttcggagaagtcgcatgccgcctgtacctgttcctatccgtctgtttcgtttccctcgccatcctgtcagtgagtgcgattaacgttgagcggtattattatgtagtacaccccatgagatatgaggtgcggatgaccctcggtcttgttgcgtccgtgcttgtgggagtttgggtcaaggctttggcgatggccagcgttcctgtactggggagagtgtcctgggaagagggagccccatcagtcccgcctggttgttctctccaatggtctcacagcgcctattgccagctgtttgtcgtggtattcgccgtcctctacttcctgctgcctctgctgctgattctcgttgtctattgttcaatgttcagagttgccagggtagccgctatgcagcatggacctctgcccacttggatggagacgcctagacagcggtcagagtcactcagcagtaggtcgactatggttacctcatctggcgctccccaaacaacacctcatcgcactttcgggggaggcaaagcagccgttgttctgttagctgtaggcggtcagtttctgctctgctggctgccctacttctccttccacctttatgtggcgctgtccgcccagcccattagcactggtcaggtcgaatccgtggtgacttggattggctacttctgctttacctctaacccatttttctacggctgcctcaaccgacagatccgcggtgagctctccaagcagttcgtttgcttcttcaagcctgcacccgaagaggaactgcggctgccctctagagagggctccattgaagaaaatttcctgcaattcttgcaggggaccgggtgtccatccgaatcatgggtgtcccggcctctcccctcccctaagcaggaaccacccgctgtcgacttccggatccccggacagatagccgaggaaacaagtgagtttctggagcagcagctgacaagtgatattattatgtcggactcttacttgaggcccgcagcctctccgcgtttggagtcctag

SEQ ID NO: 224072 - DNA, 1107 bp, synthetic construct
  misc_feature 1..1107: note = Description of Artificial Sequence: Synthetic coding sequence
  source 1..1107: mol_type = other DNA
atggctaattctacggggttgaacgcttctgaagtcgctgggtctctcggcttaatactggcggctgtggtcgaagtgggagctttgctcggtaatggcgctctgttggtggtggtgcttaggactcccggactccgagatgccctctacctcgcccacctgtgtgtagttgaccttctggctgccgcaagcattatgccactgggactgttagcagccccaccacccggactggggcgagtgcgactcggccctgcaccatgtagagcagcccgatttctcagtgcagccctgctgcccgcatgtaccctaggcgtggctgctctcggccttgcccgttaccgcctgatcgtgcaccccctgaggcctggtagtagaccccctccggttctcgtgctgaccgccgtttgggctgcagccggtcttctaggcgcactgtcacttcttggaaccccccctgcgcctccacctgctccagcaaggtgtagcgtgctcgcaggtggattgggcccttttcggccactgtgggctttgctggccttcgctctaccagccctgttgctgttgggggcttacggcggtatctttgtagtagccagacgggctgcactaagaccccctagaccagcccgaggatcgaggctccacagcgactctctcgactcgcgcctgagcatactgcctccacttcgtcctaggcttccaggcggtaaggccgctttggctcctgctctggctgtgggccaatttgccgcttgttggctaccctatggttgtgcctgtctagccccagctgctcgggcagcagaagcagaggccgcagtgacctgggtggcctactccgcatttgctgcccaccccttcctgtacggcctcttgcagaggcccgtgaggctggcactcggtcgactgagtcgtcgtgctctgcctggacccgtcagagcctgtactccccaggcttggcacccgcgagccctgctccagtgtctgcaaagaccacccgaggggccagccgtagggccaagcgaggccccagagcagacaccagagctagcaggaggcaggagtcccgcttatcagggcccacccgagtcttccctatcctag

SEQ ID NO: 224073 - DNA, 1434 bp, synthetic construct
  misc_feature 1..1434: note = Description of Artificial Sequence: Synthetic coding sequence
  source 1..1434: mol_type = other DNA
atggccaatatgcagggcttagtagagagactggaacgcgctgttagtcgactcgagagccttagcgccgaatcccataggccacctgggaactgcggagaggttaacggggtcatcgccggtgtcgctccatcggtggaagcgttcgacaaactgatggattctatggtcgctgagtttcttaagaactcaagaatactcgctggagatgtagagactcatgcagagatggtccattccgcctttcaggcgcagagagccttcctgttgatggccagccagtatcagcagccacatgaaaatgacgtggccgcactgttaaagccgattagtgaaaagatccaagagattcagactttccgtgagagaaacagaggatctaacatgttcaatcatctatcggcagtttcagaatccattccagcattaggatggatcgccgtaagccccaaacctggcccttacgttaaggaaatgaacgatgcggctactttctacaccaaccgggtgttgaaggattacaaacacagcgacctccgccacgttgattgggtcaaatcatacctgaacatttggtctgagctgcaagcctatattaaagagcatcatacaacaggtctgacttggagtaaaacaggccctgtggcctcaaccgtctccgcatttagcgtgctgtcaagtggacctggcttgccgcctcccccacctccgctgcccccacctggacccccaccactgttcgagaacgaagggaagaaggaggaatctagccctagtcgtagtgctctctttgctcagcttaatcagggcgaagccataaccaaagggttgagacatgtgactgacgatcaaaaaacatataaaaacccgtccctacgcgcacaggggggacagacacagtcccctacaaagtcgcatactccgagcccgacatccccaaagtcgtaccccagccagaaacacgcacccgttctggagctggagggcaagaaatggagggtcgaatatcaggaggaccgaaacgatctcgtcatttctgagaccgagctcaaacaggtagcatacatttttaaatgtgaaaaatcaactatccagattaagggaaaagttaattcaatcatcattgacaactgtaaaaaattaggcctggtgtttgataacgtggtcgggattgttgaggtcattaatagtcaagacattcagattcaggtgatgggaagagtgccaacgattagcataaacaaaacagaggggtgccatatctatctgagcgaagacgcactggactgcgagattgtgtctgccaagagctcagaaatgaacattctcattcctcaggacggagattatagagagtttccgattccagaacagttcaagactgcgtgggacggatctaaattgattacagagccagctgaaattatggcgtag

SEQ ID NO: 224074 - DNA, 1260 bp, synthetic construct
  misc_feature 1..1260: note = Description of Artificial Sequence: Synthetic coding sequence
  source 1..1260: mol_type = other DNA
atggttttctctgccgtgctgactgcctttcacaccggcacgtcaaacactaccttcgttgtctatgagaacacttacatgaatatcactctccctcctccatttcaacatccagacctgagccctcttctccggtatagtttcgaaaccatggctccaacaggactgtcgtccctgactgttaactcaacggcggtgccaacaactcctgcagcgtttaagagtctaaacctgcctctccagatcaccttgtccgccatcatgattttcatcctgttcgtttctttcctgggtaatctggtagtgtgtctgatggtctaccagaaggctgctatgcgcagcgcgattaatattctattagcttccttggcttttgcggacatgcttttggccgtgcttaatatgccattcgccctagtgactattttgaccacaaggtggatctttggcaaattcttctgtcgggtctccgccatgttcttctggctgttcgtcatcgagggagtggccatactgctgatcatatctatcgaccgattcctgataatagtgcagaggcaagataaacttaacccctatcgtgctaaggtactgatcgcagtatcctgggcaacttccttttgcgttgcgtttccgttggccgtcggcaatcctgacctgcagatcccaagcagggccccacagtgtgtgttcggctacacaaccaatcctggttatcaggcttatgtgattcttattagtttaataagcttcttcatacccttcttggttatcctgtattccttcatggggatactcaatactttgagacataacgccctgcgaatccatagctacccagagggcatctgtctttcacaggctagcaagctggggttgatgagcttgcagcggcctttccagatgtctattgacatgggtttcaagacacgggcttttacaaccatcctgattctcttcgccgtgttcatcgtttgctgggcccctttcacaacttacagcttggtggccacgtttagcaagcatttttactaccagcacaactttttcgagatctccacttggctcctgtggttgtgttacctgaaatctgcgctgaatccacttatctactattggaggattaaaaagttccacgatgcttgtctggacatgatgccaaagagtttcaaatttttaccccagctccctgggcatactaagcggagaatccggcctagtgccgtttacgtgtgtggggagcatcgtacagtcgtttag

SEQ ID NO: 224075 - DNA, 1260 bp, synthetic construct
  misc_feature 1..1260: note = Description of Artificial Sequence: Synthetic coding sequence
  source 1..1260: mol_type = other DNA
atggttttctccgctgtgcttaccgccttccataccgggacttcgaatacgacttttgttgtatatgagaatacctacatgaatatcacgcttccacctccttttcaacaccctgatttgtctcccttactgagatactcattcgagacaatggcgcctaccgggctatcttctttaaccgttaattctacagccgtgcccacaaccccagctgcctttaaaagtctaaacttgcccttacaaatcacattgtctgctataatgatctttattctgtttgtgagtttcctggggaacctggtagtatgcttgatggtttaccagaaagccgctatgcgctcagctatcaatatactgctggcgtctttagccttcgccgatatgctcttagcagttctcaacatgccgttcgcattagtaactatactgaccacccgatggatcttcgggaaattcttctgtcgcgtgtcagcaatgttcttttggttgttcgttatagagggcgtcgcaatactgctaattatttcaatagacagattcctgatcatagtacagagacaggacaaactgaatccatatcgtgccaaggtgctgatcgcagtgagctgggcgacttccttctgcgtagccttccccctcgcagttggcaaccctgatctccaaattccttccagggccccacagtgcgtgttcggatacactaccaatcccggttaccaggcgtatgtgatcctgatttcactgatctcattttttataccattcctggtcatcttgtacagcttcatgggtatccttaatactcttaggcataatgctttacgcattcattcctaccccgaagggatctgtctgagccaggccagcaaacttggtctcatgtctctgcagcgcccttttcagatgtctattgacatggggtttaaaacccgcgcattcaccaccattcttatactatttgctgtttttatcgtgtgttgggcaccctttacgacctactcactggtcgccacttttagtaaacacttttattatcagcacaacttcttcgaaattagcacctggctgctctggttatgctatttgaaatcggctctgaatcccctcatctattattggaggatcaaaaaatttcacgatgcatgcctcgatatgatgccgaagtcgtttaagttcctaccacagctgcccggacacacaaagaggaggattcgaccatccgcagtgtacgtttgtggggagcacagaacagtggtatag

SEQ ID NO: 224076 - DNA, 1332 bp, synthetic construct
  misc_feature 1..1332: note = Description of Artificial Sequence: Synthetic coding sequence
  source 1..1332: mol_type = other DNA
tactgctgttccgtactgaagtgtctgaaaaacagctgtataagcgcatgtatattccatcccacagaaactatggtcttcagtgcagtgcttaccgcgttccacaccgggacctccaatacgacctttgtggtctacgagaatacctatatgaacattacgttaccacccccattccagcatcctgatttgtcccccttattgcgctacagcttcgagactatggccccaactggactgagttccttaactgtgaacagcacagcagtccccactacgccagctgctttcaaatcactcaatctgccactgcagatcactttgagtgctattatgattttcattctattcgtgtcgttcctgggaaatctggtcgtttgcttaatggtgtaccagaaagcagccatgagatcggcgattaacatcctgctggcatcactggccttcgccgacatgctgttagctgtgctaaacatgccgtttgcccttgtgactatccttacaacccgctggatatttggcaagtttttttgcagagtgtctgccatgtttttttggctgttcgtgatagagggtgtcgcaatactgctgattatatccatcgaccggttcctcattatcgtgcaacggcaggacaaactcaatccttacagggccaaggtgctaatcgccgtgtcatgggccacctctttctgcgtggcctttcctctcgcagtgggtaatcctgaccttcagatccccagccgggcaccacagtgcgtgtttgggtatacgacaaaccctggataccaggcttatgttattctcatctccctgatcagcttttttatcccctttctggtgatactgtactcctttatgggaatcttaaacaccttgcgtcacaacgccctgcgcattcactcgtatccagaaggcatctgcctgtctcaggcgagtaagttgggcctgatgtcgctgcagcgaccttttcagatgtctattgatatgggatttaagactcgagctttcactactatcctgattctattcgctgtctttattgtgtgttgggccccatttactacctattccctggtagctacctttagtaagcatttttattatcaacacaatttcttcgagatatcaacttggttactttggctttgctacctcaaatctgccctgaatcccttaatatactattggcgaataaaaaaatttcacgatgcatgcctggacatgatgcccaaatcctttaagttcctgccacaacttcccggtcacactaaaaggagaatccgacctagcgcggtgtatgtgtgtggagaacacaggaccgttgtgtag

SEQ ID NO: 224077 - DNA, 2697 bp, synthetic construct
  misc_feature 1..2697: note = Description of Artificial Sequence: Synthetic coding sequence
  source 1..2697: mol_type = other DNA
atggtattctccgtgcgacagtgtgggcatgttggccgaaccgaagaagttctccttaccttcaaaatatttctcgtaatcatttgtctgcatgtcgtcttagtaaccagcctggaagaggataccgacaatagtagcctctctcctcctcccgaagtagagacaacctcacttaatgacgttactttatcactgctgccctctaacgagaccggagtcaaacctcaacgcaatatttgcaacctgtcctctatctgtaacgattccgcatttttccgcggagagataatgtttcagtatgacaaagagagcaccgtgccccaaaaccaacacattacaaatggcaccctcacaggcgttctgtcactgtctgaattaaagcggtccgagctgaacaaaactctgcagaccctcagtgagacctacttcattatgtgcgccaccgctgaagcccaaagtaccctgaactgcactttcacaattaagctcaataacacaatgaacgcttgtgcggttattgcagccctggagcgcgtgaaaatacggccaatggagcattgctgctgctccgtgcgcattccttgcccctcaagccccgaggagctggagaaacttcagtgtgatctgcaggatcccatagtgtgcctcgccgaccatccacgtgggccaccctttagcagttcccagagtataccagtcgtgccacgcgcaacagtcttaagccaagtgcctaaggctacttcattcgccgagccacccgattattctccggtgacccacaacgttcctagccccattggggagatccaacccctcagcccgcagccctccgccccaattgcttcgtcacccgctatcgatatgccccctcagtctgagacaataagctctcccatgccccagacccacgtgtctggcacaccaccgcctgttaaggcctcctttagctctccaaccgtctctgcccctgccaacgtcaacactaccagcgctcctccggtccagaccgacatagttaatactagctctatatccgacctggagaaccaggtgctgcaaatggaaaaagccttgtccctcggctcgctcgaacccaatttagcaggcgagatgatcaaccaggtaagcagactgttacatagtcccccagatatgctagccccactggcccagcgcctactcaaagtcgttgatgatatcgggttgcagctgaatttttccaataccaccatctctttgaccagtccctccctcgccctggccgtaatcagagtgaatgcgagcagctttaataccaccacgtttgtggcacaggatcccgctaacctgcaggatgaactgactgtgcgctgcgtcttttgggaccttggtaggaatgggggtcgtggcggatggtccgacaacggatgctcagtaaaggaccgcaggttgaacgagacaatttgcacatgcagccatctcacaagtttcggagtgctgctggacttaagtcgcacgtccgttctccctgcccagatgatggctctgaccttcattacctatatcggatgtggtctcagcagtatctttttgagcgtgaccttggtgacctacatcgccttcgaaaaaatccgccgagactacccatcgaaaattcttatccaactgtgcgccgctctcctgttgctgaatctggtgtttctactggatagttggatagccctctacaaaatgcagggcctgtgtattagcgttgcagtgtttctccattatttccttcttgtgagttttacttggatgggtctagaagcctttcatatgtacttggcactggtcaaggtctttaatacctacattaggaagtatatcctgaagttctgcattgtggggtggggagttccagcggttgtggttacaatcattctgactattagcccggataactatggactggggagctatgggaagtttccaaacggctcacccgatgatttttgctggatcaacaataacgcagtattttatataactgtcgttgggtacttctgtgtgatctttctgctaaatgtatcaatgtttattgtggtgcttgtgcagctctgtcgaatcaagaagaaaaagcagttgggggctcagaggaagacatctatccaggacctgaggagcattgcaggtctcacatttcttctaggaattacctggggcttcgctttcttcgcctgggggcctgtcaatgtgacattcatgtaccttttcgccatttttaatacactgcaaggcttcttcatcttcatcttttactgtgttgccaaggagaacgtgagaaaacaatggcgccgttatctgtgttgcggcaaactgaggttggccgaaaattcagattggagcaaaacagccacgaatggcctcaaaaaacagacagtgaatcagggcgtatccagcagctcaaattccctgcagtcctctagcaatagcaccaacagtacaactctgctggtgaataatgattgctcagtgcacgcttcaggcaatggcaacgccagcaccgaaagaaacggcgtcagcttcagtgtccagaatggggacgtctgccttcatgacttcacaggcaagcagcacatgttcaatgaaaaggaagactcatgcaatgggaaaggtcgcatggccctgcgcaggacatcaaaacgtggttccctgcatttcatcgagcagatgtag

SEQ ID NO: 224078 - DNA, 3006 bp, synthetic construct
  misc_feature 1..3006: note = Description of Artificial Sequence: Synthetic coding sequence
  source 1..3006: mol_type = other DNA
atggtattctcggtgaggcagtgcggccacgtaggccgtactgaggaagtgctgctaacatttaagattttcctggtgattatatgcctgcacgtggtgttggtcacgtccttggaggaagacacagacaacagttccctgtcgccccctcctgatgaagaaactggggcatgtagtgatgtgaccttaagtctgctgccttccaacgagacagaaaaaaccaaaattacgattgtgaagacgttcaatgcaagtggcgttaaaccccagcgcaatatttgcaacctaagtagtatttgcaacgacagtgcattctttaggggagagatcatgtttcagtacgacaaggaatcaaccgtcccacagaaccagcacattaccaatggaacccttactggcgtactgagcctgtccgaactgaaacgatccgaactgaacaagacgctccagaccctttctgaaacatattttattatgtgtgccacagcagaagcccagagtacactgaattgtacctttactatcaagttgaataatactatgaatgcgtgtgcggtcattgccgctctcgagcgggtcaaaattcggccaatggagcactgttgttgttcggtccgaatcccatgcccctcttctcccgaggagctcgaaaagctgcaatgcgatctgcaggaccctatcgtctgtcttgctgaccatcccaggggcccaccattttcttctagccagagtatcccagtggtacctagggccaccgtcctctcacaggttcccaaagcaacatcattcgccgaacctcccgattatagccctgtgactcacaatgtgccaagtcctatcggagagattcagccgttaagcccacagccaagcgctcccatcgcctcaagccccgcaatcgatatgccgcctcagtccgaaacaatcagcagtcccatgccgcagacacacgtaagtggcacccctcccccagttaaggctagcttttcctctcctacagtgtcagctccggcaaatgtcaatacgacatccgcccctccagtgcagactgatattgttaacactagttccatttcggacctggaaaaccaagtgttacaaatggaaaaagctctcagcctagggagcctggagcccaacttagccggagagatgataaaccaagtctcacgcctgctccacagccctcccgatatgctggccccactcgcccagaggttgcttaaagtagttgacgacataggactccaactcaatttctcaaatacgactatttccttgacctcgccctcccttgctctggccgtgattagagtgaacgcttcttcgttcaatacaaccaccttcgtggcccaggaccctgctaaccttcaagtctcactggagactcaggcgccagagaattctattggaacaatcactcttccatcttctctcatgaataacctgcccgctcatgatatggagttggcaagccgagtacagtttaattttttcgagacccccgctctcttccaggatccgagccttgagaacctgagccttatcagctacgtgatctcctctagcgttgccaacctgacagtgagaaatctcaccaggaacgtcaccgtgactctcaagcacattaacccttcccaggacgaactaaccgtacgctgtgtattctgggacctcggtcgcaacgggggaagaggcggatggtccgacaatggttgctcggtgaaggacagaagattaaacgagacgatttgtacatgttcgcatctcacttcttttggcgttctgctcgatctgtccaggacaagcgtgcttcccgctcagatgatggccttgacctttattacatacattggatgcgggctatcatccatcttcttgagcgtgacattagttacgtacatcgccttcgagaaaatcaggagagattatccttccaagatcttgatacagctttgcgcagccctcctgctgctcaatctggttttcctgctagactcgtggatagccctgtataagatgcagggtttatgcatctctgtcgctgtgtttctgcactactttctcctggtgagttttacctggatgggcctggaggcgtttcatatgtacctggcgctggttaaggtgtttaacacctacatccgaaagtacatactgaaattctgtatcgtggggtggggagtgcctgccgtggtggttacgatcatcctgactatcagccccgataattatggtctgggctcttacggcaagtttcctaacggcagtcccgacgatttttgctggattaacaataacgctgtgttttacatcactgtggtcggatatttttgtgtcattttcctcctcaacgtcagtatgttcattgtcgtgctggttcagctatgccgtattaaaaagaaaaagcaactgggggcacaacgcaagacgtctattcaggaccttcgctctatagctggccttacatttcttctaggcatcacatggggcttcgccttcttcgcctggggtcccgtcaacgtgacctttatgtacttgttcgcaatattcaacacactccagggattctttatttttatcttctattgcgtggcaaaagaaaacgttaggaagcagtggagacggtatctctgttgcgggaagctcagactggccgaaaatagcgattggagcaaaaccgctacaaatggtcttaaaaagcaaaccgtcaatcagggcgtatctagtagctcaaacagcctgcagtctagctccaatagtaccaacagcaccaccttgttggtcaacaatgattgttccgtacacgcgtccggaaatgggaacgcatctacggagagaaacggggtcagcttttctgtccagaacggagacgtttgtctgcacgactttactggaaaacagcacatgttcaacgagaaggaggactcatgtaacgggaaggggcgtatggctctacgccgaacatcaaagcgtgggtcccttcatttcattgagcagatgtag

SEQ ID NO: 224079 - DNA, 3012 bp, synthetic construct
  misc_feature 1..3012: note = Description of Artificial Sequence: Synthetic coding sequence
  source 1..3012: mol_type = other DNA
atggtttttagcgtgcgtcaatgcggccatgtagggcgtacagaagaggtgcttctcaccttcaaaatttttctcgttatcatctgtctgcatgtagtccttgtgacaagtcttgaggaggatacggataattctagcctgtctccgcctcccgctaagctgtcagttgtctcatttgcacccagttcaaacggaactcctgaagtggaaacgactagtctcaacgatgtgacattaagtctcttaccttccaacgagacgggtgttaagccgcagcggaatatctgcaacctgagctctatttgcaatgatagtgccttttttagaggcgagatcatgtttcagtacgataaagaaagcactgtgccccagaatcaacacatcaccaatggcactctgaccggcgtgttgagcctctccgagctcaagagatcagagctcaataaaacccttcagacactctccgaaacgtatttcatcatgtgtgcaactgctgaggcccagagtacgctgaactgtacgtttactatcaaattgaataacaccatgaacgcgtgcgcggtgatcgccgcactggagagggtaaagatccgcccaatggaacattgttgctgctcagtgcgcattccatgtccgtcatccccagaggaacttgagaagttgcagtgcgatttgcaggaccccatcgtttgtctggctgatcacccaagggggcctccctttagttcttcgcagagcatccccgttgtgcccagggcaactgtgctttcccaagtcccgaaagctacatctttcgccgagcccccagattacagccccgtaacgcataatgttccttctccaattggcgaaatccagccattgtccccccaacccagtgccccaattgcatcgtcccccgctatcgacatgcctccacagagcgagaccattagcagtcctatgcctcaaacacatgtgagtggaactccgcctccagtgaaggcgtccttctcttcccccacagtgtccgcccctgccaatgtgaataccactagtgcccctccagtgcaaactgacatcgtgaacaccagctccatctccgatctcgagaatcaagttcttcaaatggaaaaggccctgagcttgggatccctcgagccaaacttagctggtgagatgatcaaccaagtctctagactacttcatagccctccagacatgcttgcgcctcttgctcagcggttactgaaggtggtcgatgacatcggcctgcagttaaactttagcaacaccaccattagtttgaccagtccttcactggccctggctgtaatcagggtcaatgcctcttcttttaataccaccacattcgtggcccaggacccagccaacctgcaggtatccttggaaacccaggccccagaaaacagcataggtactatcactctgcccagctctttgatgaataacttacctgcccatgatatggagctcgccagccgagtgcaatttaatttttttgagacaccagccctgttccaggaccccagcctcgagaatctaagcctgatatcatatgttattagttcttcagtagccaacctcaccgtgcggaacttgaccaggaacgtgacagttacactgaagcacataaatccctcccaggatgaactcaccgtgcgatgtgtgttctgggacctcggacggaacggcggtagagggggatggtctgataacggctgctccgtaaaagaccgacgcttgaacgagaccatctgtacctgcagtcacctgacttccttcggggttcttttagacctgagcaggacaagcgtgctgcccgctcagatgatggctctgaccttcatcacttatatcggttgcggcttgtcttcaatattccttagtgtcactcttgtgacttacatcgcctttgagaagatacgcagagattacccgtctaagattctaattcagttgtgcgccgctttgctcctgttgaacctggtgttcctgctggactcatggatcgccctgtataaaatgcaggggctgtgtatcagtgttgccgtttttctgcactactttctcctagtgtccttcacatggatgggtctggaagccttccacatgtacctggcgctggtcaaagttttcaatacttacatcaggaagtatatccttaaattctgtatcgtggggtggggcgtgcctgctgtcgtggttaccattatcctcactatttcacctgacaattacggtctcggatcctatgggaaatttccaaatggctcgcccgacgacttttgctggatcaataataatgccgtgttttatattactgtggttgggtacttctgcgtgatatttttgcttaacgtgagcatgttcatcgtggtcctggttcagctctgtcgtattaagaagaagaagcaactgggcgcacaacgtaagacatctatccaggatctcaggagcatcgccggtcttacttttctgttgggcataacgtggggtttcgccttctttgcatggggtccagtgaacgttacatttatgtacctttttgcgattttcaataccctccagggctttttcattttcattttttattgtgtggctaaggagaacgttagaaagcagtggagacgatacctgtgttgcggcaaactgaggctggctgagaatagtgattggagtaagaccgctacaaacggcttaaaaaaacaaacagttaaccaaggagtttcctccagcagcaattctctacagagttcctccaactcaactaatagcacgaccctcctagtgaacaatgactgtagtgtccacgcatcaggaaacggcaatgctagcacagagcgcaatggcgtgagcttcagtgtccaaaatggtgacgtgtgccttcatgacttcactggcaaacaacacatgtttaacgagaaagaggacagctgcaatggtaagggcagaatggccctcagacggacctctaagagaggatcactgcatttcatcgagcagatgtag

SEQ ID NO: 224080 - DNA, 2964 bp, synthetic construct
  misc_feature 1..2964: note = Description of Artificial Sequence: Synthetic coding sequence
  source 1..2964: mol_type = other DNA
atggtgttcagcgtgcgtcagtgtggacacgtgggacgtacagaggaagtgctgttgacgttcaagatcttccttgtcatcatttgcctgcacgtggtgcttgtaacaagtttggaggaggatacggacaattcctctctctctccccctcctgaagtggagacgacctcacttaatgatgtgactctgtcgttactgccttccaacgaaaccggggtcaaaccccagcggaacatctgtaacctgtcgagcatctgcaacgattccgccttcttccggggagagattatgtttcagtacgataaagaatcaacagttccccagaatcagcacattaccaatggtacgcttactggggtgctcagcctcagcgaattgaagagaagtgagcttaacaagaccttacagacgttatcggagacatacttcatcatgtgtgccactgctgaggcccagtctactctgaattgcacatttacgataaagctgaacaatactatgaatgcctgtgctgtcatcgcagctttggagagggtcaagattaggccaatggaacattgctgttgtagcgtccgcatcccctgtccatcaagccccgaagagctggaaaagcttcagtgcgacctacaagatcctatagtgtgccttgcggaccatccacggggaccaccttttagttcatcccagagcattcccgtggttcccagagccactgtcctgagtcaggtacccaaagcaaccagcttcgccgaacctcctgactatagccctgtgacccataacgtaccctcccccattggggaaatacaacctttgagcccacaaccatcagccccaatcgccagttcccctgctatcgacatgccgccacagtccgaaaccatcagctctccaatgcctcaaacccacgtctccggaacaccccctcctgttaaggcgtctttcagtagcccaaccgtaagcgccccagcaaacgttaatacaacctcagcccctccagtgcagaccgatattgtgaataccagtagcatttccgatctcgagaaccaagttctgcagatggagaaggcactctcattgggcagtctcgagcctaacttggcgggtgaaatgattaaccaggtgtccaggcttctccattccccgcctgacatgctcgcccctcttgcacagagactcctcaaggtagtagacgatatcggcctgcagctgaatttctctaacactaccatctccttgactagcccttcactggctttagccgtaatacgagtgaatgcttcatccttcaacacgactacctttgtcgctcaagacccagcgaatcttcaggtctccctcgagacacaggcccctgagaattccattggcaccattacattgccttcctcgctgatgaataacctgcctgcgcatgatatggaactggcttctcgagtgcagttcaactttttcgagactccagccttgttccaagacccttccctggagaacctgtctcttatctcgtacgtgatttcctcaagcgtggcgaacttgactgtccgcaacctgacgagaaatgttactgtaaccttaaaacatatcaatcccagtcaggatgaactaacagtacgctgcgtgttttgggacttgggcagaaacggcggacgcggagggtggagcgacaatggctgctctgttaaagatcgcaggttaaatgagacaatctgtacctgcagccacttgacttctttcggcgtactgctcgatctttcgcggactagcgtgctgcctgcacagatgatggctttaaccttcataacatacattggctgcgggctgtcaagcatttttctctccgtcacactcgttacctacatcgcatttgaaaaaatccgcagagactatcccagcaaaattttgatccagctctgtgctgcgctcctcctattgaacttggtgtttctgcttgatagctggatcgctctctataaaatgcaaggcttgtgtatcagtgtagccgtatttctgcattacttcctgctggtgtcctttacctggatggggttggaagccttccacatgtacctggctcttgtgaaagtgtttaatacatacattcggaagtacatactcaagttttgcatagtaggatggggagtaccagcagttgtcgtgacaattattctcaccattagcccagataactacggcctgggctcatatggcaaatttcctaacgggagccctgacgacttctgctggatcaacaacaacgccgtcttttacatcaccgtagttggatacttttgtgtgatttttctgctgaatgtatctatgttcattgtcgtcttggtgcaattatgccgtatcaagaaaaagaagcagctgggcgcacagagaaaaacctccatccaggatctccgtagcattgcaggcctcaccttcctactggggatcacctggggattcgcttttttcgcctggggaccagtgaacgtgacgtttatgtatttatttgccatcttcaacacactgcaaggattttttatctttatcttctactgcgtcgctaaggagaatgtccgtaaacagtggagaagatatctctgttgcggtaaattacgcctggctgaaaactctgattggtccaaaactgcaactaacgggctgaagaaacagacagtgaaccagggcgtatcatccagctcaaattccctgcaatcatcatcgaattctaccaattctaccacactacttgtgaataacgactgttccgtacatgcaagtggcaatggaaacgccagcaccgagagaaacggcgtgagcttttccgttcagaacggtgatgtctgcctgcacgatttcaccggcaagcaacacatgttcaatgaaaaagaggactcatgcaacggcaaaggcaggatggctctgagacgcacgagtaagaggggcagtctgcactttatcgagcagatgtag

SEQ ID NO: 224081 - DNA, 3045 bp, synthetic construct
  misc_feature 1..3045: note = Description of Artificial Sequence: Synthetic coding sequence
  source 1..3045: mol_type = other DNA
atggtgttctccgtcagacagtgtgggcacgtgggtcgaaccgaagaagttctgctcaccttcaaaatattccttgtcatcatatgtttgcacgtggtgctcgtgacctcactggaggaggataccgacaactcctcattatccccacctccagccaagctcagcgtggtgtccttcgccccttcatcgaacgaagtggagactacttcactaaatgacgtgactctgtccctgctgccgtctaatgagactgagaagaccaaaattaccattgtgaaaacattcaacgcatctggagtgaaacctcaacggaatatctgtaatctgagtagcatctgtaatgactccgcattttttagaggggaaatcatgtttcagtacgataaagaatctactgtaccacagaaccagcacatcaccaacggcacgctcacgggcgtactgtccctatccgagttaaaaaggagcgagctgaataagaccttgcaaacgctgtcggagacctactttattatgtgtgccacggccgaggcacagagtaccctgaattgtactttcaccatcaaacttaacaacactatgaatgcctgcgccgttatcgccgcattggagcgtgtcaaaattcggccaatggagcactgttgttgtagtgtcaggatcccctgccccagcagccccgaggaattggagaagctgcaatgtgatctgcaagatccaatcgtgtgtctcgctgaccaccccagggggccacctttcagttccagtcagtctattcccgttgttccacgggcaacagttctgtcccaagtccccaaggccacatccttcgctgaaccgccagattactccccagtgacccacaatgtgcctagtccaatcggtgagattcaacccctgtcaccccagccctcggcccctatcgccagcagccctgctatcgatatgcctccccaatcagagaccataagttcacctatgccacagactcatgtgagcggcaccccaccccctgttaaggccagtttttcgagcccaacggtgtctgcccctgccaatgtaaacactacaagtgcccctcccgttcagactgacattgtcaacacctcctctatttcagaccttgaaaatcaggttctacaaatggaaaaggcactctcgcttggttcgcttgagcccaacctggcgggagagatgatcaaccaggtgtctcgactcctgcactcaccccctgatatgctagcacccctggcacagcgactgctgaaagtagtggacgacataggcctacaactgaacttctctaatacaactatctccctaacttccccttctctggccctggcagtgattagagtcaatgcgtcaagcttcaataccaccactttcgtcgcccaggatccggcaaatctgcaggtgagtctagaaactcaggccccagaaaattccattggtaccatcacactcccctccagtttaatgaacaaccttccagcccatgacatggagttggccagtcgtgtgcaatttaatttctttgaaacacccgcattattccaagacccatctctggagaatttgagccttatctcatatgtcatttctagcagcgtggcgaatctgacagtgcgaaacttgaccagaaatgtgacagtgacgctgaaacacatcaatcccagtcaggatgagctgactgttcgatgtgtgttttgggacctcggtcgaaacggtggaaggggtggttggagcgataatggctgctcagtaaaggaccggagattgaacgaaacaatctgtacatgctcccatctgacctctttcggtgtcctgcttgatctgtcacgcacttcagtgttgcccgctcaaatgatggcgcttacctttatcacttacataggatgcggactgtcttcgatcttcttatctgtgactctggtcacatatatagcgttcgagaagataagaagagattacccatcaaagatcctgatccagttgtgcgctgcccttttgcttctcaatctggtgtttttgctggactcctggattgccctctacaagatgcaaggtctttgcataagcgtcgcagtgtttctccattacttcttgctggtttcatttacctggatgggcctggaggcctttcatatgtacctcgccctggtgaaagtcttcaacacatacatcagaaagtacatccttaaattttgcattgtcggatggggggtacccgcagtagttgtgactataatcctgactatttctccagataactacggtttgggcagctatggcaagtttcccaatgggagccccgacgatttctgttggattaataataatgccgtgttttacattacagtcgtcggctatttctgcgtgatttttctgctgaacgtttctatgttcattgtggtattagttcagctgtgccggattaaaaaaaaaaaacagctcggtgctcaacgaaagaccagtatccaagatctgaggtctattgcaggtctgacattcctgttaggaattacatggggttttgccttcttcgcatggggccctgtcaatgtgacctttatgtacctttttgcaatatttaatacactgcaaggtttctttatattcattttctactgtgtggctaaagagaacgtgcggaaacagtggcggaggtatctgtgctgtgggaagttgcgcctcgcggagaatagtgactggtcgaagaccgctacaaacggcctgaaaaagcagacagtgaaccagggtgtgtcctcttcttcaaactccctccagtcgtccagcaatagtacgaattcgacaacgctccttgttaacaatgattgcagcgtgcatgccagcggtaacggaaacgcgtccaccgaaaggaacggcgtatctttctcagtgcaaaatggagacgtgtgtctacacgatttcaccggcaagcagcacatgttcaacgagaaggaagattcctgcaacggcaagggcagaatggcattaagacgtacctccaagagaggctccctgcatttcatcgagcagatgtag

SEQ ID NO: 224082 - DNA, 2988 bp, synthetic construct
  misc_feature 1..2988: note = Description of Artificial Sequence: Synthetic coding sequence
  source 1..2988: mol_type = other DNA
atggtgtttagtgtgcgacagtgtggacatgtaggcaggacagaggaggtcctgcttacttttaagatctttttagtcatcatctgcctgcatgtcgtcctagtgacttccttagaggaggacacggacaactcttcactttccccccctccggcaaagttatctgtcgtcagcttcgctccttccagcaatgggaccccagacgtgacgctcagtctgttacccagcaacgaaaccggggtcaaaccacagcggaatatatgcaatctctcttcaatttgtaacgacagtgccttcttcaggggcgagattatgtttcagtatgacaaggagagcaccgtcccgcagaatcagcacattaccaatggcacgctgactggcgtcctttccttaagtgaactgaaacgttcggagcttaacaagactctccagaccctgtctgaaacctatttcattatgtgcgctaccgccgaggcacagagtacgctcaactgtacttttactattaagctgaacaacaccatgaacgcttgcgccgtgatcgcagctctcgaacgtgtgaagatccgacctatggaacattgctgctgcagcgtccgcattccttgtccttcatcacccgaagaattggaaaaactgcaatgcgacctgcaggatccgattgtatgtctggccgaccaccccagaggtccaccattctcttcatctcagtccatccccgtggttccaagagccacagtcctcagccaagtgcccaaggctactagctttgcagaacccccagactatagtccagtgacacacaatgtgccgagccctattggcgagatccaacccctctctcctcaacccagcgccccaattgcgtccagtccagcaatagacatgcccccacagtccgaaaccatttcttcccccatgcctcagactcacgtttccggcaccccgcctccagtgaaagcttccttctcttcaccgacagttagcgcaccagctaacgtgaacaccactagcgcccctcccgtgcagactgatatcgtgaacacgtcatccatctcggacctggaaaatcaggtgctgcagatggagaaggcgctgtccttggggtccctggagcctaatctggcgggtgagatgatcaatcaagtgagtagattactgcacagcccccctgatatgcttgcccctctcgcccaacggctgctgaaggtggttgatgacatcggcctccaactcaattttagtaacacaactataagcctgacaagcccctctcttgcattagccgtaatacgggttaatgcatcttcgttcaacacgacaaccttcgttgctcaggaccctgcaaacttacaagtgtctcttgagacccaggctccagaaaacagtatcgggactatcactctgccgagttcgctgatgaacaacctgccagcccacgatatggagctcgccagcagggttcagttcaatttcttcgagaccccagccctgtttcaggatccaagcctggagaatctcagcctgatttcctacgtcatttcctcatctgtggccaatctcaccgtaaggaatctaacaagaaatgttaccgtgactctgaagcacatcaacccaagccaggacgaattaacagtgcgctgcgtgttctgggaccttggcagaaacggcggtaggggaggctggtctgataacggatgctctgtcaaagacagaagattgaacgaaactatttgcacctgtagccatctgaccagcttcggtgtgctcctggatcttagcaggacatcagtgctcccagcacaaatgatggctcttacttttataacgtatatcgggtgtgggctcagctccatcttcctcagcgtgacactggtaacatacatcgcattcgagaaaatcaggagggactacccttccaagatactgatccaactgtgtgcagcattacttctcctgaacctagtattcttgctggattcatggatagccttatataagatgcagggtctctgcatatccgtggccgtgtttctccactatttcctgctcgtgtccttcacttggatggggttggaggcttttcatatgtacttagcgctggtgaaagtctttaacacgtacattagaaagtacattctcaagttctgcatcgttggctggggtgtacccgctgttgtcgtaacaatcattctcacaatctctccagacaactacggactcggctcgtatggaaagttccccaatggctcccctgatgatttctgctggatcaacaataacgcagttttctatattacagtggtaggatacttttgtgttatttttttgcttaatgtttcgatgttcattgtagtgttagtccagttgtgtcgcatcaaaaagaagaaacagttgggagctcagcgaaaaacatctattcaggaccttcggtcaattgctggtctgacttttttgcttggtattacgtggggctttgccttcttcgcttggggtcctgtcaacgtaaccttcatgtacttgttcgcaatttttaataccctgcagggattcttcatctttatcttttattgtgtagccaaggaaaacgtcagaaaacagtggagaaggtacttgtgttgcggaaaactgaggctggccgagaactcagattggtctaaaacagctacgaacggtctgaaaaaacagaccgtgaatcaaggggtgagctcatcgtcaaattccctgcagtcatccagtaatagtaccaatagcacgacgctgctagtcaataacgattgctccgtacacgcctctggaaacggtaatgcctctacagaacggaacggtgtaagtttttctgttcagaacggggacgtgtgcctgcatgatttcacagggaagcagcacatgtttaatgaaaaggaagacagctgcaacgggaaaggtcgcatggcactccggcgaacctctaagcggggtagcctacactttattgaacagatgtag

SEQ ID NO: 224083 - DNA, 3054 bp, synthetic construct
  misc_feature 1..3054: note = Description of Artificial Sequence: Synthetic coding sequence
  source 1..3054: mol_type = other DNA
atggtattttctgtccggcaatgtggacatgtgggacggactgaggaagttctcctgaccttcaagatttttctggtgatcatatgcctccatgtggtgctggtaacatccttggaggaggacaccgacaatagcagcctatcacctcctccggctaagctatccgttgtgtccttcgctccatccagcaatgggacgccagaggtagagacgacgtcgctgaatgacgtaacactcagcctgctgccgagcaatgaaacggagaagacaaagattacaattgtcaaaacatttaatgcctcgggagtgaagccccaaaggaatatctgtaatctgtcaagcatttgtaacgacagcgcattcttccgcggtgaaatcatgtttcagtatgataaggaaagcaccgtaccgcagaatcagcacattaccaacggcacacttaccggggttctcagtctctctgaactgaagcgctccgagcttaacaaaacactgcagacgcttagcgagacctattttattatgtgcgccacagccgaggcacagtcaactctgaactgcacctttactatcaagctgaacaacaccatgaatgcatgcgctgttattgcggcactcgagagggtgaagattaggcccatggagcactgctgttgttctgtgcggattccatgcccttcctctcctgaagagctggaaaagcttcagtgcgatctgcaagatcccattgtatgcttggctgatcaccccaggggacctcctttctccagcagtcagtccatccctgtggtgccacgggcaaccgtgctgtcccaggttcccaaggccacatcattcgcagaacctcctgactacagccccgtgactcacaatgtccccagcccaattggcgaaatccaaccactgagtccacagccctcagccccaattgcgagttcccccgctatcgacatgccgccacagtctgagaccatatctagtccgatgccacagacccatgtctctggaacacctccccctgtgaaagcctctttttccagccccactgtctccgcccctgccaatgtcaacaccacaagcgcgcctcctgtccagacagatatagtgaacaccagcagtatttctgatctggaaaatcaggtgctccaaatggagaaagctctgtcccttggctccctggagcccaaccttgctggagaaatgattaaccaggtgtcccgccttctgcattctccacccgatatgttggcccctctcgcccagcgattgcttaaagtcgtggacgacatagggctgcagctgaatttctcaaacaccaccatctctctgacatcccccagcttagctcttgccgtcattagagtgaacgccagcagctttaataccactacatttgtcgctcaagaccctgcaaacctgcaggtgtccctggagacccaggctcccgaaaactcaatcggaacgattacgctcccttcctcactgatgaataatctgccagcacacgacatggaactggcttcgcgagtccagtttaatttctttgaaactcctgccttgtttcaggatccaagtttagagaacttatcccttatttcttacgtgattagttccagcgtcgcaaatctgaccgttcgcaaccttactcgaaacgtcaccgttacactgaaacatatcaatccttctcaagacgagctgacagtgagatgtgtgttctgggatctggggaggaacggcggacgaggcggatggtccgacaatggctgtagcgtgaaagacaggaggcttaacgagacgatctgcacctgctcccacttaacaagttttggtgtattactggatttgtcgaggacctctgtcctccccgcacaaatgatggcactgacgtttataacgtatataggctgcggcctgtcctccatatttctttcagtcaccctggtgacctatatcgctttcgaaaagatcaggagggactatccttcgaagattctcatccagttatgcgctgccctgctcctcctcaacctggtgtttttactggacagttggatcgccctttataagatgcagggtctttgcatctcagtagcagttttcctccactacttcttattggtatccttcacatggatggggctggaagccttccacatgtacctcgccctggtgaaggtctttaatacttacattcggaaatacatcttgaaattctgtattgtgggctggggggtgcccgcagtagtggttacaatcattctgactataagtcccgacaactatggacttgggagctatggcaagtttcctaacggatccccggatgatttttgctggattaacaataacgctgtgttttacataactgttgtaggatacttttgcgtaatatttttgctgaatgtgtccatgttcattgtcgtgctggtacaactctgtaggataaagaaaaaaaagcagctgggagcccagaggaagacatccattcaggatttgcgatcgattgcgggactgacattcctcttgggaatcacctggggctttgctttcttcgcatgggggcctgtaaatgtcacatttatgtatctgtttgcaattttcaataccctgcagggcttttttattttcattttctactgcgtggccaaggagaatgtcaggaaacagtggcgcaggtacctatgttgcggcaaattgaggctcgccgaaaacagcgattggtcaaagactgctactaacggactcaaaaagcaaactgtcaaccagggcgtgtctagctcatccaattcccttcagagcagctcaaatagcacaaactcaacaacattactggtgaacaatgactgcagcgtacatgctagtggcaacgggaatgcttctactgagcgaaatggtgtgagcttttcagtgcaaaatggggatgtctgcttacacgatttcaccggcaagcaacacatgttcaacgaaaaggaggatagctgtaatggcaaagggagaatggctctgcgaagaacgtccaagaggggaagccttcatttcatcgagcaaatgtag

SEQ ID NO: 224084 - DNA, 2901 bp, synthetic construct
  misc_feature 1..2901: note = Description of Artificial Sequence: Synthetic coding sequence
  source 1..2901: mol_type = other DNA
atggttttttcagtccgacagtgcggacacgtgggtagaacggaagaagtgcttttaacttttaagatttttctagtgattatctgccttcatgttgtgctggtaacaagtctggaggaggacactgataactcatctctcagccccccacctgcaaaactctcagtggtgagcttcgctccatcaagcaatgggacaccagaagttgaaaccacttctctgaatgatgtaacgctgagtttgcttccgagtaatgagacagagaaaacaaagatcacaatcgtgaaaactttcaacgccagtggggtaaagccacagagaaatatttgcaacctcagctcaatctgcaatgactcagcattttttaggggtgagattatgttccaatacgataaggagtctactgttcctcagaatcagcacatcaccaatggtaccctcacaggggtcctgtccctctcagagttaaaacgtagtgagctgaataaaacgcttcaaactctgagcgagacatatttcatcatgtgcgccacagcagaggcacagagcaccctcaactgcacattcaccatcaagctgaacaacacaatgaacgcctgcgctgtgattgccgctctggaacgagtgaaaatccggcctatggagcattgctgctgctccgttcggataccatgccctagctctcctgaagagctcgagaagttacagtgtgatctgcaggatcccatagtctgtctcgccgatcaccccagggggccacccttcagctcatcccagagcatcccagtggtgcccagagctaccgtgctctctcaagtgccgaaggctaccagctttgccgaaccacctgactactccccggttacacacaatgtcccttccccaatcggggaaatccagcctctgtcacctcagccttccgccccaattgcatcctcccctgctattgatatgcctcctcagtccgaaacaatctcaagtcccatgccccaaacccacgtcagcggtacccctcctccagtcaaggcctctttttcaagtcccactgtcagtgcgcctgccaacgtgaataccacatctgcgccacctgttcagaccgacatcgttaatacttctagtatctccgacctggaaaaccaggtgctccagatggaaaaggccctctcccttggaagtctggagcctaatttggccggagagatgatcaaccaggtcagtcgactgcttcattctcctcccgacatgctggcacccctcgcacagcggttgttaaaggtcgtcgatgatatagggctgcaactgaatttcagcaacactactatctcacttacgagtccgtcgctggccttggctgtgatccgcgtcaatgcatcttcgtttaacactactaccttcgtggcccaggatcccgctaatctccaagtgtcactggagacacaggccccagagaactcaatcggcacgatcacactgccctcgtcactgatgaacaacctgcccgctcacgacatggaactggcttcaagggtccaattcaacttcttcgagactccagccttgttccaagacccctctctggagaacctgagcctgatctcctatgtgatttcttcttcagtagccaatttaacagtgcgaaatttaacccggaatgttaccgtcacattgaaacatatcaatccctctcaggatgaactcaccgtgcgctgcgtgttctgggacctgggccgaaacggtggtcggggtggatggtccgataacggctgtagcgtgaaggatagacgccttaatgaaaccatttgcacttgctcgcacctgacttcctttggtgtgctgttggatttgagcagaacctcagtcctgcccgctcaaatgatggctctgacgttcataacttacataggttgtggactgtcatccattttcctatctgttaccctggtaacctacatagctttcgagaagatcaggcgagattacccaagcaagatcctcatccagctgtgcgcagcactgctcctgttaaatttagtattcctgctggatagctggatcgccctgtacaagatgcaagggctgtgtattagtgttgcagtctttctgcactactttttgcttgtttcctttacgtggatggggctcgaagctttccacatgtacctggcactggtgaaggtattcaatacttacatccggaaatacattcttaagttttgtatcgtaggctggggggtgccagccgtggtcgtcactatcatcctgaccatttccccagacaattatggtcttggaagctacggcaagtttcccaacgggtcgcccgatgatttctgctggattaacaataacgccgttttctacatcaccgttgtggggtatttctgtgtaatcttcctcctaaatgtgtccatgtttatcgtggtgttggtccagttatgtcgcattaaaaagaaaaagcagctgggggctcagcgtaagacctctattcaggacctcaggtctattgctggtctaacttttctgctaggaattacctggggattcgcattctttgcatggggccctgtgaatgttacttttatgtacctgtttgctatcttcaatacccttcagggatttttcatattcatattttactgtgttgcaaaagagaatgtcagaaaacaatggcggcgttatttgtgctgcgggaagttgagattggcggagaacagcgggaacgctagcactgagcgtaatggcgtcagcttttccgtgcagaatggggatgtctgcctccatgatttcaccgggaaacagcacatgttcaacgagaaggaagattcgtgcaacggtaaagggaggatggcactaagaagaacgtccaaacggggaagcctccacttcatcgagcagatgtag

SEQ ID NO: 224085 - DNA, 2982 bp, synthetic construct
  misc_feature 1..2982: note = Description of Artificial Sequence: Synthetic coding sequence
  source 1..2982: mol_type = other DNA
atggtgttttcagtccgccagtgcggccatgtcgggaggacagaagaagtgcttctgacatttaaaatctttctggtgatcatctgccttcacgtggtgctggtgaccagtctcgaggaggacaccgataattcctctttgtccccccctcctgatgtcactctctccctgctgccctccaatgagaccgaaaagacaaaaataacaattgtgaaaaccttcaatgcttcaggagtgaagcctcagcgaaatatttgcaatttgtcttccatctgtaacgatagcgcgtttttccgcggagagatcatgtttcaatatgacaaggagtcgacagtgccccaaaaccagcatatcacaaatgggacactcaccggtgttttgagcttgtcagaactgaagaggtcagagctgaacaagacactgcagacgctcagcgaaacctactttattatgtgtgcaacagcagaggcacagtctacattaaactgtactttcactatcaaattaaacaacacgatgaacgcctgcgccgttatcgccgcactggagagggtaaagattcgcccaatggagcactgttgttgctctgtgcggatcccctgtccctccagcccagaggagctggaaaaacttcagtgcgatcttcaggaccccatagtgtgcctggctgatcatccccgtggacctcctttctcatcgagccagtctatcccagtggtacctcgtgcaaccgttctctcacaggtgccaaaagccacttccttcgctgaacctcccgactactccccagtgactcataacgtgccgtcacctatcggcgagatacagcctctgtctccacaaccctctgcccctattgcaagctcaccagcaattgatatgcctccacagagcgagactatttctagcccaatgcctcagacacacgtgtctggtacacctcctccggttaaagcttccttcagctcacctaccgtgtctgctcccgctaacgtcaacacaacgagcgctccccctgtacagactgacattgttaacacgtcctccatctccgacttggaaaaccaggtgcttcagatggaaaaagcactctccctgggctctctcgaaccgaacctggctggggaaatgattaatcaggtgtcaagactgctgcactcccccccagacatgctggccccactcgctcagagactcttgaaggtcgtggacgacatcggactgcagttgaacttcagtaacacaactatttctctgacatctccaagcctcgccctcgcagtaatccgtgtgaacgcatcctcgttcaacacaaccacatttgtggcccaggaccccgctaacctccaggtgtctctggagacgcaggcccctgaaaatagcatcggcacgatcacactgccatcaagtctgatgaacaacctgcctgcccatgatatggaacttgcatcccgcgtgcagttcaatttctttgaaacacctgcgctctttcaggatccatccctggaaaacctttcgctgatatcttatgtcattagtagtagcgtcgccaatctgactgtccgaaacctgacccgcaacgttaccgttacgctcaagcacattaatccatcccaggatgagctcaccgtgcgctgcgttttttgggacctggggcgaaatgggggtcgcggagggtggagcgacaacggctgcagcgtgaaagacagaaggcttaacgagaccatatgtacatgctcacaccttactagcttcggggtgctgctcgatttgagccgaacatccgtgcttccggctcaaatgatggccctgacattcattacctatatcggatgtgggcttagctccatttttctctccgtgactctggttacctacatcgcttttgagaagatccgcagagactacccctccaaaatcctcattcagctgtgtgccgctctgctgcttctcaatcttgtgtttctactcgatagttggattgccctttataaaatgcaggggctctgtatatccgtggccgtcttcctgcattatttcctccttgtgagtttcacttggatgggactcgaggcctttcacatgtacctcgccctagtaaaagtatttaacacctatatacgaaagtatatcctgaaattctgtatcgtgggctggggtgtccccgcagtcgtagtgaccatcatcttgacgatctctcctgataattatgggctcgggagctatggcaaatttcccaacgggtccccagacgacttctgttggattaacaacaatgccgtgttctatatcaccgtcgtgggttatttttgcgtcatttttctcttgaacgtaagtatgttcatcgtggtcctcgtccaactctgccgcattaagaaaaaaaagcagctcggagctcagagaaaaacctctatacaagacctacggtccatcgctggcctcactttcctgctagggataacatgggggttcgctttcttcgcttggggcccagtcaacgtgacttttatgtacctgttcgccatattcaataccctacagggtttctttattttcatattttactgtgtggccaaggagaacgtgagaaagcagtggaggagatacttgtgctgcggtaagctgagactcgctgagaattccgactggtctaagaccgccacgaacggtttaaagaaacagacagtgaatcagggagtgtcgagctcatctaattctctgcagtcctcctccaatagcacaaactctaccacgctgctggttaataatgattgttctgttcacgcctcaggcaacggaaacgctagtaccgaaagaaacggagtgtccttctctgtgcagaacggcgacgtatgtttacatgattttaccggaaaacagcatatgttcaacgaaaaggaggattcttgtaatggtaaaggtaggatggctctgcggcgaacctcaaaacgaggcagccttcactttatagagcagatgtag

SEQ ID NO: 224086 - DNA, 3006 bp, synthetic construct
  misc_feature 1..3006: note = Description of Artificial Sequence: Synthetic coding sequence
  source 1..3006: mol_type = other DNA
atggtatttagcgtgaggcagtgcggccatgtgggtcggacagaagaggtccttctaacattcaagatctttctggtgataatctgtctccacgttgtccttgtgacatcgctggaggaagatactgacaattctagccttagtccacctccagaagttgagaccacctcactgaatgacgtgacactcagtctcttgccatccaatgagaccgagaagaccaagatcacaatcgtgaagaccttcaacgcatctggagtcaagccccagcggaatatttgtaatctatccagtatctgcaatgactccgcattctttaggggggagattatgttccagtacgataaagagagtacggtgccccagaatcaacacattacaaatggcactctcactggagtgttgagcctgtcagagctaaaaaggagcgaactgaataaaacactccagactctgagcgaaacatacttcatcatgtgcgccacagcagaggctcagtctacactcaattgcactttcactattaagttaaacaatacaatgaatgcctgtgcagtgatcgcggctttagaacgcgtgaaaattaggcctatggaacactgctgctgctccgtgagaatcccgtgtccctcttcccccgaagaactggaaaaacttcagtgtgacttacaggatccgattgtctgcctggccgaccaccccagaggcccacctttctccagtagccaaagtatacctgtggtgccgagggccactgtgctatcccaggtccccaaggccacatctttcgcggaaccaccggattactcgcctgttacacacaatgtcccaagcccgatcggggaaatccagcccctgagccctcaacccagcgcccctatagcttctagccccgcaattgacatgccgcctcaaagtgaaaccataagctcaccaatgccacagacccacgtaagcgggaccccaccaccagtgaaggcgtccttctcatccccaactgtctctgcacccgctaatgtcaatactacttctgcacccccagtacagactgacatcgtcaatacttcatcaatttcggatctggaaaatcaggtgctccagatggagaaggctctgtctctcggatctctggagcctaatctcgccggagagatgattaaccaggtatcacggctcctgcattctccacctgacatgttagcccctttggcccagcgcctgctgaaagtggtggacgatattggcttacagctgaacttctctaatactacgatctctctgacctcaccttcacttgccctagcggtgatcagagtgaatgcttctagcttcaacactacaaccttcgtagcacaagacccagccaacttgcaagtgtcactggaaacccaggcccctgaaaattccatcggaaccatcactttgcctagctccctcatgaacaatctgccggcacatgatatggagctcgccagtcgggttcagttcaattttttcgagacgccggcactctttcaggatccctcactggagaacctgtctctgatctcatacgtaatcagttcctccgttgccaaccttaccgtgcgcaatctgacaagaaatgttaccgttacactaaagcacatcaatcccagccaagacgagctgaccgtgcgttgcgtcttttgggaccttggtagaaacggtgggaggggcggatggtccgataatggttgtagtgtgaaagacaggcggctgaatgagaccatatgtacctgcagccatctcactagttttggagtcctactggatctcagccgaacatccgtgctgccggctcagatgatggcactgaccttcatcacctacatcggatgtggtctttccagtatctttctgagcgtgactcttgtgacttatattgcatttgagaagatcaggcgagactatccgagcaaaatcctgatccagctgtgcgcagctcttctcctgctaaatttagtgttcctgcttgattcctggattgctttatacaaaatgcagggtctgtgcatctcggtggcagtgttccttcactactttcttctcgtgagcttcacatggatgggccttgaagcgtttcatatgtatcttgctctggtcaaggtatttaatacatacataaggaaatacatcttgaaattttgcatcgtgggctggggagttcctgcggtggtcgttaccatcatcttaaccatttcacctgataactatggcctaggcagctacggcaagtttcctaacgggagccctgatgatttttgttggattaacaataatgcggttttttacatcaccgtggtcggctatttctgtgtcatttttctcctaaacgtgtctatgtttattgtggttctcgtgcagctttgccgcatcaaaaagaagaagcagctgggcgctcagcgtaagacctctatccaggacctgaggagtattgcgggactgacctttctccttggaatcacttggggtttcgcctttttcgcctggggtcctgtcaacgtcaccttcatgtatctttttgccatctttaacacactgcaaggattttttatcttcattttttactgcgtggcaaaggagaatgtgagaaaacagtggagacgatacctgtgttgtggaaaactgcggctagccgaaaactcggactggtccaagaccgccaccaatgggctgaagaaacagacagtcaatcaaggagtgtccagcagcagtaattctcttcagtcgagcagcaattccaccaattcgactacactgctggtcaacaatgactgttccgttcacgcttcggggaacgggaacgcatcaaccgagaggaatggggtgtcattttccgtgcagaatggcgatgtgtgtctgcacgatttcaccgggaagcagcacatgttcaatgaaaaagaggattcttgcaacggcaagggacgcatggccctgcgcaggaccagtaagagaggctctcttcacttcattgaacagatgtag

SEQ ID NO: 224087 - DNA, 354 bp, synthetic construct
  misc_feature 1..354: note = Description of Artificial Sequence: Synthetic coding sequence
  source 1..354: mol_type = other DNA
atcttactgacgatgcagcatatcaacactgggatagatatgcttaatcaactgggatgcgtgtttttcgctggagttaaaccgcagcggaatatttgtaatctgtcaagcatttgcaacgattcagctttcttccggggagagataatgtttcagtacgataaggagtcaacagtcccccagaaccagcatatcacgaatggcaccctgaccggcgtcctgagcttgtcggaactcaaaaggagcgaattaaacaaaactctgcagacactttcagaaacctactttattatgtgtgctacagccgaagcccaaaggcacattaagttgtacatccacaataagaccgagtag

SEQ ID NO: 224088 - DNA, 1014 bp, synthetic construct
  misc_feature 1..1014: note = Description of Artificial Sequence: Synthetic coding sequence
  source 1..1014: mol_type = other DNA
atgaactccacatgcatcgaggaacaacatgacctggaccactatctgtttccgatcgtatacattttcgtgatcatcgtctctatccctgccaatatcgggtccctttgtgtgagctttttacaggcaaagaaggagtcagagttagggatttacctgttctcactgtctctatccgacctgctgtacgctcttactctgccattatggatagactacacctggaataaggacaattggactttcagcccggcattatgtaaggggtcggccttcttgatgtacatgaatttttatagcagcaccgcttttctgacctgcatcgcagtggaccgttatttggccgtggtatacccacttaagttttttttcctgcggacccggagatttgccctcatggtgagcttgtccatttggatccttgaaacaattttcaatgcagtgatgctgtgggaagacgaaacagtcgtggagtactgcgacgctgagaaatctaattttaccctgtgctatgataaatacccactggagaaatggcagattaatttaaaccttttccgcacctgcacaggctatgctattcctctcgtgaccatactaatctgcaacagaaaggtctaccaagcagtccggcacaacaaggctacagagaacaaagagaaaaagaggatcattaaactgctggtttcaatcacggtcacctttgttctatgcttcacgccttttcacgtgatgttactgatccgttgcatactggaacacgctgtgaatttcgaagaccattcgaatagtggcaagaggacctataccatgtatagaattacagttgccctgacttcacttaactgtgtggccgaccctattctctattgctttgtcacggaaactggtagatacgacatgtggaacatcctgaagttctgtacgggacggtgcaatacatctcagagacagagaaaaaggatcttatcagtgtctacgaaagacactatggaattagaggtgctcgaatag

SEQ ID NO: 224089 - DNA, 1623 bp, synthetic construct
  misc_feature 1..1623: note = Description of Artificial Sequence: Synthetic coding sequence
  source 1..1623: mol_type = other DNA
atgaatagtactggacatttgcaagacgcaccaaatgctacctcgctccatgtgccgcattctcaggaagggaattcaacatctctgcaggaaggtttgcaggacttgatccataccgccacgctggtcacatgtaccttcctgctggccgtcatattttgcctcggatcttacggtaactttatcgttttcttgagcttttttgaccctgcttttcgcaagttccgcacaaacttcgactttatgatcctgaatctttctttctgtgacctgttcatctgcggcgtcaccgcgccaatgttcacctttgtcctcttcttttcttcggcttcctcaatccctgacgcattctgtttcacttttcacctcacctcatccggctttattattatgtccctcaaaactgtggccgtaatagctctgcaccggctgagaatggtgctcggcaaacaaccaaatcgaaccgcctcctttccatgcactgtcctactcacgctgcttctttgggcaacgagtttcaccctggcgacattggccactctaaagactagtaagtctcacctatgcttgcccatgagctcacttatcgcgggtaagggcaaagctatcctgtctctttatgtcgtagacttcaccttttgcgtggccgtggtgtcagtctcttatataatgatcgctcagactctaagaaaaaatgctcaggtgagaaaatgtccacccgtgatcacagtggatgccagccgccctcagccattcatgggtgtgcccgtgcagggcggaggagatcccattcagtgcgctatgccagccctgtaccgaaaccagaactataacaagctgcaacacgtgcagactagggggtataccaagagcccaaatcagctggtaacaccagcggcttcaaggctccagctggtatcagccattaacctatcaactgctaaagactctaaggcggttgtgacttgtgtgataattgtgttgagcgttttggtctgttgcttacctttgggcatctccctcgtccaagttgtgttaagctccaacggttccttcattttgtaccagtttgagctgtttgggttcactctgatcttcttcaaaagcggacttaatccgtttatttactcgcgcaacagcgcgggactgagaaggaaagtactgtggtgcctccagtacatcggcctgggatttttctgttgtaaacaaaaaactcgcctgcgtgccatgggaaagggtaaccttgaggtgaaccgtaataagagtagccaccacgagacaaactccgcgtatatgctgtccccaaaaccgcagaaaaaattcgtggaccaggcatgcggaccgagccacagtaaagagtcgatggtgagtccaaagatatctgctggacaccaacactgtggtcaatcgagctctacaccaatcaacacacggattgaaccgtattatagcatctacaattcatctccttctcaggaggagagctctccatgtaacctgcaaccggtgaattcttttggttttgccaactcatatatcgctatgcattatcacacaactaacgaccttgttcaagaatatgatagtacctctgctaagcagatcccagttcccagtgtgtag

SEQ ID NO: 224090 - DNA, 1092 bp, synthetic construct
  misc_feature 1..1092: note = Description of Artificial Sequence: Synthetic coding sequence
  source 1..1092: mol_type = other DNA
atgggacctggcgaggcactcctggctggcctcctcgttatggttctggcagtcgccctcctgtccaacgctctcgtcctgttgtgttgcgcttattccgccgagctccggacacgagccagcggcgtgctcctggtgaacctctccctcgggcatctattgctggccgctctcgacatgccttttactctgctgggcgtgatgagaggcaggacacccagcgcccctggggcatgccaggtcatagggtttcttgataccttcctcgcgagcaatgctgccttgtcagtagcagctctgagcgcggaccagtggttggcagttggattccctctgcgctatgcaggtcgcttacggccaagatatgccggtctccttttggggtgtgcgtggggtcagagtttggcattctctggagcagctctgggctgtagttggttggggtattccagcgcttttgcctcatgctctctccgattgccacctgagcccgagcgcccacggttcgccgcttttactgcaacgctgcatgctgtcggatttgtactgcctctagcggtgctgtgcttgacctcactgcaggtccaccgcgtggccagaaggcactgtcaacggatggacaccgtcactatgaaagcgctggctcttctcgctgacctgcacccctcagttagacagcgatgtctgattcagcaaaaacggaggcgccacagggccacgcggaagatcggcattgccattgctacattcttaatttgtttcgccccttatgtcatgacccgactggctgagctagtacccttcgtgacagtgaacgctcagtgggggatcctgtctaaatgcctgacctatagcaaagccgtggctgatcccttcacatatagcctgcttcggcgacccttcagacaggtactcgctggcatggtgcacaggctcctgaaaagaacaccacgacctgcctccacccatgatagctcattagacgtggctgggatggtgcaccagctgcttaagcggacaccccgtcctgccagtacccataacggaagcgttgatactgagaatgatagttgtttacaacaaacccattag

SEQ ID NO: 224091 - DNA, 1011 bp, synthetic construct
  misc_feature 1..1011: note = Description of Artificial Sequence: Synthetic coding sequence
  source 1..1011: mol_type = other DNA
atgaataacaacacaacatgcatccagccttctatgatatccagcatggctctgcctattatttatattcttctgtgtatagttggggtgtttggaaatactctgtcacaatggatttttctcacaaaaattggaaagaagactagcacacatatatacctgtctcaccttgtgacggctaacttattggtctgttcagcgatgcccttcatgtcaatatatttccttaagggattccagtgggagtaccaatccgcgcagtgtagggttgtgaactttctcggaactttatctatgcatgccagtatgtttgttagtttgttgatactctcttggattgctatcagtcgctacgccacactgatgcagaaagactcctcacaggagacaacttcatgttatgaaaagattttctatggacacctccttaaaaagtttcgtcaacctaactttgccaggaagttgtgcatttatatttggggagttgttttaggaatcatcatccctgtgaccgtctattattcagtgattgaggccaccgagggggaggagtctctatgctacaatcgacagatggaactaggagccatgatatcccagatcgcaggtctaattgggacaacatttatcggattcagcttcttggtggtattgacctcatattatagtttcgtgtctcaccttcgaaaaattcgtacctgtacaagcatcatggaaaaagatttaacttactctagcgtgaagcggcacctcttagtgatccagatcctgctgatagtctgcttcctgccatactcaatctttaagcccatattctatgtgcttcatcagagggacaattgccagcaactcaactacctgatcgagacaaaaaacatcctcacatgcctggcttccgccaggagcagcaccgatcccattatcttcctgctcctggataaaacttttaagaagacactgtacaacctctttactaagtcaaatagcgcacacatgcagtcctacgggtag

SEQ ID NO: 224092 - DNA, 1272 bp, synthetic construct
  misc_feature 1..1272: note = Description of Artificial Sequence: Synthetic coding sequence
  source 1..1272: mol_type = other DNA
atggtcccccacttactgcttttatgcttgctccctttggtaagggcaacggagccacacgagggtagagcagatgagcagtctgcggaggccgctctggctgtaccgaatgccagtcatttcttttcatggaacaactacacgttttctgattggcaaaactttgtcggccgacgtcggtatggagcagagtctcagaatcccacggttaaagccttactgattgtggcttatagcttcataatagtgttcagtctgttcggcaatgtactcgtgtgtcatgtaatttttaagaaccaacgcatgcattctgcaactagcttattcatcgtcaacctcgctgtcgccgacataatgatcacattactgaacacgccatttacactggtgcgcttcgtcaatagcacctggatcttcggaaaaggaatgtgccacgtgtctcggttcgctcagtactgctcactgcatgtgtctgctcttacactgacagcaatcgccgtcgatcggcaccaggtcatcatgcaccccttgaagccaagaattagcataacaaagggcgtgatctacattgcagttatctggactatggcaacattcttcagcctgcctcatgccatctgccagaagctgttcacattcaaatacagcgaggacatcgttcgctcactctgcctgcctgacttcccagaacccgctgatctcttttggaagtatttggatcttgcaacgtttattctactgtatattctacccctgctgattatttccgttgcatacgctagggtggcaaaaaagttgtggctgtgtaatatgatcggagatgttactaccgagcaatatttcgcgctgagacggaaaaaaaagaaaacaatcaaaatgttaatgctcgtggtggtgctgttcgcactctgttggttccccttgaattgctacgtattactgctgtcttccaaagttatacggactaataacgccctgtactttgccttccattggttcgctatgtcttcaacctgctacaacccttttatttactgttggctgaacgaaaatttccgcattgagctaaaagccctcctttccatgtgccaaagacctccaaagccccaggaagatcgacctccgtcaccggtcccgagcttccgtgtcgcgtggactgaaaagaacgacggtcagagagctcctctcgcgaacaacctgctgcccacttctcagcttcagagtgggaaaactgatctctcaagcgtggagccaattgtgacaatgtcttag

SEQ ID NO: 224093 - DNA, 1191 bp, synthetic construct
  misc_feature 1..1191: note = Description of Artificial Sequence: Synthetic coding sequence
  source 1..1191: mol_type = other DNA
atgtggaacagtagcgatgctaatttttcgtgttaccatgaatccgtgttggggtatcggtacgtggccgtaagctggggggtcgtcgtcgccgtgacagggaccgttggaaatgttctgactctgttagcactcgccattcaaccgaagctccggacccggtttaacctacttattgccaacctgacattggccgacctgctttactgcactctgcttcagccattcagcgttgacacatacttgcaccttcattggagaacaggtgctaccttctgcagagtctttggcctgcttttgtttgcgtctaactccgtgagcattttaacattgtgcctgattgctctcgggcgttacctactaatcgcccatcccaaactttttccgcaggtgttctcagctaaagggatcgtgctcgccctggtaagcacatgggtagtgggagtggccagtttcgcgcctttatggccaatctacattctggtgcccgtcgtgtgtacatgttctttcgatcggattagagggagaccctataccaccatcctcatggggatttatttcgtgctcggattgagctccgtaggaattttctactgcctcatccatcgacaagtcaaacgcgcagcccaggctttagatcagtataaactgcgccaggccagcattcatagcaatcacgtcgcacgcactgacgaggccatgcctggcaggttccaggagctggatagccggctggcctccggaggtccatccgaaggtattagcagcgagccagtctccgctgccaccacccagacactggagggcgattccagcgaggttggggatcagataaacagcaagcgcgcaaagcagatggccgaaaagtcaccccctgaagcttctgctaaagcccagcctataaaaggcgcacgtcgcgctcccgactcctcttcagaattcggaaaggtgacgcggatgtgctttgcagtcttcctgtgcttcgccctatcgtatattcctttcttgcttctaaatattttagacgccagggtgcaggcgcctagagtcgtgcatatgctcgccgctaacctaacctggctgaacggctgtatcaacccagtcctctacgccgctatgaatagacagtttagacaggcatatggttccattctgaaacgcggaccacgcagtttccaccgattacactag

SEQ ID NO: 224094 - DNA, 1191 bp, synthetic construct
  misc_feature 1..1191: note = Description of Artificial Sequence: Synthetic coding sequence
  source 1..1191: mol_type = other DNA
atgtggaactcctccgatgcaaacttcagctgctatcatgaatctgtcctcggataccggtacgttgcagtttcatggggtgtcgtggtagcggtcactggaaccgtaggtaacgtattgaccctcctcgccttggctatccagccaaaactcagaacgcgcttcaatctgttaattgctaatttaacactggccgatcttctgtattgtaccctgctgcaacctttcagtgtggatacgtatctgcaccttcattggaggaccggggctacattctgccgcgtattcggtttgctgctctttgcctcaaatagtgtgtcaattctgaccctgtgcctgatcgcactgggcagatatttacttatcgcccaccctaagctatttccacaggtcttttcagccaagggaatcgtcctagcgctggtatctacgtgggtagtaggggtggcttcttttgccccactgtggcccatctacattctggtgccagttgtttgtacttgctcgtttgataggatacgcggtagaccctataccactattctaatgggaatctactttgttcttgggctgtcttccgtgggcattttctactgcttaatccatcgccaagtgaagagagccgcacaagcactcgaccaatacaaactccgccaagcttcaatccactcaaatcacgtggcccgaactgacgaagccatgccaggcaggtttcaggaacttgactctaggctcgccagcgggggtccatcggaaggcatctcttctgaaccagtgtcagctgccaccacccaaaccttggaaggcgacagttcggaggtcggcgaccagattaactccaagcgtgccaagcaaatggccgaaaagtccccccctgaggccagcgccaaagctcagcccataaagggggcacggagagccccagattcatcttcagagtttggcaaggtgacgaggatgtgttttgcagttttcctgtgctttgccctgtcctacattccgtttctgttgctgaatattctggatgcgcgtgttcaggcccctcgcgtggttcatatgctggcagctaacctgacttggctgaatggctgcattaacccagtgttgtatgccgcaatgaatagacaattccgccaggcttatggttccattctgaaaagagggccacggagttttcatcgcctccattag

SEQ ID NO: 224095 - DNA, 1113 bp, synthetic construct
  misc_feature 1..1113: note = Description of Artificial Sequence: Synthetic coding sequence
  source 1..1113: mol_type = other DNA
atggccaactactctcatgcggcagacaacatcctgcaaaatctgtcacccctgacggccttcctgaaacttactagtctgggctttatcatcggagtcagcgtagtggggaacctcctgatcagcattctcctggtgaaggacaaaaccctgcaccgcgctccctattacttcctcctcgatctatgttgtagtgacatcctgcggagcgcaatttgttttccattcgtgtttaactccgtgaaaaacggctcaacctggacatacgggactctcacatgtaaggtgatcgccttcctaggggttttatcctgttttcacaccgccttcatgctgttctgcatctctgtcaccaggtatctcgcaattgcacatcacagattctatacaaagcgcttgacattctggacctgtctggctgtcatttgcatggtctggaccctgtctgttgcaatggcattcccaccagtacttgacgttggaacttactccttcatcagagaggaggaccagtgcactttccaacaccggtccttccgcgctaatgatagcctgggattcatgcttctgcttgctttaatactgctcgctacacagctcgtctatctcaagttgatttttttcgtccacgacagaaggaaaatgaagccggtccagtttgttgccgctgtgtctcagaattggaccttccacgggccaggcgcatcgggacaggcagcagcaaattggttagcagggttcggcaggggcccaacacccccaacactgctggggatccgccagaatgccaacacgaccggacgcaggcgtcttttggtcctagatgagtttaagatggaaaagcgcatcagtcgcatgttctacattatgaccttcctgtttctgaccctgtggggcccatacctggtggcttgttattggagggtgttcgctagaggtccagttgttcctggtggcttcctgacagccgctgtatggatgtcttttgcccaagccggaataaaccccttcgtctgcatcttctccaaccgcgagctgaggcgttgtttctccacaactctcctttactgccgtaagagcagactcccgagggaaccctattgcgtaatatag

SEQ ID NO: 224096 - DNA, 1113 bp, synthetic construct
  misc_feature 1..1113: note = Description of Artificial Sequence: Synthetic coding sequence
  source 1..1113: mol_type = other DNA
atggccaattactcgcacgccgcagacaatatcttgcagaacttaagccccttgacagcattcttaaagcttacatcattgggctttatcataggcgtgagcgtggtggggaatctgctgatctccatcttgctggtcaaggataagacccttcaccgagccccttactactttctcctcgacctatgctgcagtgatattcttcggagcgcaatttgcttcccattcgttttcaacagtgttaagaacgggtcgacctggacctacggcaccttgacttgcaaagttatcgcattcctgggagtgctgagctgcttccacacggcgtttatgcttttttgcatatccgtcaccaggtacctcgctattgctcatcaccgcttttacacgaaaaggctaacgttttggacctgcctggctgtgatctgcatggtctggactcttagtgtggccatggcctttcctcctgttttggacgtgggcacctatagctttatacgggaggaggatcagtgcacctttcagcaccggtcgtttcgggctaacgatagtcttggatttatgctgctgctggccctgatcctgctggccacccagttggtgtacttgaaactcatcttcttcgttcacgacagaagaaagatgaaacctgtgcagtttgtggccgctgtgagccaaaattggacctttcatggtccgggtgcctctggtcaggcggctgctaactggctggctgggtttggccgtgggcctaccccacctaccctattgggcattagacagaacgccaacaccaccgggaggcgacgtctgctggtgctggacgaattcaaaatggagaaacgaatatcccgcatgttttatatcatgacattcctctttctgaccctgtggggcccttatctggtcgcatgttattggcgcgtgtttgctcgaggcccagtggtgccaggcggtttccttactgcggctgtctggatgtcctttgctcaagccggtatcaatccttttgtgtgtattttttcgaacagagagctgcgcaggtgtttcagtaccacccttctatattgccgcaagtctcgcttgcctagagaaccctactgtgtcatttag

SEQ ID NO: 224097 - DNA, 216 bp, synthetic construct
  misc_feature 1..216: note = Description of Artificial Sequence: Synthetic coding sequence
  source 1..216: mol_type = other DNA
atggctaactacagccatgcagctgataatatcttgcagaacctctcaccattaactgcattcttgaagcttacctccctgggttttattattggggtgtctgtggttggcaatctgctgatctctatcctgctggttaaagataaaactctccatcgagctccctactacttcctcctcgatctgtgctgtagcgacatcctgaggagcgcttag

SEQ ID NO: 224098 - DNA, 1113 bp, synthetic construct
  misc_feature 1..1113: note = Description of Artificial Sequence: Synthetic coding sequence
  source 1..1113: mol_type = other DNA
atggcaaattactcacatgctgcagataacatcctgcaaaatctcagtcctctaacagccttcctgaagctgactagcctaggcttcatcattggcgtgtccgtcgtcggcaacctgctgatctccatactccttgttaaagacaagactttacaccgggctccctactattttctgcttgatctgtgctgtagcgatattctccggtcagcaatctgctttcctttcgtgtttaattctgtgaaaaacggatcaacgtggacttacggaacgctgacatgcaaggtgattgcatttctgggcgttcttagctgttttcatacagccttcatgctgttctgtatttccgtcacacggtatttggcgattgcacaccaccgcttctacacaaagcgcctgaccttctggacttgcctggctgttatttgcatggtatggaccctgtcagtcgccatggcttttccgccagtgctggacgtcggtacctattccttcattagggaggaagaccagtgtactttccagcacaggagcttcagggctaatgactccttgggattcatgctgcttctcgctcttatcttactcgccacccagctggtgtatttgaaacttattttttttgtgcacgaccgccgtaagatgaagccagtgcagttcgtggctgcagtaagccaaaattggacattccacggcccaggcgcttccggacaggcagctgcaaactggcttgcagggtttgggaggggccctacccccccaacattgctcggcataagacagaacgctaacactaccggcaggcgcaggttactggttttggatgaattcaagatggagaagcggatcagtcggatgttttatataatgactttcctgtttctgacactgtgggggccttatcttgtggcctgctattggagggtcttcgccagaggcccagttgtgcctggaggattccttaccgcggcagtgtggatgagcttcgcccaagcaggaataaatcctttcgtgtgtatcttcagcaatcgagagttgcgcaggtgtttctccaccactctgctttattgtaggaaaagccgccttcctagggaaccctattgcgtgatttag

SEQ ID NO: 224099 - DNA, 366 bp, synthetic construct
  misc_feature 1..366: note = Description of Artificial Sequence: Synthetic coding sequence
  source 1..366: mol_type = other DNA
atggccaattattcgcacgccgctgataatatcctgcagaatctctcccccctgacggccttcctgaaactgacaagtcttggtttcatcataggcgtgagcgtggtcggcaacttactgatttccatcctgctcgtaaaagacaagaccttgcaccgagcgccttactactttcttctcgatttgtgttgctcagacattctgcgaagcgccatctgcttcccattcgtctttaacagtgtgaagaacgggagtacgtggacatatggaaccctgacatgtaaagtaattgctttcttaggcgtattgagctgcttccataccgcctttatgctgttttgcatctctgtcacgcgttatctctag

SEQ ID NO: 224100 - DNA, 1113 bp, synthetic construct
  misc_feature 1..1113: note = Description of Artificial Sequence: Synthetic coding sequence
  source 1..1113: mol_type = other DNA
atggcgaactacagccacgccgcagacaatatcctgcagaacctaagtccccttacggcatttctgaagctgacaagtctgggatttattatcggcgtgagcgtcgttggaaacctgctcatctccatcctgttggtcaaagacaaaacactgcaccgggcaccatactatttcctgttagacttgtgttgctcagatattctcagatccgctatctgttttccctttgtttttaatagtgtcaaaaatggcagcacctggacctacggaactctaacgtgcaaggttattgcttttctaggcgtgttgtcttgttttcacacagcgtttatgctgttttgtataagtgtgactagatatctcgccatcgcacatcaccggttctatacaaagcggttaacgttctggacgtgtcttgctgtcatatgtatggtttggacactgtcggtggcaatggccttcccaccagtcttggatgtcggtacatattcctttattagggaggaggatcagtgcaccttccaacatagatcctttagggctaatgattctctgggtttcatgctcctgctggcattgatcctgcttgctactcagcttgtgtaccttaaattgatattttttgttcatgatcgacgcaaaatgaagcctgtgcagttcgtggctgctgtctctcagaattggactttccacgggcctggcgcaagtgggcaagctgctgccaactggcttgccggatttgggcgaggacccactcccccaacgctgcttggcatccggcagaacgcaaatactactgggagacgcagattgctggtactcgacgaattcaaaatggaaaaacgtatttccagaatgttctatatcatgactttcttattcttgacactgtggggaccctatctggtagcctgttattggcgagtctttgcccgtggccctgtcgttccaggcggttttctgaccgcagcagtctggatgtctttcgcacaggccggaattaacccctttgtttgcatcttctccaaccgggaacttaggagatgcttcagtacaactctgctatactgccgtaagtcccggctcccacgtgagccctactgcgtgatatag

SEQ ID NO: 224101 - DNA, 1077 bp, synthetic construct
  misc_feature 1..1077: note = Description of Artificial Sequence: Synthetic coding sequence
  source 1..1077: mol_type = other DNA
atgggtttcaaccttaccctggcaaagctccctaacaacgaactgcatgggcaagagagccacaatagcgggaatcggagcgacggcccaggcaaaaatacaacactgcataacgagttcgataccatcgtgctcccagtgctgtacctgattatattcgtggcttcaatcctcttaaatggacttgcagtttggattttcttccatatccggaataagactagcttcatattttacctgaagaacatcgtggtggctgacctgattatgacactcaccttcccgtttcgaattgtgcacgacgccggatttggcccttggtatttcaagtttattctttgccggtatacctccgtccttttttacgcgaatatgtatacgtcgatcgtgtttctcggcctcatttcaatcgaccggtatttgaaagttgtgaagccattcggtgattctagaatgtatagcattacatttacaaaggtgctgtctgtgtgcgtgtgggtgattatggcggtactgtccctgcccaacatcattctgaccaatgggcaaccaacagaagataacattcacgattgtagcaagctgaagtcccccctcggtgtgaagtggcacactgctgtaacttatgtgaacagctgtctgtttgtagcggtgctcgttatattaatcggctgctatattgcaattagtcgttacatccataagtcctcacggcagttcatatcccaatcaagtcggaaacgtaagcacaatcaatctataagagtggtcgtggctgtgttttttacctgcttcttgccctaccatctgtgccgaataccttttacgtttagccacctcgatcgacttctggacgaaagcgcccagaagatcctgtattattgtaaagagatcaccctgtttctgtccgcctgtaatgtctgtctggatcccattatttacttttttatgtgccgcagctttagccggaggctgtttaagaaatcaaacattaggacccgatcggagagcattcggtctctgcagtctgtgcggaggtccgaggtgcgaatctactacgattatacagatgtgtag

SEQ ID NO: 224102 - DNA, 1368 bp, synthetic construct
  misc_feature 1..1368: note = Description of Artificial Sequence: Synthetic coding sequence
  source 1..1368: mol_type = other DNA
atgtccttccttatcgattcatctataatgattacctcacagatcctattctttggcttcggctggctgtttttcatgcgacaactgtttaaggattatgagatccggcaatacgtagtgcaggtgatcttcagcgttaccttcgcatttagctgcactatgttcgaactcatcatcttcgagattctcggtgtcctgaactcttccagtcggtatttccactggaagatgaacctgtgcgtcatactgctcatcttggttttcatggtgcccttttacatcggttacttcattgtgtctaatattagactgctacacaagcagcggctgcttttttcttgtctgctctggcttacgtttatgtacttcttctggaagctgggtgatccattccctatcttatcccctaagcatgggatcctctctattgaacagcttatctcacgggtgggagttatcggagtaaccctcatggccttgctttcgggttttggggctgtcaactgcccctacacgtacatgtcatatttcttacggaacgtaacagatacagacatcctggctttggagaggaggctattgcagaccatggacatgattattagcaagaaaaaaaggatggctatggcgagaagaaccatgtttcagaaaggagaggtccataataaacctagcggcttttggggcatgatcaaaagcgtgaccacatcagcatccggttctgaaaaccttacgttgattcagcaagaggtggacgctcttgaggaattgagtagacagttatttctggagactgctgatctgtacgccaccaaggaaagaattgagtattccaagacgttcaaaggtaagtactttaattttctgggctacttcttttctatctactgtgtttggaaaattttcatggccaccattaacatcgtcttcgatcgagtcgggaaaactgacccagtgacaaggggtatagagataacagtaaattatctgggaattcagtttgatgtcaaattttggagtcagcacatatcgttcatcctggtcggaattatcattgtgacaagcatccggggtctgctgatcacattgactaagttcttctatgcgatttccagctcgaaaagcagcaacgttatcgtactcctgcttgcccaaattatgggtatgtactttgtctcctccgtactactgatacggatgtcaatgcctctcgagtatcgtactattatcacggaagtgttaggagaactgcagtttaacttctaccaccggtggttcgatgtcatctttctcgtgagtgcactgtctagtatattattcttgtacctggctcacaagcaggctcccgagaaacaaatggcaccatag

SEQ ID NO: 224103 - DNA, 1008 bp, synthetic construct
  misc_feature 1..1008: note = Description of Artificial Sequence: Synthetic coding sequence
  source 1..1008: mol_type = other DNA
atgtattttttttggaagctaggcgatcccttccctatcttgagccccaagcatggtattttgtctatcgagcagttaataagtagggtgggagtgatcggtgtgactctgatggctctactctcggggttcggggcagttaattgcccttacacatacatgagctacttccttcggaacgtaacagacactgacatactggccctggaacgccgactgctccaaactatggatatgatcatatcgaaaaaaaagagaatggccatggccagacgcacgatgttccagaagggcgaagtacacaacaaaccttccggtttttggggaatgatcaaaagtgtaactactagcgcaagcggatctgagaacttaacgctcatccagcaggaggtggacgctttagaagagctaagtcggcaactcttcctggaaacagcagacctttacgctacaaaggaaagaattgagtacagtaaaacctttaagggcaagtacttcaacttcttggggtacttcttttccatatattgcgtgtggaagatattcatggctaccatcaacattgtctttgatcgtgttggcaagacagatcctgtgacacgcggaatagagatcactgtgaactatcttggaatccagttcgacgtcaagttttggtctcaacacatctcatttatcctggtcggcattatcattgtcacttcaattcgcggtctgctaattaccctgactaagttcttctacgccattagttcgtcaaagagcagcaatgttatcgttctccttctggctcaaattatggggatgtatttcgtgagcagcgtgttgctgattcgtatgtctatgccattggagtataggactattatcacggaggtgcttggggagttacagttcaacttctaccataggtggttcgatgtaatcttcttggttagtgctttgtcgtccatcttatttctgtacttagcacacaagcaagcccctgagaaacagatggctccatag

SEQ ID NO: 224104 - DNA, 1368 bp, synthetic construct
  misc_feature 1..1368: note = Description of Artificial Sequence: Synthetic coding sequence
  source 1..1368: mol_type = other DNA
atgtcgtttctgattgactcatccataatgatcacctctcagattctgttcttcggattcggctggctgttcttcatgcggcagctattcaaggactacgagatccggcaatacgtggtgcaggtcatctttagcgttactttcgcattcagctgcaccatgtttgaactgattattttcgagattttgggcgtcttgaacagttcatcaaggtatttccactggaaaatgaacttgtgcgtgattttgctcatcctagtgttcatggttccattctacattggctatttcatcgtgtctaacattcgtctgttgcacaaacagcgcctgctcttttcatgtctactgtggctaacattcatgtatttcttctggaagcttggcgaccccttcccaatcctttcccccaagcacggcatcctgagtatcgagcagctcatcagcagggtaggcgttatcggcgtaacactgatggctctgttatcggggttcggagccgtgaattgtccttacacatatatgtcatactttttaaggaacgtgacagataccgacattttagctctggagaggcgcctactgcagacaatggacatgatcatctcaaaaaagaaacggatggctatggccaggcgaacaatgtttcagaaaggcgaagtgcacaataaacctagtgggttctgggggatgattaagagtgtaacgaccagtgcctccggaagcgagaacttgactctcattcaacaggaagtggacgcactcgaggagctctctcggcagcttttcttggagactgcggacctgtatgccacgaaagaaagaattgagtactcgaagacctttaaggggaagtattttaacttccttggctacttctttagtatctactgtgtctggaaaatttttatggccactatcaacattgtgttcgatcgtgtcggaaagacagaccctgtgactcgaggaattgagatcaccgtgaactacctgggcatccagttcgatgtgaaattttggtcacagcacatttcatttatcctggtgggtataattatcgtgactagtatcagggggctgctcatcacattgactaaatttttttatgccatctcatctagcaaatcctcaaatgtaatcgtgctgctccttgcccagatcatggggatgtacttcgtgtcctccgtattgttgatccggatgagtatgccactggagtaccgcacgatcatcacagaggtgttgggagagttacagttcaatttttatcaccgctggtttgatgtgatctttttggttagtgccttgtcctcaatactctttctctatcttgcccacaaacaggccccagagaaacaaatggctccctag

SEQ ID NO: 224105 - DNA, 18920 bp, synthetic construct
  misc_feature 1..18920: note = Description of Artificial Sequence: Synthetic coding sequence
  source 1..18920: mol_type = other DNA
atggatatcttcttggtcctgggcatgcccagcgcctctttgcttgtgaatcttctgagcgccctccttatcctgttcgtgtttggagagaccgagattcgattcaccggccagactgagttcgtggtaaacgagacctctactacggtcattcggttaataattgagcggatcggtgagccagctaatgtgactgccatagtgtcactgtacggagaggatgctggcgattttttcgatacatacgccgctgcttttattcccgctggcgaaacaaaccgaaccgtgtatatcgccgtgtgtgatgacgatctccctgagccagatgagactttcattttccacctgacactccagaagcctagtgctaatgtcaagctcgggtggccgagaaccgtgaccgtgacaattctgagtaacgataacgcattcgggattatttctttcaacatgctgccctccatagctgtctccgaaccaaaaggacgaaacgaatctatgccactgacattgatccgagagaagggcacgtatggaatggtgatggtgacatttgaagtggagggcggaccaaaccctcccgacgaggatttatccccagttaagggaaatattacattccccccaggcagggccacagtgatttacaacctcacagtactggatgacgaagtaccagagaacgacgaaatctttctgattcagctgaaatctgtggagggaggcgcagagatcaacactagccgtaatagtattgagattattattaagaagaatgacagccccgttaggttccttcagagcatctatctggtcccggaggaagatcacatacttatcataccggtcgtgagaggaaaagacaataatggtaatctcatcgggtccgatgagtacgaggtgtcaatatcttatgccgtcaccacaggtaactcaaccgctcatgctcagcagaatctagatttcattgacctccagcctaacacaacagtggtcttccctccattcatacatgagtcgcacctgaaatttcagatcgtcgatgacactatccctgagattgccgagtcgtttcacatcatgttattaaaagacacgctgcagggtgacgccgtgctcatctctccgtccgtggtccaggtcacaatcaaaccaaatgacaaaccgtacggggtgctatctttcaacagcgttctcttcgagcgaacggtcataatcgatgaggatagaatcagtcggtacgaggagatcacggtcgtgcggaacgggggaacccacggcaatgtctctgccaactgggtgctgaccaggaatagcaccgacccgtctcctgttactgctgacatcaggcccagtagcggagtcctgcattttgcacaaggccagatgctggcgacaatcccacttacagtcgtggatgatgatctcccagaagaagcagaagcctacttgctgcaaattcttccgcatacaatccgcggtggagcagaagtgtcggagcccgctgagctgcttttctacattcaagatagcgacgatgtgtacgggttgatcactttcttcccaatggagaaccagaaaattgaaagctcacccggtgagagatacctgtcactgtcattcacgaggctgggcggaacaaagggggatgtccggcttctttattccgttctgtacatcccagctggcgctgtcgatccattacaagccaaagaaggtatcctcaacatctcacgaagaaacgatctgatcttccccgaacagaagacacaagtgaccaccaaattaccaatcaggaacgacgcgtttctgcagaatggggcacattttctggtgcagttagagacggtggaattactcaatatcattcctcttattccccctatttcacctagatttggagaaatttgtaacatttcactcctggttacaccggcaattgccaatggtgagatcggtttcctgtcaaatctccccattatattgcacgagccagaagatttcgctgcagaggtcgtgtacatcccgttgcacagagatggcacagacggccaagctaccgtatattggtccctcaaaccgtcggggttcaacagtaaagctgttactcctgatgacattggcccattcaacggcagcgtgctgttcctgagcggccagtccgacactacaattaacattacaataaaaggcgacgatattcctgagatgaatgagacagtgacattaagcctcgaccgtgtcaacgtagagaatcaagtgctgaaaagcggatacacctccagagatcttattatcctcgaaaacgacgacccgggaggtgtgttcgagttctccccggcatcaagaggtccttatgtgattaaagagggcgagagcgtcgaattgcacattatccggtcccgaggctcacttgtaaagcagtttctccactaccgcgtcgagccgagagacagcaacgaattctatggaaacactggagtcctggagtttaaacctggagaacgggagatcgtgatcactctattagcacggctcgatgggatccctgagcttgatgaacattattgggtggtgctgagctcgcacggtgaacgggagagcaagctcggaagcgcaacaattgtcaacatcaccatcttaaagaacgacgatccacacggcatcattgaattcgtttccgatggactcattgtcatgatcaacgaaagtaagggtgacgccatctacagtgcagtctatgacgtggtgcggaacaggggaaatttcggtgatgtaagcgtgtcttgggtggtctctcccgacttcacccaagatgtgttccccgttcagggcacagttgtattcggcgaccaggaattcagcaagaatatcacgatttacagtcttccggatgaaatccctgaggagatggaagagttcactgtcatcctgctcaacggcacgggaggggctaaagtgggcaatcgtaccaccgccacacttaggattcgaaggaacgacgacccaatttattttgccgaaccaagagttgttagagtccaagagggagagaccgcaaatttcactgtccttcgaaacgggtcggtagacgtgacatgcatggtacaatacgctacaaaggacgggaaagccaccgccagagaaagggattttataccggtcgagaaaggagagaccttgatcttcgaggtcggctcccgccagcagtcaatcagcatattcgtgaatgaggacggcattccagaaacagatgaacccttttatatcattctactgaactccactggcgatactgttgtataccaatacggcgtcgctacagtgatcatcgaagccaatgacgatccaaatgggatcttctcactcgagcctattgacaaagcggtcgaagagggcaagaccaacgctttttggatactcaggcatagaggctacttcggaagcgtctccgtgagctggcagctgtttcagaatgactcagctctgcagcctgggcaggagttttacgagaccagcggcacagttaatttcatggatggcgaggaggcaaagcctattattttgcatgcattcccagataagatcccagaattcaacgaattctatttcttaaaactggtgaacatttcaggcggatccccaggacctggaggccaactggctgagactaatctccaggtaaccgttatggtgccttttaacgacgatccgttcggtgtgttcatcttggatcccgaatgcctggaaagggaagtggccgaggacgtgctctctgaagacgatatgtcctacattaccaatttcacgatccttcgccagcagggtgtcttcggagatgttcaattgggctgggaaatcctcagttccgagtttcctgctgggctccctccaatgatcgacttcctgctggtggggattttcccaaccactgtgcatctgcagcagcacatgcggagacatcattccgggaccgacgcactgtacttcacagggttggaaggagctttcggaacggtgaatccaaagtatcacccgtccagaaataatactatcgccaacttcaccttcagcgcttgggttatgcctaatgccaacactaatggcttcatcattgcgaaggatgatggaaatggttctatctattacggagtgaaaattcagacaaacgaaagtcatgtgacactcagcctgcactacaagacactggggagcaatgccacctacattgctaaaacgaccgtgatgaagtatctggaggagtcagtctggctgcacctcctgattatattggaagatggcataattgagttctacctggatgggaatgccatgcctcggggtatcaaatctctcaagggtgaagccatcactgacggcccaggcatacttcgcatcggcgcagggatcaatgggaatgatcggttcaccggactgatgcaagacgtgcgcagctatgagcggaagctcactctagaagagatatatgaactgcacgctatgcctgcgaaaagcgacctgcacccgatctcagggtatctcgagttccgccagggcgagactaacaagtcgtttatcatttccgcccgagacgataatgatgaggagggcgaagagctgtttattttgaaacttgtaagtgtctacggaggagctaggatttcagaagagaacaccactgcccgactgactatccaaaagagcgacaacgcgaacggattgttcggatttactggcgcttgtatacccgaaatcgccgaagaggggtcaaccatcagttgcgtagtggaaaggaccagaggggcactagattatgtgcatgtgttctacaccatttcgcagatagaaactgacgggattaattacttggttgatgatttcgccaacgcgagcggcactatcacgtttctcccttggcagagaagcgaggtgctgaacatctacgtgctggacgatgacattcccgaactgaacgaatattttcgggtgacgcttgtttctgcgatccctggcgacggaaagctcggatcgacccccaccagtggtgctagtattgacccagaaaaagagacaactgatattacaattaaggcaagtgatcatccctatgggctactccagttttctacagggttaccccctcagcctaaagacgctatgacgctccccgcttcttcggtgccacacataactgtggaggaagaggacggcgagatccggctcttagtgattcgggctcagggactgttgggcagagtcaccgctgaattcaggactgtgtccctgacagctttctcccctgaggattaccagaatgtggctggaactcttgagttccagcccggtgagcgttataagtatattttcatcaatatcaccgataatagtattcccgagcttgagaaaagctttaaggtggagcttctcaacctggaaggcggagtggccgaactttttagagtcgacgggagtggctccggagacggggatatggagttcttccttcccaccattcataagcgcgctagtttaggcgtcgccagccaaatattggtcactatcgccgcaagcgaccacgcacacggcgtctttgaattcagtccggagtccctttttgtgtctggaactgaaccagaggacgggtattctacagtcactctgaacgtgatccgtcatcatggcacactgagcccagtcactctgcactggaatatagattctgacccagatggggatctcgccttcacctctggaaacatcacgtttgaaatcggccagacgtctgccaacatcaccgtcgaaattctccccgatgaggatcccgagcttgataaggcttttagcgtgtctgtgctgtcggtttcatcagggtccctgggggcacatatcaacgccacattgaccgtgttagcttcagacgacccctacgggattttcatattctccgagaagaaccggcctgttaaggtggaggaagctacacagaatattacactctccatcatccggctaaaggggttgatgggcaaggttctcgtaagctatgccacgctggatgacatggagaagccaccatattttccccctaatttggcacgggctactcagggaagggattacattccagcctctggatttgcattgttcggtgccaaccagagtgaggctacaatcgccataagtatcctggacgatgacgaaccagagcgttctgagtctgttttcatcgagctgctgaactctacccttgtggctaaggttcagagccggtctattcccaatagccctagactcggtcctaaagtggagaccattgcccaactgataatcatcgctaatgacgatgcatttgggacactgcagctgagcgcgccaatcgtccgggttgccgaaaaccatgtcgggccaatcataaacgtgacaaggaccggaggcgcttttgcagatgtatcggtgaaatttaaagctgtaccaataactgccatcgcaggggaggattacagcattgcctccagtgatgttgtacttttggagggagaaacgagtaaagcagtccctatctatgtcatcaacgacatctatcctgagcttgaagagtccttcttagttcagttaatgaacgagacaaccggtggcgcacgtctgggggcactcaccgaagcggtgattattattgaagcttctgatgatccttatgggttgttcgggttccagatcaccaaactgattgtcgaagaacccgaattcaactccgttaaagtaaacctgccaatcataagaaacagcggcacgcttgggaatgtaaccgtccagtgggtggccaccattaatggccagcttgcaaccggtgacctgagggtggtgtctgggaacgtgactttcgcccctggcgagactattcagaccttactgctcgaagtcctggctgacgacgtgcctgaaattgaagaagtgattcaggttcagctcacagatgcttcagggggaggtacgatcggcttagatcgaatcgccaatataatcatcccagctaacgacgacccgtacggcactgtggcattcgcccagatggtgtatagggtgcaggagcctttagagcggtcatcctgtgcaaacatcactgtgagaagatctggcggtcacttcggccgtctactgcttttctacagcacgtcagatattgatgtggtcgccctcgccatggaagaggggcaggacctgctgtcctactatgagagtccaatccagggtgttccagatccactctggcgcacttggatgaacgtctcagcagttggagaacctctctatacgtgtgcgaccctgtgccttaaggagcaagcctgttctgctttctcgttcttttccgccagcgagggtcctcaatgtttttggatgacttcatggatctcgccggcagtgaacaattccgacttctggacctacaggaagaatatgacacgggtggcatcgttgttttccgggcaagcagtggccggttctgactatgaacccgtgacccgccagtgggcgatcatgcaagaaggagacgagtttgccaacctcactgtgagcatactgccagatgactttcccgagatggacgaaagcttcctgatatctctgctggaggtccatttaatgaacattagcgctagcctgaagaaccagccgacgatcgggcagcctaacatctcaaccgtcgttatcgcccttaatggagatgcttttggggtgttcgtcatttacaacatttccccaaatacttctgaggacggtctattcgtcgaggtacaagagcaacctcagacactggtcgagttgatgattcaccgcaccggcggatcgttggggcaggtggccgtggaatggcgtgtcgtaggaggaaccgccactgaaggactagactttattggagccggagaaatcctcactttcgcagaaggcgaaacaaaaaagacagtaatcctcacaatcctggacgatagtgaacctgaggacgatgaaagcatcatcgtttccctcgtctatactgaggggggatcccgcattcttcccagctctgacactgtgcgcgttaacatcctggcaaatgacaatgtggctgggattgtcagcttccaaactgcttcccggtcagtgatcggccacgaaggcgagatcctgcaattccatgtgatccgcacattccccggacgcggaaacgtaactgtaaactggaaaatcattggccaaaacttggagctaaacttcgcgaatttttcaggccagcttttttttcctgaagggtctcttaacactacactgttcgtgcacctattggatgacaatatccccgaagagaaagaggtttatcaagtgatcctgtacgatgtacggacccagggcgtgcccccagccggaatcgctctgctggacgcacaagggtatgccgcagtgctgactgtcgaggcttctgacgaaccccacggcgtcttgaacttcgcactgtcaagccggtttgtgttgctccaggaagctaacattacaatccaactgtttatcaatcgcgagtttggatccctgggagcaatcaatgtcacatatactacagtccctggcatgctgtctcttaagaaccagaccgtgggcaatcttgcagaacctgaagtcgacttcgtcccgatcatcggatttctgatcctggaggagggcgagaccgccgcagccataaacattacgatcctcgaagacgatgttcccgaactggaggaatatttcctggtgaacctgacatacgtgggcctgacgatggccgcatctactagtttcccacctcgtctggacagtgaaggactcacagcccaggtgataattgatgccaacgatggcgctagaggggtgattgaatggcagcagagcaggtttgaagtgaacgaaacacacggctctctgactctggttgctcaaaggtcccgcgaaccgctaggccatgtcagtctgttcgtgtatgcacaaaatctcgaagcacaggtggggctggattacatcttcacacctatgatcctccatttcgcagatggtgaaaggtataagaatgttaacattatgattctcgacgatgatattccagagggtgacgagaaatttcagttaattttgacaaatcctagtcccggtcttgagctgggtaagaatacaatcgcactgatcatcgtgctggctaacgatgacggaccaggcgtgctctcgttcaacaatagcgagcatttcttcttgagggaaccaacggccctatatgttcaagaatctgtggcagtgctgtacatcgtgagggaacccgctcagggcctgttcgggaccgtgacagtgcaattcattgttaccgaagtcaactcaagcaatgaatccaaagacctcacaccatctaagggatacattgtgctggaagaaggggtgcggttcaaagctctccaaatctctgccatcctcgacacagaacctgaaatggacgagtactttgtctgcaccctctttaacccaactgggggagcccgactgggagtgcacgtgcagaccctcataactgttctccaaaatcaggcccctttaggcctattttcgatttctgcggtcgaaaatcgagccacaagcatcgacattgaagaagcaaatcgcactgtctatttgaacgtgtccagaaccaacggtatagatttggcagtttccgttcagtgggagaccgtgtctgagactgcattcggaatgcggggtatggacgtggtttttagcgtattccagtctttcctcgacgaatctgccagtgggtggtgcttctttaccttggagaacctcatctatggcattatgctccggaaatcatcggttactgtgtaccgatggcaggggatattcatcccagttgaggaccttaacattgaaaacccgaaaacctgtgaagcctttaatattggattcagcccttatttcgtaattacacatgaagagcgaaacgaggaaaaacctagtctgaattccgtttttacatttacctcaggatttaaattgttcctagtgcagaccataatcattctagagtcaagccaggtcagatactttacttctgactctcaggactaccttataattgctagccagcgcgatgattcagaactgacgcaggtctttcgatggaatgggggatcattcgttttgcaccaaaagttgcccgtgcggggagtcctcaccgtggcgcttttcaataagggaggatcagtgttcttagctattagccaggctaatgctcgactgaattcactactgttcagatggagcggcagtgggtttatcaacttccaagaagtgcctgtaagcggaaccactgaagtcgaagctctcagctcagcaaacgacatttacctgattttcgccgagaatgttttcctaggcgaccagaacagcatcgacatttttatctgggaaatgggacaaagctcttttaggtactttcagagtgttgactttgctgccgtcaacagaatacacagtttcacaccagccagcggtatcgctcatatcttgctgataggtcaggacatgagcgccctgtactgttggaattctgagcgtaaccagtttagttttgtgctcgaggttccctccgcatacgacgtcgcctcagtaaccgtgaaaagcctgaattcgtccaagaacctgatagcacttgtaggagcccactcccacatctacgaactggcctacatttcctctcattcagactttataccatcatccggagagttgatctttgaaccaggtgagagggaggccaccatagcggttaatatccttgatgatacagtgcccgagaaggaggagagtttcaaggtccagttgaagaatcctaaaggaggtgccgaaatcggaattaacgactctgtcactattaccatcttatccaatgatgatgcctatggtattgttgcttttgcacagaactcattgtacaagcaggtggaggagatggaacaggacagcctggtgaccttgaacgtcgagcgtttaaaagggacttatggacgaataacaatcgcctgggaagccgatgggtcgataagcgacatattcccaacttctggggtaatcctgttcactgaaggacaggtgctgagcactattacactaacaattttggcagacaacattcctgaactctcagaggtggtcatcgttactctcacaaggatcactaccgagggagtggaagacagctacaagggagccactattgatcaggaccggagtaagagtgtcataaccaccctgcctaacgatagcccctttggcctggtgggatggcgggctgcctcggttttcatccgggtggctgagcctaaagaaaatactaccacgttacagcttcagatcgccagggacaaggggctgctgggggatatcgctatccatttacgggcacaacccaattttcttctgcatgttgataatcaagcgacagaaaacgaagattatgtgctgcaggagaccatcataattatgaaggagaacatcaaggaggctcacgcagaagtgagcatccttccagatgacctgccagagctggaagaggggttcatagtcaccattaccgaggtcaatctggtgaacagtgatttctctactggacagccctcagtgcggagaccgggaatggagatcgccgaaataatgattgaggagaacgatgacccaagggggatcttcatgttccacgttacgaggggtgcaggcgaggtcattaccgcatatgaggtgccgcctcccctcaacgtcctccaggtgccagtagtccggttggcaggctcttttggggctgtcaacgtgtattggaaagcatcaccagactcagccggactcgaggactttaaaccttctcatgggatcctggaattcgcagacaaacaggttacagctatgattgaaatcactataatcgatgacgcagaattcgaacttactgagaccttcaacatttccctgatcagcgtagccggaggcggacggctcggcgacgatgttgtggtcacagtcgtcatccctcaaaatgacagtcctttcggagtgttcggatttgaggaaaaaacggtaatgatcgacgaatctctgagctctgacgacccggactcatatgtgacattgactgtggtcagatcccccggtggcaagggcacagttagactggaatggactatcgacgaaaaggccaagcacaatctatctcccctgaatgggactctgcatttcgatgaaaccgaatctcagaagactatcgttctgcacaccttacaggataccgttttggaagaggacaggcgctttacgattcaacttatctctatagatgaggtcgagatttcaccagtcaagggttcagctagcatcatcataagaggcgacaaaagggcatccggggaggtcggcatagccccaagttccagacatatcctgattggtgagccctctgccaagtataatggtacagccattatcagcttggtgcgtgggccaggcatcttgggagaggttacagttttttggaggatattccccccatccgtcggcgaattcgccgaaacatccggtaagttgacaatgagagacgaacaaagcgccgtgattgtcgtaatacaggccctgaacgacgatattcctgaagagaagtccttctacgaatttcaacttaccgccgtgtccgaaggaggggtactaagcgaaagctccagtactgctaacatcactgtggtggctagtgacagcccatacggcagattcgcctttagtcacgaacagttgagggtttccgaagcccagagagtgaatattacaatcatcagaagctcgggcgacttcggccatgtgcgcctttggtataagaccatgtccggcaccgccgaggccggactggactttgttccggcagccggtgaactgctctttgaggcaggtgagatgaggaagagtttgcatgtcgagattctggacgacgattaccctgagggccctgaggaattctcattgactattacaaaagtggagttgcagggaagaggttacgattttacaattcaggagaatggccttcagatcgaccagcctccagagatcggcaacatctcaatagtgagaatcatcatcatgaagaacgataatgcagaagggatcatcgagttcgacccgaagtacaccgcctttgaggttgaggaagacgttggcctgattatgatcccggtggttcgattgcacggcacatacgggtatgtgacggctgattttatttctcaaagctcctcagcgtcccctggtggcgtggactacatcttgcacggaagcaccgtgacatttcaacacggtcaaaacttatccttcatcaatataagtatcatagacgacaatgaaagcgagttcgaggaacctattgaaatcctgttgactggcgctaccggaggggcagtgcttggcaggcacctggtatccagaatcatcattgccaaaagtgattctcccttcggggtgatacgctttctgaaccagtcaaaaatcagtatagcaaaccccaactcaactatgatactctcactcgttctggagcgcaccggcggactcctaggagagatccaagttaattgggagacagttggacctaactcccaggaggcactgctgccgcagaacagggacattgcagatccagtgagcggactcttttattttggagagggggagggcggtgtccgaacaattatcttaacaatttaccctcacgaagagatcgaagtcgaggaaacatttatcattaagctgcacctggtaaagggagaggcaaaattggactctcgagccaaggatgtgacccttacgatccaggaattcggtgatcctaacggggtggtgcagtttgcccctgagactttgtcaaaaaaaacgtactcagaacctctggccctggaagggcctcttctaataactttctttgtacgcagagtaaagggtacattcggggaaattatggtctattgggaactgagcagcgaattcgatataacggaagatttcctgtcaaccagcggattctttacaatcgccgatggggaaagtgaggccagttttgatgtacatctcctgcctgatgaggtgcccgaaatcgaagaagactacgtgattcagctcgtaagcgtcgagggtggggctgaactcgacctcgagaagtctataacatggttcagtgtatacgctaatgacgacccgcacggtgtgtttgccctgtactctgacaggcagagcatactcatcggccagaatctcatcaggtcaattcaaattaacattacaagactggccggaaccttcggcgacgtggccgtgggactccggatctcatcggaccataaagagcagcctatcgttaccgagaatgccgaacggcagctcgtggtgaaagacggtgcaacttacaaagtggatgttgtgcccattaagaatcaagtgtttcttagccttggctcaaattttacactccaactggtgaccgtcatgttggtcggagggcgtttctatggtatgcctacaatcctacaggaggccaaatccgccgtgttgccagtgagcgaaaaggcagctaattctcaagtaggcttcgaatccacagctttccagctgatgaatataacagccggaacgtcacacgtgatgatttcacgtcggggaacatacggcgcactgagcgttgcttggaccacgggctatgccccaggtctggagatccctgaattcattgtggtagggaacatgacccccaccctgggctccctgagcttcagtcacggcgagcagcgaaagggagtgttcctgtggactttccctagcccaggctggccagaggcttttgtacttcacctctccggtgttcagtcgtccgctcctgggggagcacaactcagaagcggttttattgtggccgagattgaacccatgggagtgtttcagttcagtacatcctcacgaaatatcatagtgtccgaagatacgcagatgatacggctgcacgtgcagagactatttggcttccactccgaccttatcaaagtttcttatcagaccacggctggctccgccaagccgctggaggacttcgaacccgtccaaaatggcgagcttttctttcagaagtttcagaccgaagtggacttcgagattactataatcaacgatcagctcagtgagatagaggagttcttctatatcaacctgacctctgtggaaatcagaggcctgcagaaattcgatgtcaactggagtccacgtcttaaccttgattttagtgtcgctgtaatcacaattctcgataatgatgacctggctgggatggacatttcttttcctgagaccaccgtcgcggtggccgtggacaccactttgatcccagtggaaacagaatcaaccacataccttagcacaagcaagaccacaactatcttgcaacccacgaacgtggtggccatcgtgacagaagcaacgggcgtatccgcaatccctgaaaagttggtgacgctacacggaacacccgctgtttccgagaagcctgatgtcgcaaccgtgacagccaacgtgagtatccacggcactttcagccttggtccatccatagtttacatcgaggaagagatgaaaaatgggacgtttaataccgctgaggttctcatacgacgcacaggaggattcacgggcaacgtctccataacagtgaaaacctttggggagcgctgcgcccagatggagccaaacgcacttcccttcagagggatatacgggatttcaaatctgacgtgggcggttgaggaagaggacttcgaagagcagacacttaccctgatttttttggacggagagagggagaggaaagtgtcggtccagatattggatgatgacgagccggagggtcaagaatttttttatgtctttttaaccaacccacaggggggtgcccagatcgtcgaggaaaaagacgacacagggtttgccgcattcgcgatggtgatcatcacagggagtgacctccacaacggcataattgggttttctgaagagtctcagtctggattagagcttcgtgagggagccgtcatgaggaggcttcatctgatcgtgacacgccaacctaatagggctttcgaagacgttaaagtgttctggagagtcaccttaaacaagacagttgtggtgctgcagaaagatggcgtgaacttagtcgaggaactgcagagcgtgagcggcacaacaacgtgcaccatggggcagacaaagtgcttcatttcaattgaactgaagccagagaaagtgccccaagttgaggtgtatttctttgtggagctctatgaggcaactgctggtgccgcaattaataattcagcgcgattcgcccagatcaagatcctcgagagcgatgagtcccagtcactggtctattttagcgtagggtccagattggcagttgcgcataagaaggcaacgttaatctctctgcaggtggctcgcgatagcggaactggcctgatgatgagcgtaaacttctccacacaggagctacggtccgccgaaactattgggaggaccatcatttcgccagcaataagcggcaaggactttgtcatcacagaaggcacgttggtttttgagcctggtcagagatccaccgtactcgacgttatcctcacccccgagaccgggtccttaaatagtttccccaagcgcttccagatagtattattcgatccaaaaggcggagccagaatcgataaagtctacggaactgccaacattacactcgtgagcgatgctgacagtcaggctatctggggtctggcagaccagttacatcagccagttaacgatgacattctgaaccgggtcttgcacacgatttccatgaaagtcgcgactgagaacaccgatgaacagctgagcgcaatgatgcacctcatagagaaaatcacaacagaaggaaaaatacaggcattttctgtcgcttcccgcacactgttttacgaaattctgtgcagcttaatcaacccaaagagaaaagacacgcggggattttcacatttcgctgaggtaacagagaatttcgctttctccctcttgacaaatgttacatgtgggtcgcctggagagaagagcaagacgattttagattcttgtccttacctttccattctggctctacactggtaccctcagcaaataaatggacataagtttgaggggaaggagggggattatatccgaattccagagcgccttctcgatgtacaggatgctgagatcatggcagggaagtccacctgtaagcttgtgcagtttacagaatactcctctcaacagtggtttataagtggcaataaccttcctactctgaagaataaagtcctctctctctccgtaaaaggccaatcaagccaactgctgactaacgataatgaagtgctgtatagaatttacgcagccgaaccccgaattatcccacagacgagtttgtgtcttttgtggaaccaggctgccgcttcatggctgtctgatagtcagttctgcaaggtggttgaggagacggcagattacgtagagtgcgcctgttcccacatgtctgtctatgctgtgtacgctagaaccgataatttgtcttcctataatgaagcctttttcacgtcgggatttatctgtatttccggtctgtgtttggccgtgctgagtcacatcttttgcgcgcgatactccatgttcgccgctaagctgctgacccacatgatggctgcatccctcggaacccagatcctcttcctggcttcagcgtacgccagcccccaactggctgaagagtcctgctcggctatggccgctgtgacccactacttatacctttgtcagttctcctggatgctcatccagtctgtgaatttctggtatgtgctcgtaatgaacgacgaacacactgagagacgctatctactcttctttctgctgtcctgggggctgcctgccttcgtggtgatcctactcatcgtcatacttaaggggatctatcatcagtccatgtcccagatctatgggctcatccacggagacctatgtttcatcccgaacgtgtacgcagccctctttaccgcagctctcgtcccgttaacttgcttggtcgtcgtgtttgtggtgttcatccacgcatatcaggtgaagccacagtggaaagcctacgacgatgtctttaggggaagaactaacgccgctgaaattcctctcatcctgtacttatttgccctgatctccgttacttggctatgggggggtttacatatggcatatcgacatttctggatgctggtcctttttgtgatatttaactctctgcagggcctatacgtgtttatggtgtattttatattacataaccagatgtgttgccccatgaaggcctcctacaccgtggaaatgaacggtcaccctggaccgagcacagccttcttcacacccggttccgggatgcctcccgctggtggggagatctcgaaatctactcagaatttaatcggagcgatggaagaagtgcctcccgattgggaacgggcttcgttccagcagggaagccaagctagtcccgacctgaaaccatcgccccagaacggagccaccttcccatctagcggagggtacggccaaggaagtttaatagccgacgaagagtcacaagaattcgatgatctaatttttgctctaaaaacgggagccggactgtcagtctccgacaatgagagtggccagggaagccaggaaggcggtacactgacggatagccagattgtggagcttaggaggattccaattgctgatactcatttgta

SEQ ID NO: 224106 - DNA, 6920 bp, synthetic construct
  misc_feature 1..6920: note = Description of Artificial Sequence: Synthetic coding sequence
  source 1..6920: mol_type = other DNA
gtcgatgtgttcatgtttctcggtatgccatcggcatcccttcttgtaaaccttctgtcggcactgttaattttattcgtgtttggcgagaccgagatccggtttaccggtcaaactgagttcgtggtgaacgagacttccactaccgtcatacgactaattattgagagaattggagagccagccaacgtgacagcgatagtctccctttatggggaagacgcaggcgacttttttgatacctacgcggcagctttcattcctgcgggagagactaaccggaccgtgtatatagcagtatgtgacgacgaccttccagagcccgatgagactttcatctttcacctgaccttgcaaaagccgtcagctaatgtgaaactgggctggccccgtaccgttactgtgactattctaagcaacgacaatgcatttggaataatttctttcaacatgctcccctcaatcgctgtgtcggaacccaagggcaggaacgaaagcatgcccctgaccctcatccgggaaaaggggacgtacgggatggttatggtcacctttgaagtggagggcggtccaaacccacctgacgaagacctctcccctgtgaagggcaatattacatttccgccaggaagggcgaccgttatatacaacttaacagttctggacgacgaagtccctgaaaacgacgagatttttcttatccagctgaagtcagtggagggaggtgctgaaatcaatactagtcgcaactcaatagagattattattaagaagaatgacagtccagttcggtttttacagtcaatctacctggtccccgaggaggatcatatcttgatcatcccagtggtgcggggtaaagacaacaacggcaacctgatagggagcgacgagtacgaagtgagtatttcgtatgccgtcactacagggaatagtacagcacacgctcagcaaaacctggacttcatagacttacagccaaacacaacggtcgtttttcctccattcatccacgagtcccacctgaaattccagattgtggacgacaccatccctgaaattgccgaatccttccacatcatgctcctaaaggacactctacaaggcgatgccgtcttgatctccccaagtgtagttcaggtgacaatcaaaccaaacgataagccatacggcgttcttagctttaactctgtgctgttcgaacgtacagtgataattgatgaagataggattagccgatacgaggaaattactgtagtgcgaaatggcggaacgcacggaaatgtttcagccaactgggtgcttacacgcaattctaccgatccatcacccgtgacggctgacatccgcccatcatcaggtgtgttgcacttcgcccagggccagatgttagccacaatccccttgaccgtggttgatgatgatttgcccgaggaggcagaagcatatcttctgcagatcctaccccacaccattagagggggtgccgaagtgtccgagcctgccgagctgctcttttacatccaggactcagatgacgtttatggcctgattaccttcttccccatggaaaatcagaagattgagagctcacccggtgagcggtatctgtctttaagtttcacccgattaggcggaaccaaaggcgatgtgcggctgttatactcagtgctctatataccagccggtgccgtggatccacttcaggcgaaggaggggatcttaaatatctcccgacgtaacgacctgatctttcctgaacagaagactcaagtgaccacaaagcttccaattcgcaacgacgcttttctgcaaaacggggctcacttcctcgttcagctcgaaactgtggaactgctgaatatcatccctctgattccccctatctctccaagattcggagagatctgcaacatctccttactggtgacccctgctatagctaatggcgaaattgggtttctctcaaatctgcctatcattctccatgagcccgaagacttcgctgcagaagtggtctatattcctttgcaccgcgatgggaccgacggccaagccactgtgtattggtcacttaaaccaagtggatttaattctaaagccgtgacccccgacgatattggccctttcaatggctcagtgctgtttttaagcggccagagcgacacgaccattaatatcacaattaagggtgatgacatacctgagatgaacgagaccgtgacccttagcctggacagggttaacgtcgagaatcaggtgttaaagtcaggctacacttctagggatcttattatccttgagaatgacgaccctggtggagtgtttgagttttcacccgctagccgcggaccctacgtcattaaggaaggagagtcagtggaattgcacattatcagaagcagaggctctctggttaaacagtttttgcactacagggttgaacctagagattccaacgagttctacggaaatactggcgtactggagttcaaaccaggcgagcgcgagatcgtgatcacacttctggccaggcttgacgggatcccggagctggacgagcactattgggtggtcctatcctcacacggggagcgtgaatcaaaactgggctctgctacaatcgtgaacatcacaattcttaaaaatgatgatccacatgggattattgaatttgtgtctgacggtctgatcgtgatgattaacgagagtaaaggggacgcgatctactccgcagtgtacgatgtcgtacgcaatagaggcaatttcggtgacgtctccgttagctgggtcgtcagtccagattttacccaggacgtgttcccagttcagggcaccgtggtattcggggatcaggagttctccaagaatattaccatctatagcctgccagacgaaataccagaggagatggaggagtttaccgtgatactactgaacggaacaggtggcgcaaaggttggcaacagaactacggctacgctgcgcatccggaggaatgatgaccctatatattttgccgagcctcgcgtggtcagggttcaggaaggcgaaactgccaatttcacggtgctgaggaatgggtccgtggacgtaacttgtatggtgcaatacgctactaaggatggaaaagctaccgcgcgtgagagagacttcatccctgtcgagaaaggtgaaacactgatctttgaggtgggctctcgccaacaatcgatctccattttcgttaatgaggatggaatccctgaaaccgacgagcccttttacatcatcctattgaactctactggtgatacggtggtgtaccagtacggggtggccaccgtaataattgaagccaatgatgaccccaatgggatcttctccctggagcctatcgataaggctgtcgaggagggaaagaccaacgcattctggatcttgcggcaccggggatactttggatcagttagtgtttcttggcaattattccagaacgactctgctctgcagcctggacaggaattctatgaaacttctggcaccgtgaatttcatggacggggaagaggccaagccgatcatcctgcatgcattcccggacaagatcccagagttcaacgaattctacttcctcaagttggttaacatatccggcggaagtcctggcccaggcggacagctggccgaaaccaatctgcaggttacggtgatggtgcctttcaatgacgatccttttggcgtctttatccttgaccccgaatgccttgagcgagaggtagctgaggatgttttgtcagaggacgatatgagttatattactaacttcactatccttcgtcagcagggcgtgtttggtgacgtgcaactcggatgggaaatcctgtctagcgagttccctgcaggcctaccgccaatgatcgatttcttgttagtgggaatttttccaactaccgtccatcttcagcaacatatgcggcgacaccactcaggtactgacgccctatactttacaggcctggaaggagcttttggaacggttaatccaaagtaccaccccagccgtaacaatacaattgccaatttcaccttttctgcttgggtaatgccaaatgccaacactaatggtttcattattgccaaggacgacggcaacgggagtatttattatggcgtgaaaatccagacaaatgagagccacgtgacactcagcctccactataaaacgttaggcagtaatgccacctacattgcgaaaaccacggtgatgaaatatctggaagagagcgtgtggctgcacctcctgatcattctggaagatggcattatcgagttctacctggatggcaacgctatgccgagaggcattaagtccctgaagggggaagccatcaccgacggcccaggcatcctaagaattggagccggaatcaatggaaacgaccgcttcactgggctcatgcaagacgtacggagttacgagcgcaagctgacactcgaggaaatctacgagctgcatgccatgccagcaaaaagcgacctgcatcccatttcaggatacctcgaattcagacagggtgaaaccaataagtcattcattatcagcgcccgagacgacaacgacgaggagggagaagaactcttcatcctgaagctggtatcagtgtatggcggtgcacggatcagtgaggagaatactaccgcacggctgacaatccagaagtctgacaatgctaacgggctcttcggttttacaggggcatgcatacctgaaatcgcagaagaagggtcgactatcagctgcgtagtggagcgcacgcggggtgccctggactatgtccatgtgttttatacaatttcgcagatcgagacagatgggatcaactacctcgtagatgactttgcaaacgccagtgggactatcacctttctgccctggcaacgttcagaagtgctgaacatctacgtgctcgatgatgatatccctgagctgaacgaatattttagagtgactctggtgtcagccattcccggagatggcaagctgggctccacgcccacttctggggcaagcattgacccagaaaaagaaaccaccgatattaccatcaaagcatccgaccacccttatgggcttctgcagttctccaccggactccccccacaaccaaaggacgctatgactctgccggcaagtagcgtgccccacattactgtagaggaagaagatggagaaatccgcctgctcgtgatcagagcccaaggactgcttggcagagtaaccgccgagtttagaactgttagcttaacggcattcagccctgaagactaccagaacgtggccggtaccttggagttccaaccaggcgagaggtataaatacatctttatcaatattaccgataattcgatccccgaattagagaagagcttcaaggtggagttactcaacctagagggaggggtggccgagctgttccgagttgatggctccggctcaggagatggggatatggagttcttcctccctacaattcacaaacgggcttcactaggagtggctagccagattctggtgacgattgcagctagcgaccatgcacatggggtgttcgagttcagccccgagtccctgttcgtcagtggcacggaacctgaggacggctactctactgtgaccctgaacgtcatccggcatcacggaaccctgtcccctgtcaccctgcattggaacatcgactcagatcctgatggggacctcgctttcacgtccggtaacatcaccttcgagatcggtcaaacttccgccaacataactgttgagatcctcccggacgaagatccagaactcgataaagccttcagcgtttctgtgctgtcagtctctagcggcagtctcggagcccatataaatgccacgctcactgtgttagcttcagacgatccttacggaatcttcattttcagcgaaaagaataggcctgtgaaggtggaagaggccacccagaacattaccctgtcgataatcaggcttaaaggcctgatgggcaaagtgttggtttcttacgccacccttgacgacatggaaaaaccgccatacttcccaccaaacctcgcacgcgcaacccagggtcgagattacatcccggcttctggatttgccctgtttggcgctaaccagtccgaagccaccatagcaatatcgattctggacgacgacgagccggagaggagtgagagcgtcttcatcgagctgttgaattctactttggtagccaaggtgcagtcccgaagtatccccaattcacctagattggggccaaaggtcgaaactatagcccagcttatcatcattgctaatgacgacgccttcgggacccttcagctctcggcacctattgtcagggtcgccgaaaatcacgtgggcccaatcatcaatgtgacgcggactggaggggcttttgccgacgtgagcgtgaaatttaaggctgtgcccatcaccgctattgctggagaggattattctattgcatcctcggatgtcgtgctgctagagggtgagacaagtaaggctgtcccaatctacgtcataaacgatatctaccccgagctggaagaatcgttcctcgtccagctgatgaatgaaactaccggaggggctaggttgggggcactcacagaggcagtgattatcatcgaagcctccgacgacccttatgggctgtttggtttccaaattaccaagctgatcgttgaagagccagaatttaactccgtgaaggtgaacttacctatcatcagaaattctggaacacttggtaatgtgaccgtgcagtgggtggccaccatcaatgggcagctggcgaccggggaccttcgtgtcgtctccggaaacgtcactttcgctccagggatgagctcatatccctcggcaaccaatta

SEQ ID NO: 224107 - DNA, 18920 bp, synthetic construct
  misc_feature 1..18920: note = Description of Artificial Sequence: Synthetic coding sequence
  source 1..18920: mol_type = other DNA
atgagcgtttttctcgggccaggcatgccctctgcctctctgctggtaaacctgctgtcagctctcctgatcttgttcgtgttcggtgagactgagatccgatttaccgggcagacagagttcgtggtcaatgagacaagcaccactgtcattagattaattatcgaacgaattggcgagccagctaacgtaaccgctatagtgagcttgtatggcgaggacgccggtgattttttcgatacatatgccgcagcctttatacctgctggcgagactaatagaaccgtgtacattgctgtgtgtgacgacgatttgccggaacctgacgagacgttcattttccacctcaccctacagaaaccttctgcaaacgttaagctgggctggcccagaaccgtgactgtgactatcttgtctaatgacaacgcatttgggatcatctcattcaacatgctgccttctatcgcggtttcagaacccaaggggagaaacgaaagcatgcctctgactctgatccgagaaaagggtacctacggcatggtgatggtgacattcgaagtggaaggagggccaaatccgcctgatgaggacctctctccggttaagggcaatattacctttcctcctggccgtgctacagtaatctacaatcttacggttctggatgatgaggtaccagaaaacgacgagatctttcttatccaactgaagtccgtagagggcggtgccgagattaacaccagtagaaacagcatagaaataataatcaagaagaacgatagcccagttcgatttttacagagcatctaccttgtgcccgaggaggaccacatattgatcattccagttgtccgcggaaaggacaacaatgggaacctgataggctctgacgagtacgaggtgagtatctcatatgctgtgaccacaggtaactccactgcgcatgcccaacagaatctcgactttatagatcttcagcccaataccactgtcgtcttcccgccatttattcacgaaagtcatctgaagttccagatagtggacgacaccattcctgaaattgcagagagttttcacatcatgctgctcaaagacactcttcagggcgacgccgtgctgatctcgccaagtgtagtacaggtcactattaagcccaacgacaagccttacggagtcctctctttcaacagtgtactctttgaaaggacagtaatcatcgacgaggacagaatttctaggtatgaagaaatcacagtggtcaggaacggaggcactcatggtaacgtcagcgccaattgggtgttgacaagaaacagtacagatccatcccccgtgacagccgacattaggcccagttcgggagtcttacactttgcccagggtcagatgcttgctacaattccactgactgtagtcgatgacgacctaccagaggaggccgaagcctacttgctacagatactgccacacacaatcaggggaggagccgaggtgagcgagcccgcagagctgctcttttacattcaggacagtgatgacgtttacgggctcattaccttctttcctatggagaatcaaaagattgagagttccccgggtgagaggtacttatcactgtctttcacccgtttggggggaactaaaggcgatgtcaggctcctctatagtgtcctctatattcctgccggtgcggtcgaccccctacaggccaaggagggtattctcaacatcagccggcgtaacgatctgatctttccagaacaaaaaacacaggtcacaaccaagctgccaattcggaatgacgctttcctccagaatggcgctcacttcctggttcagttggagacagtggagctgttaaacatcattccactgatcccccctatttcgcctcgatttggcgaaatctgcaacatctccctgctcgtgacaccagccatagccaacggtgaaattggattcctgagcaatctgccaatcattcttcacgaacctgaagactttgctgcagaggttgtctacattcccctccaccgggacgggacggatggccaagcgactgtgtactggagccttaaaccatcgggcttcaattcaaaagccgtgacccccgatgacattgggccattcaacggctccgtgctgttcctgagtggccagagcgacaccacaatcaacattaccatcaaaggagacgacataccggaaatgaacgagaccgtgaccttgagtctcgaccgggtgaacgtggaaaaccaggtgttaaagagcgggtacacgagcagggacttgatcatcttggaaaatgatgatccgggaggggtttttgaattctcgccagcctccagggggccttacgttatcaaagagggcgagagtgtcgaattgcacatcatccgctcccggggatctctagtcaagcagttcctgcattatcgcgttgaacccagagactctaatgaattctatggcaataccggcgtgctggaatttaaaccaggggagcgagagatcgtgattactctgctcgctcgcctggacggcatcccagagcttgacgaacactactgggtcgtcctcagcagtcatggagaacgtgagagtaaactggggagtgcgaccattgtgaatatcaccattctgaagaacgacgacccgcacggaattatcgagtttgtgtcagatgggctgatcgtgatgattaatgaatccaaaggggatgcaatttattcggccgtgtatgacgtggtcaggaatagagggaatttcggagacgtgtcagtatcctgggtggtatcaccagattttacccaggatgtgttccccgttcagggtaccgtggtcttcggcgaccaggaattcagcaagaacataacaatttatagcctgccagacgaaattcccgaggaaatggaagagttcaccgtgatcctactaaacgggaccggcggtgcaaaggtgggcaatagaacaacagccaccctgaggatcaggcgaaatgatgatcccatctacttcgccgagccaagagtggtgagagtacaggagggagagacagccaacttcaccgtgctgcggaacggatccgtcgacgtcacctgtatggtccagtatgcgaccaaggatggtaaggctacagcacgggagcgcgattttattcctgtcgagaagggcgaaaccctgattttcgaggtagggagtcggcagcagtcaattagcatcttcgtcaacgaagacggcatcccggaaactgatgagccattttatattattctgctgaactccaccggcgataccgtcgtgtaccaatatggtgttgctacagttatcatagaggcaaacgacgacccgaatggcatcttctccttagaacctatcgacaaagcagtcgaagagggcaagacgaacgccttttggattctgaggcacagaggctacttcggtagcgtcagcgtgtcctggcagttgttccagaatgacagtgcgctgcagccgggtcaggagttctacgagacatctggcactgtgaatttcatggacggcgaggaggctaaacctatcatattgcacgctttccctgataagattcctgagttcaatgaattctatttcctgaagttggtcaacatttctggcggaagccccggaccaggtggacagctggccgaaaccaatcttcaggtaaccgtgatggtccccttcaacgacgatccattcggggttttcatcctggatccagagtgcttggagagagaggtggcagaagacgttctgagcgaggatgacatgagctacattacgaacttcacgattctgcgccagcagggcgtgtttggcgacgttcagctcggatgggagatcctatccagtgagtttcccgctggtcttcccccaatgatcgattttctgctggtgggaatcttcccaactactgttcacctccaacagcacatgcgcaggcaccactctggcaccgacgctctctactttacagggttagagggggcatttgggaccgttaatcctaaataccacccttctcgaaacaataccattgccaactttacattctctgcctgggtaatgcctaacgctaacacaaacgggtttatcatagccaaggacgatggaaacggatccatttattatggcgtcaaaattcagactaacgagtctcatgtcactctgagcctgcactataaaaccctgggcagtaatgccacctatatagctaaaactacagtaatgaagtacctagaggaaagtgtctggctgcatttactgataattctcgaagatggtatcatagaattctatctggacgggaacgccatgccacgcggaattaagagtctgaagggagaggctattactgatgggcctgggattctgagaatcggcgctggcataaacggaaatgaccgatttactgggctgatgcaggatgtccgatcttatgaacgtaaactgactctggaggagatttatgagcttcacgctatgcctgccaagtctgacctacacccaattagtggatatctggaattccgacagggggagacaaataaatctttcatcatctcagcaagggacgataacgatgaggaaggggaagaactgtttatcctcaagctcgtttctgtgtacggcggtgccaggatctcagaagaaaatactaccgctcgactgacgatacaaaagtctgacaacgcaaacggtctctttgggttcacaggcgcttgcattcctgaaatagccgaggagggatctaccattagctgtgttgttgaacgtaccaggggggctcttgattacgtccacgtgttttataccataagtcagattgagaccgatgggattaactatcttgtggatgacttcgccaatgcaagtggcaccattacctttctcccatggcagaggtctgaagtgctcaacatatacgtgttagacgatgatattccggagttgaacgagtattttcgggtgacactggttagtgcaatacccggagacggcaagctaggatctacacccactagcggggcatccatagaccctgaaaaggaaaccaccgacatcactattaaagctagtgaccacccgtacggactgctgcagttcagtaccggcctgcctccgcagcctaaggatgccatgactctgccagcttccagtgtgccccacattacagtggaggaggaggatggtgaaataaggctcctagtgatccgggcacagggccttttgggccgagtgactgccgaatttcgaaccgttagcctcacagcattctcgccggaagactatcagaacgtggcaggtactctggaattccagcccggagaacgatacaaatacattttcatcaatatcactgacaatagtatccccgaactggaaaagtctttcaaggtggagctcctgaatctggaagggggagtagccgaactgttcagggtcgatggcagcggatctggcgacggcgacatggagttctttctcccaacaatccataaaagggcatctctcggagtcgcttcccagattcttgtgacaatcgccgcttccgaccacgcccatggcgttttcgaattcagtccagagagcctgttcgtcagtgggactgagccagaagacgggtactcaacagtaactttaaatgtgattcggcaccacgggaccctttctcctgtgacattgcattggaatattgattctgatcccgacggtgacttggcattcacaagcggcaatattacattcgaaattgggcagacttcagctaatattactgttgaaatcctgccagatgaagatcctgagttagacaaggcattcagtgtatcagtgttatctgtttcttcggggtcccttggcgctcacattaatgctaccttgacagtgctcgcctccgatgatccctacggcatcttcatattctctgagaagaatcgcccagtcaaagtcgaggaggccacccaaaacattaccttgtctatcatccgacttaaaggacttatgggtaaagtgttggtcagctatgccacactggatgacatggagaaacccccatatttcccaccaaacctagctagggcaacccaaggacgcgattacatcccggctagcgggttcgcattgttcggcgctaaccagtctgaggctactatcgctatctccatacttgacgatgatgagcccgagaggtctgaaagcgttttcattgaactgctgaatagtactctggtggctaaggtgcaatcacgttctattcccaacagtcccagactgggcccaaaagtcgaaaccattgctcagctcatcataattgccaatgacgatgccttcggtacattgcaactgtctgctcccatcgtcagggtcgctgagaaccatgttggacccattatcaatgtgaccaggactgggggtgcctttgccgacgtcagcgtcaagttcaaggcggtgcctattaccgcgatcgccggtgaggattattccattgccagtagcgatgtcgtcctgctcgaaggcgaaacctcaaaggcagtccctatctatgtcatcaatgatatataccctgagctggaagaatcttttctggtccagctgatgaacgaaaccacgggaggggctcgtctcggggcactgacggaggccgtgattatcatagaggccagtgacgatccttatgggctttttggtttccagattactaaacttatcgtagaagagcccgaatttaactccgtgaaggtgaatctgcccattatccgcaactctgggactctcggtaatgtgaccgtacagtgggtggctacgattaatgggcagctggctacaggggatctgagagtggtgtcgggcaatgtcactttcgctccaggagaaacaatccaaaccttgcttctggaagtgctggcagatgacgtgcccgaaatcgaagaagtcatccaggtacagcttactgatgcctctgggggaggcactattggactcgaccggatcgctaacataatcatccctgcgaacgacgacccgtatggaacagtcgccttcgctcagatggtttaccgagtccaggagccactggagcgatccagctgcgccaacattacagttcggagatccggaggccactttgggaggctcctcttgttctattcaacctcagacatcgatgtggtggccttggctatggaggagggacaggacctgctctcatattacgaatctcctattcaaggggtcccggacccgttatggcggacctggatgaatgtgagcgccgtgggcgagcccttgtacacgtgtgccaccttatgtctgaaagagcaggcatgtagcgcatttagcttcttttccgccagtgaaggaccccagtgcttctggatgactagttggattagccccgcagtgaataacagcgacttctggacatatagaaagaatatgacacgggtggcctcgctattcagcggacaggccgtggccggttctgattacgaaccagttacccgccagtgggctatcatgcaggaaggagatgaatttgccaatttgacagttagcattctccccgacgattttcctgaaatggatgagtcctttctgatatctctgctagaagttcaccttatgaacatcagcgcaagcctcaagaatcagccaactataggccagccaaatatctcgacagtggtgattgccctcaatggggacgccttcggagtattcgtgatctacaacatttccccaaacaccagcgaggatggactgtttgtcgaagtgcaggagcagccacagacacttgttgagctgatgatccacagaaccgggggatccctggggcaagtggccgtggaatggagggtggtgggtgggactgctaccgaggggctcgatttcatcggcgctggggagattctcacctttgccgagggagagacaaagaagaccgtcatcttaactatcctggatgactccgagcctgaagatgatgaatctatcatagtgtccctagtgtataccgaaggcggttctcgtatcctcccatcaagtgacacagtcagagtcaatattcttgccaatgacaatgtggccggtattgtgagcttccagactgcaagtcgaagcgtgatcggccatgaaggcgaaatactgcagttccacgtgattaggacttttcccggaagagggaacgtgacagtgaactggaagattattggccaaaatctggaactgaactttgccaacttttcgggtcaactattttttccagaagggtccctcaacaccacactttttgtccacttactcgacgacaatatcccggaggagaaggaggtgtatcaggttatcctttatgacgtacgcacccagggggtgcctcccgcaggaatcgctctgcttgatgctcaggggtacgctgctgtcttgactgtcgaggccagcgacgagccacacggtgtgctgaacttcgcattaagttcaaggttcgtgttattgcaggaggctaacatcactatacagctgttcatcaatcgcgaatttggtagcctgggggcaataaacgtgacatacacaaccgtcccaggcatgctgagcctgaaaaatcagaccgttggtaacctggcggaaccagaagttgactttgtgcccatcattggttttctgatccttgaggagggagagactgccgcagctattaacattactatccttgaggatgacgtgccagagctggaagagtactttttggtcaatctcacatatgttggtctcaccatggccgcaagcacctctttccctcctaggctggactcggagggtctcaccgcacaagtcataattgatgcaaatgacggcgctcgtggcgtaattgaatggcagcagtcacggttcgaggtcaatgaaacccacggtagcctgaccctggtcgctcagcggtctcgcgagccattgggacacgtttcattattcgtgtatgcacagaacctggaggctcaggtgggcctcgattacatcttcactccaatgatcctacatttcgcggatggcgagcgctacaagaatgtgaacattatgatactcgacgatgacattccagagggcgatgagaagttccagttgatcttgaccaacccctctcccggactggagctgggcaagaatacaattgctctgatcatagtattagctaacgacgacgggcctggcgtgctgagcttcaataattccgagcatttctttctcagagaaccaacagccctgtatgtgcaagaaagcgtggccgtcctatacatcgttagagagccagcccaagggctgtttggcacagtgacagtacaatttatagttacggaggtgaactcatccaatgagagtaaggacctcacacccagcaaagggtatatagtgcttgaggagggggtgcgcttcaaggcgctccaaatttccgccatcctggatacagagcccgagatggacgaatactttgtctgcactctattcaatccaacaggcggagccagactgggagtgcatgtgcagacactgatcactgtgctgcagaaccaggcacccctgggcctcttctccatttctgcagtagaaaatagagcaacatccatcgacatagaggaggcaaatagaacagtctacctgaatgtgagccgcacaaatggcatcgatctggctgtgagtgtgcaatgggaaacagtgagcgaaactgccttcggtatgcggggaatggacgtggtgttttccgtgtttcagtccttcctggatgagtctgcaagcggttggtgctttttcacactggagaatctgatttatggaatcatgctgcgaaagagcagcgtgacagtgtatcggtggcagggaatctttatccccgtcgaggatctgaacatcgagaacccaaagacttgtgaagccttcaacatagggttcagtccctattttgtaatcacacatgaagagaggaacgaggagaagccgtcgcttaactctgtgtttacattcacctcagggttcaagctcttcctagttcagacaatcattatcctggagtcatcccaggtgcgatattttacttccgactcccaggactatctcattatcgcatctcagcgcgatgactccgaattgacccaggtgtttagatggaatggcggttcatttgtgctccaccagaagttaccagtacgcggagtacttacagtcgccttgtttaacaagggcggaagcgtgtttctggccattagtcaggccaacgcaagactaaattcactgctgttcaggtggagtggtagcggatttattaattttcaagaagtacccgtgagtggaacaactgaagtagaagctttaagctccgctaatgatatctacctgatattcgccgaaaatgtgttcctcggagatcagaacagtattgatatattcatctgggaaatgggtcagtcatcgttccgctattttcagtccgtcgatttcgccgctgtcaatagaatccactcgttcacccctgcgtccggaatcgcccacattcttctgatcggacaggatatgtcagccctctactgctggaattccgaaaggaaccagttctcgtttgtgcttgaggtcccctcagcatatgatgtcgccagcgtgacagttaaatcactaaatagttctaaaaacctgattgcccttgttggtgcacatagccatatctacgagctagcttacatttccagtcactcagatttcatcccttctagtggagagttgattttcgaacctggagaaagggaagccactatcgctgtgaatatcctcgacgataccgtccccgagaaggaagagtctttcaaagtgcagctcaaaaatcctaagggtggggcagaaatcggcataaacgatagtgtgaccatcacaatcctgtccaatgatgatgcttacgggattgtggcctttgcccagaactcactatataagcaggtcgaggaaatggagcaagattccctggtgactctaaacgtggagcgactgaaagggacttatggcaggatcacgatagcgtgggaggcagacggttccatttcagatatcttcccaactagtggcgtgattctgtttacggaaggccaggtgttaagtacgattaccttaacaattcttgccgacaatatccccgaactgagcgaggtcgttattgtgacattgacacggattacgactgagggcgtggaagacagttataagggagccacaatcgaccaggacaggtctaagtctgtcataaccactctgccgaacgatagtccttttggactcgtggggtggagagcagctagcgtgtttatcagggtcgccgagcctaaggaaaacacaaccactctacagcttcagatagctcgtgacaaagggcttttaggggacattgcgattcacttgcgggcacagccgaacttcctgttgcacgttgataatcaggccaccgagaacgaggactatgtgctgcaggaaacaatcatcatcatgaaggagaacattaaagaggcccacgccgaggtgtctatactgccagacgatctcccagagctcgaggaggggtttattgtcactatcactgaagtgaatctagtcaatagtgacttttccacaggccaaccttcagtacgcaggcctggcatggaaatcgccgagatcatgatcgaagaaaatgatgacccaagaggtatctttatgtttcacgtcactagaggggctggagaagtcatcactgcctacgaggtacctcccccactaaacgtactgcaggttccagtcgttaggctcgccggaagtttcggagctgttaacgtttactggaaagcaagcccggacagtgcagggctggaggattttaagccatcacatggtatcttagaatttgctgataagcaagtcacagccatgatagagattaccatcattgatgatgcggagtttgaacttacagagacctttaacatttcactcatatcagtggcgggtgggggacgcttgggagatgacgtggtcgtgacggtggtgatcccccagaacgactcacctttcggcgtttttggcttcgaggaaaaaacagtgatgatcgatgagtccctcagctccgatgatcccgattcctatgtgaccctgacagttgtcaggtcccccggaggaaaaggtacagttcgattggaatggacaattgatgagaaagccaaacacaatctgagtcccctaaacgggactttgcactttgacgagactgaaagtcagaagaccatcgtgctgcacaccctacaggataccgtgttagaagaggatcgacgatttaccattcagctgattagtatcgatgaggtcgagatttccccagttaaggggtcagccagcattatcatccgcggagacaaaagagcctctggagaagttgggattgctccatccagtcgccacattctcattggcgagccaagcgccaagtataacggcactgcgattatatccctggtaagagggccaggtatattgggtgaggtaacagtgttttggagaatcttccctccttctgtcggtgagtttgcggaaacctccggtaaactgaccatgagagatgagcaatctgccgtgattgtagttatccaggccctcaacgacgatattcctgaagaaaagtcattctatgagtttcagctgactgctgtgagcgaaggtggcgtcctttccgaaagctcaagtaccgccaatatcacagtggtggcatccgactcgccgtatgggcgattcgccttcagtcacgagcagctgcgcgtaagtgaagctcagagagtcaatataactataatacgcagttctggggactttgggcacgtccgtttatggtacaagactatgtccggtactgcagaagcgggtctggacttcgtacccgctgccggagagctacttttcgaggccggtgagatgaggaaaagcctgcatgtcgagattttagatgatgactatcctgagggccctgaggagttttcgctgacaattaccaaggttgagttgcagggacggggatatgatttcacaattcaggaaaacggactgcagattgaccaaccccctgaaattggtaacatctccatcgtgcgaatcattataatgaagaacgacaatgctgaaggaatcattgagttcgacccgaagtacacagccttcgaagtggaggaagatgtggggttgatcatgattcccgttgtacgactgcacgggacttacggctatgtcactgccgattttatttcacaaagctccagtgcctcacctggaggcgtggactatatactccatggttctacagtgactttccagcacggacagaatctgtcctttataaatattagcattatcgacgataacgagagcgagtttgaagagcccatcgaaattctgctgaccggggcaaccggcggagccgtccttgggagacatctcgtgtcacgcatcatcatcgccaagagcgatagtccctttggggtgatcaggtttctaaatcagtccaaaattagtattgctaatccaaactctacgatgattctatcgctcgtgctggaacggacaggcggtctgctgggcgaaatccaagttaattgggagaccgtgggccctaactcccaagaggcactgctgccccagaatagggacatcgctgatcccgtgagtggtcttttttactttggtgagggggagggaggggtgcgaaccatcatcttaacaatatacccccacgaggaaatcgaggttgaggaaacgttcataataaaattacacctcgtgaaaggcgaagcaaagctggattcgcgcgcaaaggatgttactctcaccattcaggagttcggggaccccaatggcgttgtccaattcgcccctgaaactctttctaaaaagacttattctgagcccctggcactcgagggtcccttattaattacctttttcgtgaggcgcgtgaaaggcaccttcggggagattatggtctactgggaattgagcagcgagttcgacattactgaggacttcctgagcaccagcggattcttcaccatcgctgacggtgagtcggaagcctccttcgatgttcacttgttgcccgacgaggtgcctgaaattgaagaggactatgtcatccaactggtgtctgtggaggggggagcagaactagacctggagaagagtatcacttggttctctgtttacgccaacgatgaccctcacggcgtgtttgcactctactctgatcgccagtcgatactaataggacagaacctgatccggagcattcagattaacataacccgcctggcagggacattcggggatgtggcggtgggcctgcggatttcttctgatcacaaagaacaacctatagtgactgagaacgcggagcggcagcttgtggtgaaagacggagccacatacaaggtagatgtcgtacctatcaagaaccaggtgtttttgtctctgggctctaattttacgctacaattagtgactgtgatgcttgtcggcggtcgcttttacggcatgccaacaattctgcaggaagccaagagtgccgtgcttcctgtgtctgagaaggcagcaaactctcaggtcggattcgaaagtactgcatttcagctgatgaatatcaccgccggaacctcccatgtcatgatttcacgccgtggaacctatggcgcactgtccgtggcctggacgactggctatgctcctgggctggaaatccctgaatttatcgtcgtgggtaacatgacccccaccctgggatccttgagtttttcacacggtgagcaaagaaaaggcgtctttttatggacctttccatctccaggatggcccgaggcatttgttctgcacctgagcggcgttcagagctctgctccagggggtgcgcagctgaggtccggtttcatcgtggcggagattgagccaatgggggtttttcagttctcaacctcctcaaggaatatcattgttagcgaagacactcagatgatccgactccatgtacagcggctgtttggattccattcagacctgatcaaagtaagctatcagactacagcaggcagtgccaagccattggaggattttgaaccagttcaaaatggggaactctttttccagaagtttcagacggaggtggatttcgaaatcactatcattaacgaccagctgtccgagatagaagaatttttttatatcaatctgactagtgttgaaatccgtggactccagaagttcgatgttaactggtctcctcgattgaacctggattttagtgtggccgtgatcacaatcctcgacaacgacgatctggcgggtatggacatatccttccccgaaacaacagtagctgttgccgtcgataccaccctcattccagtggaaacggagagtactacatacctgagcacctcaaaaaccactactatattacagcctaccaatgtcgtagccattgtgacagaagcaaccggggtgtccgccatccctgaaaagctggtgacattgcacggaactccagcggtcagcgagaagcccgacgttgctacagtgacagcaaatgtatctatccatgggaccttctcgttgggcccttctattgtttatatcgaagaagagatgaagaacggaacattcaataccgccgaggtcctgattaggaggacagggggatttaccggcaatgtgtccattactgtgaagacgttcggggagcgctgtgcccagatggaacctaacgctctgcccttccgtggcatctacgggatttcaaatctaacttgggcagttgaggaagaggacttcgaggagcagactctgaccctgatcttcctggacggggaaagggagcggaaagtgagcgtgcagatactagatgacgatgagccagaaggccaggagtttttttatgtgttcctgacgaacccgcagggaggggctcagatagtcgaagagaaggatgataccggatttgccgcttttgcgatggtgatcataaccggctcagatttgcataatggcatcatcgggttcagcgaagagtctcagtctggactggaactcagagagggggcagtgatgaggcggttgcacctgatcgtgacacgacagcccaacagggctttcgaggacgtcaaagtgttctggagagtcacactaaacaaaactgtggtcgtgctgcagaaagacggtgtcaatctcgtggaagagttgcagtcagtcagtggaaccaccacctgtactatgggccagacaaaatgctttatcagtattgagctgaaacctgaaaaagtcccccaggtagaggtatatttcttcgtggaactgtacgaggcaacagccggtgcagcaatcaataattctgccagatttgcccagattaagatcctggagtccgatgaatcacagagtctggtgtacttctctgtgggcagccggctggctgtggcgcataaaaaagctactctgataagtcttcaagtggctagggactccgggaccggcttaatgatgtccgtcaatttctcaactcaagagttgaggtctgccgagacaatcggtcggacaatcatttcacctgccatttcagggaaagattttgtgataactgaaggaaccctggtctttgagcctggccagcggtccactgtgctcgacgtgatactgacacctgaaaccggcagcctgaactcatttccaaagcgatttcagatcgtgctcttcgaccccaagggcggagccaggattgacaaggtgtatggaactgctaatattactttagtgtctgatgcggactctcaagccatttggggcctggccgaccagctgcaccaacctgtgaatgacgacatcttaaacagggtcctgcatacgattagcatgaaggttgcaaccgaaaataccgacgagcaattgtctgccatgatgcacctcatcgagaaaattactacagagggcaaaattcaggccttttctgtggcaagccgaaccctgttctacgagattctgtgcagtctgataaacccaaaacggaaggacacaaggggattcagccactttgcagaggtaaccgagaattttgcattctctttgctgacgaatgtcacttgcggtagtccgggagagaagtcaaaaacaatattagacagctgcccttacttaagtatattggcactgcattggtatccccagcagattaacgggcacaagttcgaaggcaaggagggggactatatacgcattcctgagagactcttggatgtacaggatgccgagattatggctggcaagtccacatgtaaactcgttcagttcacagagtatagtagccaacagtggttcatttctggtaacaacttacccacccttaagaataaggttctctccctctcagtgaaagggcagagctcccagttgctgaccaacgacaacgaagtcctgtatcggatatacgctgcggaacctcggatcataccccaaacatctctgtgccttttatggaaccaggcagctgcttcatggctgagcgatagtcagttttgcaaggtggtggaggagaccgcagactatgttgagtgcgcttgctcccacatgtccgtgtacgccgtttacgcccgtaccgacaatttgtctagttacaatgaagcgttctttacttccggctttatatgcatatctggattatgtctagccgtcctctcccacatcttttgtgctcgctacagcatgtttgcggcaaaactgctcactcacatgatggccgcatctctcggtacccagattctgtttctggcaagcgcctatgcctcgccacaattagctgaggagagctgctcagccatggccgcagtaacacactatctgtacctgtgccaattctcttggatgctgattcagtccgtgaatttttggtatgtgctcgtgatgaatgacgaacatacagaaaggagatacctcttatttttcctgctgtcctggggtttgcctgcgttcgtcgttatcctgctcatcgtcattttgaaaggcatctatcatcagagcatgtcccagatctatggtttaatacacggcgatttatgttttatcccgaacgtttatgccgctttgttcacagccgcactggttcccctgacttgcctcgtggtggtgtttgtcgtttttatccacgcataccaggttaagccacagtggaaggcttacgacgacgttttccggggacgcactaatgcagcggaaatcccgctgatcctgtacctctttgccttaataagcgtcacctggttgtggggtgggctccatatggcctaccggcacttttggatgctggtcctcttcgttatctttaacagcttgcagggactatatgtcttcatggtctactttattctgcacaatcagatgtgctgccctatgaaggctagctacacagttgaaatgaacggccacccaggaccgagcactgcattctttactccgggatcgggcatgcctcctgccggaggggagatttccaagtcgacgcagaacttgatcggagctatggaagaggttcccccagactgggagagagcctccttccaacagggctcacaagcctccccagatttgaaacctagcccccaaaacggggcaacatttccaagctcaggcggatatggtcagggtagcctgattgccgacgaagaatcccaggaatttgacgaccttattttcgccctcaagaccggtgcaggactctccgtgtctgacaacgagtcaggacagggttcccaggaggggggaacactgaccgacagccagatcgttgaactgcggagaataccgatcgctgatacccatctgta

SEQ ID NO: 224108 - DNA, 4188 bp, synthetic construct
  misc_feature 1..4188: note = Description of Artificial Sequence: Synthetic coding sequence
  source 1..4188: mol_type = other DNA
atgactggagctgagatcgagtcgggcgctcaggtgaagcctgaaaagaagcctggggaagaagtagtgggcggtgccgagatcgagaacgacgtcccccttgtcgtccgccctaaggtgaggactcaagcacagataatgcctggagctagacctaaaaacaagagcaaggtgatgcccggagcttcaactaaagtggaaactagcgctgtaggcggtgctcgaccgaaatctaaagctaaggcgattcctgtgtcaaggttcaaggaagaagctcaaatgtgggcacagccccgatttggcgctgagcgcctcagcaaaacggagaggaatagccaaacgaacatcattgcctcacccctggtatccactgatagtgtgttggtggcgaagactaaatatctgtctgaggatagggagctggtcaatacagacacagaatcttttcctcgccgaaaggctcactatcaggccggtttccagccctcctttcgcagcaaagaggagaccaacatgggttcctggtgctgtcccaggcccactagtaagcaggaggcatctcccaatagcgacttcaaatgggttgataagtcagtttcctcccttttctggtccggtgacgaagtaactgccaaatttcaccccggtaaccgcgtaaaggactccaacagatcaatgcacatggcaaaccaggaggccaatacaatgtcgaggagtcagacaaatcaggagctttacatcgcctccagctcgggatcagaagatgaaagtgtgaagactccatggttttgggctagggacaagactaatacatggtctgggcctcgagaggaccctaatagccgatcacgattccgcagtaagaaggaggtgtacgttgagagttcctcaggctccgagcacgaagaccacctcgagagctggttcggtgccggaaaggaggcaaagtttagatccaagatgagagctggaaaggaggccaacaatcgtgcacggcaccgggcaaagcgcgaagcctgtattgatttcatgccgggatctatcgacgtcatcaaaaaggagagttgcttctggccagaggagaacgctaacaccttcagcaggccgatgataaagaaggaggccagagccagggcaatgactaaggaggaagctaaaactaaggcacgggcaagggccaaacaagaggccagatccgaagaagaggcgcttataggtacttggttctgggcgacagacgagtcctcaatggccgatgaagcttccattgagagctccctgcaggttgaggacgaatccataatcgggagctggttctggaccgaagaagaggcaagtatgggtacaggagcctcaagtaaatcaaggccaaggactgatggggaaagaataggagacagcctgtttggcgctagagagaagactagcatgaagacaggcgctgaggccacttcggaaagtatcttagccgcagacgatgaacaggtgattatcggctcttggttctgggctggagaggaggtgaaccaggaagcagaggaggaaaccattttcggcagctggttctgggtcatcgacgctgctagtgtggagtccggtgtgggcgtctcctgtgaatcccgcacacgctcagaggaagaagaagtcatcggtccttggttctggtcaggcgaacaggtagatatcgaggcagggataggtgaagaagcaaggcccggagctgaggaagaaactattttcggctcctggttctgggccgagaaccagacttatatggactgtcgtgcggagacttcgtgcgatactatgcagggcgcagaggaggaagagcccattattgggtcttggttttggacacgggttgaagcttgtgtggaaggcgacgtcaattccaagagttctctcgaggacaaggaggaggccatgattccatgcttcggcgcaaaggaggaggtgtcaatgaaacacggcacaggagtgaggtgtcgctttatggccggtgctgaggagactaataacaaaagctgcttttgggcagaaaaagagccatgtatgtatcctgcaggtggcggttcttggaaatccagacctgaggaagaggaagacattgtgaatagttggttctggtccaggaaatacacaaaacctgaagccataatcgggtcatggttgtgggccaccgaggaatcaaatattgacggtacgggggaaaaagccaagctgcttacagaggaagagaccataataaatagctggttttggaaggaggatgaggcaatctcagaggctacggaccgagaggagtcacggccagaagccgaggagggggatatcattggcagctggttttgggcgggagaagaggacaggcttgagcccgcagccgaaactcgggaagaggatcggcttgccgcagaaaaggaaggtatagtcggctcttggtttggagcgcgtgaagagaccatccggagggaggcagggagttgttctaagagtagtcccaaggcggaggaagaagaagtcattataggcagttggttttgggaggaggaagcttcacctgaagccgtcgcaggcgtagggtttgaaagtaaacccggaactgaggaagaagagatcacagttggaagttggttttggccggaagaggaagccagtatacaagccggtagtcaagcagtggaggaaatggagtccgaaaccgaggaggagaccatctttggcagctggttctgggacggcaaggaagtgagtgaagaggcgggaccgtgctgtgtgtctaagccagaagatgatgaggagatgatagttgaaagttggttttggtccagggataaagcaattaaagaaacaggcacagtcgccacctgtgagtctaaaccagaaaacgaagaaggcgctatcgttggatcttggttcgaggcagaagacgaagttgataaccgaacagataacggatctaattgcggctcccggacactggccgacgaagacgaggcaatagtgggctcatggttctgggccggtgacgaggcacactttgaatccaaccccagccccgttttcagagctatttgtaggtccacttgctctgttgagcaggagcctgatccaagtcggcgaccccagagctgggaggaggtcaccgtccagtttaaaccaggaccatggggcagggtgggctttccctccatctcgccgttcaggtttcctaaggaagccgcatcactgttctgcgagatgttcggtgggaagccaaggaatatggtgctctccccggagggtgaagaccaggagagcttgttgcaacctgaccaaccctcacctgaatttccctttcaatacgatcctagctacaggtcagtgcaggaaatcagggagcacttgcgggctaaggaatcaactgagcctgaatcatctagttgcaactgtatccaatgcgaactcaagattgggtcagaagagtttgaggaacttctgctgcttatggaaaaaatccgcgatccttttatccacgagatctcaaaaatcgccatgggcatgcgtagcgcgagccagttcacaagagatttcatccgagatagtggtgtagtgagtctcattgaaactctattgaactatccatcgtctcgggtgcgaacctctttcctggagaatatgatccgtatggctcccccataccccaaccttaacatcatccagacgtacatttgcaaggtgtgtgaggagaccctcgcttattcagtggattctcctgagcaattgtctggaatcagaatgattagacacttgaccacaaccacggactaccacactctggtcgctaactatatgtcagggttcctttctctgctggctactggcaatgcaaaaacgaggttccacgtgttgaaaatgctgctgaaccttagcgagaacctgttcatgaccaaggagttgctgtcggctgaagccgtatccgaatttataggactgtttaatagggaggagactaatgataatatccagatcgtgctggcgatctttgagaacatcggaaacaatattaaaaaagaaaccgtttttagtgacgacgactttaacatcgagcctctgatctctgcttttcacaaggttgagaaattcgctaaggaactgcaagggaaaaccgataaccagaatgaccccgaaggcgatcaagagaactag

SEQ ID NO: 224109 - DNA, 4188 bp, synthetic construct
  misc_feature 1..4188: note = Description of Artificial Sequence: Synthetic coding sequence
  source 1..4188: mol_type = other DNA
atgaccggggcagagattgaatcaggggcacaggtgaaaccggaaaagaagcccggagaggaggtagtgggaggcgctgagattgaaaacgacgtgccactggtcgtgagacctaaggtacgtacgcaggcccaaatcatgccgggtgcaagaccaaagaacaagtcaaaagtcatgcccggagcgtctaccaaagtagaaacttctgctgtgggcggtgctaggcccaaaagcaaggctaaggcgataccagtcagccggttcaaggaggaagcacagatgtgggcgcaaccaagatttggtgcagagcgcctgtcaaaaactgagcgtaattcccagacaaatattatagcctcacccctagtcagtactgacagcgtattggtggctaagactaagtacttatcggaggatcgggagctggtgaacacagatacagagtccttccctagacgaaaggcgcactaccaggctggattccagccgtccttccgctctaaagaagaaactaacatgggcagctggtgctgtccacggccaacttccaaacaggaagcctccccgaactctgatttcaagtgggttgacaaatcggtctcatcgttattctggtccggtgacgaagtcacagccaaattccacccaggcaatagagtaaaggattccaataggagcatgcacatggccaaccaggaggccaatactatgtctagatcacagacaaatcaggagctgtatatcgcatccagctctggcagtgaggatgaaagcgttaagacaccctggttttgggccagggacaagaccaatacatggagcgggcctcgcgaggatccaaactctcgctcaaggtttcgctctaagaaagaggtctatgtggaaagctcctcgggaagtgaacatgaggaccacctggaatcctggtttggggctggcaaggaagccaaatttaggtcaaagatgcgcgcaggaaaagaagctaataaccgagctcgccaccgtgcaaagcgagaggcatgcatcgactttatgcccggaagtattgatgtgatcaagaaagagagctgcttctggccagaggagaatgctaacaccttcagccggcctatgattaagaaagaggcgagagctcgcgctatgaccaaagaagaagctaaaacaaaagccagagcaagggccaagcaggaggccagatccgaagaagaggctttgatcgggacatggttctgggcaaccgacgaatcctctatggccgatgaggcatcaatcgaaagctctcttcaggtcgaggacgagtcaataatcggaagctggttctggacagaagaggaagcctctatgggcacaggggcttccagcaagtcaaggcccagaacggatggcgagaggatcggtgatagcctgtttggcgctagggagaagacttcaatgaagactggcgcagaggcaaccagcgaaagcatcttggccgctgacgatgagcaagtcatcataggctcatggttctgggccggagaggaggtgaatcaggaagctgaggaagagaccatctttggttcttggttctgggtaattgatgccgcttcggtagagtcaggcgtcggcgtgagttgcgagtcacgaacccgtagcgaagaggaagaggtgattggaccctggttctggagtggcgagcaagtggacatcgaggctggcataggagaggaagcccgacccggtgcggaagaagagaccatctttgggtcatggttctgggcagaaaaccaaacgtacatggactgccgcgcagaaacatcttgcgacactatgcagggggctgaagaggaggaacccattattgggagctggttctggaccagggtggaagcctgcgttgagggggatgtgaattctaaatcttcattagaagataaggaagaggccatgatcccctgcttcggagcaaaggaagaagtctctatgaagcacggtacgggcgtgaggtgccggttcatggccggagcagaagagactaacaacaagagttgcttctgggccgagaaggaaccttgcatgtaccctgcaggtgggggaagctggaagtctaggcctgaagaggaggaggatattgtgaacagttggttctggtctcgcaagtatactaaaccggaggcaatcattggatcttggctttgggccactgaagagagcaacattgacggaacgggcgaaaaggccaagctgcttaccgaggaggagaccattataaattcatggttttggaaggaagacgaggcaatctctgaagcaacagatcgtgaggaatcccgcccagaagccgaggagggagatatcattggtagctggttctgggccggtgaagaagataggcttgaacctgcagcagagactagggaggaagatagacttgctgccgaaaaagagggaattgtcggctcatggtttggggcacgcgaagagactattcgacgcgaggcaggttcatgctctaaatcaagtcccaaggcggaagaggaggaagttattattggtagctggttttgggaggaggaggcctcccctgaggccgtcgctggcgtggggttcgagagcaagccaggcactgaggaggaggaaattacagtgggcagttggttttggcccgaagaagaggcttcaatccaggccggatctcaggccgtggaggagatggagtccgagacagaggaagaaacaatctttggatcatggttctgggacggcaaggaagtttcggaggaggcaggaccgtgttgcgtgagcaagcctgaggatgacgaggagatgatcgttgagagctggttttggtccagagataaggcgatcaaggaaaccggaactgtggcgacctgcgagtccaagccagagaacgaagagggcgcaatcgtcgggagctggttcgaggctgaggatgaggtcgacaaccgcactgacaacggctccaactgtggttccaggaccctggccgacgaagatgaagcaattgtggggtcatggttctgggctggagacgaggcacactttgagtccaaccctagccccgttttcagggctatttgtcggagtacatgctcggtggaacaagagcccgacccgagcagaaggccacagtcttgggaggaagtcacggttcagttcaagcccggtccgtgggggagggtgggcttcccctccatcagcccctttagatttccgaaggaggccgcatcattgttttgcgagatgttcgggggtaaaccacgcaacatggtgttgtctcctgagggtgaggaccaggagtctctcctgcagcccgaccaaccctctccagaattccccttccaatacgacccatcttatcgctcagtgcaagaaatccgggagcacttgcgggcaaaagaaagtaccgaacccgagtcttcttcttgtaactgtatacagtgtgaactcaaaataggatccgaagaatttgaggagttgctcctgctgatggaaaaaattcgcgaccctttcatacatgaaatatctaaaatcgccatgggaatgcgcagcgcctcgcagttcactagggatttcattcgggacagtggcgtggtatccttaatcgagactctactaaactatccatcctctagagtgcggactagctttctcgagaacatgatacgaatggcccctccgtaccccaacctaaacatcatacagacctacatatgcaaggtgtgtgaagagacccttgcctacagtgtagatagccctgaacagttgtcagggatccgcatgattcggcacctcaccaccacaaccgattatcacacgctggtggccaattacatgagtggcttcctatcccttcttgccaccggaaatgcaaaaacacgctttcacgtgttgaaaatgttactgaatctgagcgagaatttattcatgactaaggagcttcttagcgcagaggcagtgagtgagttcatagggctgtttaatagggaagaaacaaacgataatattcagatagtgttggccatatttgagaacatcggaaataatataaaaaaagagactgtattctctgacgacgacttcaacattgaacccctgatctccgccttccacaaagtcgaaaagtttgcaaaagagctgcaggggaaaacagacaaccagaacgatcccgagggcgatcaagagaattag

SEQ ID NO: 224110 - DNA, 4188 bp, synthetic construct
  misc_feature 1..4188: note = Description of Artificial Sequence: Synthetic coding sequence
  source 1..4188: mol_type = other DNA
atgacaggcgctgaaattgaatctggtgctcaggtcaagcccgaaaaaaaaccaggagaggaggttgtgggaggagcagaaatcgagaatgacgtccctttagtcgtgcggcctaaggtcaggacacaggcccagatcatgcccggagcacgacccaagaacaagagcaaggttatgcccggtgctagcaccaaggtggagacatctgccgtgggtggtgcaagacccaagtctaaagccaaagccattccagtgagcaggttcaaggaggaagcccagatgtgggcacaacctagattcggggcagagcgcctctctaagactgagcgcaactctcagaccaatataattgcatctcctttggttagcacagacagtgtactggtcgctaagacgaagtatttgtcggaggatagagagctggtaaatactgatactgaaagtttccctaggaggaaggcgcattaccaggcgggtttccaaccatccttccgttccaaggaagagaccaatatggggagctggtgctgtccaagacccacaagcaaacaggaagccagtcctaatagcgatttcaagtgggtggataaatccgtcagctctctcttctggagtggtgacgaagttacagctaaattccacccagggaatagggtgaaagacagcaacaggtccatgcatatggctaatcaggaagccaatacaatgtctagatcccagactaaccaggagctctacatagcttcatcaagcgggagtgaggatgaatctgtgaaaacaccttggttctgggcaagggacaagaccaacacatggtctgggcctcgcgaagatcctaacagtagatcacgttttaggagtaagaaggaggtatacgtggaatcctccagcgggtctgaacatgaagatcaccttgagagctggtttggcgctggtaaagaggccaaatttagaagcaagatgagggcgggtaaagaggccaacaaccgtgcccgacacagagccaagcgcgaggcctgcatcgatttcatgcctggttctattgacgtgatcaaaaaagaatcctgtttctggcccgaggaaaacgccaatactttcagtcgccctatgatcaaaaaagaagcgagggcccgagcaatgactaaagaagaggccaagaccaaagcgagggctcgagcgaagcaagaagcccgttctgaggaggaggcgttgatcggaacatggttttgggccactgacgagtcttcaatggccgacgaggccagcatagagtcttccttgcaggtggaggatgagtctataatcggctcatggttctggaccgaagaagaagcctccatgggaactggcgcttcatccaagagccggccacgcactgacggagagaggattggggactctctgttcggcgctagagaaaagacaagcatgaaaactggggctgaagcaacatcagagtcaatcttagcggctgacgatgagcaggtgatcatcggcagctggttctgggcaggggaagaagtcaaccaggaagccgaagaagagactatttttggatcatggttctgggtgattgacgccgctagtgtcgaaagcggagtaggcgtttcttgcgagagcaggaccagatccgaggaggaggaagtgatcggcccatggttctggtctggggaacaggtggacattgaagcaggcatcggagaagaggcccgaccaggggctgaggaggagaccatttttggtagttggttctgggcggagaatcagacctacatggactgccgcgcagagacctcatgtgatactatgcaaggggctgaggaagaagaaccaatcattggatcctggttttggacccgggtggaagcttgtgtggaaggcgacgttaattcgaagtcaagtctcgaagataaggaggaagccatgatcccttgctttggtgcaaaggaagaggtctctatgaaacatggaactggagtcagatgcaggttcatggccggtgcggaggagacgaacaacaaaagttgtttctgggcagagaaggagccctgcatgtacccagccggaggcggttcatggaaaagcaggcctgaagaggaagaggatatagttaattcttggttttggagcagaaaatacaccaaacccgaggctatcatcggcagctggctttgggccacagaagagagtaacattgacggcaccggcgaaaaagccaagctcctcactgaggaagagaccattataaatagctggttctggaaagaggacgaggccatcagtgaagctaccgatagggaagaaagcagaccagaagccgaagagggagacataataggttcctggttctgggccggtgaggaagacaggttagagcccgcagccgagacaagggaagaggatagactggcagctgaaaaggaaggaattgtcggatcatggttcggcgcaagagaagaaactattcgccgtgaagctggtagttgcagcaaaagttcccctaaggctgaagaggaagaggtgattatcggctcatggttttgggaggaagaggctagcccagaggcagtggccggagtcgggttcgaatcaaagccaggtacagaggaggaagagattaccgttggctcctggttttggcccgaagaggaagcgtcgattcaagccggatcccaggctgttgaggagatggaaagtgaaacggaggaggagacgatattcggctcatggttttgggatggaaaagaagttagcgaagaggcaggaccgtgctgcgtgtcaaagcctgaagatgatgaggagatgattgttgagagttggttctggtcccgggataaggcaattaaggagaccggaactgtggctacttgcgaaagcaaacccgagaacgaggagggagccattgtgggatcatggttcgaggcagaggatgaggtcgacaaccgtacagacaacggcagtaattgcggcagtcgtaccctggcagacgaggatgaagctatcgtaggctcctggttctgggcgggtgatgaagcccatttcgaatctaatccaagtcccgtgtttagagccatttgtcgcagcacctgtagtgtcgaacaggagccagacccttctcgacgaccacagagctgggaagaggtgacggtgcaattcaaaccaggtccatggggacgcgtaggatttcctagcatctctccattccgtttcccaaaggaagctgcgtccctcttttgcgagatgtttggcggaaaaccgcgaaacatggtcttgtccccagagggcgaagaccaggaatcattactgcagcctgatcaaccgtcacccgagttccccttccagtatgatccctcctacaggtcggtccaggaaattagagaacacctgcgagcaaaagagtccactgagcccgagtccagctcctgtaattgcattcagtgtgaattgaagattggatctgaagagtttgaggagctactcctgcttatggagaagattagggacccatttatccatgagatttccaaaatcgcgatggggatgcgatcagcaagtcaatttacccgcgacttcataagggatagcggtgtggtctcactgatcgaaactctgttgaactacccctcgtcgcgcgtgcgtacgtctttcctcgagaacatgattagaatggcccctccctatcccaatcttaacattatccagacctacatttgcaaagtgtgcgaggaaacactcgcatactcagtcgactctccagagcagctgtccggcattcgtatgatccggcacctaactaccactactgattatcacactttagtggctaattatatgtcgggcttcttatcactgttagctactgggaacgctaagacgaggttccacgtattaaagatgctgcttaatctgagtgaaaacctttttatgaccaaagaattactgtccgctgaagcagttagtgaatttattgggttatttaacagagaggagacaaacgataatatccaaatcgtccttgccatctttgagaatatcggaaacaacataaaaaaggagactgtattttctgacgacgattttaatatcgaacccctgatcagtgcatttcataaagtggagaaatttgcaaaggaactgcagggcaagaccgataatcaaaatgatcccgaaggagaccaggaaaactag

SEQ ID NO: 224111 - DNA, 4188 bp, synthetic construct
  misc_feature 1..4188: note = Description of Artificial Sequence: Synthetic coding sequence
  source 1..4188: mol_type = other DNA
atgacgggcgcagaaattgagtcaggggctcaggtgaagccggagaagaaacccggtgaagaggtcgtgggtggggctgagatcgagaacgacgtgccattagtggtgcgcccaaaggttaggacacaggcccagatcatgcctggagctaggccgaaaaacaaatcgaaggtgatgccaggagcctccaccaaggtagagaccagtgccgtcggcggtgcccgtcccaaatctaaagctaaggcaatccccgtgtccaggtttaaggaagaagcccaaatgtgggcccagccaagatttggagctgagagactgagtaaaacggagagaaacagccagaccaacatcattgcctctcctctggtcagtacagactccgtgttggtcgctaagactaagtacttaagcgaggacagagaattggtgaatacagacacagaaagctttcccaggcgtaaggcccattatcaggccggtttccagcctagttttcgctctaaggaggagaccaacatgggtagctggtgctgtcccaggcctacctccaaacaagaggccagtcccaattccgactttaaatgggtggacaagtctgtgtccagcctcttctggtctggggacgaggtgactgccaagttccaccctggcaacagggtgaaggattctaaccgctccatgcatatggctaatcaagaggccaacaccatgtctcgcagccagactaatcaagagctctacatcgccagtagctcaggatccgaggacgaatccgttaaaactccgtggttctgggccagagacaagactaatacatggagcgggccacgggaggacccaaattcccgaagccgctttcggagtaagaaggaggtgtacgttgagtcctcttcaggaagtgaacacgaggaccacttggagtcttggttcggtgccggaaaagaagccaagttccgctcaaagatgcgagcgggaaaagaggctaataatcgggctagacacagagctaaacgcgaggcatgtatagattttatgccaggtagtatcgatgtcataaaaaaagagtcatgtttttggccggaggagaatgccaacacgtttagccggcctatgatcaaaaaagaggccagagcgagggcaatgacaaaagaagaggccaaaaccaaagcccgtgccagggcaaagcaggaggcacgctctgaggaggaggccctgatcggcacctggttctgggcaacagacgaaagcagcatggcagacgaagcctcaattgagtcttccctgcaggtggaggacgagtctatcattggatcttggttctggaccgaggaagaggccagtatggggacaggcgcttcaagcaagagccggccaagaacagatggggaacgcatcggagatagcctgttcggtgcaagggagaagacctcgatgaagaccggtgcagaggcgacttcagaatctatcctggctgctgacgacgaacaggtgatcattgggagttggttttgggccggagaggaagtgaatcaggaagctgaggaggagaccatctttggatcttggttttgggtgattgatgctgcttctgtggaaagcggtgtgggagtaagttgcgagtcgagaacccgaagtgaggaggaggaggtcataggaccctggttctggtcaggggaacaagttgacatagaggcaggaataggtgaagaggcccgtccaggtgccgaagaggagaccatctttggctcctggttttgggccgaaaaccagacctatatggactgtagggcggaaacgtcttgcgacaccatgcagggagccgaggaggaagagcccattatcggatcttggttctggacccgcgtggaggcttgtgttgaaggagatgtaaactccaagtctagcttggaggataaggaggaggcgatgatcccttgttttggcgcaaaggaggaagtttccatgaaacatggaaccggcgttaggtgccgattcatggctggcgcagaagaaaccaacaacaagtcttgtttctgggccgaaaaggagccctgtatgtacccagcaggcggaggatcttggaaatcaagacccgaggaagaggaggacatagtgaacagctggttctggagccgaaagtataccaagcctgaggccattatcggcagctggctctgggccaccgaggaatcaaatatcgacggcacgggagaaaaagccaagctcttaactgaggaggaaactatcattaattcgtggttctggaaagaagacgaggccatatcggaggccacagacagggaggaatcccggccagaggcagaagagggggacatcatcggtagttggttctgggctggtgaagaggacagactcgagcctgctgctgaaaccagggaggaagaccgattggcagctgagaaggaaggtatcgttgggagctggttcggtgcccgagaagagactataaggagagaggccggatcctgttccaagtcaagccccaaagcagaggaggaggaggttatcatcggttcttggttttgggaggaggaagccagtcctgaggccgtcgcaggcgttggcttcgagtctaagcccggtacggaagaggaagaaattaccgtggggtcttggttttggccagaagaggaggcttccattcaggccggatcacaggcagtcgaggaaatggaatcagagaccgaagaagagactattttcggatcctggttctgggacgggaaggaggtctcggaagaggctggcccatgttgtgtgagtaaacctgaagatgacgaagaaatgatcgtcgaatcctggttttggtcacgtgataaggcgatcaaggagaccgggacagtggccacttgcgagtccaagccggaaaacgaagaaggtgcgattgtggggtcctggttcgaggcagaggatgaagtggacaatcggactgacaatggttctaactgtggtagcagaactttggcggacgaggacgaagctattgtgggttcctggttttgggccggagatgaggcacactttgagagcaacccaagtccagtcttcagggcaatctgccgttccacctgttcagtggagcaggagcctgatcctagtcggcgaccccagagttgggaagaagtaacggtgcagttcaagccaggcccatggggaagggtcgggtttccatcaatctcacctttccggttccccaaggaagcagcctctctcttttgtgagatgtttggcggaaagcccagaaacatggttctgagccctgagggcgaggaccaggagagcttacttcaacctgatcagcctagcccagagttcccttttcagtacgatcctagttatcgatctgtccaggaaatcagggagcatttaagagccaaggaatccacggaacctgaatcctcctcatgcaattgcatacaatgtgaacttaagatcggttccgaagaattcgaagagttattgcttctgatggaaaagatcagagaccctttcatccacgagataagtaagatcgcaatgggcatgcgctctgccagccagttcacacgcgattttataagagattccggagtcgtctcccttatagagaccttgttgaattacccatcctccagggttcggacgagctttctggagaacatgatcagaatggctccaccctaccctaacctaaatattatacagacttacatttgcaaggtgtgcgaagagacactggcctactctgtggactcccccgaacagctgtccggaattcggatgatccgccatctgacaacaactacggattaccatacgttagtggcaaactacatgtccggctttctcagtctgctcgctacgggaaatgctaaaaccagattccacgttcttaaaatgctgcttaacctctccgagaatctgttcatgacaaaggagttactgagcgccgaggccgtttctgagtttattggtctctttaacagagaggagactaatgacaatatacagattgtgctggcaatattcgaaaatatcggaaacaatattaaaaaggagaccgtgttcagtgatgacgacttcaatattgaaccactcatatctgctttccacaaggtggagaagtttgcgaaagagcttcagggcaaaaccgataaccagaatgacccagagggcgatcaggagaattag

SEQ ID NO: 224112 - DNA, 1692 bp, synthetic construct
  misc_feature 1..1692: note = Description of Artificial Sequence: Synthetic coding sequence
  source 1..1692: mol_type = other DNA
atggacttcggttctctggagacggtagtggcaaattcggcattcatcgcagcccgtggcagtttcgacggctcatcttctcagccttccagagacaagaagtatttggctaagttgaaacttcctcctctgtccaagtgtgagagcctgcgggacagcctgtctcttgagtttgagtctgtttgtcttgagcagccaatcggtaagaagttgttccagcagtttctacaatctgcagagaagcatttgccagcactcgagctatggaaagatattgaggattacgacacggccgataatgacctgcagccgcagaaagcccaaacgatacttgcccaatatctggatcctcaggccaagttattctgttcctttctcgacgagggaatcgtcgcgaagtttaaggagggaccagtggaaatccaggatggccttttccagcctttacttcaagcgaccctggcacacctcggccaagctcccttccaggagtacctagggagtctgtactttctgcgctttctgcagtggaagtggcttgaggcacagcctatgggggaagactggtttctggactttcgggtgctgggaaagggaggctttggcgaggtgtcagcgtgtcaaatgaaagctacaggaaaattatacgcctgtaaaaagttgaataaaaaaaggcttaagaagcgtaaagggtatcagggcgcaatggtggaaaaaaaaatcctcatgaaagtgcacagcaggttcatcgtatccctcgcatacgctttcgagaccaaagctgacctttgtttggtaatgacgattatgaacggaggggacatcagataccatatttacaacgttaatgaagagaaccctggctttcctgaaccgagagctcttttttatacagcacagataatttgcgggctagaacacttgcaccaacgtcgcattgtttatcgcgacctcaagccagaaaatgtgctcctcgacaatgacgggaacgtaagaatctcggacttaggcctcgccgtggaactgctggacgggcagtccaaaactaagggatacgccggaaccccaggatttatggcgccagaacttcttcagggggaagagtatgatttcagtgtagactactttgcacttggtgtcactctctatgagatgatcgccgctaggggtccctttcgtgccagaggcgaaaaggtcgagaataaagagctaaagcaccgcattatttccgagccagtgaagtatccagacaaattttcccaggcaagcaaggatttctgcgaggctctcttagagaaagatcccgagaagaggctgggatttagagacgagacctgtgataagttgagagctcacccactgttcaaagatctgaattggagacagctcgaggcgggtatgctgatgcccccttttatacccgattctaagacggtgtacgccaaggatatccaggatgtgggggctttttctactgtgaagggggtcgcctttgataagacagacaccgaattcttccaggaattcgcaaccgggaattgtcccattccttggcaggaggagatgatcgagacaggcatttttggcgagctgaatgtttggagatctgacggccaaatgcccgatgacatgaaaggtatatccggcggttcgtcaagctccagtaagtctggtatgtgtcttgtgagctag

SEQ ID NO: 224113 - DNA, 285 bp, synthetic construct
  misc_feature 1..285: note = Description of Artificial Sequence: Synthetic coding sequence
  source 1..285: mol_type = other DNA
atgatagccgctcgtggcccatttagagcacgcggagagaaagttgaaaataaggagctgaaacataggattatctcagagccggtgaaataccctgacaaattctctcaagcctctaaggatttttgcgaggctcttttagagaaagaccccgaaaagaggctcggctttcgcgatgagacttgtgacaaactgcgggctcacccactgttcaaggacctgaactggcgccagctggaagccggaatgctcatgcctcctttcatacccgattctaagacctag

SEQ ID NO: 224114 - DNA, 228 bp, synthetic construct
  misc_feature 1..228: note = Description of Artificial Sequence: Synthetic coding sequence
  source 1..228: mol_type = other DNA
atggaactcgaaaacattgtcgctaataccgtgctgttaaaagcacgagaaggtggaggaggaaaaaggaaaggtaagtccaagaagtggaaggaaattctaaaatttccgcacatctctcagtgtgaggatctgaggaggacaattggagagctttcaggaagcttgatctcttggtcctcgtcaaccaaggaacacgggaggccgactgaaataaagatgagatag

SEQ ID NO: 224115 - DNA, 1458 bp, synthetic construct
  misc_feature 1..1458: note = Description of Artificial Sequence: Synthetic coding sequence
  source 1..1458: mol_type = other DNA
atgacgaaatatttgacacccaagtcccctgtatttattgcacaagtgggccaggatttggtttcccagactgaggagaaattgcttcaaaaaccatgcaaagaattgttttcagcctgcgctcagagtgtgcatgagtatctgcgcggagaaccgttccatgagtatttggactccatgtttttcgacagattcttacagtggaagtggttggagcgacagccagtgactaagaacaccttccgccaatatagagtgctcggcaaaggcggtttcggagaagtgtgtgcctgtcaggtaagagctacaggcaaaatgtacgcatgtaaacggttggagaagaagagaataaaaaaaaggaaaggagagagcatggcgctgaacgagaagcagatccttgaaaaggtgaatagccaattcgtcgttaacttggcatacgcctatgagaccaaggacgccctgtgtttagtgctgactatcatgaacggaggggaccttaagttccacatatacaatatgggcaatccgggatttgaggaggaaagggccctcttttatgccgctgagattctctgcgggctagaggatctgcaccgtgaaaataccgtttaccgagatcttaagcctgagaatattctgttagatgattacggtcatatccggatcagcgacttgggcctggcagttaaaatacctgagggagatctgatcagaggtcgagtcggaacagtgggttacatggctcccgaagtccttaataaccaacgatacggactaagtcctgattactggggcttgggttgtctcatatacgagatgatcgaagggcagtcccccttccgcggtagaaaagagaaagtcaagagggaggaggttgaccgtcgcgttctcgagactgaagaggtctatagccataagttctcagaggaggcaaagtccatctgtaagatgctgttgacaaaagatgccaagcagagactgggttgccaggaagagggggctgccgaggtgaaacgtcaccctttttttagaaacatgaacttcaaacggctggaggccggaatgctcgaccctccctttgtgcctgacccgagggccgtatactgcaaggatgtgctcgatattgagcagttctccacagtcaagggcgtgaatctggaccacaccgatgacgacttctacagcaagttcagcactgggtcggtgagcatcccctggcagaatgagatgatcgagaccgagtgtttcaaagaacttaatgtgtttggccctaacggcacgctcccccctgatctcaataggaaccatcctcctgagcctccaaaaaaaggtcttctgcagcgactcttcaagcgacagcaccagaacaactccaagtctagccccagttctaagacctcatttaaccaccacatcaattcgaatcatgtgagcagcaacagtactggcagtagttag

SEQ ID NO: 224116 - DNA, 1773 bp, synthetic construct
  misc_feature 1..1773: note = Description of Artificial Sequence: Synthetic coding sequence
  source 1..1773: mol_type = other DNA
atggagttagaaaacatcgtggccaatacagtactcctgaaggcacgggaggggggaggaggaaaacgaaagggaaagtcgaaaaagtggaaagagatcctgaaattcccgcacatttcacagtgtgaagaccttcgacgtactatagaccgagactattgtagcctgtgcgataaacagccaatcggcaggcttctgtttaggcagttttgcgaaacaaggcccggtctggagtgctatatacagttccttgatagcgtggccgagtatgaagttactcctgatgaaaagttgggcgagaaaggtaaggagattatgacgaaatatctcacgccgaagtcacctgtgttcatcgcccaagtggggcaagacctggtgtcacagactgaagagaagctgctgcagaagccttgcaaggaactttttagcgcttgtgcccaatccgttcacgagtatctgagaggcgagccttttcatgaatacctggactcaatgttcttcgacagatttttacaatggaagtggctcgagagacagcccgtgactaaaaatacatttcggcaatatcgggtgcttgggaagggaggttttggggaagtctgcgcatgtcaggtcagagcaacaggaaagatgtatgcttgcaagcgtctcgaaaagaagaggatcaagaagcggaagggcgaaagcatggctctaaatgagaagcagatcctagagaaggttaactctcagttcgtggtaaacttggcctatgcttatgaaactaaggacgcactgtgcctggtgctcaccatcatgaacggcggtgacctaaaattccacatctataacatggggaatccaggcttcgaggaggaacgcgcactcttttacgctgcggagatactatgtgggctggaggaccttcatcgagagaacaccgtgtatcgggatttgaaacctgaaaatattctcctcgatgactatgggcatattcgcataagcgatctgggcttagcagtgaaaatccctgagggggacctgattagaggccgagtgggtactgtgggatatatggccccagaagtgctcaacaaccaacgctacggtttaagcccggactattgggggctcgggtgtctcatttatgaaatgatcgagggccagtctcctttcagggggcgtaaagagaaagttaagcgagaagaggtggatcgacgcgttcttgagacagaggaagtatactcgcacaagttttccgaagaggctaagtcgatttgcaagatgctgctcacaaaagacgcaaaacagcggctgggctgccaggaagaaggggctgccgaggtgaaacggcatcccttctttcggaacatgaattttaaacggctggaggctgggatgctcgacccaccatttgtccctgaccctagggcagtgtattgcaaggatgtactcgatatagagcagttctccaccgtaaagggcgtgaatctggatcataccgatgacgacttctactcaaagttttctacaggaagcgtctccattccctggcagaatgagatgatcgagacagagtgttttaaagaacttaatgtctttggcccaaacggaaccttgcccccagacctgaaccgtaatcatccacctgaaccaccgaagaagggcctgttgcagaggctgtttaagcggcagcatcagaacaatagtaagtctagcccctcctccaaaacctctttcaaccatcatataaactccaaccacgtctccagtaactctacagggagtagttag

SEQ ID NO: 224117 - DNA, 1200 bp, synthetic construct
  misc_feature 1..1200: note = Description of Artificial Sequence: Synthetic coding sequence
  source 1..1200: mol_type = other DNA
atgacgaagtacctgacaccgaagtcaccggtcttcatagcccaggtgggccaggatctggtcagtcagactgaggaaaagctccttcagaagccttgtaaagagttgttcagcgcttgcgcccagtccgtgcacgaatatctgaggggcgaaccctttcacgaatatctagatagcatgttcttcgacagatttctgcagtggaagtggttggagcggcaacccgtgactaaaaatacttttcgccagtaccgagttctgggcaagggtggttttggcgaagtgtgtgcttgccaagtaagagccaccgggaagatgtacgcatgcaagaggcttgagaagaaaagaattaagaaacggaaaggagaatctatggcgctgaatgaaaaacaaatcctcgaaaaggtgaactcacagttcgtggtgaaccttgcctatgcttacgagacgaaggatgcgctgtgcttagttctgaccattatgaacggaggagacctgaagtttcatatttataacatggggaacccaggctttgaggagggggctgccgaagtcaaacgccacccgttcttccgaaacatgaactttaagaggctcgaagccggaatgctggaccctcctttcgtgccagaccccagagctgtttattgcaaggatgtgctggacattgaacagttttccacagtaaagggggtcaacctagaccacactgacgatgatttctattcgaagttttctaccggtagcgtctcgattccgtggcagaacgagatgatagagaccgaatgcttcaaggaactgaacgttttcggaccaaatgggactcttcccccagacctcaacagaaaccacccaccggaacctcctaaaaagggcctacttcagaggctgtttaagcgtcagcaccagaataattctaagtcttctccctctagcaagtccacggtggaacctgcgcagacactcttgctgcgatctggatcttctggcgcacccgcactagtggggttgcctggagagacgccgggagctggcgaagggggacggccttcccggagaaggaggacctcccgattccttaaggaaatctcgactcaggtgtgctttccaaggaggcctaggcctggctggatcggctttgtattcggcgagcattgcaatcggaaccctattggctacgacaacctccatgtgttttag

SEQ ID NO: 224118 - DNA, 1731 bp, synthetic construct
  misc_feature 1..1731: note = Description of Artificial Sequence: Synthetic coding sequence
  source 1..1731: mol_type = other DNA
atggaactggaaaacatagtcgccaatacagtcctgttaaaggcgagggaaggcggaggcggtaacagaaaggggaagtctaagaagtggcgacagatgcttcagttcccacatatttcccaatgtgaggagttacgactaagcttagagcgagactatcatagcctctgtgagcggcaacctatcggacgcttgctgtttagagaattctgcgcaacccggccagaactgtccaggtgtgtggcattcctcgatggcgtagctgaatacgaagtaacgcctgacgataaacgtaaagcctgcgggagacaactgacccagaactttctcagccacaccggaccagacctgatcccagaagtgcccagacagctggtgactaactgtacccagaggttggagcaggggccatgtaaagacctgttccaggaactcacccggcttacccacgaatatctctcggtagctccatttgccgattacttggattccatctacttcaaccggttcctccagtggaagtggctggaacggcaaccggtaacgaaaaacacattccgccagtaccgtgtactgggcaagggtggcttcggtgaggtatgtgcctgccaggtgcgcgctaccggaaagatgtacgcctgcaaaaagctcgaaaaaaaacgcatcaaaaaacggaagggcgaagcgatggccttgaatgagaaacagattctcgagaaagtgaattctaggtttgtcgtgagcctcgcatacgcttatgagactaaagacgccctgtgcctggtactgaccctcatgaacgggggagatttaaagtttcatatttaccacatgggccaggcgggttttcctgaggcccgagcagtgttctacgccgcagaaatctgctgcggcctggaagatctccatagagaacggatcgtatacagagatctgaagccagagaatattcttctggacgaccatggtcatattcgaattagcgatttaggtctggctgtgcacgtgccggaaggccagacgattaaaggtagagtgggcaccgtcgggtatatggcccctgaggttgtgaaaaacgaacggtacacattctctcccgattggtgggccttgggctgtctattatatgaaatgattgcaggtcagtctcccttccaacagcggaaaaagaaaatcaaaagagaggaagtggagcggctagtgaaggaagtgcctgaagagtattcagaaagattctccccccaggcacgttcactctgtagccagctgctttgcaaggatcctgccgaacggctgggttgtcgtggagggtccgccagagaggttaaagagcaccctctgttcaaaaagttgaatttcaaacggctaggcgcaggaatgctggagcctccattcaagccagacccccaagctatatactgcaaggacgtgctcgatatagaacagtttagtactgtaaaaggcgtagagctggagccaaccgatcaggacttttaccagaaattcgccaccggatctgtgcctatcccttggcagaatgaaatggttgaaaccgagtgctttcaggagctgaatgtgtttggcttagacggctctgttcctcctgacctggactggaaaggccaaccgccagcgcctccaaaaaagggcctcctgcagcgtctcttctccaggcaagattgttgcggcaattgcagtgacagcgaagaggaactgccaacgcgcttgtag

SEQ ID NO: 224119 - DNA, 1683 bp, synthetic construct
  misc_feature 1..1683: note = Description of Artificial Sequence: Synthetic coding sequence
  source 1..1683: mol_type = other DNA
atggagctcgagaatatcgtagccaataccgttctgttaaaggcaagagagggcggaggaggcaatcgtaaaggcaagagtaagaagtggcgacagatgctccagttccctcatatatcacaatgtgaggagctgagactgtctttagagcgcgactatcacagtctgtgcgagcgtcagccaatcggcagactactttttcgcgaattttgtgccacaaggccagaactttcccgctgtgtcgcctttctggatggagtggccgaatatgaggtgacccccgacgacaaacgaaaggcatgcgggcgtcagcttactcagaatttcctttcccatacagggccagacttgatccccgaggtccctaggcaactggtgacgaactgtacccagaggcttgagcagggcccttgcaaggacctattccaggagttgacgcggctcactcacgagtatctgagcgttgcccctttcgccgactatctcgatagcatatatttcaataggtttctgcagtggaaatggctcgagcgccagccggtaactaagaacacgttcagacagtaccgcgtcctcggtaagggcggattcggcgaggtctgtgcctgccaggtaagggcaaccggaaagatgtatgcgtgtaaaaagctcgaaaagaagagaatcaaaaaaaggaaaggggaggcaatggctctgaacgagaagcagatcctggaaaaggtaaactcacggttcgtggtgagtctggcctacgcatatgaaactaaggatgccctctgtctcgttctcactcttatgaacgggggagatcttaaatttcacatttatcacatgggacaggcgggattcccagaagctcgggcagtcttttacgctgccgagatctgctgcggtctggaggacttgcatagagagagaatcgtttacagagacctaaaaccagagaacattctgctggatgaccacggtcacattagaatctccgacttaggtcttgccgtgcacgtccccgaggggcagaccatcaaaggccgagttggcactgttggatacatggcacctgaggtggtgaagaatgagcgatacacatttagtcctgactggtgggcccttggatgtctcctgtacgaaatgattgctgggcaatcacctttccaacagcgaaaaaagaaaatcaagagagaggaggtcgagaggcttgtaaaggaggtgcctgaagaatactccgaaaggttttccccgcaggccaggagcctttgctcgcaacttttatgtaaggatcctgcagagcgattgggatgtcgcggtggatcagccagggaagtgaaggaacatcccctattcaagaagttaaactttaaaagacttggtgccggtatgctggagccacccttcaaaccagacccccaagcgatttactgtaaagatgtgctggatatcgagcaattttcaactgtgaaaggtgtggaactggaaccaaccgatcaggacttctatcaaaagttcgcaactgggtcagtgccaattccgtggcagaacgagatggttgagactgaatgttttcaagagttaaacgtatttggcctggacgggagtgtgccacccgatttggactggaaaggccagccacccgctccccctaagaaaggactgttgcaaagactgtttagtcgacagaggtag

SEQ ID NO: 224120 - DNA, 1770 bp, synthetic construct
  misc_feature 1..1770: note = Description of Artificial Sequence: Synthetic coding sequence
  source 1..1770: mol_type = other DNA
atggagttagagaatattgtagccaataccgtgctgctgaaggcaagggagggagggggtggcaaccgaaagggtaagagcaagaaatggaggcagatgttacaatttccacacatatcccagtgtgaggagctgcgcctgagcttagagcgcgattatcactcgctctgtgaaaggcagcccattggaagattgctcttccgggagttctgcgcaacaaggccagaactgagcaggtgtgtggcttttttggacggcgtggccgaatatgaggtgacgccagatgataagcggaaggcatgtgggagacaactcacgcaaaactttttaagccacacagggccagacctcattcccgaagtgccccgtcaattagtcaccaactgtactcagagactggagcagggaccgtgcaaggatctgtttcaagagctaacaagactgacccatgagtacctcagcgtggctccttttgcagattacctggattccatctacttcaatcggttcctgcagtggaagtggttggaaagacagcccgttaccaagaataccttccgacagtaccgggtgcttgggaaaggaggttttggcgaagtgtgtgcttgccaggtgcgcgctacaggtaagatgtatgcatgcaaaaagttggaaaagaagcggattaagaagagaaagggcgaggctatggctttgaatgaaaagcaaattctggaaaaggtcaactctcggttcgtagtgtctttggcatatgcctacgagacgaaggatgctttgtgcttggtccttactctgatgaacggcggtgatttgaaatttcatatctaccatatgggccaggctggctttcccgaagcccgagctgtattttacgcggctgagatctgttgcggcctcgaggacctgcatcgcgagcggattgtctatagggatctgaagcctgagaacatcttgctcgacgaccatggccacatacgcatatctgacctggggctggctgtgcatgtaccggaagggcaaacaattaaagggagagtgggaacagtgggctatatggcacccgaggtcgtgaaaaacgaacgctacaccttctcgccagactggtgggcgctgggatgtctcctctacgagatgatcgcaggccaatccccattccagcagaggaaaaagaagattaaaagggaggaggtagagcgactggtcaaagaagtgcctgaagagtattctgaacgatttagcccacaggccaggtccttgtgcagtcagctattgtgtaaagacccagccgaacgtctgggatgtcggggagggagcgcaagagaagtcaaggaacatccacttttcaagaagcttaatttcaaacgactcggggctggaatgctggagcctccttttaagcccgaccctcaggcaatttattgcaaagacgtactggacattgagcagttctcaacagttaagggagtggaattggaaccgactgatcaggatttctaccaaaagttcgctactgggagcgtgcccattccctggcagaacgagatggtcgagacagaatgttttcaggagctgaacgtgtttgggcttgacgggtctgtgccacctgacctcgattggaagggccaacctcctgctcctcccaagaaaggtctgttgcagcggttattcagccggcagagaatcgccgtagagaccgcagccacagcaaggaagtcctcgccgccagccagctcaccccagcccgaagcccctacctcctcctggagatag

SEQ ID NO: 224121 - DNA, 1662 bp, synthetic construct
  misc_feature 1..1662: note = Description of Artificial Sequence: Synthetic coding sequence
  source 1..1662: mol_type = other DNA
atggtggatatgggagcgctagataatttgatagccaacaccgcatacctccaggcaaggaaaccaagcgattgtgactccaaagaactccagcgcaggcggcgttccctggcactacctggtttgcagggatgcgcagaactacgccagaaactgtccctgaactttcactccttgtgtgaacagcagcctatcggcagaaggttgtttcgagatttcctagcaactgttcctacttttcgtaaggcagccaccttccttgaggatgtgcagaactgggagctggcggaggagggcccaacgaaggatagcgccttacaaggtctagtggccacatgtgctagcgcccctgctcctggcaacccccagccatttttgagccaggccgtagcgaccaagtgccaggcagccacaactgaggaggaacgagtggctgccgtgactttagcgaaggcagaagccatggccttcttacaggagcagccttttaaggacttcgtgacctctgctttttacgataaattcctgcaatggaaactatttgagatgcaacccgtctctgataaatactttacagagtttagagtcctgggaaagggcggttttggcgaagtttgcgccgtccaggtgaagaacacaggaaagatgtatgcatgcaaaaagctggataaaaaacgcctgaaaaagaaggggggagagaagatggcgctgctggaaaaggagatactcgagaaagtgtcctccccattcatcgttagcctcgcatacgcttttgagagcaaaacgcacctgtgtctcgtcatgagtctaatgaatggcggagacctgaaatttcatatttacaatgttggaacccgagggctggacatgagccgcgtcattttctattctgcccaaatcgcttgcggaatgcttcatttgcacgaattgggaatcgtctatagggatatgaaacccgagaatgtgctcctggacgacctgggaaactgcagactcagcgatttggggctggcagtcgagatgaagggcggaaagcccatcacgcagcgagccggaaccaacggttacatggctccagagattctgatggagaaggtgagctattcatatcccgtcgattggttcgccatgggctgttccatttacgagatggtggctgggcgaacacctttcaaagattacaaagagaaagtctctaaggaggatttgaagcagagaaccttgcaagatgaggtcaaattccagcatgacaacttcaccgaagaggctaaggacatctgtcgcctctttctggcaaagaaacctgagcagcgcttaggaagtcgcgagaagtctgacgacccacgcaagcatcatttcttcaagactataaacttcccacgattggaggcaggcctcattgagccccctttcgtgcctgatccttccgtggtatacgctaaagacattgctgagatcgacgatttcagcgaggtaaggggggtagagttcgacgataaagacaaacagttctttaaaaatttcgcaacaggagcagtgccaatcgcctggcaagaggaaatcatagaaaccggactattcgaagaattaaacgatccaaaccggcctactggatgtgaggaaggaaattccagcaagtcaggggtgtgccttctgctgtag

SEQ ID NO: 224122 - DNA, 2088 bp, synthetic construct
  misc_feature 1..2088: note = Description of Artificial Sequence: Synthetic coding sequence
  source 1..2088: mol_type = other DNA
atggaggagaaaccaggccagccccagccacaacatcatcactcacaccatcacccccaccaccatccccaacagcaacagcagcaaccccaccaccaccaccactactacttctacaatcatagccataatcaccatcatcatcaccatcaccagcaaccgcaccaatacctgcagcatggggctgagggtagtccaaaagcgcagcccaagccactcaagcatgagcagaagcacaccctccagcagcatcaggagacccccaagaaaaaaacgggttacggtgaattaaacgggaacgctggagaaagggaaatcagcttaaagaacctgtcttccgacgaggctaccaatccaatcagcagggtgcttaacgggaatcaacaggtcgtggacaccagtctgaagcagaccgtgaaggcgaacaccttcggcaaggccggtatcaaaacaaaaaatttcatacagaaaaactccatggacaagaagaacggcaaatcctacgaaaacaagtcaggggaaaatcaaagtgtagacaaatccgatactatccccatccctaacggagtggtcacgaacaacagcggatatattaccaatgggtatatgggaaagggggcagataatgacgggtctggaagtgaatccggttatactacccctaaaaagagaaaggcaaggcgcaacagcgccaaaggttgtgaaaacttaaatattgtccaagataaaatcatgcagcaggagactagtgtgcccactctgaagcagggccttgaaacatttaagccggattatagcgagcagaagggtaacagagtagatggctcaaagcccatatggaagtatgaaaccgggccagggggaacttcaaggggaaagcccgcagtgggagatatgctccgtaagtctagcgatagcaagcctggcgtatcaagtaagaaattcgatgaccgtcccaaaggcaagcacgctagcgcagttgccagcaaagaagactcttggacactgtttaagcctcctcctgtctttcctgtggacaacagcagcgcgaaaattgttccgaagatttcctacgcatccaaggtcaaagaaaatctgaataaaactatccagaatagtagtgtgagccctacatctagctcctcctctagcagcagcaccggggagacacagacacaatcctcatctagactcagtcaggtgccaatgtctgcgttgaagagcgtaacgtcggccaatttctcgaacggtccagtgctcgccggaaccgatggcaacgtctaccctccaggcggacagccgctcctgacaacggctgcaaataccctgacacctatctcttccggaactgattccgttctacaggacatgtctctgacatccgcagctgtcgagcagattaaaacttccctgtttatatatcccagcaacatgcaaacaatgctgctgagtactgctcaagtagacctgccctctcagacagaccagcagaatctgggcgacatcttccagaatcagtggggtctaagctttattaatgagccctccgctgggcctgagacagtgaccgggaagtcaagcgagcacaaagtcatggaagtcactttccaaggcgaatatccggcaactcttgtcagccagggggctgaaatcatcccttcaggaaccgagcaccctgtctttcccaaagcttacgaactcgagaagaggacaagtccccaggtattaggcagcatccttaagagcggtaccacgagtgagtctggcgctctgagtctggaaccgtcacatatcggggatctgcagaaggctgacaccagcagtcagggtgccctggtgttcctttctaaagattacgagatagaaagtcagaaccctctagcctcgcccacgaatactctgcttggatcggctaaagaacagcgctatcagagaggactggaaaggaatgatagttggggatcattcgatctccgggcagccattgtgtaccatacaaaggaaatggaatcaatctggaacttgcagaagcaggacccaaagcgaattattacttacaatgaggcgatggactcccccgatcaatag

SEQ ID NO: 224123 - DNA, 534 bp, synthetic construct
  misc_feature 1..534: note = Description of Artificial Sequence: Synthetic coding sequence
  source 1..534: mol_type = other DNA
atgtcgcgaaagggtccccgtgccgaggtgtgtgctgattgttcagctccagaccccggttgggcctctatctcaagaggtgtgcttgtctgcgacgagtgttgctccgtccataggtcactgggcaggcatatcagcatcgtcaagcacctcagacactcggcttggcccccaacgcttttacagatggttcatacacttgcctcaaatggcgctaatagtatttgggagcactctttactggatcctgcacaggtccagtcagggaggaggaaggcgaacccccaggataaggtacatcctatcaagtctgagtttatccgggcaaaataccagatgttagctttcgtccacaagcttccctgcagagacgatgacggcgtaactgccaaagacgatctgaccggtcaccggagctgggctacacccgatattaatccacatccaaatcgggctaccggcacgtcagcactatccgccgctaccctccccggttcacaggttccttggtgtccgcctctaagcagtccctag

SEQ ID NO: 224124 - DNA, 2313 bp, synthetic construct
  misc_feature 1..2313: note = Description of Artificial Sequence: Synthetic coding sequence
  source 1..2313: mol_type = other DNA
atgagccgaaaaggacctcgcgctgaagtgtgcgccgactgcagcgcacccgacccgggatgggccagtatctcgcggggagtgctcgtgtgcgacgagtgttgttctgtgcaccggagcttgggcagacatatcagcatcgtgaagcatttacgtcatagcgcctggccacccaccctccttcagatggttcatactcttgcctctaatggggctaacagcatctgggagcactccttactggatccagcacaggtgcaaagcggcaggaggaaagcgaacccacaagataaggtacaccccattaaatccgaattcatcagagcgaaatatcagatgctggcgttcgtgcataaactcccttgtcgcgacgatgatggagtgaccgcgaaggacctgtctaaacagttgcactcaagtgtgagaacagggaaccttgagacctgcctcagactgctgagcctcggtgcccaagccaatttcttccatcctgaaaagggcacaacccctctccacgtcgctgccaaggctggccaaacccttcaggctgagctcctcgtcgtgtatggggctgaccccggatctcccgacgtgaacggtcgaacccccattgactacgccagacaagcaggtcaccacgaactggctgaacgcctggtcgagtgtcagtatgaacttacagacaggcttgccttctatctctgtggcagaaagcccgaccataaaaatggccattacataatcccccagatggccgataggagccgccagaaatgcatgtcccaaagcctggatctaagcgaactggcgaaggcagccaaaaaaaaattacaggccctgtccaatagactgtttgaggagcttgctatggatgtgtatgatgaagtcgaccggcgagagaatgatgccgtgtggcttgctacacaaaaccattctaccctggtaacagagaggtcagcggtgccattcctacctgttaaccccgagtatagcgccacccgtaatcaaggtagacagaaattagccagatttaatgcccgagaattcgccactctgattatcgacattctgagcgaagccaaacgtcggcaacagggtaaatctctgtcaagccctacagacaacctcgagctgtctttacgatctcagtctgacctcgatgatcagcacgattatgactctgtggcttcagatgaggataccgatcaggagcctcttcgctccaccggtgccaccagatccaacagagcacggagcatggactctagtgacctgagtgatggagccgtgactttgcaagagtacctggagcttaagaaagcactcgcgacttctgaagccaaggtgcagcagctgatgaaagtgaatagctctttaagcgacgagctccggcgtcttcagcgcgagatccataagctgcaggccgagaacctgcagttgcggcagcctccgggacctgtgcccaccccccctctgcccagtgaaagggccgaacatacccccatggcccctggcggaagcacacaccgcagagaccgccaagctttctccatgtatgagccaggcagcgccctaaagcccttcggcggacctcctggagacgagttgactaccaggctgcagcctttccactccacagagcttgaggatgatgcaatctattctgtccatgtgcctgctggcctgtacaggatcaggaaaggcgtgagcgccagcgctgtacccttcacacccagtagtcccctcctttcctgtagtcaggagggctccagacacacttctaagctgtctcgccatggttctggtgccgacagcgattacgagaatactcagagcggtgacccactccttgggctcgaaggaaaacgcttccttgaattgggcaaggaggaagatttccacccggaactggaatcactggatggcgacctggatccaggactgccaagtacagaggatgtgatcctgaaaaccgaacaagtgaccaagaatatccaggagctgctgcgtgccgcacaagagtttaagcatgactcctttgtcccctgctctgaaaagattcacctcgctgtgactgaaatggcctcactgtttcccaaaagacccgcattggaaccagtgagatccagtttgagactgctgaacgctagcgcctaccggcttcagtcggagtgtcgtaagaccgtgccgccagagccaggcgctcccgtggacttccagctactgacgcagcaggtgatccagtgtgcctacgacatcgctaaggccgctaaacagcttgtgaccattacaaccagggagaagaagcagtag

SEQ ID NO: 224125 - DNA, 1212 bp, synthetic construct
  misc_feature 1..1212: note = Description of Artificial Sequence: Synthetic coding sequence
  source 1..1212: mol_type = other DNA
atgttcgtggcatctgagaggaagatgcgcgctcaccaggtgttgaccttcctcctgctctttgtgatcacatccgtagcgagtgaaaatgcttctacatcgcggggatgcggtttagacctgctgccgcagtacgtgagtctgtgcgacttagacgcaatatggggcatagtggtggaagcagtggcgggagctggcgcactgatcacactgctacttatgctgatattgttagtgaggcttccctttattaaagagaaggaaaagaagtccccggtaggactgcacttcctgtttctattaggcactctggggctgttcgggctgaccttcgctttcatcatccaggaggacgagacgatttgtagcgtacgacgcttcctctggggcgtcctgtttgccctttgctttagctgcctgttaagtcaggcctggagggtgaggaggctggtgcgccatgggacaggaccagctggatggcagttggtgggactggccttgtgcctgatgcttgtgcaggtgatcattgcagtagaatggttagtgttaacagtcttgcgagacacacggccagcatgcgcctacgagccgatggacttcgtgatggccctgatctacgacatggtgctgttggtggtcactcttggactggcactctttaccctgtgcgggaagtttaaaagatggaagctgaatggtgctttcctcttgatcacggcctttcttagtgttctgatctgggttgcttggatgactatgtacctcttcggtaatgttaagcttcagcaaggcgacgcatggaatgacccgactctcgctattaccctcgcagccagcggctgggtttttgtcatattccacgccatacctgagatacattgcacattgctgcctgcgctccaggaaaacacccccaattactttgatacatcccagccaaggatgagggaaaccgccttcgaagaggacgttcaactgcccagagcatatatggagaataaggccttttcgatggacgaacataatgctgccttgcgtaccgcaggcttcccaaacggctcgctgggtaagagaccctccggatcactcgggaaacggccaagcgctccttttcggtccaatgtgtaccagccaacggagatggccgttgtgctcaacggaggtactatccccacagcacctccatctcacactggaaggcacctgtggtag

SEQ ID NO: 224126 - DNA, 1215 bp, synthetic construct
  misc_feature 1..1215: note = Description of Artificial Sequence: Synthetic coding sequence
  source 1..1215: mol_type = other DNA
atgtttgtggcctccgagaggaaaatgcgagcccaccaggtcttgacctttctgcttttattcgttataacctccgtagctagcgagaatgctagcacctcgagaggttgcggcttggatctgttgcctcagtatgtgtcactatgtgatctcgacgcgatttggggaatagtggtggaagccgtggcaggagcgggtgccttgatcaccctgctgctgatgcttatcctgttagtgcgactgccttttatcaaggaaaaggaaaagaagagccctgtgggtttgcacttcctcttcttgctgggcacgctcggtcttttcggcttgactttcgcttttatcatacaagaggatgaaactatctgttcagtgcggcgtttcctctggggcgtgctatttgctttgtgtttttcctgcctcctttcgcaggcttggcgcgtgcggaggctcgtcaggcacggaaccgggccagcaggctggcaactcgtgggactggctctgtgtcttatgctggtgcaggttattatagctgtagaatggctagtgttgaccgtcctgagggacacaaggccggcttgcgcttacgagcccatggactttgttatggccctaatttacgatatggttctgctggtcgttacgctcggtctggctctgttcacactctgcgggaagttcaaaagatggaaattgaatggagcatttctgctgataaccgcatttttgtcagtcctcatctgggttgcctggatgaccatgtaccttttcgggaacgttaagctgcagcaaggcgacgcttggaatgacccaactctagccatcaccctggctgctagcgggtgggtgtttgtgatttttcatgccatccccgaaatccattgtacactgctaccagcccttcaggagaataccccgaattacttcgacacatcccagccacgaatgcgtgaaaccgcctttgaagaggacgtgcagctgccacgagcctacatggagaataaagcgttcagtatggatgaacataacgccgcactccgcacagccggattcccaaacgggagccttgggaaaaggccttcaggcagcctcggcaaaagacccagcgcccctttcaggtccaacgtgtaccagccaaccgagatggccgttgttcttaacggaggcactgagatggtgactcacccaagatctttagagagctttggcgcattttag

SEQ ID NO: 224127 - DNA, 1290 bp, synthetic construct
  misc_feature 1..1290: note = Description of Artificial Sequence: Synthetic coding sequence
  source 1..1290: mol_type = other DNA
atgaaccctccctggagcgtcgcctgggggcaagaaggttttcgggctgggacccccggatctcgctacctgcctcgcatgtttgtcgcgagcgaacgcaagatgagagctcaccaagtgctgacattcctcctgctcttcgtgattacgagcgtggcatcagaaaatgcctcaaccagtagaggctgcggcttagatctgttgcctcaatatgtgtctctttgcgacttggacgccatctggggcattgttgttgaggcggtagctggcgctggggctctgatcacactgctgttgatgctcatcctgctggtccggctaccttttattaaggagaaagagaagaaaagccctgtagggcttcactttctcttcttactcggcacattgggtctgtttggcctcactttcgcattcattattcaggaggatgaaacgatttgtagtgtgcgaagattcctgtggggagttctatttgccctgtgtttctcttgtttgctctctcaggcctggcgggtgcggagattggtgaggcatggtacgggaccagccggatggcaattggtaggcctcgccctgtgtttaatgcttgtgcaagttatcatcgcagtagagtggctcgtgctgactgtgctgcgcgatacaaggcctgcatgcgcatacgagccaatggatttcgttatggccttgatttacgacatggtgctgctggttgtgacattgggcctggcgttgtttacactctgtgggaagttcaagcgctggaagctgaatggagcttttctgctgatcactgccttcctctccgtgctgatttgggtggcctggatgactatgtacctctttggcaatgtgaagctccaacagggtgatgcatggaacgacccaaccttggccatcaccctcgcagcttccgggtgggtcttcgtgattttccacgccatacccgaaatccattgcaccctgctccctgcactgcaagaaaacaccccgaattatttcgacacctcacagcccaggatgcgcgaaactgctttcgaagaggacgtgcaattgcccagggcatacatggagaacaaggcattcagcatggacgaacataacgccgcactacggactgcaggattcccgaatggcagtctgggcaagcggccttccggttcacttggaaagagaccatcagctcctttccgctcaaatgtatatcaacctactgagatggccgtggtgctgaatggcggtactatacctaccgcaccccctagccatactgggcgacatttgtggtag

SEQ ID NO: 224128 - DNA, 759 bp, synthetic construct
  misc_feature 1..759: note = Description of Artificial Sequence: Synthetic coding sequence
  source 1..759: mol_type = other DNA
atgttcgtggcaagcgaaagaaaaatgcgggctcaccaagtccttacctttcttctgctcttcgtcatcacttccgtggcatccgagaacgcctcaacatctaggggctgcggattggacctgctcccgcagtacgtgagtctgtgcgacctggacgccatctggggtattgtagtggaagctgttgcaggagccggtgcactgatcaccctgctgctcatgctaatcctcctagttcgattgccctttttcctgctcattaccgccttcctgtctgttttaatttgggttgcgtggatgacaatgtacctgtttggaaatgttaaactgcagcaaggtgatgcctggaatgaccccaccctcgcaatcaccctggccgctagcgggtgggtgtttgttatctttcatgccatcccagagatacactgcactctgctaccggctctccaggaaaacacacccaattactttgatacaagtcagccgcgtatgcgggaaactgccttcgaagaggacgtccagttaccaagggcttacatggagaacaaggccttttcaatggatgaacacaacgcagctctgaggactgcaggatttcccaatggatctctgggcaaaaggccaagcgggtctctcggtaagcgccctagcgctccatttcgctccaacgtttaccagccaactgagatggctgtggttctcaatggtggcaccattccgactgctcccccttcccatacgggccgtcacctgtggtag

SEQ ID NO: 224129 - DNA, 489 bp, synthetic construct
  misc_feature 1..489: note = Description of Artificial Sequence: Synthetic coding sequence
  source 1..489: mol_type = other DNA
atggccatccacaaggcattggtgatgtgtcttggtctccctctgttcctgttccccgaacagtcataccaaggtgatatgtatcctacgcgcggagtgggttacgaaacgatattaaaggagcagaagggacaatccatgttcgtcgagaacaaggccttttcgatggatgaacctgtcgcggcaaagaggcccgtctccccatactcgggctacaatggtcagctgttgactagcgtgtaccagcccacggagatggcactcatgcacaaggtgccgtcagaaggggcatatgacatcattctgcccagggcgactgctaactcgcaagtaatgggctccgctaattccaccttgcgcgcagaagatatgtacagcgctcagtctcaccaggctgccactcccccaaaagacggtaagaacagccaagtgtcagaactcacccagaggggacaggccaacaccaaccaggtgtttctccggttgtag

SEQ ID NO: 224130 - DNA, 1461 bp, synthetic construct
  misc_feature 1..1461: note = Description of Artificial Sequence: Synthetic coding sequence
  source 1..1461: mol_type = other DNA
atgcgcggacgaggatcccaacagcagcagcccacacggagacagggtcagaaactcccttctccatcacccgctgggaagtacgagtccgcgcagcccggagggacgcagccagaacccggactgggggctcgcatggctattcacaaagccctggtgatgtgtcttggactgccactatttctcttccccggagcttgggcccaaggccatgtccccccaggatgctcccaaggactaaaccccctatactataacctgtgtgatagatccggtgcctggggcatcgtgctggaggctgtggccggtgccggtatcgtgacaacctttgttctgactatcatcctggtcgcttctctgcctttcgtgcaagatacaaaaaagcgcagtcttcttggcacccaggtgttctttttgttagggactctcggactgttctgtttagtgtttgcctgtgttgtcaagcccgacttttccacatgcgccagtcggagattcctgtttggtgtgctcttcgccatctgtttctcctgcctggcagcccacgtgttcgccctcaactttctggctcgaaaaaaccatgggcctcgaggttgggtcatattcactgtggccctcctcctgactttagtggaagtcattatcaatactgagtggctgattatcacattagtgcggggatccggagagggaggccctcagggcaacagtagcgctgggtgggcagttgccagtccctgcgcaatagccaacatggatttcgttatggctctgatatacgtgatgctactgttattgggagcttttctgggcgcttggcccgcactgtgtggcaggtacaagcgctggcggaaacatggagtctttgtcctgcttacaacagcaacatcagtggccatctgggttgtgtggatcgttatgtatacatacggcaataagcagcacaacagccctacatgggatgaccccactctcgctattgctctcgcagcgaacgcatgggctttcgttctgttttatgtgattccagaagtgagccaagtgactaagagcagcccagagcaaagttatcaaggtgatatgtatcctacacgaggtgtggggtatgaaaccatactaaaggaacagaagggccagagcatgttcgttgagaacaaagcatttagtatggatgagccggtggccgctaagcggccagtcagcccgtatagcggatataacgggcagctgctgacctccgtctaccaaccaacagagatggcattaatgcacaaagttccatccgagggagcttatgatattatcctccctcgggctaccgcaaactcccaggtgatggggtccgccaactcaactctgcgcgctgaagacatgtattcagctcagtctcaccaggctgccacccctcctaaggacggcaagaacagccaagtgtttcggaacccctacgtgtgggactag

SEQ ID NO: 224131 - DNA, 1326 bp, synthetic construct
  misc_feature 1..1326: note = Description of Artificial Sequence: Synthetic coding sequence
  source 1..1326: mol_type = other DNA
atggccatacacaaagccttagttatgtgtctaggattgcccttatttctgtttcctggggcttgggcacagggccatgtccctccaggctgtagccagggcttaaatcctctctattacaacctctgtgatcgctctggggcttggggcattgtgcttgaggctgtggctggcgcaggcatagtaacaacattcgtcctcacgattatccttgttgcatccctgccgttcgttcaagacaccaagaagagaagtctgttaggaacccaggtttttttcctgctgggcacccttgggctgttttgtctagtgtttgcctgcgtggtgaagcctgacttctctacctgtgcctcccgccgattcctgttcggggtcctctttgcaatctgttttagttgtctcgcagcccacgttttcgctctgaacttcctcgcccgaaagaaccacggcccaaggggttgggttatttttacagtggctctgttgctaaccctggtggaggtcatcattaatacagagtggttaattatcaccctggtgagaggttccggcgagggagggcctcaaggtaattcttccgcaggctgggccgtcgcatcaccttgcgccatcgccaatatggatttcgtaatggctctgatctacgttatgctgctcctcctcggcgctttcctgggagcttggcctgccctgtgtggacgttataaacggtggcgtaaacatggagtattcgtgcttttaacgaccgcaacgtctgtggctatctgggtggtctggatcgtcatgtatacttacggcaacaagcagcataacagtcctacctgggatgatcccactctggctattgcgcttgcagcgaacgcctgggcatttgtgctgttttacgtgatccccgaggtatcacaagtcaccaaatcttcgcccgagcagagttaccagggagatatgtaccccaccagaggcgtgggatacgagactatactgaaagagcaaaaaggacagtctatgttcgtggagaataaagcctttagcatggatgaaccagtggccgcaaagcggccagtgagtccttattctggatacaacgggcagttgttgacaagcgtttaccagccaacagaaatggccctgatgcataaggtgccctccgagggagcctacgacatcatcttgcccagagcgaccgccaattcacaggtgatggggtcagcaaactccaccctgagggctgaggatatgtactcagcccaatcccaccaagccgcaactcctccaaaagacgggaagaactctcaagtgttccgaaacccatacgtttgggactag

SEQ ID NO: 224132 - DNA, 1329 bp, synthetic construct
  misc_feature 1..1329: note = Description of Artificial Sequence: Synthetic coding sequence
  source 1..1329: mol_type = other DNA
atggccatccacaaggcactcgtaatgtgcctcggactccccttgttcctatttcctggggcatgggctcaagggcacgtccctcccggttgctctcagggtctgaatcctctctactacaatttatgcgataggtccggagcctggggtattgtcctggaagctgttgcaggagccggaatcgtaactaccttcgtcctaactatcattctggtcgcttctttaccatttgtgcaagatactaagaagcgaagtctgttgggtacacaagttttcttcctccttggtactctcggcctcttctgccttgttttcgcgtgtgtcgtgaaacccgatttcagtacatgtgccagccgcagattcctatttggggtacttttcgccatttgttttagctgtctggccgctcacgtctttgcgctaaattttctggctcggaagaaccatggcccacgcggatgggtgattttcactgttgccctgttgctgactctcgtcgaagttatcattaataccgagtggcttataatcacgctggtccgtggtagtggcgagggaggacctcaaggaaattcgtccgccggttgggcagtggctagtccatgtgccattgcaaacatggatttcgtgatggccctcatttatgtcatgctgttgctgttgggtgcatttctgggagcttggcccgcattatgtggtcggtataagcggtggcggaagcatggtgttttcgtgcttcttactaccgcaacgtctgtggcaatctgggtggtttggatagtcatgtacacctatggaaataaacaacacaactcccctacctgggacgatccaactctggccattgctctggccgctaacgcatgggcattcgtactattttatgtgattcccgaagtgtcccaggtgacaaaatcatctcctgagcagtcatatcagggtgacatgtacccaactaggggagtggggtatgaaacaatactaaaagaacagaaggggcagtctatgtttgtggaaaataaggctttcagcatggatgagccggttgctgcaaaacgcccagtttccccctactctggctataatggacaactgcttacgagcgtgtatcaacccaccgaaatggcacttatgcacaaggttccaagcgagggtgcttacgatattattctgccacgagcgacagccaacagccaggttatgggatcagctaattccacccttcgtgctgaagatatgtactcagcgcagtcacaccaggcagccacacctccgaaggatggcaaaaactcccaagcccaaagtccccagtccaaaactagatggtag

SEQ ID NO: 224133 - DNA, 1362 bp, synthetic construct
  misc_feature 1..1362: note = Description of Artificial Sequence: Synthetic coding sequence
  source 1..1362: mol_type = other DNA
atgggcacacagcccgagcctggtctgggggctcggatggcgatacataaggcactggttatgtgtctcggattgcctctatttctattccctggtgcatgggcccagggtcatgtgccgccagggtgttctcagggcttgaaccccctgtactacaacctgtgcgaccgctccggcgcatggggcatagtgcttgaggccgtggctggggcaggcatcgttacaacctttgtgctaactatcattcttgtcgcatcccttcctttcgtccaagacaccaagaagagaagccttctggggacacaggttttcttccttctcgggaccctgggccttttttgtttggtgtttgcctgtgtcgtgaaacctgatttctctacttgtgcatccagacgcttcctgttcggggtgttgtttgcgatttgtttcagttgcctggcagcccatgtgtttgcgctgaacttcctggcacggaaaaaccacggtccacggggttgggttatctttacggtggccctccttctgacattggtcgaagtgatcatcaatactgagtggctgataatcacactggtgcgagggagtggcgaaggtggtcctcaggggaacagcagtgccggttgggcagtggctagtccctgcgccatagcgaatatggactttgtcatggctctcatctatgtcatgcttctgctgctcggcgcattcttaggggcttggcccgcactgtgcggtaggtacaaacgatggagaaagcatggagtctttgtgcttcttacaaccgcaacctcggttgccatatgggtggtttggatcgtgatgtacacctatggtaacaagcagcataactccccaacatgggacgatcccacattggccattgccctggccgctaacgcctgggcttttgtgctgttttacgtaattcctgaagttagccaggttaccaagagcagccctgagcaatcctatcaaggtgatatgtaccccaccagaggcgtgggatatgagacgatccttaaagagcaaaaagggcagtccatgtttgtggaaaacaaagccttttcaatggacgagccagttgctgctaaaagacccgtctctccctatagtggctacaacggccagctgcttacaagcgtataccagcctactgagatggccttaatgcataaagtgccctcggagggggcatacgacatcatactgccacgggctacggcgaattcacaggttatgggatctgcgaattccacactccgggctgaggatatgtacagcgcacagagccaccaggccgctaccccgccaaaagatggcaagaactcccaagtattccggaatccatacgtgtgggactag

SEQ ID NO: 224134 - DNA, 597 bp, synthetic construct
  misc_feature 1..597: note = Description of Artificial Sequence: Synthetic coding sequence
  source 1..597: mol_type = other DNA
atgtctaatgtacgcgtgagtaacggaagcccgagccttgagcgaatggatgccaggcaggccgagcacccgaagccaagtgcatgtaggaacctgttcggcccagttgatcacgaggaattgacacgggatctcgagaagcactgcagagacatggaggaagcaagccagaggaagtggaactttgactttcagaatcataagccccttgaaggtaaatatgagtggcaggaggtggaaaaggggtctctgcccgagttctactatagacctccaagaccacccaagggcgcttgtaaagttcccgcacaggagagccaggacgtctcagggtctagacccgctgctcccctcattggcgcacctgccaattctgaggacacacaccttgtagaccccaaaaccgacccgtccgactctcaaacaggtctggccgagcaatgtgccggtattcggaagcgtcctgccaccgatgatagctccacacaaaacaaaagagccaacagaacagaggagaatgtgtcggatggttccccaaatgccggttccgttgaacagacaccaaaaaagccaggactgcgacggaggcagacttag

SEQ ID NO: 224135 - DNA, 903 bp, synthetic construct
  misc_feature 1..903: note = Description of Artificial Sequence: Synthetic coding sequence
  source 1..903: mol_type = other DNA
atgtacaaggattgcattgagtccaccggagactatttcctgctgtgcgacgcagagggaccttggggcattatacttgaatctttggccatactgggtattgtcgtcaccattttactcctcctggcgttcctgttcctcatgagaaaaatccaggattgctctcagtggaatgtactgccaactcagctgctctttctgctaagcgtgttgggactgttcggccttgctttcgcattcatcatagagttaaaccagcagacggcaccagttcgatatttcctattcggcgtcctctttgccctatgcttttcatgcctgcttgcccatgcctcgaatctggtaaaactggttaggggatgcgtgtcctttagctggactactatactgtgtattgcaattggttgttctctgctgcaaatcatcattgctacggaatacgtgacactaataatgaccagggggatgatgtttgttaatatgacaccttgccagcttaacgtcgactttgtggtcctgctggtttacgtgctgtttctgatggcactgacgttcttcgtttccaaagccaccttctgtggcccttgtgagaactggaaacagcatggccgtctcatctttatcactgtgctctttagtatcattatctgggttgtctggatctctatgcttttacgcggtaacccacaattccagcggcagccacaatgggatgacccagtggtctgcattgctctcgtcactaacgcttgggtgttcctgctactctatatcgtccccgagctgtgcattttatatcgatcctgcagacaggagtgccccctccagggtaacgcttgcccagtaactgcgtaccagcattcgtttcaggtcgagaaccaggaactcagccgggattgctag

SEQ ID NO: 224136 - DNA, 363 bp, synthetic construct
  misc_feature 1..363: note = Description of Artificial Sequence: Synthetic coding sequence
  source 1..363: mol_type = other DNA
atgtacaaagactgcatagagtccactggtgactattttctgttatgtgacgctgaaggtccatggggcataatcctcgaatctctcgctatcctgggaatcgtggtcaccatcctgttgcttttagcatttctatttttgatgaggaagatccaggactgttctcagtggaatgtgctgccaactcaactgttgttcctgttgagtgtgctgggtctgttcggtctagccttcgcatttatcatcgagttaaatcagcagactgcccctgtacgttatttcctattcggagtgctctttgccctctgcttttcttgcctgctggcccatgcctcaaacctagttaagcttgttaggggctag

SEQ ID NO: 224137 - DNA, 312 bp, synthetic construct
  misc_feature 1..312: note = Description of Artificial Sequence: Synthetic coding sequence
  source 1..312: mol_type = other DNA
atggagaccgttcaggaactgatcccattggctaaggaaatgatggcacagaaacggaagggaaagatggttaagctgtacgtgctgggatcagtgctcgccttatttggagttgtgctgggcctgatggaaactgtctgttcacccttcacagctgcccgtcggctgcgggaccaggaagcggctgttgcggagttgcaggcagccttagagcgccaagccttgcagaagcaggccctgcaggaaaagggcaaacagcaggacaccgtcctgggcggaagggcactatctaatcgccaacatgcaagctag

SEQ ID NO: 224138 - DNA, 1500 bp, synthetic construct
  misc_feature 1..1500: note = Description of Artificial Sequence: Synthetic coding sequence
  source 1..1500: mol_type = other DNA
atggagctcagtgagcccatcgtggaaaatggggagaccgaaatgagtccagaagagtcatgggagcataaggaggagatttctgaagctgagccaggcggtggaagtctgggcgacgggaggccacctgaggagtccgcccacgagatgatggaggaagaagaggaaatccctaaaccaaaatctgttgtcgcccctcccggtgcacccaagaaggaacacgtaaacgttgtgttcatcggacatgtggatgccggaaaatcgacaattggtggccagatcatgtatctcactggaatggtcgataagcggacgctcgagaagtatgaaagagaagcgaaagaaaagaaccgtgagacttggtatctcagctgggctctcgacacgaaccaggaagaaagagacaaaggcaaaacagtcgaagtaggacgggcatacttcgagacagagaaaaaacatttcaccatccttgacgcccctgggcataagtctttcgttccaaatatgatcggtggcgcaagccaggcagacttggctgtcctagtgatcagcgccaggaaaggggaattcgagacaggatttgagaaaggcggacagacacgcgaacacgccatgctcgccaaaaccgccggtgtgaaacatctgatcgtcttgatcaataagatggacgacccaactgtgaattggtcgaatgagcggtacgaagagtgtaaagagaagctggtgccttttttgaaaaaagtaggctttaatcccaaaaaagatattcattttatgccatgcagtgggcttactggagccaacctgaaggaacagtctgatttttgtccatggtatattgggctaccattcataccctacctcgataacctcccaaattttaaccggtcagtggacggaccaataagactgcctatcgttgataagtataaagacatgggcaccgttgtcctgggcaaactcgagtcagggtcaatttgtaaggggcaacaactcgtgatgatgcctaacaagcacaatgtggaagtcttgggtatcctatccgacgatgtagagaccgatactgtcgcccctggcgagaacctcaaaatccgcctcaaaggtatcgaggaagaagaaattctcccgggattcatcctgtgcgacccgaacaatctatgtcattcgggtaggacatttgatgcccagatagtcatcatcgagcataagagcataatctgccccggatataacgccgttcttcacatccatacctgcattgaggaggtggaaatcacagccctaatctgcctggtagataaaaagtccggggagaagagcaagacacggccacgattcgtgaagcaagatcaagtttgcatcgccagacttaggactgctggcactatttgccttgagacgttcaaagacttccctcagatgggccgatttacactcagggacgagggcaagacgattgctataggcaaagtgctcaagctcgttcctgagaaggattag

SEQ ID NO: 224139 - DNA, 1914 bp, synthetic construct
  misc_feature 1..1914: note = Description of Artificial Sequence: Synthetic coding sequence
  source 1..1914: mol_type = other DNA
atggatccagggtccggcggtggaggcggaggtggcggaggaggtggttccagtagcggtagttcttctagtgattccgctcctgattgctgggaccaggcagacatggaggcacctggccctggcccttgcgggggtgggggttctctcgcagccgcagccgaagcacagcgcgagaacctctctgcagcctttagtagacaactgaatgttaatgcgaaaccatttgtgcctaacgtgcacgctgccgagttcgtcccgtcctttttaagggggcctgctgcccctccacccccagttgggggtgcagcaaacaaccacggcgctgggagcggtgctggagggcgagctgccccagtggagtccagtcaggaggagcagagcctgtgtgaaggcagcaactctgctgtgtccatggaactgtctgaaccgatcgtggagaatggtgaaacagagatgagcccggaggagtcctgggaacataaggaggagattagcgaggctgagccagggggtggctctctgggggatggtcggccaccagaggaatccgcccacgaaatgatggaagaggaggaggaaatcccaaaacctaagagtgtagtggccccacctggagcgccaaaaaaggaacacgtcaacgtagtgtttataggtcacgtcgacgccggaaagagtacaatcgggggtcagattatgtacttgacagggatggtggataaacgaactctcgagaaatatgaaagagaggcaaaagagaaaaatcgggagacatggtatctgtcgtgggccctcgacactaatcaggaggagcgcgacaagggaaaaactgtcgaggtgggcagggcatattttgagaccgaaaaaaagcacttcacaatcctggatgctccagggcataagtccttcgtcccaaacatgatcggcggtgcatcacaggctgatctggctgtgttggtgatttcagctcgcaagggggaatttgagactggctttgagaagggaggacagactagagagcacgctatgctggccaagaccgctggtgtgaaacaccttattgtgctgataaataagatggacgacccaaccgtaaattggtcaaatgagcggtacgaggaatgcaaagagaaactggttccatttctgaaaaaagtagggtttaacccaaagaaagacatccacttcatgccttgttctgggcttacaggggcaaatctgaaagagcaaagcgatttctgcccatggtatatcggcctgccattcatcccatatttggataatctccctaacttcaatcgttctgtggacggcccaatccgactgccaatagtggataagtacaaagacatggggaccgtggtgctaggcaaactggaatctggtagtatttgtaagggtcagcagctcgtaatgatgcccaacaagcacaatgtggaggtgctgggtatcctttctgatgatgtggaaacagacaccgtggctcccggagaaaacctgaagatccgactgaagggcattgaggaagaggagatattgcctgggttcattctctgcgaccccaacaatctgtgccatagcggcagaactttcgacgcacagattgttatcatcgaacacaaatccataatctgccccggttacaatgccgtgctgcatattcacacatgtatcgaggaggtagagatcacagcattgatctgtttagtagataaaaaatccggagaaaaatccaagaccaggccaaggtttgtgaagcaagaccaggtgtgcatagctcggttacgaacagctggtaccatctgtttggagacattcaaggacttcccccagatgggcaggtttaccttgcgggatgagggcaaaaccatcgccatcggcaaagtgcttaagctggtgcctgagaaagactag

SEQ ID NO: 224140 - DNA, 1911 bp, synthetic construct
  misc_feature 1..1911: note = Description of Artificial Sequence: Synthetic coding sequence
  source 1..1911: mol_type = other DNA
atggaccctgggtctggtggcggtggcggaggtggcggaggcggtggctcctcctccggttcatccagcagtgactcggcgccagattgctgggatcaggccgacatggaagcccctggtcctggaccatgtggtggtggaggatctttggcggctgccgctgaggctcaacgggaaaatctttccgctgcattcagccgtcagttgaacgtgaatgctaaaccgttcgtgcctaacgttcacgccgctgagtttgtgccatctttcctgcgcggtcccgcagctcccccacccccagtgggcggtgccgctaataatcacggcgcagggtccggagctggaggaagggctgcacccgtggagtcctcccaagaagagcagtctctgtgcgaaggcagtaattcagctgtgagcatggagctcagtgagccgatcgaaaacggagaaacggagatgagcccagaggagagctgggaacacaaggaggagattagcgaagctgaacccggtggaggcagtctgggagacggacgacctcccgaagagtctgctcatgaaatgatggaggaagaagaggagattcctaaaccaaaaagcgttgtggccccacctggagccccaaagaaagaacacgttaacgtcgtgttcataggacacgtggacgccggtaaatccactatcggagggcaaattatgtacctaacaggcatggtcgacaaaaggacattagaaaaatatgagcgtgaggcaaaagaaaagaaccgcgaaacatggtacctgagctgggcattggatactaaccaggaggaaagggacaaaggcaagacagtcgaggtgggccgtgcttacttcgaaacggagaagaagcacttcactattctcgatgcccctggacacaagtctttcgtcccaaatatgatcggcggagcatcacaagcagacctggctgttctggtgatctcggccagaaagggcgaatttgaaacaggatttgagaaaggaggacagacaagagaacatgccatgctcgccaagacggccggagtaaaacacttaatagtccttataaacaagatggacgatcccaccgtgaattggtcgaatgagcgctatgaggagtgcaaggagaagttggtcccatttctcaaaaaggtggggtttaatcctaaaaaagatattcatttcatgccgtgtagcggtctcaccggagcaaacctaaaggaacagtctgatttttgtccgtggtacatcgggctcccatttattccctatctggataaccttcccaattttaaccggtccgtggacggcccaatcaggctacccattgtggataaatacaaagatatgggaaccgtggttctgggtaaactggaaagcggaagtatttgtaaaggccaacagctggtgatgatgcccaataaacataatgtggaggttctgggcattctctccgatgatgttgaaaccgacacagtcgcacctggcgagaatttgaaaatccggctgaaaggcatcgaggaagaagagattctgcctggtttcattctctgcgaccctaataatttgtgtcacagtggaagaacattcgatgcccagatagtgattatcgagcacaaaagcattatatgccctggatacaacgccgtccttcatattcacacctgcattgaggaggtcgagattaccgctctgatctgtctggtagataagaaatccggtgagaagagcaaaactaggcccaggtttgttaagcaggaccaagtctgtatcgctaggctgcggaccgcaggcaccatctgtctcgaaaccttcaaagattttccacagatggggcgattcaccctgcgggacgagggtaagaccatcgcaattggtaaagtgttgaagcttgtccctgagaaggactag

SEQ ID NO: 224141 - DNA, 1887 bp, synthetic construct
  misc_feature 1..1887: note = Description of Artificial Sequence: Synthetic coding sequence
  source 1..1887: mol_type = other DNA
atggactccggctcttcctcatccgatagcgcgccagattgttgggatcaagttgacatggagtcacccggatctgccccttcgggcgacggggtgtcatccgcggtggctgaggcacagcgggagcctctgagttctgcattttcccgcaagctaaatgtcaatgcgaaaccgttcgtacccaatgtgcacgccgcagaattcgtgccttcatttcttagaggcccaactcaaccacccacattgcccgcaggcagcggctctaatgatgagacctgtactggagccggttacccacaaggcaaaagaatggggaggggggcaccggtggaaccaagcagggaggagcctttagtgagcttggagggctctaactctgccgtcactatggaactgagcgagccagtggtggagaacggcgaagtagagatggccctggaagagagttgggagcatagcaaagaagtaagtgaggcagagccaggtgggggatcatctggagatagcggtcctcctgaggagtctgggcaagaaatgatggaggagaaggaagaaattcgcaagagcaaatctgtcatcgtgccttctggcgctccaaagaaagagcacgttaacgttgtctttattggacacgtggacgcagggaaaagtactatcgggggacagatcatgttcctgacaggcatggtcgacaaaagaacactggaaaagtacgagagggaggcgaaggagaagaacagggagacttggtatcttagctgggccctggatacaaaccaggaagaacgggacaagggcaaaaccgtagaggtgggccgagcctattttgagacggaacgcaagcacttcaccattctggacgcacccggacataaatcatttgtgcctaatatgataggaggcgctagccaggccgacctggctgtgttggtgatttccgctcgcaagggagaatttgaaaccgggtttgagaagggcggtcagacaagagaacatgccatgctcgccaagacagcaggcgtgaagcacctgattgtactgatcaacaagatggacgacccaaccgtaaattggtcaatcgagaggtacgaggaatgtaaggagaagcttgtcccttttctcaaaaaagtcggtttcagcccaaaaaaagacatccacttcatgccctgttctgggctgactggcgcaaatatcaaagagcagtccgatttctgcccctggtacaccggactgccattcatcccttatctggataacctgcctaatttcaatcgtagcatcgacggtcccattaggttgcctatcgtggataagtataaggatatggggacagtagtcttaggtaagctcgagtccggatccatttttaagggccagcagttagtgatgatgcccaataaacacaacgtcgaggtgctgggcatcctgtctgacgatactgagactgatttcgtagcgccaggagagaatctaaagatcaggctgaaaggcattgaagaggaggaaattctccccggatttatcctctgcgatcctagcaatctgtgccactccggacgtactttcgacgtgcaaattgtgattattgaacataagtcaattatatgccccggatataacgccgtgctgcacatccacacttgtatagaggaagtcgagataacagcactcataagccttgtagataaaaagagtggtgagaaatccaagaccagaccgcgattcgtgaaacaggatcaagtgtgcatcgcccgtctccgtactgccggaaccatctgcctcgagacgtttaaagactttccgcaaatgggcaggttcactttaagagacgagggcaagactattgccatcggaaaggtgttgaagctcgtcccagagaaggattag

SEQ ID NO: 224142 - DNA, 1638 bp, synthetic construct
  misc_feature 1..1638: note = Description of Artificial Sequence: Synthetic coding sequence
  source 1..1638: mol_type = other DNA
atggactctgggagcaacgacgagacctgtaccggagcaggttacccacagggcaaacgcatggggaggggggctccggtggagcctagccgcgaggaaccccttgtctcgttggagggctccaactccgccgtcaccatggaactgagcgaacccgtggtggagaatggggaggttgagatggccctcgaggagagttgggagcatagcaaagaagtctctgaggcagaacctggcggaggttccagcggtgactcagggcctccagaggaaagcggccaagagatgatggaagagaaagaggagatacgcaagagcaaaagtgttatcgtgccgtccggcgctcctaagaaggagcacgtgaacgtggtttttatcggtcacgttgacgctggtaagagcaccatcggtggtcagatcatgtttctcacggggatggttgacaagaggactctggagaaatatgaacgggaagctaaagagaaaaatcgcgagacgtggtacctgtcttgggcccttgacacaaatcaggaggagagggataagggcaagacagtggaggtcggtagggcctacttcgaaactgagaggaagcacttcacgatcctggatgcccctgggcacaagtcttttgtgccaaacatgataggcggtgctagccaagctgatctggctgtcttggtgatcagcgcccgtaagggcgagttcgagaccggctttgagaaggggggacagacccgggaacacgctatgctggccaagacagccggagtcaagcatctgattgttctgattaataaaatggatgaccctacagttaattggagcatcgaaaggtacgaggagtgcaaggaaaagctggtcccattccttaaaaaagtgggcttttcacccaagaaagacatccattttatgccctgttctggcctgacaggagcaaatatcaaggagcagagcgacttctgtccttggtatactggccttccttttattccatacctggataatttaccaaattttaaccgtagtattgatggaccaattaggctgcctattgtggataaatacaaagacatgggcaccgtagtcctgggtaagttagaatcgggcagtattttcaaaggacagcaactcgtaatgatgcctaacaaacacaatgtagaggtgttgggcatcttgagtgacgatacagagaccgacttcgttgctcccggagagaacctgaaaattcggctcaaggggatcgaggaggaggagatactgcccggatttattctgtgtgacccctccaacctatgtcactccgggcgtacgttcgacgttcagattgtgataatcgagcacaaatccataatctgtcctggatataacgcagtgctgcacatccatacctgcatcgaggaagtagagatcacagccctcataagcttagtagataagaagagcggcgagaaatcgaagacaagacccagatttgtgaaacaggatcaagtgtgcatcgctcggctcagaaccgccggtactatctgccttgaaactttcaaggatttccctcagatgggcaggtttactctacgtgacgagggcaagaccatcgcaatcgggaaagttctgaaactggtaccggaaaaggactag

SEQ ID NO: 224143 - DNA, 1365 bp, synthetic construct
  misc_feature 1..1365: note = Description of Artificial Sequence: Synthetic coding sequence
  source 1..1365: mol_type = other DNA
atgacgaagagggaggctgaagagctcatcgaaatcgaaatcgatggaaccgagaaggctgaatgtaccgaagaaagtatcgttgagcagacatatgctcctgccgagtgtgtgtcacaggccatcgacatcaatgagccaatcggcaacctgaagaaactgctagagcctagactgcagtgctctctggatgcacatgagatctgcctgcaagacatacagcttgaccccgaacggtctctgtttgaccaaggcgtcaaaaccgatgggaccgttcagcttagtgtccaggttatctcgtaccaggggatcgagcccaagttgaacatcctcgaaatcgtgaaaccagctgacacagtcgaggtggtgatcgaccccgatgcccatcatgctgagagcgaggctcaccttgtggaggaggctcaggtaatcacactggacggcaccaaacatatcaccactattagtgacgagacctccgagcaagtgacgcgctgggccgctgctttagagggctaccgaaaggaacaggaacgactgggcattccctatgatcccatccagtggagcaccgatcaagtcttgcattgggtcgtttgggtgatgaaagagtttagcatgactgacattgatctgactacattgaatatcagcggaagagagctctgttcccttaatcaggaggacttttttcaacgggtgcctaggggcgaaattttatggtcccatctggaactgcttcggaagtatgttttggcttcccaagaacagcagatgaacgagatcgtaacaattgatcagcccgttcagatcattcctgcttccgtgcagtctgctacccctacaacaataaaggttattaatagttcggctaaggccgctaaggtccagcgggctcctaggatcagcggggaggatcggtcatcccccggaaatcggacaggcaacaacgggcaaatccagctttggcagttcttgttagagcttctaacagataaagatgcaagggactgtattagctgggtaggagatgaaggggaatttaaactgaaccagcccgagctggtggcgcagaaatgggggcagaggaagaacaaacctaccatgaactatgagaagcttagccgcgctctgcgctactattacgatggggatatgatttgtaaagtacagggcaagcgcttcgtgtacaaattcgtgtgcgatctcaagacgctgatcgggtattctgcagcggagctcaaccggcttgttaccgagtgcgaacagaagaagcttgcaaaaatgcaactgcacggcatagctcaaccagtgacggctgtggctctggccaccgctagtctgcaaacagagaaggacaactag

SEQ ID NO: 224144 - DNA, 1365 bp, synthetic construct
  misc_feature 1..1365: note = Description of Artificial Sequence: Synthetic coding sequence
  source 1..1365: mol_type = other DNA
atgacgaagagagaagctgaggaacttatagaaatcgagatcgatggaacggagaaggctgagtgcacagaagaatccatcgtagagcagacctatgcaccagccgaatgtgtcagccaggccatagatatcaatgagccgatcgggaacctgaagaagctgctggagcccaggctccagtgctctctggacgcacatgaaatctgtctgcaggacattcaactggacccagagaggtctctgtttgaccagggggttaagaccgatggcactgtacaactgagtgtacaggtaatttcttatcaaggcattgagcccaagttgaatattttggagattgtcaagcccgctgacaccgttgaggttgtaattgaccccgacgcgcaccacgcagagtcagaggcacatctagttgaagaggcccaggtcattacactcgacggtaccaagcacattaccacgatcagcgatgaaacaagcgaacaggtgactcggtgggccgctgctttggagggctacagaaaagagcaggaacgattaggtataccctatgaccctattcagtggagtaccgatcaggtcctgcactgggttgtgtgggtcatgaaagagttcagcatgaccgatattgatctgaccaccctcaacatcagcggcagagagctgtgctccctgaatcaggaagattttttccagcgggtgccgagaggcgagatcctatggagccatctggagctgcttaggaaatatgttctggcctctcaggagcagcaaatgaatgaaatcgtgaccatcgaccaacccgtgcagatcatcccggcttccgtacaaagtgccacacctaccacaattaaggtcatcaactccagcgccaaggctgccaaggttcagagggctcccaggattagtggcgaagacaggtcaagcccgggaaaccgcacaggtaacaacggacagatccaactatggcagttcttactggagctccttaccgacaaagatgcaagagactgtattagttgggtgggcgacgagggcgaattcaagttgaatcagcccgagctcgtagctcagaaatggggccaaagaaagaataaacccactatgaactacgagaagctctccagggcactcagatactactacgacggcgacatgatttgcaaggtgcaggggaagcggttcgtgtacaagttcgtgtgtgatctgaagacactgattggctatagcgctgcagagctaaacagactcgttacagaatgcgaacaaaaaaagttggcaaaaatgcaactgcatgggatagcccagccagtcaccgcagttgccctggcaacagctagtctacaaaccgaaaaggacaactag

SEQ ID NO: 224145 - DNA, 2163 bp, synthetic construct
  misc_feature 1..2163: note = Description of Artificial Sequence: Synthetic coding sequence
  source 1..2163: mol_type = other DNA
atggctcagggcctggaggtggcacttactgacctgcaatctagccgcaacaacgtgcgccatcacacagaggaaataacagtggaccacttactggttcggaggggacaagcgttcaacttgaccctatatttccggaataggtccttccagcccggtctggataacatcattttcgtggtggagactggcccactacctgacctggcattgggcacaagagccgtcttcagcctggctagacatcacagtccaagtccgtggatcgcgtggctggaaactaacggtgccacctctacagaagtttctctgtgtgcccctcctacggcagccgtgggacggtacctcctgaagatccatatcgattcgttccagggttcagtgaccgcttaccagttaggagagttcatactgttgttcaatccctggtgcccagaggatgctgtttatctggactccgagccgcagcgccaggaatacgttatgaatgactacggtttcatttatcaaggctctaaaaactggataaggccgtgcccttggaattacggtcagttcgaggataaaatcatcgatatctgtctaaagttgctcgacaagtcgctccacttccagaccgaccctgcaactgattgcgccttacggggtagtcccgtctatgtgtctagagtcgtatgcgccatgatcaattcgaatgacgacaacggagtgctgaacggcaattggagtgaaaattatacagatggggctaacccggcagagtggaccggctcggttgccattctcaagcaatggaacgccacaggttgccagccagtgcgttacgggcaatgttgggttttcgcagccgtgatgtgtaccgtcatgcgctgtttagggatccccacccgcgtaataactaacttcgacagcggccacgataccgatggcaacctgatcatcgacgagtattatgacaacacgggcaggatcctgggcaacaagaaaaaggacaccatatggaatttccacgtttggaacgagtgttggatggctcgcaaggacctgccaccagcttacgggggatggcaggttctggacgccactccccaggagatgagtaatggggtgtactgctgtggccctgcctcagtgagggccattaaagagggcgaggtcgacctgaactatgacacaccattcgtcttctcaatggttaatgcagattgcatgtcttggttggtccagggcggaaaagaacagaagctccatcaagacacttcatcagttgggaattttataagtactaaatcaattcagagtgatgaaagagatgacattaccgagaactacaagtacgaggaaggctcactgcaggagagacaggtgttcctcaaagctctccagaaattaaaagcacggtccttccacgggtcccagagaggagcagagctgcaaccaagcaggcccaccagtctctcacaggatagcccaagatccttgcatacaccatcactcaggccaagtgacgttgttcaagtctctctgaagtttaaactcttagaccccccaaacatgggacaggatatctgcttcgtgctcctggccctgaatatgagtagccaatttaaggacctcaaggtgaatctgagtgcacagagtttactacatgatggctctcccttgtcacctttttggcaagatactgctttcatcactttatcacctaaagaggccaagacatacccatgcaaaattagctatagccagtatagccagtacctctcgaccgacaaacttatacggatttctgcattgggtgaggagaagagcagccccgaaaagattctggtgaacaagattatcaccctctcctacccctcaattactatcaacgttcttggagcagctgttgtcaaccagcccttgagcatccaggttatcttcagtaacccactgtctgaacaggttgaggattgtgtgctgacagtagaagggtctggcctctttaagaagcagcagaaggttttcctgggcgttcttaagcctcagcatcaggcatcaatcattctcgagaccgtgcccttcaaatctggccagagacagatccaggccaatatgaggtccaataaattcaaggacatcaagggttatcggaatgtctatgttgacttcgcactttag

SEQ ID NO: 224146 - DNA, 1047 bp, synthetic construct
  misc_feature 1..1047: note = Description of Artificial Sequence: Synthetic coding sequence
  source 1..1047: mol_type = other DNA
atgtctcttgtcgacctcgggaagaagttgctcgaggccgctcgggctggtcaggatgacgaagtgagaattttgatggctaatggggcacccttcacaaccgattggctgggaacttccccattgcacctagccgcacaatatgggcattactcgactactgaggtgctgctgagggcaggagtatcgcgggatgcccgaactaaagtggaccggactccactccacatggcggcaagcgagggccacgctagcattgtggaagtcttgctgaagcatggggcagatgtgaacgcaaaggatatgctgaaaatgactgcgctccattgggctactgagcataatcaccaggaggtagttgagctcctgatcaagtatggagccgatgtgcacacccagtccaagttttgcaaaactgctttcgacatttccattgataacggcaacgaggatctggcagaaattctccagattgcaatgcagaatcaaataaatacaaacccggagtcccctgacacagttaccattcacgctgccaccccccagttcatcatcgggccaggcggagtcgtgaacctgaccgacgagacaggcgtgagtgccgtgcagtttggcaactcctcaacttccgtactggccacattagctgccttggccgaggcttcggcaccgctcagcaactctagcgagacaccggttgtggccacggaagaggtggtcactgcggaatcagttgatggagcaatacaacaggttgtttcctcaggcggacagcaggtgattaccattgttaccgacggaatccagctgggcaacttacatagcatccctaccagcggaattggccaaccaatcattgtgacaatgcctgatggacagcaggtgcttacggtgccggcaactgatatcgcggaagagactgttataagcgaggaaccccctgcaaagcgtcagtgcatagaaatcatagagaacagagttgaatccgctgagattgaggttaggagcctcctcccaggcgtcttgtgcaggagccacccaaaatag

SEQ ID NO: 224147 - DNA, 1152 bp, synthetic construct
  misc_feature 1..1152: note = Description of Artificial Sequence: Synthetic coding sequence
  source 1..1152: mol_type = other DNA
atgtctcttgtggacctgggaaagaagctactagaagcggctagggctggccaggatgacgaggtacgcattctgatggccaacggggctccgttcacaacggactggttggggacgtcaccgcttcacctggcagctcagtatgggcactattccaccactgaagttctgttgcgcgctggagtttctagggatgccagaacaaaggtcgatcggacccctttacacatggccgcatctgaggggcatgcgtccatcgtcgaagtgctactcaagcatggcgctgacgtcaatgcgaaggacatgctgaaaatgactgcccttcattgggccactgagcacaaccaccaggaggtggtagaattactgatcaagtacggcgctgatgtacatacccagtcaaagttttgtaagacagctttcgacatttctatcgataatggcaacgaagacctggctgagatactccagattgcaatgcagaaccagatcaatacaaaccctgagagtcctgatactgttacaattcacgccgcaactcctcagttcatcatcggccctggcggtgtcgtaaacttaaccgacgagaccggagtatccgcggtacagtttggcaacagctctacctccgtcttggccacgctggctgcgctagcggaggcatctgccccactgtccaactcttctgaaacaccagtagttgcaacagaagaggtggtgacggccgagtcagtggatggtgccatccagcaggtggtatcctctgggggacaacaggtaattactattgtgaccgatggcatccaactggggaacctgcatagcatcccaacaagcggaataggccagccgatcatagtcacaatgccggacggccaacaagttctgacagtgcccgcaaccgatatcgccgaggaaaccgttataagcgaagaaccccctgcaaagcggcagtgcattgagataattgagaacagggtggaatccgcggaaattgaagagcgcgaggctctacagaagcagctcgatgaagctaatcgcgaggcccagaaatacaggcagcagctgctgaaaaaggagcaggaagctgaagcatatagacagaaacttgaggccatgacacggctccaaactaataaggaagctgtatag

SEQ ID NO: 224148 - DNA, 1047 bp, synthetic construct
  misc_feature 1..1047: note = Description of Artificial Sequence: Synthetic coding sequence
  source 1..1047: mol_type = other DNA
atgtcattagtggacttgggaaagaagctgctcgaagccgcacgggctggccaggacgatgaagtgcgtatcctcatggctaacggcgcaccgtttaccactgactggctcgggacgagtccactgcatctcgccgcacagtatgggcactactccaccaccgaggtgctgctccgggcaggagtatcgagggacgctcgaacaaaggtcgacagaacccctcttcatatggctgccagcgaaggccacgcaagcattgtggaagttctcctcaaacacggagcagacgtcaatgccaaggatatgctgaagatgaccgcactccattgggcgactgagcacaaccaccaggaagttgtggagttactgatcaaatacggggctgatgtacacacacaatccaaattctgcaaaacagcctttgacatctcgattgacaatggaaacgaggatctcgcagaaatcctacagatagcaatgcagaaccagatcaataccaacccagagtctcccgatactgtgactattcacgccgctactccccagtttattattggcccagggggagtagtgaatctaacagatgaaacaggagtgtcagcggtccaatttggcaatagcagcacctcagtcttagctaccctggctgccttggccgaggcgtcggcccctctttcaaacagctccgagacaccagtggttgcaaccgaggaggtggtgaccgccgagagtgtggacggtgccatacagcaagtggtctccagcgggggacagcaagtgattacaatcgtaaccgatgggatccagttggggaatctccactccatcccgacgagtggtatcgggcagccaattatcgtgactatgcccgacggacagcaagtattaacggtgcctgcgacagatatagccgaggaaaccgtaattagcgaggagccaccagctaaaagacagtgcattgagataatcgaaaatagggtggagagtgctgaaattgaagtgcggagcctgcttccaggagtcttgtgtcgcagccatccaaaatag

SEQ ID NO: 224149 - DNA, 1083 bp, synthetic construct
  misc_feature 1..1083: note = Description of Artificial Sequence: Synthetic coding sequence
  source 1..1083: mol_type = other DNA
atgagcttggtggacctgggcaagaagctcctggaagccgcaagggccggacaggacgacgaggtgcggatcttgatggccaacggcgctccatttactacagactggctggggaccagtcctttgcacctggctgcacaatacggacattacagtactacagaggtgctgttgagagccggagtatctcgagatgccagaacaaaagtggatagaactcccctgcacatggccgctagcgaagggcacgcctctatcgtcgaggtgctcctaaaacacggagctgatgtgaacgcaaaggatatgcttaagatgacagctctgcattgggccaccgagcacaaccaccaggaggtagtggaactcctaatcaaatatggagctgatgtgcacactcagtccaaattctgcaaaacggcctttgacatatcaatagataacggtaacgaagaccttgccgagattctgcagatcgccatgcagaaccagattaataccaatcctgagtctccagataccgtgactattcatgctgccacacctcagtttattataggtcccggtggcgtcgtgaatctcaccggcctggtgtcttcggagaatagcagtaaggccaccgatgaaactggggtttctgctgtacaattcggtaattcgtctacctctgtgctggcaaccttagctgcactagccgaagccagtgccccactgtcaaattccagcgaaacaccggtagtggcgacagaggaggtagtaaccgctgaatctgtcgatggcgctatccagcaggttgtctcgtctggtggccagcaagtgatcaccatcgtgacagacggtattcagctgggcaatctacatagcatcccaacttccggtatcggtcagcctatcatcgtgaccatgcccgatgggcagcaagtgcttacggtacccgcaacagacatcgccgaggagaccgtaattagcgaagagcctccagctaagagacagtgcattgaaattatcgagaatagggtggagagcgccgagatcgaggttaggtccctgctgccaggagtcctctgtcgttctcatcctaaatag

SEQ ID NO: 224150 - DNA, 270 bp, synthetic construct
  misc_feature 1..270: note = Description of Artificial Sequence: Synthetic coding sequence
  source 1..270: mol_type = other DNA
atgtccctggtggacttaggcaagaagctgctggaagccgctcgcgctggccaagacgacgaagtgagaattttaatggcaaatggtgctcctttcaccaccgactggctcggcacgagtccactccatctggccgcacagtatggccactattccaccacagaggtcttgctgcgtgctggagtgagtcgagacgcaaggactaaggtcgaccgcaccccacttcacatggccgcttcagaaggccatgctagcatcgtggaagtatag

SEQ ID NO: 224151 - DNA, 270 bp, synthetic construct
  misc_feature 1..270: note = Description of Artificial Sequence: Synthetic coding sequence
  source 1..270: mol_type = other DNA
atgtccctagtcgacctgggtaaaaaactgctggaagctgcacgagcgggacaggacgatgaagtgcgcattctgatggctaacggcgctccttttactacagactggctcggaacaagtcctctgcatctggccgctcagtacggacattacagcaccacagaagtcctcctgagggctggagtgtctagagacgccagaaccaaagtagataggacaccattgcacatggcggcttccgagggacacgcctccattgtggaagtctag

SEQ ID NO: 224152 - DNA, 354 bp, synthetic construct
  misc_feature 1..354: note = Description of Artificial Sequence: Synthetic coding sequence
  source 1..354: mol_type = other DNA
atgaaattcgtgtacaaggaggagcacccatttgagaagcgacgctctgagggcgaaaaaattcgcaagaaatacccggaccgggtgcctgtgatagtggagaaggctcccaaggcccgaatcggcgatctggacaaaaaaaagtacttggtacccagcgaccttacagtgggacaattttacttcctcattcggaagcggattcacctacgtgcagaggatgctctgtttttcttcgttaataacgttatacctccgacctctgccactatgggtcagttgtatcaggaacatcatgaagaagactttttcctatacatcgcttacagtgatgagtctgtttatggcctgtag

SEQ ID NO: 224153 - DNA, 354 bp, synthetic construct
  misc_feature 1..354: note = Description of Artificial Sequence: Synthetic coding sequence
  source 1..354: mol_type = other DNA
atgaaatttcagtataaggaggatcacccgttcgaatatcggaagaaggaaggagagaaaatccgcaagaaatatcctgatagagtgcctgtaatcgtggaaaaagcccctaaggccagggtcccggatcttgataagaggaagtatttggttcctagcgacctgaccgttggccagttctactttttgattaggaaaaggatacacctcaggcccgaggatgcactgtttttcttcgtcaataatacaataccacctaccagtgctacaatggggcagctttacgaggacaatcacgaagaggactatttcctgtatgtcgcgtacagcgatgagagcgtatatgggaagtag

SEQ ID NO: 224154 - DNA, 441 bp, synthetic construct
  misc_feature 1..441: note = Description of Artificial Sequence: Synthetic coding sequence
  source 1..441: mol_type = other DNA
atgaaattccagtacaaagaagaccaccccttcgaataccggaagaaggaaggtgaaaaaattaggaagaagtatcccgaccgagtgccagttattgttgaaaaagccccaaaagctagggttccagatttggataagcgcaaataccttgtgccaagtgacctcaccgtgggtcagttttactttcttatccggaaacgcatccatcttaggcccgaagacgctctcttcttctttgtgaataacacgatcccccctacgtcggccacaatggggcagctgtacgaggtaatggtgctagtggcccaatactggatgcctagctctgctgtgtggcatcctctggccctcgtgctcgacgcattgatcacccacctccgctcgggcgctgagggcgtgatttaccctgaccctcttacttatggcagtgtgcgcctgtag

SEQ ID NO: 224155 - DNA, 441 bp, synthetic construct
  misc_feature 1..441: note = Description of Artificial Sequence: Synthetic coding sequence
  source 1..441: mol_type = other DNA
atgaagttccagtacaaagaggatcatccttttgagtatcgcaagaaagaaggagaaaaaatccgcaagaagtatcctgatagggtcccagttattgtggaaaaggccccaaaggccagagtgcctgacctcgacaaacggaagtaccttgtgccaagcgaccttacggtgggtcagttctatttcctgatacgaaagaggatccacttgcgaccagaggacgctctctttttctttgtgaacaatacaattccacccacatctgctactatgggccagttgtatgaggtgatggtcctcgtcgctcaatattggatgccctcttcggcggtgtggcatcctctggctctggttttagatgccttgattacccacttaagatccggcgctgagggggtcatctatccagatcctctcacatatggcagtgttcgcctgtag

SEQ ID NO: 224156 - DNA, 213 bp, synthetic construct
  misc_feature 1..213: note = Description of Artificial Sequence: Synthetic coding sequence
  source 1..213: mol_type = other DNA
atgaaatttcagtacaaggaagatcacccatttgaatatcgcaaaaaggagggggagaagattcgaaagaaatatccagaccgggtccctgtcatcgttgagaaagcccctaaagcgagggtgcccgatcttgacaaaaggaaataccttgttccatccgaccttacagtgggacagttttattttctcataaggaagaggatccacctctag

SEQ ID NO: 224157 - DNA, 354 bp, synthetic construct
  misc_feature 1..354: note = Description of Artificial Sequence: Synthetic coding sequence
  source 1..354: mol_type = other DNA
atgaagttccagtacaaggaggatcacccttttgagtatcgaaagaaggagggggaaaagattcgcaaaaaatacccggatagagtgccagtcatcgtcgaaaaggctcccaaagctagagtgcctgacctcgacaaaaggaaatacctcgtgccctctgacctgaccgtggggcaattttatttcctgattaggaaacggattcacctccgcccagaagacgcactgttcttctttgtgaacaacacgattccccctacctccgccaccatgggacagctgtacgaagacaatcatgaggaggactactttctctacgttgcctactctgacgagagcgtctacggcaaatag

SEQ ID NO: 224158 - DNA, 354 bp, synthetic construct
  misc_feature 1..354: note = Description of Artificial Sequence: Synthetic coding sequence
  source 1..354: mol_type = other DNA
atgaaatggatgttcaaagaagaccattctctggaacaccggtgtgtagaaagcgccaagatccgcgctaagtatccagatagggtgcccgtcatagttgaaaaggtgagtgggtcccagatcgtcgacatcgacaagagaaaatacctggttccatccgacatcactgtcgcccagtttatgtggatcattagaaaaaggattcagctgccatcagaaaaagcgattttcttgttcgtggacaagacagtaccacagtccagcctcacgatgggtcagctgtatgagaaagagaaagatgaggatgggttcctgtacgtagcctattccggggaaaacacattcggattctag

SEQ ID NO: 224159 - DNA, 1344 bp, synthetic construct
  misc_feature 1..1344: note = Description of Artificial Sequence: Synthetic coding sequence
  source 1..1344: mol_type = other DNA
atgcccgtcctatatgacagattgctgaaactcaaagaaatgttcaattcgaagttcggcagcatcccgaagttttatgtgcgcgcacccggtagggtgaacataatcggggagcatatcgattactgtgggtacagcgtgttgccaatggctgtggagcaggatgtgttaatcgccgtggagcccgtaaagacttatgcccttcagttagcaaacactaacccactgtaccctgacttctccacaagcgccaacaacatccagatcgacaagacgaaacccctctggcacaattacttcctatgtggcctgaagggaatccaggagcatttcggtttgagtaatctgaccggaatgaactgtttagtcgacggcaatatccctccctccagtggacttagctcttctagcgcactcgtgtgctgcgccggacttgtcacactgaccgtcctcgggaggaacctgagtaaggtagagctagctgagatatgtgccaagagcgagcggtacatcggcactgagggcggagggatggatcagtctatttcatttctcgccgaagaggggacagcgaagctcatagaatttagcccgctgcgagccaccgacgttaagctgccttcaggtgccgtcttcgtcatcgccaacagctgcgtggagatgaacaaagccgcaacttcacattttaacatccgagtgatggaatgtagactcgccgcaaagctgctggccaagtataaatccctgcaatgggataaggtgctgagactggaggaggtgcaggcaaaattaggaatcagcctcgaagagatgctattggtaactgaggatgcactccatccagagccctacaatcccgaggagatctgccgatgcctcgggatttcactagaagagctgcgaactcagatactcagccccaatacccaggacgtgttaattttcaagttgtaccagcgggctaaacacgtctattccgaggcagcccgtgtgttgcaattcaagaaaatttgtgaggaggccccagaaaatatggtgcagctcttgggagagctcatgaaccagagccacatgtcttgcagagatatgtacgagtgttcatgccccgagctggaccaactagtcgacatttgccggaagtttggcgctcaggggtctaggctcaccggggctggatggggtggttgtaccgtcagtatggttcccgctgataagctgccgtccttcttggccaacgttcacaaagcctactatcagcggagcgatggctcactcgctccggagaaacagtccctgttcgctactaagcccggaggtggcgctctagtcctcctggaagcctag

SEQ ID NO: 224160 - DNA, 1305 bp, synthetic construct
  misc_feature 1..1305: note = Description of Artificial Sequence: Synthetic coding sequence
  source 1..1305: mol_type = other DNA
atgttcaatagcaaattcggatctatccccaagttttacgtgcgcgcacctgggagggtcaatattattggtgagcacatagattactgcggatatagcgtgctgcccatggccgtcgaacaagacgtgctgatcgctgtggagcccgtgaagacgtacgccctccagctggccaacacaaatcccctttatcccgacttcagcacgtcagccaacaatatacaaattgacaagacaaagccactgtggcacaattattttctctgtggcctgaaaggcatccaagaacattttggcctgtccaatcttacaggcatgaactgcctcgtggacggaaacatcccaccgagtagtggattgagttccagtagcgccctagtgtgctgtgcaggattggttaccttaactgtcctggggagaaacttgtcaaaagtagaacttgcagaaatctgtgccaaatcggaaaggtacatagggactgaaggtgggggaatggatcagtcaatctctttcctggccgaggagggcacagctaagctgatcgagttcagtccgctgagagccactgatgtgaaactgcccagcggagcagtgttcgtgattgctaactcatgtgtggagatgaataaagctgctactagtcattttaatatacgggtgatggagtgcagactggccgcaaagctgctggccaagtacaagtccctccagtgggacaaggtcctgagattagaggaggtccaggcaaagctgggaatttctctagaagagatgctgctagtaaccgaagacgctttgcacccggaaccctacaatcctgaggagatctgtcgatgcttgggcatttccctggaggaactaagaacccagatcctctccccaaacacacaggatgtcctgattttcaaattatatcagcgtgccaaacacgtttacagcgaggctgcgagagttcttcagttcaaaaaaatttgtgaagaggcccctgagaatatggtacaactcctgggagagctgatgaaccaaagccacatgagctgtagagacatgtatgaatgcagttgtcctgaactcgaccaactcgtggacatttgtcgtaaattcggagcgcagggctcacggcttaccggtgccggttggggcggatgtaccgtcagcatggtccccgctgataaactgccgtccttccttgccaacgtgcacaaagcctactatcagagatctgatgggtctcttgcaccagaaaaacaatcactgttcgccacaaaacccggagggggtgccctggtgttgctcgaggcctag

SEQ ID NO: 224161 - DNA, 624 bp, synthetic construct
  misc_feature 1..624: note = Description of Artificial Sequence: Synthetic coding sequence
  source 1..624: mol_type = other DNA
atgaactgtctggtggacggaaacattccaccctcttctggcctgtccagctcatccgcactggtgtgttgcgcaggattagtcacattaacagtgctggggaggaacctttctaaagtagagctagcagagatttgcgctaaatctgaacgctatattggcacggagggcggtggaatggaccagtctatcagcttcttagctgaggaggggacggctaagctcatcgaattctctccacttagagccaccgatgttaaacttccctctggcgctgtttttgtgatcgccaattcgtgcgttgagatgaacaaagccgctacctcccattttaatatcagagtgatggagtgcagactcgccgctaaattacttgccaagtataaaagtctgcaatgggataaagtcctgaggctggaggaagttcaggccaaactggggatcagcttagaggaaatgttgctcgtcacagaggacgccttacacccggagccttacaatcctgaggaaatatgccgatgcctgggtatttctctggaggaactgaggacacaaattctgtcccccaacacccaggacgacggggtggtgctctatcgccctgggtggtcagcaaccgcctag

SEQ ID NO: 224162 - DNA, 1305 bp, synthetic construct
  misc_feature 1..1305: note = Description of Artificial Sequence: Synthetic coding sequence
  source 1..1305: mol_type = other DNA
atgtttaactccaaatttggatccatccctaagttttatgtgcgggctccagggagagtgaacatcataggcgagcacatcgactactgtgggtattccgtactcccaatggcggtggaacaggacgttttaatagccgtcgagcccgttaaaacctatgccctgcaactggccaatacaaaccccctttatcctgacttttccaccagcgcgaacaacatacagatcgacaaaacaaaacctttatggcataattatttcctttgtggcctaaagggtattcaggaacactttggactgtccaacctgacagggatgaattgtcttgtcgacggtaatataccaccatcatcaggtctgtcatcttccagcgcacttgtgtgctgtgcaggtctagtgactctcaccgtgctgggacgcaacttgtctaaagtcgagctggcggaaatctgcgctaagtcagagcgttatataggcacagaggggggtggaatggatcagtccatcagcttccttgcagaggaaggaacagctaagttgatcgagttctctcctctacgggctacagatgttaagctcccatccggagctgtctttgtaattgccaattcatgcgtcgaaatgaataaagccgctacatcgcactttaacataagagtgatggaatgccgcctggcagccaagttgctcgcaaagtacaaatccctgcagtgggataaggtgcttagacttgaagaggtgcaggctaaactaggcatcagcctggaagagatgctactggtcaccgaagacgcactccaccccgagccatacaatccagaagagatctgtcggtgcctaggcatcagtctggaagaactccgaacgcagatcctgagccccaatacacaggacgtcttgatcttcaagctgtaccaacgggcaaagcatgtatactccgaagcagcgcgtgtgcttcagtttaaaaaaatttgtgaagaggccccagaaaacatggtgcagctgttgggagaactgatgaaccaatcccatatgtcgtgtagggatatgtatgagtgcagctgcccagaactggatcagctggtggatatctgcagaaagttcggagcccagggatctaggctgactggcgcaggttggggcggatgcactgtgagcatggtccccgcagataaactcccgtctttcttggcaaacgttcacaaggcttattatcagaggtccgacggttcactcgcacctgagaagcagtccttattcgcaacaaaaccgggagggggtgcactggtgctgctggaagcttag

SEQ ID NO: 224163 - DNA, 1305 bp, synthetic construct
  misc_feature 1..1305: note = Description of Artificial Sequence: Synthetic coding sequence
  source 1..1305: mol_type = other DNA
atgtttaattcaaaattcggatccatccccaaattctacgtcagagctccaggaagggtcaacatcataggtgagcacattgactattgcggctattcagtgttgcctatggcggtggagcaggatgtgcttatcgccgtcgagcccgtgaagacttacgccctgcaactcgcgaataccaatcctctatatcctgactttagcacatctgccaacaatatccagatcgataaaacaaaacctttatggcacaattatttcttgtgtggcctgaagggcatccaggaacacttcggactctccaaccttacaggaatgaattgcttggtggatggtaatattccaccgagctccggtctgtcatcttcaagcgcattagtgtgctgcgccggactggtgacgctgaccgttctaggcagaaacttgtctaaggtggagctcgccgaaatatgtgctaaatccgaacgttacattggaaccgaagggggagggatggatcagtctatttctttccttgcggaagagggcaccgccaagctgattgaattctcccctctgcgcgctacagacgtcaagttaccatccggcgctgtgtttgttatcgccaactcctgcgtagagatgaacaaggcagctacttcccacttcaacattagggtgatggaatgtcgcttagcagctaagttgctcgccaagtacaagagcctgcaatgggataaagtgctgaggcttgaggaagttcaggcaaaactggggatttccttagaggaaatgttgcttgtgaccgaagacgctctgcacccagaaccatataaccccgaagagatctgccgttgcctggggatctcgttagaagaacttcgcacacagatcctgtcaccaaacacacaagatgtgttgatctttaaactgtaccagagagcgaagcacgtctacagcgaagccgctagagtgctgcagttcaagaaaatttgtgaagaagcccctgagaacatggtccagcttctgggtgagctcatgaaccagagccacatgtcttgcagggacatgtatgaatgttcgtgcccggagttggatcagttggtggatatttgtcgaaaattcggcgcacaaggcagtagactgacgggtgcaggctggggaggctgtacagtaagtatggtccccgctgacaaattgccctcattcctggcgaacgtgcacaaggcatactatcaacgaagtgacggtagcctggccccagagaaacagtcactgttcgccaccaagcctggcggaggggctttagtgttgctggaggcatag

SEQ ID NO: 224164 - DNA, 1377 bp, synthetic construct
  misc_feature 1..1377: note = Description of Artificial Sequence: Synthetic coding sequence
  source 1..1377: mol_type = other DNA
atggccacagagagtcccgcaactcgcagggtgcaggtggcagagcaccccagactgctaaaattgaaggagatgttcaacagcaaattcggctccattccaaagttttatgttagggctcccggtagagtgaacatcatcggggagcacatcgactattgtggatatagtgtgttacccatggcagtggagcaagatgtactgattgcagttgagccagttaagacctacgctttgcagctggccaatacgaaccctctgtatccggacttctctaccagtgctaacaacatccagattgacaaaacaaaaccattgtggcacaactatttcctgtgtggtctcaaaggcattcaggaacactttgggctgagcaacttgaccggcatgaactgcctggtcgatggtaacattccccctagctcaggcctttctagctcaagcgccctggtctgttgcgcaggactcgtcaccttaacagttctggggagaaacctgagcaaggttgagctggcagagatttgtgccaaatccgagaggtatatcggcacggaagggggaggaatggaccagtctatctcttttctggctgaggaaggaaccgccaagctgatcgaattttccccacttagggccacagatgtgaaattgccatcaggcgctgtctttgtgattgccaacagttgcgtggaaatgaataaggccgcaacctctcattttaatattcgagttatggagtgtcgactggctgctaaactgctcgccaagtataaaagtcttcaatgggacaaagtgcttagactggaggaagtccaagcaaaactaggcatatccttagaagagatgctcttggtgactgaagatgcactgcatcctgaaccgtacaaccccgaagaaatatgccgatgtctgggcatctccttagaggaactgaggactcagattttatctccaaatacacaggacgtcttgatttttaaactgtatcagcgggctaaacacgtttactccgaagctgcgagggtcctccagtttaaaaaaatttgcgaggaggcacctgaaaatatggtccagctgctcggtgagctaatgaatcagtcacatatgagttgtcgagatatgtatgagtgcagctgtcccgagctggaccaacttgttgatatttgccgcaaattcggcgcacagggtagccgcttgacaggcgctggatggggtggctgtactgtgtcgatggttcctgcggataaactgccttcatttctcgcaaatgtgcacaaagcctactaccaaagatcagatgggagcctagccccagagaagcagagcctgttcgccacaaagcctggagggggtgcactggtattgctggaggcatag

SEQ ID NO: 224165 - DNA, 1272 bp, synthetic construct
  misc_feature 1..1272: note = Description of Artificial Sequence: Synthetic coding sequence
  source 1..1272: mol_type = other DNA
atgctacctccccagaagaagccttgggagagtatggcaaagggactggtcctgggagccctatttacaagcttccttctcttagtctactcttacgcagtaccccctctgcacgctgggctggcctccaccacccccgaggcggctgccagctgctctcccccagctctcgagcctgaagcagtgatccgggcaaatggctctgcaggtgagtgccagccacgaagaaacatcgtgtttctcaaaactcataagacagcaagctccacattgttgaatattctcttccggttcggccagaaacacagactgaagttcgcattccccaacgggaggaacgattttgactatcctacattttttgctagatctcttgtccaggactacaggcctggcgcttgctttaacattatatgcaaccatatgcgattccactacgacgaggtcaggggcttagtcccaaccaatgctatcttcattactgtgttgcgggatccagcgagacttttcgaaagttcattccattactttggcccagttgtcccactgacttggaaactgagcgctggagataagcttactgagtttcttcaggaccccgaccgatactacgaccccaatggctttaatgcccactaccttaggaatctgctgttcttcgatctcggatatgacaatagcctcgacccttcttcgcctcaggtacaggagcacattctggaagtagaacggaggttccacctagttctgctgcaagagtattttgacgaatcattggttcttctaaaagacctgctgtgttgggaacttgaggacgtcctgtactttaagttaaacgcaaggcgcgatagtcccgtcccacgcttgtccggcgagttatacgggagggccaccgcctggaacatgctggactcccatttgtaccggcacttcaacgcctcattttggcgaaaagttgaagcctttggacgggaaagaatggccagagaggttgccgctctgagacacgccaatgagcggatgaggactatttgcattgacggaggacacgccgtcgacgccgctgctatccaggatgaagcaatgcagccatggcaacctttgggaaccaagtctatcctgggatacaatttaaagaaatctattggccaaaggcatgcacagctgtgccggagaatgcttacgcccgaaatccaatacctgatggacctcggggcaaatctttgggtgaccaaattgtggaaatttatccgcgacttcctcagatggtag

SEQ ID NO: 224166 - DNA, 1272 bp, synthetic construct
  misc_feature 1..1272: note = Description of Artificial Sequence: Synthetic coding sequence
  source 1..1272: mol_type = other DNA
atgttgccgcctcaaaaaaagccatgggaatccatggcaaaggggcttgtgctgggggcactgttcacatctttccttctgcttgtttattcctatgctgtccccccacttcacgcgggactggcgtcaacgacccccgaggccgctgccagctgcagccctcccgctctggaacctgaagctgtgatcagggcgaatggctccgccggtgaatgtcagccacggcgaaatatagtgtttctgaagactcataaaacggcttcatctacccttctgaacatactgttcaggtttgggcaaaagcatagactcaaatttgcattcccgaatggtaggaatgattttgactaccccaccttctttgcgcgatcattagtccaagactaccgccctggggcatgttttaatataatctgtaatcatatgaggtttcattacgacgaggtcaggggcctagtccccacaaacgctatctttataactgtattgcgcgacccggcacgcctcttcgagagcagctttcattactttggacctgtggtcccactcacctggaagctgtctgcgggtgataaactcacagagttcctgcaggatcctgaccgctattatgaccctaatgggtttaacgcccactatctcaggaatctgctgttcttcgacctgggttatgataatagcctggatcccagtagcccgcaggtgcaggagcatatcctcgaggtagaacgcagattccacctggtgttactgcaggagtattttgatgaaagcctggtgctgctgaaagatctgttgtgctgggaactggaggatgtgctgtactttaaactgaacgctcggcgagattcgcctgtaccaagattaagcggagagctgtacgggcgtgcaactgcatggaacatgctggattcacatctgtaccggcactttaatgcaagtttctggagaaaagtagaagccttcggcagggaacggatggccagggaggttgccgctttgagacatgcgaacgagcgcatgcgtacaatatgcatcgacggagggcatgccgttgacgcagctgctatccaagacgaagcaatgcagccttggcaacccctgggtactaagtccattctgggatataatctgaaaaaatccataggacaacggcatgcccagctttgcaggcgtatgctcacccccgagattcagtacttgatggatctgggggcaaatctatgggtgacgaaactgtggaagttcatacgcgatttcctgcgatggtag

SEQ ID NO: 224167 - DNA, 1272 bp, synthetic construct
  misc_feature 1..1272: note = Description of Artificial Sequence: Synthetic coding sequence
  source 1..1272: mol_type = other DNA
atgcttccccctcagaagaagccttgggagtctatggctaagggattagtgctgggtgcactgtttacaagctttcttctgctagtgtattcctacgcagtgccccctctgcacgcaggccttgcctctactactcctgaagccgcagcaagctgcagcccccctgcgctggagcccgaggccgtaatccgagccaacggaagcgcaggcgagtgccagcccagaagaaatattgtgtttttgaagacccacaaaaccgcatcctcaacgctgctcaatatcctctttcggtttgggcagaagcatcgcctcaagtttgctttccccaacggacgtaacgattttgattatcctacattcttcgcacgttccttagtacaggactatcggccaggcgcttgtttcaacataatctgcaatcatatgaggttccattatgacgaggtgcggggactcgtccccacgaacgctatcttcatcacagttctccgtgatccagcgaggttgttcgagtcaagcttccattacttcggccctgtggtgccactgacatggaagctatccgccggagataaactgaccgagttcctgcaagatcctgacaggtattacgaccctaacggcttcaatgcccattatcttagaaaccttctgttcttcgatcttggatacgacaattctttggaccccagtagcccacaggtgcaggaacacatcctggaagtggagcggcgattccacctggtactgctccaagaatatttcgacgaaagtctggttctgctgaaagatctgctgtgttgggagcttgaggacgtgctgtatttcaaactgaacgcccgacgggattcccctgtccctcgcctctccggggagttatacgggcgagccacggcttggaacatgcttgattcccacttgtacagacacttcaacgcatccttttggaggaaggttgaggcattcggtcgtgaacgcatggctcgcgaggtcgcagctttgaggcacgcaaacgagcgcatgaggacgatctgtatcgatggcggacatgctgtggacgccgcagccattcaggatgaagccatgcagccatggcagcccctgggcaccaagtccatcctggggtacaatctgaagaagtccatcggccagagacacgcccagctgtgccgccgaatgctcactcccgagattcagtatttgatggacctgggagctaacttgtgggttaccaaattgtggaagtttattcgggacttcttgcgctggtag

SEQ ID NO: 224168 - DNA, 1272 bp, synthetic construct
  misc_feature 1..1272: note = Description of Artificial Sequence: Synthetic coding sequence
  source 1..1272: mol_type = other DNA
atgctgcctccacaaaagaagccctgggaaagtatggctaaagggcttgtgctgggagcactgttcactagtttcctacttctcgtatacagttacgcagttcctcctttacacgcaggacttgcttccaccacccccgaagccgctgcctcttgttcgcctcctgccctcgagcccgaagcggtcattagagccaatggctctgctggggagtgccagcccaggcgaaatatcgtgtttttgaagactcacaagaccgcaagctccaccctgctgaatattctatttcggttcggccagaaacacaggttgaaattcgcgtttcccaacggcaggaatgactttgactatcctacattcttcgcacgctctttggttcaggattaccgtccaggtgcatgtttcaacatcatttgtaaccacatgagattccattacgacgaggttcgcggactcgtccccactaatgcaatcttcattaccgtcctgagggaccccgctcgcctctttgaatcatcattccactactttgggccagtggttcctctcacctggaagctgagcgctggcgataagctcacggagttcttacaagaccccgaccgatattacgatcctaacggctttaatgctcattacctccgtaacttactgttctttgacctcggctatgataactccctagatcctagttctcctcaggtgcaagagcacattctcgaggtcgaaagacggtttcaccttgtgctgctgcaggagtactttgacgagtccctcgtgctgctgaaggacctgctgtgttgggaactagaagacgttctatatttcaaattaaatgctagacgcgacagccctgtccccaggctgtctggcgaactgtatggaagggctaccgcctggaacatgttagacagtcacctttaccgtcattttaatgctagcttttggagaaaagttgaggcctttggtagggagagaatggctagggaggtcgcagcactcagacatgcaaatgagcggatgcgtaccatctgtatcgacggcggtcatgcagtggacgcggcagctatccaggatgaagccatgcagccatggcagcctctcgggacaaagagtatcctgggctataacctgaaaaagtctatcggccagagacacgcccagctctgccgtcggatgcttacccctgagatacagtacctgatggacctcggagctaacctgtgggtgaccaagctgtggaagttcatccgtgacttcctgagatggtag

SEQ ID NO: 224169 - DNA, 1272 bp, synthetic construct
  misc_feature 1..1272: note = Description of Artificial Sequence: Synthetic coding sequence
  source 1..1272: mol_type = other DNA
atgctgccgcctcagaaaaaaccatgggagtctatggctaagggcttggtgttgggagccctgttcacaagttttcttctgctggtgtactcatatgcagtgcccccacttcacgccggattggcctcaacaacccctgaggccgcagcaagttgctcccccccagcactggagcccgaggccgtcatccgggcaaacggatctgcgggagagtgtcagcccaggcgtaacatcgtgttcctgaaaacccataaaactgcgtcttctactcttctgaatattctgttcagattcggacagaaacacaggctgaaatttgcctttccgaatggcaggaacgatttcgattatcccacttttttcgccagatccctcgtacaggattatcggccaggcgcatgtttcaatatcatctgtaaccatatgaggttccactacgacgaagtgcggggtttagtcccgacaaacgccatcttcatcaccgtgttgcgggatccggctaggctgtttgagagtagcttccactatttcgggccagttgtgccgttgacatggaaactgtcagcaggtgacaaattgaccgagttcctccaggacccggataggtactatgatcctaatgggtttaatgcccactatttaagaaatctgctgttcttcgacctgggctacgacaattccctggatccctccagtccacaagtacaagaacacatattagaggtcgaaaggagatttcacctggtgctgctgcaagaatacttcgatgagtccctcgtgctgttgaaagacttgctttgctgggagctggaggacgtcctgtacttcaagctgaatgccagaagagatagcccggttccacgcctgtccggagagttatacgggcgagccacagcttggaatatgcttgactcccatctttatcggcacttcaacgcttctttttggcggaaggtcgaagccttcggtagggagaggatggcgagagaggtcgcagcactgaggcacgctaatgagagaatgcgcactatatgcatcgacggtgggcatgcggtggacgctgcagcaatccaggacgaagccatgcagccgtggcaacccctgggaacaaagtctattctgggctacaacctcaagaaatccatagggcagcgtcacgctcagctgtgccgccgaatgcttactccagagattcaatatctaatggacctgggcgctaacttgtgggtaacgaagttgtggaagttcatcagggacttccttagatggtag

SEQ ID NO: 224170 - DNA, 1272 bp, synthetic construct
  misc_feature 1..1272: note = Description of Artificial Sequence: Synthetic coding sequence
  source 1..1272: mol_type = other DNA
atgcttcccccacagaaaaaaccgtgggagtccatggctaagggcctggtgctgggggctcttttcacatcgtttttgctactggtgtactcctacgcggtccctcccttgcacgccggacttgcctccacgacccccgaagcggcagccagttgttcacctcccgctttggaacccgaggccgtgattcgggcaaatggctccgccggtgaatgccagcctcggaggaacatcgtgttcctgaagacccataaaacggcctctagtacccttctgaacattctgtttcgctttgggcagaagcacaggctgaaattcgcctttcccaatggaaggaacgattttgactatccaacatttttcgcgagatctctggtccaggattaccgccctggcgcttgcttcaacattatctgcaaccacatgcgcttccattacgatgaagtgcggggactggtaccaaccaacgcgatcttcatcacagtgctacgcgaccccgctcggttattcgaatccagcttccattattttggcccagtcgtcccactgacttggaagctctctgccggtgacaaacttacagagtttctccaggacccggaccggtactacgatccgaatgggtttaacgcccactacctccgcaacctactcttctttgacctggggtatgacaattctctggacccctcctcccctcaggtccaggaacatattcttgaagtggaaaggcgcttccatttggttttgctccaggagtatttcgatgaatctctggtcttgcttaaggatctgttatgttgggagctggaagacgttctttactttaagctgaatgcccgacgcgactccccggttcccaggctctctggggaactctatgggcgagcaaccgcgtggaatatgctggatagccatctttaccgacactttaatgcttctttttggcggaaagtggaggcgttcgggcgagagcgtatggcgagggaggtcgcagccttgcgccatgccaatgagcggatgcggacaatctgcatagatgggggacacgccgtagatgccgcagcgatccaggacgaggcaatgcaaccttggcagcctttaggtacaaagtctattttggggtacaacctgaaaaaaagtatcgggcagcggcacgctcagctgtgccgaagaatgctgactccagagatccagtacttgatggatctcggcgctaatctgtgggtgaccaagctctggaagttcattcgcgatttcctcagatggtag

SEQ ID NO: 224171 - DNA, 258 bp, synthetic construct
  misc_feature 1..258: note = Description of Artificial Sequence: Synthetic coding sequence
  source 1..258: mol_type = other DNA
atgttaccacctcaaaagaaaccgtgggaatctatggcaaagggccttgtgcttggtgctctctttacatcttttcttctgctcgtgtacagctatgctgtgcctcctctccatgccggactggccagtactaccccagaggcagctgcttcctgtagtcctcccgctctcgagccagaagcagtgattagagcaaacgggagcgccggtgaatgccagcctcggaggaacatcgtttttctgaagacccataagtag

SEQ ID NO: 224172 - DNA, 513 bp, synthetic construct
  misc_feature 1..513: note = Description of Artificial Sequence: Synthetic coding sequence
  source 1..513: mol_type = other DNA
atgcttcctccccagaagaagccttgggagagtatggccaaaggcttggtcctaggtgccctatttacatcattccttttacttgtttattcgtacgccgtgcctcctctgcacgctggactcgcttctacaacgcccgaggctgccgcatcctgttcaccccctgctctcgagcccgaagcagtgatcagagctaacggcagcgccggtgaatgccagcctcgtaggaacatcgtctttttgaaaactcataaaacagcctccagtactctcctgaacatactattcagattcggccagaagcaccggctgaagttcgcttttcctaacggacgtaatgacttcgactacccaacgttcttcgcgcgttcacttgtccaagattatagacccggtgcctgctttaacatcatctgtaaccacatgaggttccattacgatgaagtgcgtggtctcgtgccaactaacgccatttttatcacagtgttgagagatcctgcaagactgttctag

SEQ ID NO: 224173 - DNA, 450 bp, synthetic construct
  misc_feature 1..450: note = Description of Artificial Sequence: Synthetic coding sequence
  source 1..450: mol_type = other DNA
atgctgcctccacagaaaaagccttgggagtcaatggccaaaggcctagtgttaggcgcattgttcacctccttcctactgctggtctattcctacgctgtgccaccactccatgccggtctcgcttcaacaacacccgaagcagctgccagctgctcgcctccggcactggaacctgaagctgtgatccgcgctaatggcagtgctggtgagtgccagccgaggcgcaatatcgtctttttaaagactcataagacagctagctcaacacttttgaacatcctgtttcgcttcgggcaaaaacaccgtctaaagttcgctttccccaacgggagaaacgatttcgactaccccactttctttgctcgttcgttggtacaggactacaggcctggtgcctgctttaacattatctgtaatcacatgaggttccactacgatgaggtgtag

SEQ ID NO: 224174 - DNA, 300 bp, synthetic construct
  misc_feature 1..300: note = Description of Artificial Sequence: Synthetic coding sequence
  source 1..300: mol_type = other DNA
atgctgccacctcaaaagaagccctgggaatctatggccaagggcctagtgctgggcgctctctttacctcctttctgttgctcgtgtactcatatgccgtgccacccctacatgcaggcttagctagtacgacccctgaggcagctgcctcgtgttcacctcctgctctggaacctgaagctgtcatccgcgcaaatggatctgctggcgaatgtcagccgagacggaacattgtgttcctgaaaacccacaagacagcatcttccacacttctgaatatcctgtttaggttcggatag

SEQ ID NO: 224175 - DNA, 312 bp, synthetic construct
  misc_feature 1..312: note = Description of Artificial Sequence: Synthetic coding sequence
  source 1..312: mol_type = other DNA
atgctgccaccccagaaaaaaccctgggaatccatggctaagggcctggttcttggcgctctgttcaccagttttttgttgctcgtctattcatacgcagttccccctctgcacgccggactggcctccaccactcccgaagccgctgcttcctgtagccccccagcccttgaaccagaagctgtgattagggcgaatgggagcgcgggtgaatgccagcctagacgaaacatcgtgttcttgaaaacgcacaagacggcctcgagtacgttgctgaatattttattcagatttggacaaaagcaccggtag

SEQ ID NO: 224176 - DNA, 600 bp, synthetic construct
  misc_feature 1..600: note = Description of Artificial Sequence: Synthetic coding sequence
  source 1..600: mol_type = other DNA
atgttgccaccccagaagaagccatgggagtctatggcgaaaggtctcgttctgggtgccctcttcacaagcttcctgctgctcgtatactcttacgccgtgccgcctctccacgctggtctggctagcaccacacctgaagcagcagcatcttgctctccaccagccctcgaaccggaagcagttatccgcgctaatgggagtgccggagagtgtcagcccagaaggaatatagtcttcctgaagactcataagaccgcctccagtacgctgctgaacatcttgttccgatttggccagaagcatcggttgaaattcgcctttcctaacggccgaaacgattttgattatccaacgtttttcgctaggagtttggtccaggactatcgtccaggagcctgtttcaatatcatttgtaatcacatgcgcttccattacgacgaagtgcggggacttgtgccaacaaatgccatatttataactgttcttagggaccctgccagactgttcgagtcctctttccactattttggccctgtagtaccccttacttggaaactgtctgccggagataaattaacggagttcttgcaggattag

SEQ ID NO: 224177 - DNA, 840 bp, synthetic construct
  misc_feature 1..840: note = Description of Artificial Sequence: Synthetic coding sequence
  source 1..840: mol_type = other DNA
atgctgccacctcagaagaagccctgggagagcatggctaaaggccttgttttgggagctctatttacctcatttctgctgctagtctatagttatgctgtgcctccactacatgctgggcttgccagcactacacccgaggccgcagcttcctgtagccccccagcgcttgagccagaggctgtgatcagggctaatggcagcgcaggggaatgccagcccagaaggaacatagtgtttttgaaaacgcacaaaactgcttcgtctacactcctgaatatactgttccgattcggacagaaacatcgtctcaagttcgcgtttcccaatggcaggaacgactttgactatcctacatttttcgctcggtctctggtgcaggactacaggccaggagcctgtttcaacatcatctgtaaccacatgcgattccactacgacgaggtcagaggcctcgttcccactaacgctatctttatcacagttctccgggacccagccagactgtttgaatcgtctttccactacttcggccctgtcgtaccgcttacgtggaagttgtccgccggagacaagttgacggagttcctccaggacccggatcggtattacgatcccaacgggttcaatgcacactacttgcgaaaccttctcttcttcgatctgggctatgacaatagccttgacccatcgagcccacaggtgcaggaacatatcctagaagtggaaaggagatttcacctggtcctactgcaggaatacttcgacgaaagcttggtcctgcttaaagatctcttgtgttgggagttggaggacgtgctgtacttcaaactcaactag

SEQ ID NO: 224178 - DNA, 1272 bp, synthetic construct
  misc_feature 1..1272: note = Description of Artificial Sequence: Synthetic coding sequence
  source 1..1272: mol_type = other DNA
atgctgccaccccaaaaaaagccatgggagtctatggccaagggactggtcctcggggctctatttacctctttcttgctgctagtctactcttacgcagtgcctccactgcacgctgggctcgcatctactacaccggaagcggcagcctcctgtagtcctccagctcttgagccggaggcggttatccgggcaaacggcagtgccggagagtgccagcccagacggaatatagtgttcttgaagacacacaagactgccagcagtactctgctgaacatcctttttaggtttggccagaaacataggctcaaattcgcctttcccaatggaagaaatgacttcgattaccccacattctttgcacgatccctggtgcaggattatcgcccaggagcatgttttaatattatttgcaaccacatgaggttccactacgatgaggtgcgcggtttagtgcctaccaacgcaatctttatcaccgttctgagggacccagcgaggctcttcgagtcttccttccactactttggtccggtggtgcctcttacatggaaactgagtgccggtgataaactgaccgagtttctgcaggaccccgataggtactatgaccctaacggcttcaatgctcactacctgcgcaacttactcttttttgatctcggatacgataatagcctggacccatcaagtccacaggtccaggaacacatacttgaagtagagcgtagatttcacctggtccttctgcaggagtacttcgatgagagtctcgtcctgctgaaagatctcctgtgttgggaacttgaggacgtgctgtatttcaagctcaacgcaaggcgcgatagccccgttcccagactctcgggggaactgtacggcagagcaaccgcttggaacatgctggatagccacctgtaccggcatttcaatgctagtttttggcgaaaagtggaggcatttggacgagaacgcatggcccgagaagtagccgctttgagacacgctaatgaaaggatgcgcaccatctgtattgatgggggtcacgccgtggacgccgctgcgattcaggacgaggccatgcaaccctggcagcctctggggaccaagagcatactgggatacaatctcaagaaaagcatcgggcagcgccacgcccagttgtgcaggcggatgcttaccccagaaattcagtacctcatggacctgggtgccaacctgtgggtcacaaagctctggaagttcatcagggacttccttagatggtag

SEQ ID NO: 224179 - DNA, 432 bp, synthetic construct
  misc_feature 1..432: note = Description of Artificial Sequence: Synthetic coding sequence
  source 1..432: mol_type = other DNA
atgctaccacctcagaagaagccctgggaaagtatggctaagggattggtgctcggcgctttgttcactagttttctgctactagtgtattcatacgcggtcccacccctccatgctgggctcgcctctaccactcctgaagcagccgcaagttgcagtccgccagctctagagcccgaagcagtgattagggctaatgggagtgccggagagtgtcagccccgaaggaacattgtgtttctgaagacccacaaaacagccagctcaactctgctgaacatcctctttcgattcggccagaagcaccgactgaaattcgctttccctaatggcaggaacgatttcgactacccgacttttttcgcacggtccttagttcaagattataggccaggggcttgttttaatattatctgcaaccatatgcgatag

SEQ ID NO: 224180 - DNA, 231 bp, synthetic construct
  misc_feature 1..231: note = Description of Artificial Sequence: Synthetic coding sequence
  source 1..231: mol_type = other DNA
atgttaccccctcagaagaagccatgggaaagcatggcgaagggactggttctaggtgctctgtttacatccttcctcctgctggtatatagttatgctgttcccccactgcatgctgggttagccagtaccacccctgaggccgctgcgagctgtagtcctcctgctctcgagcctgaggctgtgatacgggcaaatggcagtgctggcgaatgccaaccaaggagatag

SEQ ID NO: 224181 - DNA, 288 bp, synthetic construct
  misc_feature 1..288: note = Description of Artificial Sequence: Synthetic coding sequence
  source 1..288: mol_type = other DNA
atgttaccgcctcagaaaaagccgtgggagtctatggctaaaggcctggtgctgggcgcattattcacctcgtttcttttattggtctattcgtatgccgtgccacccctgcacgctggtcttgccagcaccacgccagaagctgctgctagttgcagcccccctgctctggagcccgaggctgtgattcgagcgaacggtagtgccggagagtgtcagccacgcaggaacatcgtctttttaaagacacataaaacagcaagcagtacactgttgaacattctgtag

SEQ ID NO: 224182 - DNA, 216 bp, synthetic construct
  misc_feature 1..216: note = Description of Artificial Sequence: Synthetic coding sequence
  source 1..216: mol_type = other DNA
atgcttccacctcaaaaaaagccgtgggaatcaatggccaaaggcctggtcttgggagccctgttcacctcattcctattgctagtctacagctacgcagtgccacctttgcacgcaggcctcgcgagcacgacccccgaggccgctgccagttgttctccacccgctctcgagcctgaagccgtgatacgcgctaacggctctgcgggagagtag

SEQ ID NO: 224183 - DNA, 729 bp, synthetic construct
  misc_feature 1..729: note = Description of Artificial Sequence: Synthetic coding sequence
  source 1..729: mol_type = other DNA
atgctcccccctcagaaaaagccgtgggaaagcatggctaagggactggtgctgggagctctattcacatcatttctgctattggtctacagttacgcggtgccaccactccacgcgggactggcgagcactacaccagaggccgctgcaagctgttctccaccagcgctagagcccgaggctgtgatcagagcgaacggaagtgccggagaatgtcagccccgtcgaaacattgtgttcttaaaaacgcataaaacagccagttctaccttattgaatatcctctttcgctttggtcaaaaacatcggctcaaatttgcatttcccaacggcagaaatgattttgattatccgacttttttcgccagatcgctcgtccaggactaccgccctggggcttgtttcaatatcatctgcaaccatatgcggtttcactacgacgaagtgagagggctggttccaaccaatgcaatcttcattacagtgcttagagatccagcccgactctttgagtcctccttccactattttgggccagtggtcccgttaacttggaagctctctgcaggtgataaactgactgaattcctccaggacccagatcggtattacgaccccaatggcttcaacgcacactatttgcgtaatctactgtttttcgacctgggctacgataattcactcgacccctcatccccccaggtccaagaacatatactagaagtttag

SEQ ID NO: 224184 - DNA, 303 bp, synthetic construct
  misc_feature 1..303: note = Description of Artificial Sequence: Synthetic coding sequence
  source 1..303: mol_type = other DNA
atgctcccacctcagaaaaaaccttgggaaagtatggcgaaaggactggtccttggggcattgttcacctccttcctacttctggtttattcttatgctgtccctccactgcacgctggcctagcatccacaactcccgaggctgccgcaagctgctcacctcctgctctggagccagaggccgttatcagggcaaacggatcagccggtgaatgtcagcccagaaggaacatcgtattcctgaagacccataagacggccagctcgactctactgaatattttgttccgatttggccagtag

SEQ ID NO: 224185 - DNA, 1197 bp, synthetic construct
  misc_feature 1..1197: note = Description of Artificial Sequence: Synthetic coding sequence
  source 1..1197: mol_type = other DNA
atgatgtcaatgctcggcggattacagcgatattttagggtgatcctcctattgcttctggccctcaccctcttactactggcgggattcctccacagcgatctggagctggacacgcccctctttgggggtcaggccgaggggccacccgtcacgaatatcatgttccttaaaacacataagacagctagctcgaccgttctgaatattctgtaccggttcgccgagacacacaatttaagcgtggcactgcctgctggcagccgggtgcatctggggtacccctggttatttctcgcacggtacgtggaaggcgtggggtctcagcaacgctttaacattatgtgcaatcatcttcggttcaacctgccgcaggtccagaaggtgatgccaaatgatactttttacttctccatcctgcgcaatccagtatttcagcttgaaagctccttcatttattacaagacatacgccccagctttccgcggagcaccctctctggacgcctttcttgcaagccctaggacattctacaatgatagccgccaccttcgcaatgtatacgcgaaaaataacatgtggtttgatttcggcttcgacccaaatgcccagtgcgaggaagggtacgtgcgtgcacggatagccgaagtggaaagacgattcagactcgtcctgattgctgaacacctggatgagtcacttgtgctgctgcgacggaggctgaggtgggcgcttgatgacgttgttgcatttagactgaactcccggagtgcccgaagtgtcgctcggttgtcacccgaaacacgagagcgagccagatcctggtgtgctctcgattggcgcctatacgaacacttcaaccggaccctctgggctcagctgagggcagaacttgggcctcgacgcctcagaggcgaagtagagcgtttacgtgccaggcgcagagaactggcgtctctgtgccttcaggacggcggtgccttaaaaaaccacacacaaattcgcgatccgagactgcgcccataccagtcagggaaagccgacattctaggctataacctgaggcccggactggacaaccaaacattgggcgtgtgccagcgcctggttatgcctgagttgcagtacatggccaggctgtacgcactccaattccctgaaaagcctctgaaaaatataccattcctaggcgcatag

SEQ ID NO: 224186 - DNA, 1296 bp, synthetic construct
  misc_feature 1..1296: note = Description of Artificial Sequence: Synthetic coding sequence
  source 1..1296: mol_type = other DNA
atgcctcccatcctgcagagacttcagcaagccacaaagatgatgagccgccgaaaaatcctcctcttggtgctgggctgcagcacagtgtcacttttgatccatcagggtgctcagctctcttggtaccccaaattgttccctctcagttgtcctcccctgcgcaattctcctcccagaccaaaacacatgacagtcgcgtttctgaagacccataagaccgctggcacaacggttcagaacatcttattccgcttcgccgaaaggcataatctgactgtggccttgcctcacccatcttgcgagcaccaattctgttaccctcgtaacttctccgcacatttcgtacatcctgccaccagacctccgcacgttttagcctcacacctgaggttcgaccgagccgagctagaacgtctgatgcctcccagcaccgtctatgttacaatcctgagggagccggctgctatgttcgaaagcttgttcagttattacaatcaatactgccctgcatttcggagggttcctaatgcttcgctggaagcatttcttcgcgcaccagaggcctattatagggcaggcgaacacttcgcaatgtttgcacataatacactggcctatgatcttggaggagacaacgagcgctcccccagggacgacgctgcatatctagctggactgattcggcaagtggaagaagtgttttcacttgtgatgatcgccgagtacttcgacgagtccctggtgctgcttagaaggcttttggcctgggatctagacgacgtactttatgccaaactgaatgcgagagctgccagcagcaggctggccgctatcccggcagctctggcccgagcagcacggacctggaacgctttggacgcaggactgtacgatcattttaatgccacattctggaggcacgtcgcaagggctgggagggcgtgcgttgagagagaagcaagagagctgcgggaggcgagacagcgtctcttacgcagatgcttcggcgacgaacctttgctgcgtccagcagcccagattcggacaaagcagttacagccatggcagccctcacggaaggtagatataatgggatatgacctgccgggtggcggagccggaccagccaccgaggcgtgtctcaaactggctatgcctgaggtgcagtatagtaactatctgcttcggaaacaaaagaggcggggtggagctagagctcggcctgaacctgtgctggacaatccaccacccagacccatcagagtcctccccagaggacctcaaggcccatag

SEQ ID NO: 224187 - DNA, 1296 bp, synthetic construct
  misc_feature 1..1296: note = Description of Artificial Sequence: Synthetic coding sequence
  source 1..1296: mol_type = other DNA
atgcccccaatcctgcaacgcttgcagcaggctacaaaaatgatgtcaaggagaaaaattctgttactcgtgctggggtgcagtaccgtgagtctcctgatacaccaaggagcccagctctcttggtacccaaaactgtttcccctgtcctgtccacctttacgtaacagcccaccacgcccaaaacatatgacggtagctttcctcaaaacccataagacagctggaaccacagtccaaaacattctgttcaggtttgccgaaaggcataacctaacggtggcactgccccatccatcgtgtgaacaccaattttgttaccctcgcaacttttctgcgcacttcgtgcatccagctaccagacctccacatgtgctggcctcccatctgcgctttgatagggctgagctcgagaggctcatgccaccctccactgtctacgtgaccatcctacgggaacccgcagcgatgttcgagagtctgttctcttactacaatcagtactgtcctgcgtttcggagagttcctaacgccagccttgaggcttttctgcgcgctccagaagcatactatcgggcaggagagcatttcgcaatgtttgcgcacaatacactcgcttacgatttggggggtgataacgagaggtcacctcgggacgatgcagcctatctggcaggcctcattaggcaggtggaggaagtgtttagcctggtaatgatagcagagtatttcgatgaaagtctggtcctgttacgcagactcctggcatgggaccttgacgacgtgctttacgccaaactgaacgcacgggctgcatcctccaggctagcagcgatacctgcagccctggcgagggccgcaaggacttggaacgctctcgatgctgggctgtatgaccatttcaacgccaccttctggcgccatgtggcccgtgcgggtagggcctgtgtggaaagagaagccagagaactgagagaggccaggcaacgactgctgcggcgatgttttggcgacgagcctctcttaagacccgctgcacagattcggaccaagcaattgcagccatggcaaccttcccgcaaagtcgatatcatgggctatgatttgcccggtggcggagctggtcctgcaaccgaagcctgcctgaagttggcaatgccagaagttcagtacagcaactacctgctccgaaagcagaaacggcgaggcggtgctcgggctagacctgagccagtgctggacaatccccctcctcgtcctatcagggtgctgccgcgtggaccccaaggcccttag

SEQ ID NO: 224188 - DNA, 1461 bp, synthetic construct
  misc_feature 1..1461: note = Description of Artificial Sequence: Synthetic coding sequence
  source 1..1461: mol_type = other DNA
atgggccctctctccccagcacgcaccctgaggctgtggggccctcgcagcttgggcgtggccctgggcgtgtttatgacgataggctttgctctccaattactgggaggaccttttcagaggcggctccctgggctccagctgaggcagcccagcgccccaagcctgcgccctgctctcccatcttgtcctccaaggcagaggctagtgtttttgaaaacccataagtccggcagctcctcagtgctttctctgctccatagatacggtgatcagcatgggctgcggtttgcccttcccgctcgctaccagttcggctatcccaaacttttccaggcttctagggtcaagggataccgcccacaaggaggtggcacccagctcccttttcacatcttgtgccaccacatgcgatttaacctgaaagaggtcttacaggtgatgccctcagacagctttttcttctctatcgtgcgggaccctgcagcccttgctcggagcgctttttcgtattacaagtccacaagtagtgctttccgtaaaagtccttcactcgccgctttcctggcaaacccccgaggcttttatcgacccggagcccgaggagaccactatgctcggaacctgctgtggtttgattttggcttaccatttcctccggagaagagagcaaaacgcggaaatatccatccaccgagagatccgaacccacctcagcttcaggtgctgccgtcaggcgcaggcccacgcgctcaaactttaaatcctaacgccctgattcacccagtcagtaccgtgactgatcaccgctctcagatcagctcgccggctagctttgatttagggtctagctcgtttatccagtggggtctggcttggctggactccgtttttgatctcgtgatggtcgccgagtactttgacgagagcctcgttctgttagctgacgctctgtgttgggggctggatgacgtagttggtttcatgcacaatgctcaggccggtcacaagcagggactctccactgttagcaattctggactaactgcagaagaccgccagctgaccgctagggcaagagcctggaacaacctggattgggccctgtacgtgcatttcaacaggtctctctgggctcgcattgagaagtacgggcagggaagactacagactgctgtggcagagcttcgggcacggagggaagctctcgctaagcattgtctggtggggggtgaagcatccgatccaaagtatatcacggataggcgcttccgacccttccagttcgggagcgctaaagtactaggatacatccttcgatcagggctatcgccccaggatcaagaggagtgtgaacgactggctacaccagaactgcagtacaaagacaaactcgatgcgaaacaatttccccctactgtatcccttccattgaagacgagtagaccactctctccttag

SEQ ID NO: 224189 - DNA, 1461 bp, synthetic construct
  misc_feature 1..1461: note = Description of Artificial Sequence: Synthetic coding sequence
  source 1..1461: mol_type = other DNA
atgggaccattgtcaccggcacgaacactcagactctggggacctagaagcttaggggttgcgttgggggtctttatgacaatagggtttgccctccagttactagggggtcccttccagagaaggctcccaggtctgcagctgagacagccaagcgctcccagcctcaggcccgctctcccttcctgccccccacgccagcgcctcgtgtttctgaagacccacaaaagcggctcatccagtgttctgagcctgctacatcggtatggcgaccagcacggccttcggttcgcccttcctgcacgctatcaatttggatatcctaagctgttccaggcctctcgggtaaaggggtatcgacctcagggaggcggaactcaacttcctttccacatcttgtgccaccatatgcggttcaaccttaaagaagtcctacaggttatgccctctgactcttttttctttagtatcgtcagggatcccgcagccttagccagatccgcattttcatattacaagagcacctcttctgcttttcgaaaaagcccttcgctggctgctttccttgcaaatccccgtggcttttataggcccggagcacggggtgatcactatgcacgcaatctgctgtggttcgatttcggcttaccctttcctcccgaaaagagagctaagcgcggaaatatccatcccccaagagatcccaacccaccccagttacaagtgctcccctcgggcgcaggccctagagcccagactctcaatcctaatgctctgatccaccccgtgtcaacggtgacagaccatcgaagccagatttcttcccctgctagcttcgacctgggatccagttcgttcatccagtgggggctcgcatggctagactcagtctttgacctggtaatggtggctgaatactttgatgagagtctcgtgctcctggccgatgctctatgttgggggttagacgatgtagtaggattcatgcacaacgctcaggccggtcataagcagggtctctctactgtgtccaacagcggacttaccgctgaggatcgccagctaaccgctcgtgccagggcctggaacaacctggactgggcactctacgtgcatttcaaccgctcactctgggccagaatagagaaatatggccaaggcagattgcagactgctgtcgctgagttacgcgcacgcagagaagccctggcaaaacactgcctggtgggcggtgaggctagcgatcccaaatacataactgatcgacgattccggccatttcagtttggttccgcaaaggttctgggctatatcctgaggagtggcctgtcgccccaggaccaggaagagtgcgaacggctggccacccccgagctccagtataaggacaagttggacgcaaagcagttcccccctactgtgagtctgcctctgaagacctcgaggccacttagcccatag

SEQ ID NO: 224190 - DNA, 1275 bp, synthetic construct
  misc_feature 1..1275: note = Description of Artificial Sequence: Synthetic coding sequence
  source 1..1275: mol_type = other DNA
atgacacctcggagccctacatccgcctttaggagctgcacagctgtgtcatcctgcttgtgcccctcctcatggccttggctccacctctcagtcacgtcaccatttcccgtcccccacgggcctagtctcagttgtcaggacgctgccgctctgggcacaagtgaacccggagggggaagcggaagccttcacgaccactggttgtgcactcccgctttagggagagcactgcccgaggaagtcctacaggtcatgccgtccgatagctttttcttcagcatagtgagggaccccgcagcattggctaggagcgcgttcagctactacaaatccacgtccagcgcatttagaaagtccccgtcactcgccgcttttctggctaatccaagagggttctacagaccgggtgcccgtggagatcattatgccaggaacctgctgtggttcgactttggcctgccctttccacccgagaaacgtgccaagcggggtaatatccatccacctagagaccccaatccaccgcagcttcaggttctgcccagtggcgctggccctagggcccagacactcaacccgaacgcactgattcatcctgtctctaccgtcacagaccacaggagtcaaatctcctcccctgcctcttttgacctggggtcctccagctttattcaatgggggctcgcgtggctcgactcagttttcgaccttgtcatggtggcagaatatttcgacgagagtctagtgttactggcagatgctctttgttggggcttggacgacgttgtcggttttatgcacaatgcccaagccggtcacaagcaggggctgtccaccgtgtccaacagcggacttaccgccgaagacagacagctgacagcccgtgccagggcctggaacaatctggactgggctttgtacgtacacttcaatcgatcactttgggctagaattgagaaatatggccagggcagactgcagaccgctgtcgccgaattacgggcacgcagggaagccctagccaaacattgtctggttggtggcgaagctagcgacccgaagtatatcacagataggcgttttcgcccattccagtttgggagcgccaaagttctgggttacatactgaggagtggcctgtctccccaagatcaggaagaatgcgagagactggccactcccgagctccaatacaaggataaactggacgcaaagcagttcccgccaaccgtgtcattgcccctgaagacaagcaggcctctgagcccctag

SEQ ID NO: 224191 - DNA, 1641 bp, synthetic construct
  misc_feature 1..1641: note = Description of Artificial Sequence: Synthetic coding sequence
  source 1..1641: mol_type = other DNA
atgccgggattccttgtccggatactaccgctgctcctagtgcttctacttcttggaccaactagaggcctcagaaacgccacgcaacgaatgttcgagatcgactactccagagacagtttcctgaaggacggtcagcccttcaggtatatcagcgggtctattcactacagccgcgttcctaggttctactggaaggatcgtctactgaagatgaaaatggccggactgaatgcaatccaaaccctgcctggctcttgtgggcaggtagtggggtctccatcagctcaggatgaggcgtctcctctgtcggagtggagagcatcttataattccgctggaagtaacattaccgatgcgtttttgtcccagcgcaagtgcgaacccaaaggccctctaattaatagcgaattctacactggatggctcgaccactggggccagcctcattctactattaaaaccgaagctgtggcctcctccctatacgacatccttgccaggggcgcatctgtcaacctgtatatgttcatagggggaacgaactttgcctattggaatggggctaattcgccctacgccgcacagcccacctcctacgattacgatgccccactgagcgaggccggagacctgacggaaaaatacttcgcactgagaaacatcatccagaagttcgagaaggtgccagagggaccaatccctcccagcacaccaaaatttgcctacggaaaagttactttggaaaagctgaagactgttggtgctgcactggacatcctgtgcccatccgggccaatcaagagtctatacccattaaccttcatccaggtgaagcagcactatgggtttgtcctatacaggaccacgctccctcaggattgttcaaaccccgcaccactctcgtcacccctgaacggtgtccatgaccgagcttatgtggctgtggacggcatcccccaaggcgtcctggagcgaaacaatgtgattacactcaacattaccggcaaggccggagccacattggatctcctggtcgagaacatgggcagggtgaattacggagcatatatcaacgactttaagggtttggtgtcaaacctgaccctgtcttctaatatcctgactgactggactatcttccctttggataccgaggacgcagtctgctcccatcttgggggatggggacatcgagattctggccaccacgatgaggcatgggctcataatagttctaattatacccttccggcattctatatgggaaattttagtatcccatcgggcatacccgatcttccacaggatacatttattcagttccccggttggactaaaggccaggtgtggatcaatggatttaatctgggacggtactggcccgcaaggggcccacaactgacgctgttcgtgccccagcatatccttatgacatctgcaccgaatacaattacagtattggaactggagtgggctccttgcagtagcgatgatcctgagctgtgtgccgtgacttttgttgataggcccgtaatagggtcctcagtgacctacgatcatcctagtaagccagttgaaaaaaggcttatgccacccccaccacagaagaacaaggattcctggctagaccacgtgtag

SEQ ID NO: 224192 - DNA, 1944 bp, synthetic construct
  misc_feature 1..1944: note = Description of Artificial Sequence: Synthetic coding sequence
  source 1..1944: mol_type = other DNA
atgttcgagatagattattcccgagattcattcctgaaggacggacaaccttttcggtacatcagtggcagcatccactattctcgggtgccccgtttctactggaaagatagactcttaaaaatgaaaatggcgggtctcaacgccatccagacctacgttccctggaatttccacgaaccttggccaggtcagtatcagttctctgaggatcatgacgtagaatacttcctgagactggcccatgaactggggctcctcgtaattctgcgccctggaccctatatttgtgccgagtgggagatgggaggtctcccagcctggctgttagaaaaggagtcaatcttattgaggtcatccgaccccgattatctggccgctgtagataaatggctgggcgtgctgctccccaaaatgaaacctctgctctaccagaatgggggacccgtgatcaccgtgcaggtggaaaatgaatacggatcttacttcgcctgcgacttcgactatcttcggtttctgcaaaaacggttccggcatcatctgggcgacgatgtcgtgttgttcactacagatggagctcacaaaacattcctaaagtgtggagccctacaggggctatacactacagttgacttcggaactggttcgaacatcaccgatgcctttctttcccaaaggaaatgtgaaccaaaggggccactcataaactccgaattttacaccggctggctggaccactgggggcagccccattccactattaaaacagaagctgtcgcctcatcgctatacgatatcctggcgcgtggggctagcgtcaatttgtacatgttcatcggcggtaccaactttgcgtactggaatggcgctaattctccatatgctgcacagccaacctcctacgactatgacgccccactctccgaagcgggagatctgactgagaaatatttcgccctgcgcaacattatccagaaatttgaaaaggtccctgaagggccaatccccccttcaaccccaaaatttgcttatggcaaggttactttggaaaaactgaagactgtgggagccgctctggacatactctgcccttctggaccaattaaaagcttgtatcccctcacattcattcaggtcaaacagcactacggattcgtcctgtatcgaaccaccctgccccaggattgttcaaaccccgctcccttgagtagtccgttgaatggagtgcacgaccgagcatatgtggctgtggacggaatcccccagggagtcctggaaaggaacaacgtgatcacattgaacatcacaggcaaggccggtgccacactagacctccttgtggaaaatatggggagggtgaactacggggcttacatcaatgactttaagggtctggtgagtaatctgaccctgtcaagcaacatcttgactgactggactatcttccccctcgatacagaagatgccgtctgtagccatcttggtggatggggacatcgggatagtgggcaccatgatgaagcttgggcacataattcctccaactacaccctgcccgcattctatatgggcaacttcagcatacccagcggcataccggacttgcctcaggacaccttcatacagttccctggctggaccaagggccaggtgtggatcaacggttttaatctgggacgctactggcccgctcgtggaccacagctgacgctgtttgtacctcagcatattttaatgacctctgcgccaaatacaataactgttctcgagctggagtgggctccctgttcctccgatgaccctgagctttgtgctgtaacattcgtggaccggcctgttattggttcttccgtgacgtacgatcacccgtcaaaacctgtggaaaaaagacttatgcccccaccaccacagaaaaataaagattcctggcttgaccatgtctag

SEQ ID NO: 224193 - DNA, 2034 bp, synthetic construct
  misc_feature 1..2034: note = Description of Artificial Sequence: Synthetic coding sequence
  source 1..2034: mol_type = other DNA
atgccgggttttttggttaggatcctgccgctgctgctcgttcttctattattaggacccaccagaggactccggaacgcaacccagcgcatgtttgagatagactatagtagagactcctttcttaaggacgggcagccatttagatacatctcaggctctattcattactcccgggtccctcggttttattggaaagataggcttttgaagatgaaaatggctgggctgaacgccatccaaacatacgtcccctggaacttccacgaaccctggcctggacagtaccagttttccgaagaccacgatgtagaatacttcctccggctggcccacgagcttggcctgttggtgatcttacgcccaggaccatatatttgtgcagagtgggaaatgggtggactacccgcttggttgctagaaaaagaatccatcttgttgaggagttccgacccagactacttggctgcagtagataagtggctgggcgtcctgctgcccaaaatgaagccgcttctgtaccaaaatggcggacccgtcatcaccgtccaagtcgagaacgaatatggatcatatttcgcgtgcgatttcgactaccttcgattcttacagaagaggtttcgccaccacctgggagacgatgtggtgttgttcacgacagatggggctcacaagaccttcctcaagtgtggcgctctacaaggattgtacaccaccgtcgattttggcacaggaagtaatatcacagacgcctttctgagtcagagaaagtgtgaaccaaagggacctctgatcaacagtgaattttacacagggtggctcgatcattgggggcagcctcactcaaccatcaagaccgaagcagtggcctctagcctctatgacatcttggctcgcggagcgagcgtgaatctgtatatgtttattgggggaacgaacttcgcatactggaacggggcaaactccccctatgctgcccagcccacgtcttatgactacgacgcaccactcagcgaggcgggagatttgactgagaagtatttcgctctgagaaacatcatccaaaagttcgaaaaagtgcccgaaggaccaatacccccatctaccccaaaatttgcatacggaaaggtcacactggaaaagctgaaaaccgtcggggcagctttggatattctgtgtccttctggtccgataaagtctttgtatccgctgactttcattcaggtgaagcagcattacggcttcgtgctgtaccggacaacgctgccgcaagattgttcaaatcccgcaccactgtcttctcctcttaatggagtccatgacagggcatatgtcgccgttgatggaattccccagggggtattggagcgaaataatgtcattacgttgaatatcactggtaaggcaggagccactctggacctcctggtggagaacatgggacgcgtgaactacggagcttacattaatgactttaaggggttagtaagcaatctgacgctctcttccaacatcctgacagattggacaatcttcccattggacacagaggatgcagtatgttcacatttgggtggctggggtcatcgcgacagcgggcatcatgacgaagcctgggcccataactctagcaactacacacttcccgctttctatatgggtaatttctctatacccagcggaatccctgatttgccccaggacacctttatccagttccctggctggacgaagggacaggtttggatcaatggattcaatctggggaggtactggcctgctaggggtccacagctgactctgttcgtgccacaacatattctgatgacctcagcccctaacacaattacagtgctggaattggagtgggctccctgttcatccgacgatccggagctgtgtgctgtcacctttgtcgatcgaccggtgatcggctcgtcagtgacgtacgatcacccttccaagcctgtagagaaacggctgatgccccctcctccccagaaaaataaggattcctggttggatcacgtgtag

SEQ ID NO: 224194 - DNA, 2178 bp, synthetic construct
  misc_feature 1..2178: note = Description of Artificial Sequence: Synthetic coding sequence
  source 1..2178: mol_type = other DNA
atgcctggttttctggtgaggatcctgccactgctgttggtgttactcctccttggtcccacaaggggtctgcgcagcagatttctgccctgggcattccatttgcccagacaggcgcctaagtcccagctgccgctgcacaagcgcggaacaaagaccgcgcctaacgagcacgcttcctccaaccgctccggccgtcgacgcagaagacagcagtggaacgcaacacagagaatgttcgagatagattacagcagagattccttcctgaaagacggacagcctttcagatatatcagcggctctattcattactcaagagtgccgagattctattggaaagaccgactgttgaagatgaaaatggccggattgaacgctatccaaacttatgtcccgtggaactttcatgaaccctggcctggacagtatcaattctcggaagaccacgatgtggagtactttctgcggctggcacatgaactaggattgctcgtaatcctacggcctggcccatatatatgtgccgagtgggaaatgggagggcttccagcctggctccttgaaaaagagtcaatcttgcttcgctccagtgaccccgattacttggccgcagtcgacaaatggctaggcgtactactgccgaagatgaagcctcttctgtaccagaacggaggccctgttataactgtgcaagtggaaaacgagtatggatcctattttgcttgcgactttgattacttgaggtttctgcagaagagatttagacaccatctaggagatgacgttgttctcttcacaaccgacggcgctcataagacattcctgaagtgcggtgcccttcaagggttatataccacagtcgacttcggtactggcagtaacatcactgacgcctttctcagtcagcgcaagtgtgagcctaaagggccactcatcaactccgagttttatacaggctggttggaccattgggggcagccacacagtacaatcaagaccgaggctgtggcttccagcctgtacgatatcttggccagaggagcttccgtcaacttgtacatgttcatcggaggcacaaattttgcatattggaacggcgcaaattcgccctacgctgcacaaccaacctcttatgattatgatgccccattatcagaggccggagatctgactgaaaaatacttcgccctgcgaaatattatacagaagtttgaaaaggttcccgaagggccaataccaccatcaacacctaagtttgcctacgggaaagttacgttggagaaattgaaaacagttggcgcagcgctggacatcctgtgtccttctggacccattaagtctctgtaccctctgacctttatacaggttaaacagcattacggattcgtgttgtatcggaccactttgccccaagattgttctaatccagcccctctttccagcccgcttaatggagtgcatgaccgcgcatatgtggctgtagacgggattccacagggggttctggagagaaataacgtcatcactctcaacataacgggtaaggctggcgctactcttgatcttctcgttgaaaacatggggcgtgtgaattatggagcttatatcaatgattttaagggcctggtgagcaacctcacactgtcctctaatatcctcaccgactggaccatctttcctttggacactgaagacgctgtgtgttcccatttaggagggtggggccatagagactcagggcaccatgatgaagcctgggctcacaacagtagcaattacactctacctgccttctatatggggaatttttcgatccccagcggaattcctgacctccctcaggatacctttatccagtttccaggctggacaaaaggccaagtctggatcaatggatttaacctgggaagatattggccagcccgaggaccacagctcaccctctttgttccacagcatatcctgatgacaagcgccccaaataccattacagtgctggagctggaatgggcgccttgctctagcgacgatccggagctatgcgccgtcacgttcgtggacagaccagtcattgggtcctctgtgacttatgaccatccaagcaaacctgtcgaaaaacgactcatgccaccccctccacagaagaacaaagactcctggctggaccacgtgtag

SEQ ID NO: 224195 - DNA, 2058 bp, synthetic construct
  misc_feature 1..2058: note = Description of Artificial Sequence: Synthetic coding sequence
  source 1..2058: mol_type = other DNA
atggctgagtggctgttgtcagcaagttggcagcggcgtgcgaaagccatgacggccgctgccggaagcgccggtagggccgctgtgccactactcctttgtgcactgctagctcctgggggtgcctacgtgctagacgactcagatggactgggacgggaatttgacggaattggagcggtgagtggtggtggtgcaacgagcaggctgctggtcaactacccagaaccctatcggagccagattcttgattatctgttcaaacccaatttcggagccagcctgcacattttgaaggtggaaatcggcggtgatggccagacaacagatggaaccgagccctcccacatgcactacgctctggacgaaaactatttccggggatatgagtggtggctgatgaaagaagcaaagaaacggaatccaaacattacactaataggcctgccctggtccttcccagggtggcttggtaagggtttcgactggccatacgtgaatcttcagctgaccgcctactatgtggtgacttggatagtgggcgctaagcggtaccacgacctcgatatcgattatatcggaatttggaacgaaagatcttataacgcaaattacattaaaatcttaaggaagatgttaaattaccagggcctgcaaagagttaagatcattgcttctgacaacctgtgggaatctatcagtgcaagtatgctcctcgatgccgagctcttcaaggtggtggatgtcatcggggcacattaccctggcactcacagcgctaaggatgccaaactgacaggcaaaaaactttggtcgtctgaagacttttcgacactgaacagcgacatgggtgctggctgttggggacgaattcttaaccagaattacattaacggatatatgacttctaccatcgcctggaacctggtggcttcttactatgagcaactgccttacggccgttgcggtctgatgaccgcccaagaaccctggtcaggccattacgtagtggagtcccctgtttgggtgtccgctcacacgacacagtttacgcagcctggctggtactatctaaagactgtgggacacctggaaaagggcggtagttatgtggccctgaccgatgggcttggcaatttaacaatcattatcgaaaccatgagtcacaagcacagcaagtgtattaggccttttttgccttattttaacgtgagccaacagtttgcaacctttgtgctaaagggctcattctctgaaatcccagagctccaggtgtggtacaccaagttaggtaagacttctgagaggttcctgttcaagcagctggatagcttgtggctccttgacagcgacggatcttttacactctctttgcatgaagacgaattgttcactctcacaactttgactaccggcaggaagggcagctacccgctaccgccaaaatcccagcctttcccctctacctacaaagacgacttcaatgttgactatcctttcttttctgaagccccaaacttcgccgaccagaccggcgtcttcgagtacttcaccaatattgaggacccaggagagcaccacttcactctgaggcaggtgcttaaccagcgtcccatcacatgggcggcagacgccagtaatactatctctatcattggggactacaattggaccaaccttacaataaagtgcgatgtctacattgaaactccagatacagggggagtctttatcgcaggtagagttaacaagggcggtattttaatccgaagcgccaggggcattttcttttggatttttgctaatggctcctacagggtgactggcgaccttgcaggctggatcatctacgctttgggtagagtggaagtcactgcaaaaaaatggtacactctgacgctgacaattaagggccattttaccagcggcatgctaaacgacaaatccctgtggaccgacatcccagtcaacttccccaagaatggatgggcagccatcggcacgcattcctttgaatttgcgcaatttgacaacttcctcgtggaagccacgagatag

SEQ ID NO: 224196 - DNA, 1989 bp, synthetic construct
  misc_feature 1..1989: note = Description of Artificial Sequence: Synthetic coding sequence
  source 1..1989: mol_type = other DNA
atggctgaatggctcctgagcgcttcttggcagagaagggcgaaggccatgactgccgcagccggaagcgctgggagagccgctgtgcctctgctcctctgcgccctgctagcacccggtggagcttatgtcctggacgacagtgatggattagggagggaatttgacggaatcggtgctgtatcaggtgggggacctaactttggcgcatcccttcacatcttaaaggtcgaaattggcggagacggacagacgactgacggaactgagccttcccacatgcattatgctctcgatgagaactacttccggggatatgaatggtggctgatgaaagaggctaagaaaagaaaccctaacatcacacttatcggcctgccatggtcgtttccaggctggcttggtaaagggtttgactggccgtacgtcaatttgcaactgactgcctattacgtggttacctggatcgtgggcgcaaagaggtaccacgatctggacatcgactacattggaatatggaacgagcgcagttataatgccaattatattaagattctgaggaaaatgttgaactatcagggattacagagagtaaaaataatagcgtcagacaacttgtgggaaagcatctcagcctccatgctccttgatgcagaactctttaaggtcgtcgacgttataggggctcattaccccggtacacacagcgcgaaagatgctaaactgaccggaaagaagctgtggagttcagaagacttcagcactttaaactccgatatgggggctggttgttggggaaggattctgaaccagaactacattaacggctacatgaccagtactattgcctggaatcttgtggcttcctactacgaacagcttccctacggtcgttgtgggctcatgaccgcccaggagccttggtcaggacactatgtggttgagtccccggtctgggtgtctgcccatacaacgcagtttacacagcccggttggtattatcttaagactgttggacatctcgaaaagggcggatcctacgtggctcttactgacggcctgggaaacctgacaattatcatcgaaaccatgtcacataagcactccaagtgcatacggcctttcctgccctacttcaacgtgagccaacaattcgccacttttgtcctgaagggcagtttttctgagattcctgaactccaggtgtggtacacaaaactcggtaagacatcggagcgttttttatttaaacagctggattccctctggctgctcgactctgatggatcttttaccttatcacttcacgaggatgaactttttaccctcactaccttaaccaccggacgcaaaggctcatacccactgccacccaaaagccaaccattcccaagcacatataaggatgactttaacgttgactatcctttcttttctgaggcccctaactttgcagaccagaccggtgtatttgagtacttcacaaatattgaggatccaggcgaacatcactttaccctccggcaggtactgaatcagagacctataacttgggctgccgatgcgagcaacacaatttccatcattggtgactataattggactaacttgacaataaaatgtgatgtgtacatcgaaactcctgacaccggaggagtgttcatcgcaggtcgagtcaacaaaggcggtatcttgatcaggtccgcccgtggaatctttttctggatctttgctaacggctcctaccgggtcaccggggacctcgcaggatggataatctacgcattaggcagagtggaggtgacagccaaaaagtggtatacccttaccctgactattaaggggcactttacctccggaatgctgaatgataagtcgctttggacagatattcccgtcaacttccctaagaacggatgggcagctattggcacgcatagctttgagttcgcccagtttgacaatttccttgtggaggccacaaggtag

SEQ ID NO: 224197 - DNA, 1980 bp, synthetic construct
  misc_feature 1..1980: note = Description of Artificial Sequence: Synthetic coding sequence
  source 1..1980: mol_type = other DNA
atgctgggcaagtcacacggcagagccacccatggacctcttccccttgcagatctgggtattcatctcccatgcgtaaaggtgcttcatcaggtgaccccagaagaaaagccggctgctactagtcgcttgctcgtgaactatcctgagccctaccgtagtcaaattctagattacctgtttaaacccaactttggagcgtccctccacatcttgaaagttgaaatagggggagacggccagacaacagatggcacagaaccatcccacatgcactatgccttagacgagaactattttcggggatatgaatggtggctgatgaaagaggctaaaaaacggaaccctaatattacacttattgggttgccatggtccttcccaggttggttgggcaaaggattcgattggccttacgtgaacttgcagcttactgcctactatgtcgtcacctggattgtgggtgctaagcgctatcatgatctcgatattgactatatcggcatatggaacgagcgctcttataacgcaaattatatcaagatacttcggaagatgctgaactaccagggcttgcagcgcgtcaagattatcgctagcgataacctgtgggaatctatatccgcaagcatgctgctggatgcagaattatttaaagtcgttgacgtgattggcgctcattaccccggaactcacagtgcaaaggacgcaaaactgacgggtaagaagctatggtctagcgaagacttctccaccttaaatagcgacatgggagccggttgctgggggcgtatattaaatcaaaattatataaatggatatatgacctcaaccatagcctggaatttagtcgcgtcctattatgagcaactgccctacggtcggtgtgggttgatgaccgcccaggaaccttggtcgggtcactacgttgtagaatcgcccgtctgggttagcgcacacacaactcaatttacacaaccgggatggtactatctgaagacagtgggacacctggagaagggtggatcatacgtggctctgaccgatgggctaggaaatctaactattatcattgagacaatgagtcataaacacagcaaatgcataagacccttcctgccctatttcaacgtgtctcaacagttcgccacatttgtactgaaagggagcttttctgaaatccctgagcttcaagtctggtacacgaaactcggtaagacctcggaaaggttcctgtttaaacagctggactccctctggctgctcgattcagatgggtcgttcactctcagcctgcacgaggatgagttgttcactctgacaactctgactaccggcagaaaaggatcttatccacttcctcccaaaagtcaaccgtttcctagcacctacaaagacgatttcaatgtggactaccctttcttctctgaggccccaaacttcgccgatcagacgggcgtcttcgaatacttcacaaatatcgaagaccccggtgaacaccactttaccctgaggcaggtgctgaaccagcgtccaataacttgggcagctgatgcaagcaacacaatcagcatcattggagattataactggacgaacctcacaatcaagtgcgacgtctatattgaaaccccagatactggcggtgtttttatcgccggtcgtgtcaataagggaggcatcctgatccgaagcgctcgtggcatcttcttctggatttttgccaatgggtcatacagggtgactggggatcttgctgggtggattatttacgctctgggcagagtcgaagtgacagcaaagaagtggtatactctgactctcaccatcaagggacatttcacatctggcatgctgaacgacaaaagtctgtggacagatattcctgtcaattttcccaagaatggctgggccgcaatcgggacccactccttcgaattcgctcagttcgataatttcctggtcgaggcaacgcgttag

SEQ ID NO: 224198 - DNA, 1425 bp, synthetic construct
  misc_feature 1..1425: note = Description of Artificial Sequence: Synthetic coding sequence
  source 1..1425: mol_type = other DNA
atgctgaattatcagggtttacagcgggtgaagattatcgcatccgacaatctgtgggagtccatatccgcttccatgctcctggacgccgagcttttcaaagtcgtcgatgtgatcggagcacactaccccggtacccattccgctaaggatgcaaagctcaccgggaagaaattatggagtagtgaggatttctccacccttaacagtgatatgggagcaggctgctggggaaggattctcaaccaaaactacattaatgggtatatgacctcaaccatagcctggaacttggtggcttcctattatgaacaacttccttacggtcgctgtggattgatgactgcccaggagccctggagcggacattacgttgtcgagtctccagtgtgggtttccgcgcacacgactcaatttacccagcccggttggtactacctcaagacggtgggccatcttgagaaagggggaagctacgtggcactgactgatggcctgggcaacctgaccataatcatcgaaaccatgtcacacaaacactccaaatgcataagaccgttcctgccatattttaacgtctcacagcaatttgccacttttgtgctgaagggcagcttcagcgagatccccgagttacaggtttggtatactaaattaggcaaaacttccgaacggttcctatttaagcaacttgattctctgtggctcctcgacagcgatggatccttcactttgagtctgcatgaggacgaattgttcaccctgacgaccctgacgacaggacggaaaggctcctaccccctgccgcctaagtcacagcccttcccatccacctacaaagacgatttcaacgtggattatccttttttttccgaggcacctaattttgccgatcaaactggcgttttcgaatatttcaccaatatagaagacccaggggagcatcattttacgctgaggcaggtactcaaccagcgccctatcacttgggctgcggatgcctctaataccattagtatcattggcgactataactggaccaaccttactatcaaatgtgacgtgtacatagagacaccggacacagggggagtctttatcgcaggcagggtgaacaagggaggcattcttattcgctcagccaggggaattttcttttggatctttgctaatggaagttaccgcgtcaccggtgaccttgcaggctggataatctacgctctcggacgtgtagaagtgactgctaagaagtggtatacactgaccctgaccattaaagggcatttcacttcaggaatgctcaacgacaagtccctctggactgatatcccagtgaacttcccaaaaaatggctgggcggcaataggcactcacagttttgagtttgcacaattcgacaattttttggtggaggccacccgctag

SEQ ID NO: 224199 - DNA, 1770 bp, synthetic construct
  misc_feature 1..1770: note = Description of Artificial Sequence: Synthetic coding sequence
  source 1..1770: mol_type = other DNA
atggggttcatggtagccgacctgtgggctacctcccggttgctcgtgaactaccctgaaccgtaccggagccagatcttagattatctttttaaacccaacttcggtgcaagtctccatatactgaaagtagaaatcggaggagacggccagaccactgacggtactgagccatctcacatgcactacgcacttgatgagaactacttccgtggttacgaatggtggctgatgaaagaggctaaaaagagaaatccgaatatcactctgattggcctgccttggagcttccctggatggctggggaagggtttcgactggccttatgtgaatttgcagttaactgcctattacgtggtaacttggattgttggcgctaaacgttaccacgacctcgatatcgattatatcggcatatggaatgagcggtcctacaacgcaaattacattaagatcctgagaaagatgctaaactaccaagggctgcagagagtcaagataatcgcatcagacaacctgtgggagagcatatcggcgagcatgctgctagacgccgagctattcaaagtggtagatgtcatcggtgctcactatccaggaacccattcagccaaggacgcaaagctcacaggcaaaaaactgtggtcctccgaggacttttccaccttaaatagtgacatgggcgctggctgttgggggaggatcctaaatcagaactacatcaacggctacatgactagtaccattgcttggaacttggtggccagttactacgaacagctgccatacggcagatgcggcctaatgacagcccaggaaccctggagtggccactatgttgtggagagcccagtctgggtaagtgcacacaccacccagttcacacagcccggttggtactatctcaaaaccgtggggcacctggagaaaggcggttcctatgtggccttaactgatgggctcggtaatctcaccattattattgaaacgatgtcccataagcacagcaaatgcattcgcccattccttccatatttcaacgtgtctcagcagtttgctacgtttgtgttgaaagggtctttctcggaaattccagaattacaagtttggtacaccaaattaggaaaaactagtgagagattcctcttcaagcagctcgactccctgtggctcctggatagtgatggcagcttcacactgagccttcatgaggacgagttgttcaccctgaccaccctcaccacaggaagaaagggatcctacccactcccaccaaaatcacagccatttccctcaacatataaagatgactttaatgtagactacccattcttcagcgaggcccctaatttcgctgatcaaacaggggtttttgaatactttaccaatattgaggaccccggtgagcaccactttaccttaagacaggttctcaatcagcgcccaataacttgggccgcagacgcttctaataccatcagtataatcggtgattacaactggacaaacctaaccatcaagtgcgacgtgtatattgaaacgcccgacaccggaggcgtttttatagccggacgagtgaataagggtggcatcctcattagaagcgccagagggattttcttctggatattcgccaacggctcctaccgcgtgacgggagatctcgccggatggattatctatgccctggggagagtcgaagtaactgccaaaaaatggtataccctaacattaacgatcaaagtggctggacggagaaagaagacctag

SEQ ID NO: 224200 - DNA, 372 bp, synthetic construct
  misc_feature 1..372: note = Description of Artificial Sequence: Synthetic coding sequence
  source 1..372: mol_type = other DNA
atggcacggggatccgctcttttgctcgcatccctcctgctggccgctgcacttagcgcctcggccggactctggagcccggctaaggagaagcggggttggacattgaacagcgccggatacctactgggaccacacgcagtcggcaaccataggtctttctctgataagaatggcctcaccagtaagagagagctgaggcccgaggacgatatgaaacccggaagcttcgatcgctctatcccggagaataacattatgagaactattatagagtttttgtctttcctgcatctgaaggaagccggagctctcgaccgattactggatctccctgctgcagccagttccgaggacatcgagagaagttag

SEQ ID NO: 224201 - DNA, 1050 bp, synthetic construct
  misc_feature 1..1050: note = Description of Artificial Sequence: Synthetic coding sequence
  source 1..1050: mol_type = other DNA
atggagttggctgttggcaatctgtcagaaggcaatgcaagctggccagaacctcctgccccagagccgggaccactgtttggaattggcgtcgaaaatttcgtcaccttggtggtgttcgggttgattttcgcactcggcgtgctggggaactcgctggtgataacagtactggcgcgatccaagccaggaaaacctaggtcgactactaatttatttatcctgaatctcagcattgccgatctggcataccttttgttctgtatcccgttccaggcgacggtgtatgcacttccaacatgggtcctcggggctttcatttgcaagtttatacattatttcttcaccgttagtatgctcgttagcatctttaccctggccgctatgtctgtcgatagatacgtggccattgtgcacagtagacggtcctcgtcccttagagtgagtagaaatgcactcctcggggtgggctgcatttgggcgctctccattgccatggcgagccctgtcgcatatcaccaaggactcttccaccctcgcgcttctaatcagaccttctgttgggagcaatggcctgaccctagacacaaaaaggcctatgtggtgtgcactttcgtatttggctacttgctaccgctgctgctgatatgcttttgctacgctaaggtactcaatcatcttcataaaaagctgaaaaatatgtccaaaaagagcgaagcctccaagaagaagaccgcccagactgttttagtggttgtggtggttttcggtatcagctggctgcctcaccatatcatacacctgtgggccgagttcggagtgttcccccttactcccgctagctttttattccgtataaccgctcactgcctcgcgtacagtaactcctccgtcaacccgataatttacgccttcctgagtgagaattttaggaaagcctataagcaggtctttaagtgccatattagaaaggattctcatctcagcgataccaaggagagtaagagccgaatagacacgcctccgagcaccaactgtacccatgtctag

SEQ ID NO: 224202 - DNA, 1164 bp, synthetic construct
  misc_feature 1..1164: note = Description of Artificial Sequence: Synthetic coding sequence
  source 1..1164: mol_type = other DNA
atgaatgtgtctggctgcccaggcgctggcaatgcttcccaggcaggaggcggaggcggatggcatcctgaggcagtgattgtacctctgctgttcgccctcatcttcttggtggggactgtggggaacaccctcgttttggccgtcctgttgcggggaggccaagcggttagtaccacgaatttatttattctgaacctaggagtggcagacctgtgctttattttgtgctgcgttccattccaagctacaatttacaccctggacggctgggtgttcgggtcactgctatgtaaagcggtgcactttcttatattcctgaccatgcacgccagtagctttacactggctgccgttagcctcgacagatatttagcaattaggtacccgctccattctagggaactcagaacaccacgcaacgctttggccgctatcgggctgatctggggactgagcctgctcttctctgggccatacctgtcttattatcggcagtctcaattggccaacctgaccgtgtgtcatcccgcttggtcagcccctcggaggcgcgctatggatatctgcaccttcgtattctcgtatctgcttcctgtgctggtgctggggctgacctacgccaggacgctgcgctatctctggcgcgctgtcgacccagtagctgcaggcagcggagcacggagagccaaaaggaaggtgaccaggatgatcctcatagtcgccgcactcttctgcctgtgttggatgccccaccacgccctgatactgtgtgtgtggtttggccagtttcctcttacgagggcaacctacgcccttcgtattctgagccatcttgtcagctatgccaattcgtgtgtgaaccctatcgtatacgctttggtgagtaaacattttcgcaaaggtttcaggaccatttgcgcagggctgctgggaagggcaccaggcagggcttctggtagagtgtgcgccgctgcgcgtggcacgcacagcggatctgtgctcgagcgcgagtccagcgatcttctgcatatgtctgaagccgctggcgctttacggccatgccccggagcatcccagccctgcatcttggaaccatgcccaggtccctcgtggcaagggccaaaagccggagatagcatcctgacagtcgatgttgcttag

SEQ ID NO: 224203 - DNA, 1107 bp, synthetic construct
  misc_feature 1..1107: note = Description of Artificial Sequence: Synthetic coding sequence
  source 1..1107: mol_type = other DNA
atggctgacgcccagaatatatccctggatagcccagggtccgtgggtgcagtagccgttccagttgttttcgctctgatatttcttctggggacggtaggtaacggtttagttctggcagtgctgctgcagcccggtcccagtgcatggcaggaacccggttccacaaccgatctttttatcctaaatctggccgtggcggacctgtgcttcattctgtgctgcgtgccgtttcaggccactatttacactcttgacgcgtggttgttcggtgctcttgtgtgtaaggcagtacacctacttatctatctgacaatgtatgctagctcttttaccctcgcagccgtgtctgtggaccgatatcttgctgtccgccacccgttgcggtcaagggctcttcgaacacccagaaatgcgagagccgcagtcgggttggtgtggttactcgccgctctgttctcagctccctacctgtcttactacggcaccgtccgctatggcgctctagaactgtgcgtgccagcctgggaggatgcgagacgccgagctctggacgttgctacatttgctgccggatatcttctgcccgtcgcagtggtgtcccttgcttacgggcgaactctccgctttctgtgggctgccgtcggacccgcaggcgctgcagctgcggaggcacggcgaagagccaccgggcgagctggtcgggctatgctcgccgtggcggcactctacgctctctgctggggacctcaccatgccctgatattgtgtttttggtacggaaggtttgcctttagcccggcaacatatgcctgccgattagcctcccactgtttggcttatgccaactcatgcctcaatcctcttgtctacgccctcgcttctcgccactttagagccagatttaggagactatggccatgtgggagaagacggaggcatagggctcgtagagctctgagaagagtgcggcctgcctcaagtggaccacccggatgtcccggtgatgccagacctagcggacgcctgctcgccggaggaggacaagggccagagccacgcgaagggcctgtccacgggggagaagcagcccgaggaccagagtag

SEQ ID NO: 224204 - DNA, 1959 bp, synthetic construct
  misc_feature 1..1959: note = Description of Artificial Sequence: Synthetic coding sequence
  source 1..1959: mol_type = other DNA
atgggcaacttacagtcggagccatccgccggagggggatcccgcaaggtccagccatccgatagggcgccagatagcagacgcacatccctggtggagcccgaaatgacatctcaggccatgaggctcaccagaggattgggcgtctggttcccaggatcagccacacctcccggactcatggtccccagggagccacaggcaagcccgtcaacactgcccttaacattggagcggccatctccagtgatgccgccacctgaagaggccgcagctgtgtctgccccaccgcctgctccagccggaacactgctccctggaccatcaaagtggcaaaagcctgcgggaactcctgttccaagaattcgcagactcctcgaggcttcacatcgtggtcaaggggatccaccatcactgcggcctctgaaaccgccaccccctcccaggcagttgtccgttaaggacaccgtccctcgagcgccatcccaattcccccctcccctcgaaacgtggaaaccgcctccgcctctaccctccgaacgacagcctgctgatagacgtataactccagcgctggctacccctgcctcaccaccaactgaatcccaggcaggacccaggaaccaaggacagactgcgggacgcgcacgtgggggagctccacctcacgccggtgagggcgaaatggcccaacccgctgactcggaatccgggctgtctttgctgtgtaaaattactttcaaatcacgaccttccctggccccaccagccgcaagttcatctctcgcggcaaaggctagccttggcggaggtggaggtggcggtctgtttgcagcctcgggtgcaatttcatacgcagaggtcttgaaacagggacccctacctcctggagctgctcggccactcggagaagtgtcccggggtgctcaggaggctgagggcggagacggtgacggcgaggggtgctccgggcctccttctgcccctgcctctcaggccagggctttgccccctcctccgtacacaacatttcccggttccaaacccaagttcgactgggtaagtgccccagacggcccagaacggcacttccgcttcaatggggcaggcggagggatcggcgcaccaagacgaagagcagctgctctctcgggtccatgggggtccccaccacccccacccgaacagattcattctgcaccaggccctaggcgacccgcacctgctttattggctccaccaacattcatctttcccgctcctacaaatggagaacctatgcggcctggcccacctggcctgcaggaacttccaccgctaccgcctcctacaccccctcctactcttcagcccccagccctccaaccgacaccccttccagtggcaccgccactcacaccaggcctgggccataaagaaagtgccctcgcccctacggccgctccagctcttccgcctgctcttgccgctgaccaagcccctgcgccttctccagcgccagcccctactgtggccgaaccctctccacccgtcagcgccccagctccggcagccgctcccatcaagactcggactcgcagaaacaagggctcccgcgcagcccgaggagcgacaaggaaggatggactgcatggggacgggccacgcgagcgagccacggctactgtcccggatagcagtggaggtggtgggggtggcagcggagcctctcaaacaggcgctgccaatactagagcagccagacactggttgcctttccaagtcctgaattcctgcccctgcaaatgctactgtcaccaccaaccacgccataggcgcttaccaaggaatgtgtccgcctggctctccacgagcaccaaccacctgggggagccaccctgggtggctacaatcaagctttctggctccctcgtggctaagctggagcattatgacttgcaggctacacactcaaattag

SEQ ID NO: 224205 - DNA, 675 bp, synthetic construct
  misc_feature 1..675: note = Description of Artificial Sequence: Synthetic coding sequence
  source 1..675: mol_type = other DNA
atggggaaccttcagtccgagccaagtgctggcggaggcagtagaaaggtgcagccaagcgatagggctccagacagcagacgcacaagcctcgtggagccagagatgacgagccaagccatgagactcacccggggtcttggagtttggtttcctggaagtgctacgccaccaggccttatggtcccgcgtgagcctcaagcttccccatctactttgcctcttaccctcgagaggccgagccccgtgatgccccctccagaagaagctgccgctgtgagcgccccacctcccgctcccgctggcaccctgctgccaggacccagtaaatggcagaagcccgctggcacccccgtgccgcgaatccggagattattagaagcatcccaccgcggacaaggtgatcccccaagcctgagaccactgaagcccccaccgccaccacgccagttatccgtcaaagatacggtccccagggctcccagccagtttcccccacctcttgagacctggaaacctccgccacctctgcccagcgagcgccagcctgcagaccgtcggattaccccagctctcgctacgccagcctgtgttagagctagaactcggggatgcgcgcaccaggatccccacgcccaggagcagggctttccgtgttcccctggacgcgactag

SEQ ID NO: 224206 - DNA, 2094 bp, synthetic construct
  misc_feature 1..2094: note = Description of Artificial Sequence: Synthetic coding sequence
  source 1..2094: mol_type = other DNA
atggcccgacttgttgccgtatgcagggacggggaggaagagtttcccttcgaaagacgtcagatacctctgtacattgacgatacactgaccatggtgatggagtttcccgataatgtgctgaacctggacggacaccagaacaacggcgcacaactgaaacagttcattcagaggcacggcatgcttaaacagcaggacctttcgattgccatggtggtaacgagcagggaggtgctgtcagctctttcacaattggtgccctgtgtaggatgtagacggtctgtcgaacgccttttcagccagctagttgagagcggaaatcccgcactggagccccttacagtaggcccaaagggcgttcttagcgtgaccagatcttgtatgactgatgctaagaagctttacacgctgttttacgtgcatggaagcaagctgaatgatatgatcgacgctatacctaagtcaaaaaaaaataaaagatgtcagctgcatagccttgacactcataagcctaagcctcttggtggctgctggatggatgtatgggaactgatgtcgcaggaatgcagagacgaggtggtcctgatagactcttcatgtttgctggaaacccttgaaacttacctgaggaagcacagattttgtacagactgtaaaaataaagtattgagggcatataacattttgatcggcgaactggactgctcaaaagaaaaagggtactgcgccgcactgtacgaaggtctcagatgttgcccccacgaaagacatattcatgtctgctgcgagactgactttatcgcacacctgttaggtcgggctgagcctgagtttgcgggtggcagacgagagagacatgccaaaaccatcgacattgctcaggaggaagtactgacctgtctcgggattcacctgtacgagcgactacacaggatctggcagaaactacgggcagaagaacagacctggcagatgcttttttatctaggtgtggatgccctcaggaagagcttcgagatgacggtcgagaaggtgcagggtatttcccgacttgaacagctctgtgaagaattcagtgaggaagagagagtccgggagctcaaacaagaaaagaaaagacaaaaacgtaagaaccgccgtaagaacaagtgtgtgtgcgacattcctacgccgttacagacggcggatgagaaagaagtgtcacaggaaaaagagactgacttcatcgaaaacagttcttgcaaagcctgcgggtcaactgaagacggcaatacatgtgtggaggtgatagtaactaatgaaaatacaagttgcacttgtccctcctctgggaacctgttagggagtccaaaaattaaaaaaggactcagcccccattgtaacggatcagattgtgggtattcctcatccatggaaggctcggagacagggtccagagaagggagtgacgttgcgtgtactgagggcatatgtaaccacgacgagcatggagacgacagttgcgttcatcattgcgaggataaggaagatgacggcgactcctgcgtggagtgctgggcaaactcagaagaaaatgatactaagggcaagaacaagaagaaaaagaagaaatcaaaaatcctgaagtgcgacgagcatattcagaagctgggaagctgtataactgaccctggtaaccgcgagacttccggaaatactatgcataccgtgtttcaccgcgacaagacaaaggacactcacccggagagctgctgcagctctgaaaaaggcggtcagccactgccctggttcgagcaccgtaagaatgtaccccaatttgcagagccaactgagaccctcttcggacctgactcaggaaagggggctaagagcctagtggagttattggacgaatccgagtgcacctccgacgaggaaattttcatttctcaagacgaaattcaaagtttcatggccaacaatcaatcattctactctaatcgcgaacagtatcgacagcacctgaaggagaagttcaacaaatactgtcgtttgaatgatcacaagcggcctatttgcagcggttggctcacaacagctggagccaattag

SEQ ID NO: 224207 - DNA, 1548 bp, synthetic construct
  misc_feature 1..1548: note = Description of Artificial Sequence: Synthetic coding sequence
  source 1..1548: mol_type = other DNA
atgtcatcgccaaatatatggagtaccggaagtagtgtgtattccacgcctgtcttcagccagaagatgacagtttggattctcctgttattgtccctgtaccccggatttacatcacagaagtcagacgacgactacgaggactacgcctcaaacaaaacctgggtcctcacccccaaagttccagaaggggacgttaccgtaattttgaacaatcttctggaggggtatgacaacaagctgaggcccgacatcggagtgaagcccaccctgatacataccgatatgtacgtcaattccatcggccctgttaatgcaattaacatggagtacacaattgacatcttttttgctcagacctggtacgacagacgcctcaagttcaactcgactattaaagtcctgaggctgaattccaacatggtcggcaagatttggattccagatacttttttcagaaattcgaagaaggctgatgctcactggattacaacacccaacaggatgttgcggatctggaatgacggccgtgtgctgtacacgctgcggctcacaattgacgctgagtgtcagctgcagctgcataatttccctatggacgaacattcatgtcccttggagttttcaagttggtcgcgttctattgcacaggcaggaatgtgttccggggtgatttcagcccactactcgctgcgattctgggggtccactgaccctcccacattggcctctcgtgtggcaggaatctccgacggatacccaagagaagagattgtctaccaatggaagcgctcgtctgtcgaggtgggggatacacgttcctggaggctgtaccagttttccttcgtcggactaagaaacaccaccgaggtggtgaaaacaacctctggcgattatgtggtcatgtccgtgtatttcgacctgtcacgccgtatggggtacttcacgattcagacctatattccttgcacgctcatagtggtcctgagctgggtgagtttctggatcaacaaggacgccgtgcccgctcgcactagcctgggcattactaccgtattgacaatgaccacactctctaccattgcacggaaatcactgcctaaggtcagttatgtgaccgccatggacttgttcgtaagtgtgtgttttatttttgtgttctctgcattggtcgaatacggaaccttgcattacttcgtctctaatcgtaagcccagcaaggataaagataagaaaaagaagaaccctttgttacggatgttttcctttaaagctcctactatagacatcaggccgcgaagcgcgacgatccagatgaacaatgccactcacctccaggagcgagatgaagaatacgggtatgaatgtctggacggaaaggattgtgcaagcttcttctgttgtttcgaggactgcaggaccggcgcttggagacacgggagaatccacatccgaatagcaaaaatggattcgtacgctaggatctttttcccaaccgccttttgcctgttcaatctggtgtattgggtgtcttatctctacttatag

SEQ ID NO: 224208 - DNA, 762 bp, synthetic construct
  misc_feature 1..762: note = Description of Artificial Sequence: Synthetic coding sequence
  source 1..762: mol_type = other DNA
atggctcctaaactactgctgcttctctgtctgttcagtggactgcacgcgagatctaggaaagtggaggaagacgaatacgaggacagctcctcgaatcagaagtgggtccttgcacctaagagtcaggacaccgatgtgaccttaattttgaacaagctacttagagagtatgataaaaagctgaggccggatatcggaatcaaaccgactgtaattgacgtggatatctacgtgaattcaattggacccgtaagctcaatcaacatggaataccagatcgatatcttcttcgctcaaacgtggactgactccaggttacgctttaacagcacaatgaagattctgacgttaaattcgaatatggtgggacttatctggatccccgatacaatctttaggaattctaagaccgctgaggcacactggattaccactcccaaccaactcctgaggatctggaacgacggcaagatactatacactctacggttgactataaatgccgaatgtcaattacagctgcataactttccaatggacgagcattcatgcccattaatattcagcagctatgggtacccaaaggaggagatgatctatcggtggcgaaagaactcagtggaggccgctgatcagaaatcttggcgcctgtatcagttcgacttcatggggttgagaaatacaaccgaaatcgtcacgacctccgctggcagaaacctccttaaagaagcacagcttagcaaggctagagaggcttag

SEQ ID NO: 224209 - DNA, 1371 bp, synthetic construct
  misc_feature 1..1371: note = Description of Artificial Sequence: Synthetic coding sequence
  source 1..1371: mol_type = other DNA
atgcgaaaatcacccggtctgagtgactgcctgtgggcatggattcttctcttatccacactgactggcaggagctacgggcagccatctttacaagacgagcttaaagataacacaaccgtgtttacgcggatcctggatcgtctcctcgacggatatgacaaccgattaaggcctggcctgggcgagagagtgaccgaggttaagaccgatatattcgttaccagctttgggccagttagtgaccatgacatggagtatacaatagacgtctttttcaggcagagctggaaagatgagcgtcttaaattcaagggcccaatgacagtgctgagacttaacaatttaatggcctccaagatttggacaccggataccttcttccacaacggaaagaaatcagtagcccataacatgacgatgccaaacaaactcctgcgaattactgaagatggcactttactctatacaatgaggcttaccgtacgggcagagtgtccaatgcacctcgaggacttccccatggatgcccatgcttgcccgcttaaatttgggtcttacgcctacactcgggcagaggtggtttacgagtggacccgtgagcctgcacggtccgtggtggtggccgaggatggttcaaggctgaaccagtatgacctgctgggccagactgtggatagcggcatcgtccagtcaagcacaggcgaatatgttgttatgaccacacatttccatctaaagaggaaaataggttacttcgtcatccagacatatctcccctgcatcatgacagtgatcctgtctcaggtctccttctggctcaacagagaaagcgtgcctgctagaacggtgttcggtgtgactacggtcctcactatgacaaccttgtcgatatccgctagaaattcactccctaaagtggcttacgcaacagccatggattggtttatagccgtatgttacgcgtttgtgttcagtgcactcatcgagtttgcaaccgtgaattatttcacaaaacgagggtatgcgtgggatggcaagagtgttgtcccggagaagccaaagaaagtaaaagaccctttaatcaagaagaataacacctacgcccctaccgccacaagctatacccccaaccttgccagaggagaccccggactggccacaattgccaaaagcgccacaatcgagcccaaggaggttaaaccagaaactaagcctcctgaaccaaaaaagactttcaactccgtgtccaagatcgatagattaagtcggatcgccttcccattattgttcggcattttcaacctggtttattgggccacctaccttaatcgggaacctcagttgaaagctcctaccccccatcagtag

SEQ ID NO: 224210 - DNA, 1371 bp, synthetic construct
  misc_feature 1..1371: note = Description of Artificial Sequence: Synthetic coding sequence
  source 1..1371: mol_type = other DNA
atgcgcaaatcaccaggcttgtctgattgcttatgggcatggatcctgctactgtctacattaacaggaaggtcatatggtcagccctctttacaggacgaacttaaggacaataccaccgttttcacacggattctagatcgcctactggatggttatgataatcgcctgaggccaggtctcggggaacgagtgaccgaagtgaagacagatatcttcgtcacaagttttggcccagtgtctgaccatgacatggagtacacgattgatgtttttttcagacagtcctggaaagatgagcgactgaaattcaaggggcctatgaccgttctccgtttgaataaccttatggcatcgaaaatctggacccctgataccttcttccacaacggcaagaagtctgttgctcacaacatgacaatgcccaataaattattgcgcatcacagaggacgggactctgttatacacaatgcgcctcacagtccgagccgagtgtcccatgcacctcgaggatttcccaatggatgctcacgcttgcccactcaaatttgggtcatatgcttatactcgcgctgaagtggtctacgagtggaccagggaacccgcacgtagtgtggtggtggcagaagatgggagcagactcaatcaatatgacctactcggacagaccgtcgatagcgggattgtgcagtcgtctaccggagaatacgtggttatgacgacgcatttccatctgaaacggaagattggttacttcgtcatacaaacatacctaccttgtatcatgacggttatcctgtcacaggtgagcttctggctgaatcgtgagagcgtccccgcacgcaccgtattcggggtgacgacggtgttgacaatgacgacactgtcgatttccgccaggaatagcttgcctaaggtggcatatgctacagccatggattggtttatcgccgtctgctacgcattcgtattcagtgccttgatcgagtttgcaaccgtgaattattttacaaagagaggatatgcgtgggacgggaaatccgtggtcccagaaaagcccaagaaagtgaaggaccccttaattaagaagaataatacatacgcccctaccgctacttcctacaccccaaacttagcccgaggcgacccaggactggccacgattgccaaaagcgccaccatcgagcctaaggaggtgaagcctgagaccaagcctcctgagccgaagaagacctttaattcggtgagcaaaattgaccgattgagcagaattgcgtttcctctattgttcggcattttcaaccttgtgtattgggccacctatctgaaccgagaaccccagctgaaagctcccactccacaccaatag

SEQ ID NO: 224211 - DNA, 1371 bp, synthetic construct
  misc_feature 1..1371: note = Description of Artificial Sequence: Synthetic coding sequence
  source 1..1371: mol_type = other DNA
atgcgaaagtctcctggtctctctgattgcctctgggcgtggattcttttattgagcacgcttactgggagatcctatggacagccatccctacaggacgagttgaaggacaatacgacggtgttcacaagaatactggatcgtctactcgatggctacgacaatagactacgcccaggcttgggcgagcgggtcacagaggtgaagacggatatttttgtgacaagtttcgggcctgttagcgatcatgacatggaatacaccatcgacgtattctttagacagagctggaaagacgagcggctaaagtttaaggggcctatgacagtgctgaggctgaataacctgatggcctccaagatttggacccctgacacattctttcacaacggtaagaagtccgtggcacacaacatgaccatgccaaacaaactgctcagaatcaccgaggatgggaccctgttatatactatgcggctgacggtgcgcgctgagtgtccaatgcacctcgaagacttccctatggacgctcacgcctgcccgttgaagttcggcagttacgcatatactagagctgaggtcgtatacgaatggaccagagagcccgcaagatccgtagtggtcgctgaggatggcagtcgcctaaaccaatatgacctgctcgggcagacagtggattcgggcatagttcagtcgagtacaggtgagtatgttgtgatgaccactcatttccacctgaagagaaagatcgggtatttcgtcattcaaacctatttgccatgcattatgaccgtcattctttcccaggtctccttttggctgaacagggaaagtgtgcctgcaagaactgtgtttggcgtgactaccgtgctgacaatgactacgttgagtatttctgctcggaacagcctgcccaaggttgcctatgctactgctatggattggtttatcgctgtgtgctacgcgttcgtttttagtgcccttattgaattcgccacggtgaactatttcaccaagaggggatacgcctgggacggcaagtccgttgtacctgagaaacccaaaaaggtgaaagatcctctcataaagaaaaacaacacatacgcgcctaccgccactagctatacccctaacctggcaagaggtgatcccggattggccacaattgccaaaagcgccaccatcgaacctaaggaggtcaaaccggagactaagccccctgagcccaaaaagactttcaactccgtgtccaagatcgacaggttatctagaattgcctttcccctcctctttgggatctttaatctcgtttattgggccacatacctgaatcgtgagccccagctcaaggccccaactccacatcaatag

SEQ ID NO: 224212 - DNA, 1371 bp, synthetic construct
  misc_feature 1..1371: note = Description of Artificial Sequence: Synthetic coding sequence
  source 1..1371: mol_type = other DNA
atgaggaagtcccctggactttctgattgtctctgggcgtggattctgcttcttagtacacttactggaagatcctacgggcagccatctctgcaggatgagctgaaggacaatactacagttttcaccaggatattagaccgactgctggatggttacgataaccgattgaggccgggactcggcgaacgcgtgaccgaggtgaagacagatatattcgtgacttcatttgggccagtcagcgaccacgacatggaatacaccattgacgtgttttttaggcagtcttggaaagacgagcggttgaagtttaaaggtccaatgaccgttctgcgactgaacaacctgatggctagcaaaatctggactccagatacctttttccacaatggaaagaagtccgtcgctcacaacatgacaatgccaaataagctgctgcgcatcacagaagacggcaccctcctgtataccatgcggctgaccgtcagagccgagtgccctatgcatcttgaagacttcccaatggacgcccacgcgtgtccactcaagttcggaagttatgcatatacccgagccgaggtggtttatgagtggacccgtgaaccagccaggagcgtcgtcgtagctgaagatggcagcaggttgaatcagtatgacctgctcgggcagaccgtggacagcggcatcgttcagagttctactggcgaatatgtggtgatgaccacacacttccatcttaaacgcaagatcggatatttcgtaatccagacctaccttccctgtattatgactgtgatcctcagccaggtgtccttctggctgaatcgcgagtcggtaccagccagaactgtatttggggtgacaaccgttctcaccatgacgacactgagtatcagtgcacgaaatagcctgccaaaggtggcttacgccaccgccatggattggttcatcgcggtttgctacgctttcgtgttctcagctctgatcgagtttgctacagtgaactacttcacaaagagaggctacgcttgggatgggaaatcagtggttccagaaaagcccaagaaagttaaagacccattgatcaagaaaaataacacatacgcccctaccgcgactagctatactcctaacctggctagaggagacccaggactggcaaccatcgctaagagcgccaccatagagcccaaggaagttaaacccgagaccaagccccctgaaccgaagaagacgttcaactcggtgtcaaagatcgatcggctttccagaatcgccttcccactgctgttcgggatctttaatctcgtatactgggctacgtacctgaaccgcgaaccgcagctgaaggccccaacaccacaccagtag

SEQ ID NO: 224213 - DNA, 1371 bp, synthetic construct
  misc_feature 1..1371: note = Description of Artificial Sequence: Synthetic coding sequence
  source 1..1371: mol_type = other DNA
atgcgtaagtcccctggcctgagcgactgcctctgggcctggatcctccttctttccaccctgaccgggcgtagctacggacagcctagcctccaggatgagctgaaggacaataccacggtcttcaccaggattctggatcgattattggacgggtatgacaatcgcctgcgcccaggcctgggggaacgcgttactgaggtgaaaacggacattttcgtcacatccttcggacctgtgtcagaccacgacatggaatacacaattgacgttttttttagacagtcctggaaagacgagcgactgaaatttaaggggcctatgacagtactgagactcaataacctcatggcctccaagatctggactcctgataccttttttcataacggaaaaaaatcggtggcccacaatatgacaatgcccaacaagctgctgaggattactgaagatggaaccctactgtatactatgcggctcactgtgagagccgagtgccccatgcaccttgaagattttccaatggacgcgcacgcatgtcctcttaagtttgggtcttacgcctacactcgagcggaagttgtgtacgaatggacccgagagcctgcccgttcagttgttgtcgctgaggatggatctaggctgaaccagtacgatttactaggtcagaccgtggatagtggcatcgtgcagtctagcaccggtgaatatgtggttatgacaacgcattttcacctcaaacgcaagatcgggtactttgtaatccaaacctatctgccttgcattatgacagtgatactgtcgcaagtttcattttggctgaaccgtgagtctgtgcccgcacggacggtctttggggtgacgaccgttctgacaatgactacactaagtatctcagcccgaaacagtttgccgaaagtggcctacgctaccgctatggactggttcattgctgtgtgctatgcattcgtgttctccgctctaatcgaattcgctactgtcaattatttcaccaagagaggatatgcatgggacggcaaatcagtggtgcccgagaagcctaaaaaagtcaaagaccccctgattaaaaaaaacaacacatacgcccctacagccacatcttatacccctaatctggctcgcggagatcctggactcgcaacaatcgctaagtctgctaccatagaacccaaggaagttaagcccgagacaaaaccccctgagcctaagaagacgtttaactccgtgtcgaagatcgataggttgtccagaatcgctttcccactcctgtttggcatatttaacctcgtatactgggccacttacctgaacagagaacctcagctgaaagctcccaccccccatcagtag

SEQ ID NO: 224214 - DNA, 1371 bp, synthetic construct
  misc_feature 1..1371: note = Description of Artificial Sequence: Synthetic coding sequence
  source 1..1371: mol_type = other DNA
atgcgtaagagccccggactgtccgactgtctttgggcctggatcctgctcctgagtaccctgaccggaagaagctatggccagccttccctccaagatgaacttaaagacaatactacggtgttcactcgcattttagatcgcttgcttgacgggtatgataacagactcagacctgggttgggtgaacgcgttactgaggtgaagaccgacatctttgtaacatcatttggccctgtttccgatcatgacatggaatatacaatagacgtcttcttccggcagtcttggaaggacgagcgcttgaaatttaagggcccaatgacagttctgaggctgaataatctcatggcttctaaaatctggaccccagacactttcttccacaatgggaaaaagtcagtcgcccacaacatgaccatgccgaataaactgctgagaattactgaagacggtacccttctgtacaccatgaggttaaccgtccgagccgaatgcccaatgcacctcgaggactttcctatggatgcccacgcatgccctcttaagttcggttcctacgcgtacacgcgggcagaagtcgtctatgaatggacacgagaaccagcgaggagcgttgtggtggcggaagacggatccaggctgaaccagtatgatctgttaggtcagacagtagacagcgggatcgtgcagagctcaaccggagagtacgtggttatgaccacacactttcacctgaagagaaaaatcggttactttgtgatccagacctatctgccttgcataatgaccgtaatcctatcccaagtttctttttggctgaatagggaaagcgtgccggctcgaaccgtcttcggtgtgaccaccgtgctgaccatgactactctgagtatcagtgcccgaaatagccttcctaaggttgcttacgctacagctatggactggtttatcgcagtatgctacgcttttgttttctccgctttgatagaatttgccacggtaaattacttcactaaaaggggatacgcctgggacgggaaaagcgtggttcccgagaagccaaaaaaagttaaggatcctctgattaagaaaaacaatacatatgctcccacagcgactagctacacgcccaacctagcaaggggggaccccggattggcaacaatcgccaagagcgccaccatcgaaccaaaggaggtaaagcctgagaccaaacctcccgagccaaaaaagacctttaacagcgtctctaaaatcgaccgtctctccagaattgcttttcccctgttgttcggaatcttcaatctcgtctactgggctacttacctgaaccgcgagccccagctgaaagcgccaacccctcaccagtag

SEQ ID NO: 224215 - DNA, 372 bp, synthetic construct
  misc_feature 1..372: note = Description of Artificial Sequence: Synthetic coding sequence
  source 1..372: mol_type = other DNA
atgagaaagtctcccggacttagcgattgtctgtgggcttggatcttgctcctgtccacattgaccggaaggagctacgggcagccgtcactgcaggatgaactgaaggacaataccaccgtttttaccaggatcttggatcgcctcttggatggttacgacaaccgactgagacctgggttgggtgaacgagtcactgaggtgaagaccgatattttcgtgaccagctttgggcctgtaagcgaccacgatatggaatatactattgacgtatttttccgacagtcttggaaagacgagaggctcaagtttaagggtccaatgaccgtgctcagactcaataacctgatggctagcaagatctggacatag

SEQ ID NO: 224216 - DNA, 1356 bp, synthetic construct
  misc_feature 1..1356: note = Description of Artificial Sequence: Synthetic coding sequence
  source 1..1356: mol_type = other DNA
atgaagacaaaactgaacatttataacatgcagttcctgctctttgtctttttggtctgggacccagcgaggctggttttagcaaacatccaggaggacgaagcaaagaataatattactatctttacgcgcatcttggatcggttgttggatggatatgataaccgtctgcggccaggccttggcgattctataacggaggtgtttacaaatatatacgttacgtcttttggccctgtgtccgataccgatatggaatacactatcgacgtgttttttaggcagaagtggaaagacgaacgtcttaaattcaagggccctatgaacattctgaggctgaataacttaatggcatcgaagatttggacccccgataccttctttcataatggcaagaagtctgtggcacataatatgacaatgcctaacaaactgctgcggattcaggacgacgggacacttctctataccatgcgcctgacagtgcaggcagaatgtcccatgcatctggaggactttccaatggacgcccacagttgtcctctcaagttcggaagttacgcctacactacttctgaagtcacgtacatctggacctacaacgcgtccgactctgtccaggtggcgcctgatggatccaggttaaaccaatatgatctccttggccagtccatcggcaaagaaaccatcaaatccagtactggagagtatactgtgatgactgctcattttcatctgaagcggaaaatcggatatttcgtaatacaaacctatctgccctgtattatgaccgtcatcctgtctcaggtgtccttttggctcaatcgggaatctgtgcctgccaggacggtctttggcgtgactacagtgcttactatgacgacactgagcattagcgctagaaactctttgccgaaggtggcatacgctactgccatggactggtttatcgccgtgtgttacgcatttgttttctcggccttgattgaattcgctaccgtcaattatttcactaaaagaggctgggcgtgggatggaaaatccgttgtgaacgacaagaagaaggaaaaagccagtgtcatgatccagaataatgcatatgcagtggctgtggctaattacgcaccaaaccttagcaaggaccccgtgctgtccacaataagcaaatccgcaaccacccccgaacccaacaagaaacccgaaaacaaaccagctgaggcgaaaaaaacatttaattccgtgtctaagattgataggatgtcacggatcgtgttccccgtgctgttcggaaccttcaatctcgtctactgggctacatacctcaatagagagcccgtgctcggtgtctctccttag

SEQ ID NO: 224217 - DNA, 1356 bp, synthetic construct
  misc_feature 1..1356: note = Description of Artificial Sequence: Synthetic coding sequence
  source 1..1356: mol_type = other DNA
atgaagactaagctcaacatttacaacatgcaattcttattgtttgtgttcttggtctgggacccggcacggcttgtgctggcgaacatccaggaggacgaggcgaaaaataacatcaccatttttacgaggattctggatcgactccttgatggatacgataacaggctgagaccgggactgggcgattctataactgaagtctttacaaatatctatgtaaccagtttcggcccagtatctgataccgacatggaatatactattgacgtgttcttccggcagaagtggaaagacgagagactcaaatttaagggtcccatgaatatcctaagactgaacaatctgatggcaagtaaaatttggacccctgatactttctttcataatggcaaaaagagtgtggctcataatatgacaatgccaaacaagctcctccgaatacaggatgacggcacactcttgtacactatgagactgaccgtacaggccgagtgccctatgcacctagaggacttccctatggacgcacactcctgcccgcttaagttcggaagttatgcgtacactacatctgaggtgacctacatctggacctataatgcctctgacagcgttcaggtcgcccctgacggatcccggctgaaccagtacgatctgctgggtcaatccatcggtaaagagaccattaagtcctctaccggagagtacacagtcatgaccgcccatttccatctgaaaagaaaaatcggatattttgtgattcagacttacctgccatgcattatgaccgtgattctctcacaggtgagtttttggttaaatcgcgagagcgtacctgctagaacggtatttggagtgaccaccgtcctcacaatgaccaccctgagcatcagcgccagaaacagcctgcccaaagttgcctacgcaacagctatggactggttcatcgccgtgtgctacgcttttgtcttctctgctttaatcgagtttgctacagtgaactatttcacaaagagagggtgggcctgggacgggaagagtgtggtgaacgacaaaaagaaggaaaaagcgtcagtgatgatccagaacaacgcttacgccgtcgccgtggccaattatgcaccgaatttaagtaaggatcctgtgctctctaccatttccaagagcgctaccacgcctgaacccaacaaaaaaccagagaacaaaccggctgaagccaagaaaacatttaactcagtaagcaaaatcgatcgaatgtctcgcatcgttttccctgtcttgttcggcacattcaatctggtatactgggccacatacctaaatcgtgagcccgtgttaggggtgtccccgtag

SEQ ID NO: 224218 - DNA, 459 bp, synthetic construct
  misc_feature 1..459: note = Description of Artificial Sequence: Synthetic coding sequence
  source 1..459: mol_type = other DNA
atgaaaacaaagctaaacatctataatatgcagttccttcttttcgtgttcctggtgtgggatcccgcacggctggtgctggctaatatccaggaagatgaggctaagaacaacattaccattttcacgcggatccttgatcggctattggacggctatgacaaccggcttcgtccaggcctcggggattccattacagaggtgtttacaaatatttacgtgacctcctttggcccagtgtctgacacggacatggagtatacaatcgatgtgttcttccgccagaaatggaaggacgagcgccttaaattcaagggtcccatgaacattctgcgcctgaacaacttaatggccagcaagatctggacaccggacactttctttcataatggtaaaaagtcagtggctcacaacatgacaatgcctaacaagctgctgagaatccaagatgatggttag

SEQ ID NO: 224219 - DNA, 414 bp, synthetic construct
  misc_feature 1..414: note = Description of Artificial Sequence: Synthetic coding sequence
  source 1..414: mol_type = other DNA
atgaagacaaaactgaacatctataatatgcagttcctcctcttcgttttcctcgtgtgggatcccgctcggttggttctagccaatatacaggaggacgaagccaagaacaacataacaatcttcacccgtattctagaccgcttactcgatggctacgacaatcgtctgcgtccgggactaggtgattcaatcacggaagtttttactaacatttatgttacctcattcggtccggtaagcgatacagatatggagtatacaatagacgtctttttccggcagaaatggaaagacgagagactcaagttcaagggccctatgaacattctgcggctcaataacctcatggcctcaaaaatttggacaccagataccttcttccataacgggaaaaaatctgtggcacattag

SEQ ID NO: 224220 - DNA, 1536 bp, synthetic construct
  misc_feature 1..1536: note = Description of Artificial Sequence: Synthetic coding sequence
  source 1..1536: mol_type = other DNA
atgaagaccaagctcaacatttataacatgcagttcctgctgttcgtcttcctggtctgggaccccgcacgcctggtactggccaacattcaggaagacgaagctaagaacaacatcaccatttttacacggatattagatcgcctcctggacggttatgataaccggttaagaccaggcctaggcgattctatcaccgaggtatttacaaacatatacgtgacaagcttcggccctgtgtccgatactgatatggagtacactatcgatgtgttttttcgccagaagtggaaggacgaaagactgaaattcaagggaccgatgaatatcctgaggctaaacaacctcatggcaagtaagatttggacccccgataccttcttccacaacggcaagaaaagcgtcgcccataatatgactatgcctaataaactgctaagaattcaggatgacgggaccctgctgtacacgatgcgattaactgtgcaagcagaatgccctatgcacctggaagatttcccaatggatgcacactcctgcccactgaagttcggctcctatgcatacaccacatcggaagtgacatacatctggacatacaacgcatcagactccgtacaggtggccccagacgggagcaggctgaaccaatacgatctgctgggccagagtataggcaaagaaaccattaaatcctccaccggtgagtacacagtcatgacagcccatttccaccttaagaggaaaattggatatttcgtgatccagacttatcttccctgtattatgaccgtcattctcagccaagtgagcttttggcttaacagggaatcggtgccagcacggactgtctttggcgtcactaccgtgctgaccatgaccacattatcgataagcgccaggaactcactgcccaaagtggcttatgcgacagccatggattggtttattgctgtgtgttatgcattcgtattctccgctctaatcgagtttgctaccgtgaattacttcacaaagcgaggatgggcctgggatggaaaaagcgtggtgaacgacaaatctccgtctattaaagcggaaggtattactctgacatacaacagtgtcaaggctatcctccaaggggctaagcttatctggtcaaagtatattgcattcagctggccttctctcttccaggaaaaaaccctggaatatctagagaagtggatggactgccttacctttaagcagtcttctaagaaagagaaagcttctgtaatgatccaaaataatgcctatgcagttgctgtggccaattacgcgccaaacctgtcaaaggatcctgttttgagcacaatcagtaagtccgccaccacacctgaaccgaataagaaacctgagaataaaccagccgaagctaagaaaacatttaatagcgtgtcaaagatcgaccggatgtcccgtatcgtcttccccgtcctcttcgggacatttaatttagtatactgggcaacatacctgaacagggaacctgttctgggtgtcagcccatag

SEQ ID NO: 224221 - DNA, 1356 bp, synthetic construct
  misc_feature 1..1356: note = Description of Artificial Sequence: Synthetic coding sequence
  source 1..1356: mol_type = other DNA
atgaagacaaagctgaacatttacaacatgcaattcctgctcttcgtgttcctggtatgggatccagccagactagtcctggccaacatccaagaggacgaggcaaaaaataatattacaatatttacccgaatcttggatagactcctggacggatatgacaaccgtttgcgtcctgggttgggagacagcatcactgaagttttcactaacatttatgttacaagttttggccctgtctccgatacagatatggagtataccatcgacgtgttcttcaggcagaagtggaaagatgaacgcctgaaattcaaaggccctatgaacatcctcagactgaacaacctgatggcaagtaagatatggacgcctgacactttttttcacaatggaaagaaaagcgtcgctcataacatgactatgcccaacaaactgctgaggatccaggacgatggaactctgctgtacaccatgcgcttaacagtccaggctgaatgccctatgcacctggaagattttcctatggatgcacattcgtgtcccctcaagtttgggtcatatgcctatacaacttctgaggtgacttacatctggacttacaatgcaagcgattccgtgcaggtggcacccgacgggtctcgactgaatcagtacgacctactgggccagagtattgggaaggagactataaagtcaagtacgggtgaatacaccgtcatgactgcccattttcatctcaaacggaaaatcggttatttcgtgatccagacttatctgccatgtattatgacagttatcctgtctcaggtgtcattttggctgaaccgtgagtccgtgcccgctaggaccgtgtttggagttaccacagtacttacaatgaccacgttaagtatctcagccaggaactccttgcctaaggtggcctatgccactgccatggactggttcatcgctgtttgttatgcatttgtgttttcggccctcatagagttcgctaccgtcaactacttcactaagagaggatgggcctgggacggcaagtccgtcgtaaacgataagaagaaggaaaaagcaagcgtaatgattcaaaacaatgcttacgctgtggcagtggccaactacgcccctaacctgagcaaagatccggtgctcagcaccatctctaagtcagctaccacaccagagcccaacaagaagccggagaataagccagccgaagctaaaaaaacattcaatagcgtcagtaagatcgacagaatgtccaggatcgttttccctgtacttttcgggacctttaacttagtgtactgggccacatacctgaacagagagccagtgctgggcgtgtccccctag

SEQ ID NO: 224222 - DNA, 1356 bp, synthetic construct
  misc_feature 1..1356: note = Description of Artificial Sequence: Synthetic coding sequence
  source 1..1356: mol_type = other DNA
atgaagaccaagttaaacatctacaacatgcagtttctactctttgtgttcctcgtttgggatccagctagactggtccttgccaatattcaggaagacgaggccaagaataacatcacgatatttacgcgcatactggacaggctgctagacggatacgataatcgccttcggcctggcctgggagatagcatcacagaagtcttcaccaatatctacgtgacgtccttcgggcctgtatccgatacagacatggagtacactatcgacgtgttcttccgacaaaaatggaaggacgagagactcaaatttaaagggcctatgaacatcctgcgtctgaacaacctgatggcgagcaaaatctggaccccagatacattcttccacaacggtaaaaaaagtgtcgcccacaacatgaccatgccaaataaactcttgcgcatacaggacgatggaaccctgctgtatactatgcggctcacagtgcaggccgaatgccccatgcacctggaggatttccctatggacgcccatagttgtccattgaagtttggtagctatgcatatacaaccagcgaggtgacttacatctggacctataacgccagcgattccgtacaagttgccccagacggcagcaggttaaatcagtatgacctgttgggccagtccatcggaaaagagaccattaaatcctcaaccggggagtataccgtcatgactgcccactttcacttgaaacgcaaaatcggttacttcgtgatccagacttatctcccttgtatcatgacagtcattctctctcaggtctcattctggctgaaccgggagagtgttcccgcacgtactgtattcggggtcaccaccgtgttgaccatgacgacactgagtatctcagccaggaactctttgcctaaggttgcctatgccacagctatggattggtttatcgccgtttgttacgcatttgtcttctctgcactgattgagtttgctacagtcaactatttcacaaagagaggatgggcctgggacggcaaaagcgtggtgaacgataagaagaaggaaaaggcttcagtcatgattcagaacaacgcctatgcagtggccgtcgccaattatgcaccaaatttgagcaaagaccccgtgctcagtacaatcagcaagagtgctacaaccccagagccaaataagaagccagaaaacaagccggctgaagctaaaaaaacattcaattccgttagcaaaatagaccggatgagccgcattgtattccccgtgctgtttggcacattcaatctggtatattgggccacttatctgaatcgggagccggtgctaggtgtgtccccctag

SEQ ID NO: 224223 - DNA, 1104 bp, synthetic construct
  misc_feature 1..1104: note = Description of Artificial Sequence: Synthetic coding sequence
  source 1..1104: mol_type = other DNA
atgaaaacgaaactgaacatctacaacatgcagtttctgctgttcgtttttctcgtttgggatccagcgagacttgtcttggccaatatccaggaagacgaagcaaaaaataacattaccatcttcacaaggatcctggataggcttctggacggctacgacaatcggttgcgccctgggctgggcgactccatcaccgaggtttttactaatatatacgtgacttcttttgggcctgtctctgacacagatatggagtacaccattgatgtgttcttccgccagaagtggaaagacgaacggttgaagttcaagggaccgatgaacatcctgcgcctgaacaatctgatggcgtccaagatttggacccccgacaccttcttccataatggcaaaaaaagtgtggcccacaacatgaccatgcccaacaaattgttgaggatccaagatgacgggaccctgctgtataccatgcggctgacagtgcaggctgagtgtcctatgcatctagaagattttccaatggacgctcactcctgtccactgaaatttggcagctatgcttacacaacaagcgaagtcacatatatttggacatataacgccagtgacagcgtgcaggtggcacccgacgggagccggctgaatcagtatgaccttcttgggcagagcattggtaaggagactataaaatcctcaaccggagagtatacagtgatgaccgctcatttccacttgaaacgtaagatcggctacttcgtcatccagacctacctcccgtgtatcatgaccgtcatactgtcccaggtttccttttggctcaatcgcgagagtgtgcctgcacgcaccgtgttcggggtgactactgtcctcactatgaccaccctatctatctccgctaggaactctttgcctaaggttgcatacgctacggctatggactggtttatagccgtctgttatgccttcgtcttttctgccttgatcgagtttgctaccgtgaactactttactaagcggggatgggcatgggacgggaagtcagtggtcaacgataaggtgtcagaatctttccgtgtaattataattaagaagatcccatag

SEQ ID NO: 224224 - DNA, 1371 bp, synthetic construct
  misc_feature 1..1371: note = Description of Artificial Sequence: Synthetic coding sequence
  source 1..1371: mol_type = other DNA
atgagactgaagatcacacttcctagccttcgtgagttcctcaccgacttctggatggtgaccattattggactagaccaggattgggaggaatacacgattgacgttttctttcgccagaagtggaaggatgaaagactgaaatttaaaggtcctatgaacatcctcaggttaaacaatctcatggcttccaagatctggaccccagatactttcttccacaatggaaaaaagtctgtggcacacaacatgacaatgcccaataagcttctgaggattcaggacgacggcactctgctgtacaccatgcgactgacggtgcaagctgagtgcccgatgcacttagaggactttccaatggatgcccactcctgccccctgaagtttgggtcttacgcatatactacctccgaggtgacgtacatttggacctacaacgccagcgattctgtgcaggtagctcctgatggaagccgtcttaaccagtacgatcttcttggccagagtatcggtaaggaaacaatcaaaagctcaaccggcgagtataccgtgatgactgcccatttccacctcaaaaggaagattggttacttcgtgattcagacatatctgccttgtatcatgaccgtgatcctgtcacaggtctcattctggttgaacagggagtcagtgcctgccaggactgtttttggggtcaccacagtgctcactatgacgaccctctcaatctccgcacgtaactcactcccgaaggtcgcatatgccactgcgatggattggttcattgccgtgtgttacgcatttgtgttcagcgcccttattgagttcgccactgttaactactttaccaaacgcggatgggcatgggacggcaaatccgtggtgaacgataaatccccgtccatcaaggcagagggaattactcttacttacaattccgtgaaagcaattctgcagggggcaaagctgatttggtctaagtacattgcattcagttggccttccctgttccaagagaagaccctcgagtatcttgaaaagtggatggattgccttacttttaaacagtcttcaaagaaggaaaaggctagtgtcatgatccagaataacgcctatgccgtcgctgtcgctaactatgcgccaaacctgtcgaaggatcctgtgttgtccacgatctcaaaaagcgctactacacctgagcctaacaagaaacccgagaacaaacccgcagaggctaaaaaaacgtttaattcggtgtctaagatcgacaggatgtcccggatcgtgtttccggttctgttcggcaccttcaacctcgtctactgggccacctacctgaacagggagcctgtcctgggtgtcagcccatag

SEQ ID NO: 224225 - DNA, 1479 bp, synthetic construct
  misc_feature 1..1479: note = Description of Artificial Sequence: Synthetic coding sequence
  source 1..1479: mol_type = other DNA
atgattatcactcagacttcccattgttacatgacctcccttgggattctgtttctgatcaatatactgcctggcaccacaggtcagggagagtcccggaggcaggagccaggcgacttcgtaaaacaagacattggcggactgtcacccaaacacgctcctgatatcccagatgatagcaccgacaacataaccattttcaccaggatattggacagacttctggatggatacgataatcggttgcgtccagggcttggggacgcagtaacggaagtgaagaccgatatctatgtcacttccttcgggcctgtgtccgacactgacatggagtacacgattgatgtgttttttcgacagacgtggcacgacgagaggctaaaattcgacggacctatgaagatcctgcctttaaacaaccttctcgcctcaaagatatggaccccagatacattttttcacaatggcaaaaagtctgtagcacacaacatgacgaccccgaataaactcctcagactggtggacaacggcacgcttctctacaccatgagactgactatccacgccgagtgtcctatgcatctggaggattttcctatggatgtccatgcctgtcctctgaagttcggttcttatgcgtacactactgcagaagtggtgtactcctggaccctcggaaaaaacaagtcagtggaggtcgcgcaggatggctcaagactcaatcagtatgacttgctgggtcatgtagtagggactgagatcatccgaagctccacgggcgagtacgtggtgatgactacgcacttccacttgaagaggaaaattggatactttgttatccagacttacttaccctgcatcatgacggtgatcctgtcccaggtcagcttctggttgaatagagaaagtgtccccgctaggaccgtattcggagtgaccacggtgctcaccatgactaccctcagtatctcagcacggaacagcctgccaaaagtggcctacgccaccgctatggactggtttattgcggtgtgctatgcatttgttttctcagcccttattgaatttgctacggtgaattattttaccaagcggtcctgggcctgggaagggaagaaggttcctgaggcacttgagatgaagaaaaaaacgcccgctgccccagccaaaaagacaagtaccaccttcaacatcgtgggcacaacctaccctattaacctggcaaaagataccgagttctctaccatttccaaaggcgcagctcccagcgcgagtagtacacctacaatcatcgccagccccaaagcaacgtacgttcaggattcacccaccgagacaaaaacctataactctgtgtcaaaggtcgataaaattagcaggataatcttccccgtactctttgcaatattcaacctcgtctactgggctacctacgttaacagggaatccgcaattaaaggcatgatccgtaaacaatag

SEQ ID NO: 224226 - DNA, 1479 bp, synthetic construct
  misc_feature 1..1479: note = Description of Artificial Sequence: Synthetic coding sequence
  source 1..1479: mol_type = other DNA
atgatcatcacccagaccagtcactgttacatgacgtcgctcggaattttatttctgatcaatatactgcccggaaccacaggtcaaggcgagagtcggagacaggagcccggagactttgtgaaacaggatatcggcggactcagccccaagcacgctcctgacattcccgacgactctactgacaacattactatatttacacgcatcctagaccggcttttagatgggtacgacaaccggcttcggccagggctgggggatgccgttaccgaggttaagaccgacatctacgtgacatctttcgggcctgtatcagatacagatatggaatacacaatcgacgttttcttccgccagacatggcacgatgaaagactgaagttcgacggacccatgaaaatcctgccactgaataacctcctcgcgtccaaaatttggacccctgacacgttcttccataatggaaagaagagtgtcgcccacaatatgacaaccccaaacaaactcctgcgactcgtggataatggcaccctgctctacaccatgcggctgacaatccatgctgagtgccccatgcatctggaagatttcccgatggacgtacacgcctgccctctgaaattcggaagttatgcttacacaaccgcagaagtagtgtacagctggactctcgggaaaaacaagtcagtagaggtagcccaggatgggagccggctcaatcagtacgatctcctgggtcacgttgtcggtacagagattataagatccagtacgggcgagtacgtggttatgactacccactttcacttgaaacgcaagatagggtactttgtaattcagacatacttgccctgcatcatgactgtgattctgtctcaagtgtccttctggttgaacagagaatccgtccctgcaagaacggtgtttggcgttaccactgtgttgaccatgactactcttagtatttccgcgaggaattcccttcccaaagtcgcttacgctacagcaatggactggttcatcgccgtctgctatgcatttgtgtttagcgccttgatcgagttcgccacagtcaattactttaccaagaggtcatgggcttgggaagggaaaaaagtccccgaggccttggaaatgaaaaagaaaaccccagcggcacctgccaagaaaacatctacgacattcaatatcgtcggcactacctatccaataaatctagcgaaggatacagaattttccaccattagcaagggtgccgcaccctcagcctcaagcacacccaccattattgcctcccccaaagccacatacgtccaggatagtcccaccgagaccaagacttacaactccgtgtcgaaggtcgataaaatttctaggattattttcccagtgctatttgcaatattcaacctcgtctactgggctacttacgtaaacagagagtcggccatcaaggggatgatccgaaaacagtag

SEQ ID NO: 224227 - DNA, 339 bp, synthetic construct
  misc_feature 1..339: note = Description of Artificial Sequence: Synthetic coding sequence
  source 1..339: mol_type = other DNA
gaatataccatcgatgtttttttccgacagacatggcacgatgaacggttaaagttcgacggccctatgaagatccttccgctgaataacctcttagcgtccaagatctggactcctgacacgttctttcataatggcaaaaagtctgtcgcccacaacatgaccacccccaacaaactccttagactcgtggacaatggtaccctgctctacactatgcgcatcgaagaggtgcagaaacaccgctccatgatgaagccctccgtttcctacacggtcgccccttggattcaagaaggcggtcctggcggtaggcacagacttaagatggaaaaatag

SEQ ID NO: 224228 - DNA, 1479 bp, synthetic construct
  misc_feature 1..1479: note = Description of Artificial Sequence: Synthetic coding sequence
  source 1..1479: mol_type = other DNA
atgatcattacccagacaagccattgctatatgacctctctcggcatcttgtttctgatcaacattctccccggtacaactggtcagggggagtctagacgccaagagcctggtgactttgtcaaacaggatatagggggactttcgccgaaacatgcaccggacattcctgatgatagcacagataacatcaccatatttactcgtatcttggataggttattagatggctatgacaatcggctgagaccaggtctgggggacgctgtgactgaagtgaagaccgatatctatgtcaccagctttggacccgtttctgataccgacatggagtacaccattgatgttttttttagacagacttggcatgatgagcgcttgaagtttgatgggccaatgaagattctgccactcaataacctgctggcctctaagatttggacaccagacaccttcttccataacggcaagaaatctgtcgctcacaatatgaccacccctaataagctcctgcggctggtggacaatggcacattgttgtacacaatgcggttgacaatacacgctgaatgtcccatgcatttggaagatttcccgatggatgtgcacgcttgtcctttgaaattcggtagctacgcctatacgaccgccgaggtcgtctactcttggacactgggaaagaacaagagtgtggaggtggcacaagacgggtctaggctcaatcagtacgatctgctgggccatgtggtcgggactgaaataatccggtccagtacaggcgaatatgtcgtcatgaccacgcattttcacctcaagcgcaagataggatacttcgtgattcagacatacctgccatgcattatgacggtgattttatcacaggtgagcttctggctgaaccgggaatccgtaccagcccgaactgtgttcggggtgacaactgtactaaccatgaccacacttagcatttcagctcgcaatagcctgcccaaggtcgcctacgccaccgcaatggactggtttatcgctgtgtgttatgcttttgtgttctccgcccttattgagtttgccaccgtgaattactttaccaaacgaagctgggcctgggagggcaagaaggttcccgaagctttagagatgaaaaaaaaaaccccagcagcccctgcaaaaaaaacatctactaccttcaacatcgtcggcacgacctaccccataaacctcgctaaggacaccgaattctcgacaatcagtaaaggtgccgcaccgagtgcttcttccacccctacaatcattgcttcacctaaggctacctacgtgcaagattccccaacagaaaccaagacttataacagcgtgtctaaggtggacaagatcagcagaataattttccctgtgttgtttgccatattcaacctggtttattgggccacctacgtgaaccgagaatccgctatcaaaggaatgattcgaaagcagtag

SEQ ID NO: 224229 - DNA, 1665 bp, synthetic construct
  misc_feature 1..1665: note = Description of Artificial Sequence: Synthetic coding sequence
  source 1..1665: mol_type = other DNA
atggtgtccgccaagaaggtgcccgctattgccttaagtgccggtgtgtctttcgccctcctcaggttcctttgcctagccgtttgcctcaacgaaagcccagggcagaaccaaaaggaggagaagctctgcactgagaattttacccgtattctggatagcctcttggacggctatgataatcgcctgcggccaggatttggaggtcccgtgacggaggtgaaaacagacatttacgtcacatccttcggccctgtctctgacgtggaaatggagtacaccatggacgtctttttccgccaaacgtggatagacaagcgccttaagtacgacggccctattgaaattttacgtttgaacaacatgatggtaacgaaggtgtggacacccgatacattttttcgcaatgggaagaaaagtgtgtcacacaatatgaccgcgcctaacaaactgttcagaattatgagaaatggaactatcctctatactatgagacttacaatcagcgctgagtgtcctatgagacttgtggacttccctatggatggtcacgcctgtcccctgaaattcggttcctacgcctatcccaagtccgagatgatttacacctggacaaaaggccctgaaaagtcggtggaggtgccaaaggaatccagttcattggtacagtatgacctcatcggccaaacagtgtccagcgagacaatcaagtccatcacaggtgaatatattgttatgacagtatacttccacctcagaaggaaaatgggctattttatgattcagacatacatcccatgtattatgactgtaatcctctcacaggtgagtttttggattaacaaggagtcggtgcccgcacgcactgtgtttggaatcacgacagtgctgaccatgaccaccctaagcatctccgcccgacatagcctccctaaggtttcttacgccactgccatggactggttcatcgcagtgtgcttcgcttttgtgttctctgcgttgatagagttcgccgcagtgaattattttacaaacattcagatggagaaagctaaacgcaagacctctaagcctcctcaggaggtgcctgcagctccagtccaacgcgagaaacacccggaggccccattacagaatactaatgccaacctgaacatgagaaaacgcacaaatgctcttgtccactccgagagcgacgttgggaaccggacagaggtgggaaatcactcctctaagtcctccacggtggtgcaagagagctccaagggtactccacgttcttacctggcatcttctccaaatcctttttctcgcgctaacgcagcagaaactatttcagccgctcgtgctttacctagcgcgtctcctacatccatcagaacgggttacatgccgaggaaagcctctgtcggatcagcttcgacccggcatgtcttcggatccaggttgcagaggattaaaacaaccgttaacacaatcggcgcaaccggaaagctcagcgctacccctccaccatctgccccacctcctagcggcagcggtaccagtaaaatcgataagtacgcaagaatcttgtttcctgtgacttttggtgccttcaacatggtatactgggtagtttacctgtctaaagacacaatggagaagagtgagtccctcatgtag

SEQ ID NO: 224230 - DNA, 1389 bp, synthetic construct
  misc_feature 1..1389: note = Description of Artificial Sequence: Synthetic coding sequence
  source 1..1389: mol_type = other DNA
atggacaatggaatgttctcaggattcattatgataaagaacctgctgctcttctgcatctctatgaacctcagttcccattttggcttctcccagatgccaacttccagtgtgaaagacgaaaccaacgataatattactatctttacaaggatcctggatggactgctcgacgggtacgataaccggttgagacccggtctgggtgagagaatcacgcaggtccgcactgacatctacgtgacctcttttggccctgtgtcggatacagaaatggagtataccatcgacgtgttcttcaggcagagctggaaagatgagcgtcttcgtttcaagggtccaatgcaaaggctcccactgaataatctgctggccagcaaaatttggacccctgacacattcttccacaacggaaagaagagtatcgctcataatatgacaactccaaataagctacttcgcttggaggacgacggcacgttactctacaccatgcgcctaaccatctcggcggagtgcccaatgcaacttgaggactttcctatggatgcccacgcgtgtccccttaagtttggaagctatgcctatcctaattctgaggtggtgtacgtctggacgaatggatcaacaaagtcagttgtagtcgctgaagacggatctcgccttaaccagtaccatctcatgggccagactgtggggaccgaaaatatcagcacctcaactggcgaatacactattatgactgcccacttccaccttaagaggaagatcggatatttcgtgatccagacgtatctcccctgcattatgaccgtgatcctgtcccaggtgtccttctggctcaaccgtgaatctgtgcctgcgcgtacagtgtttggggtgaccactgtgctgactatgaccactcttagcatttccgctaggaactctctgccaaaggtggcttacgccactgccatggactggtttatcgccgtgtgttatgctttcgtgttttctgccctgattgaattcgcgaccgtcaattactttaccaaaagaggttgggcttgggacgggaaaaaagctttggaggccgctaagattaaaaaaaagcgggaggtaatactgaataagagtacaaacgctttcactactgggaagatgagccacccccctaacattcctaaggaacagactcccgctggtacatccaacacgacatcggtatctgtgaagccctctgaggagaagacatctgagtcaaagaagacatataattcaatttccaaaattgacaaaatgagtcgtattgtctttccagtgctgttcggaacatttaaccttgtctactgggctacgtatcttaatagggagccggtcattaagggggcagcgagccccaaatag

SEQ ID NO: 224231 - DNA, 1389 bp, synthetic construct
  misc_feature 1..1389: note = Description of Artificial Sequence: Synthetic coding sequence
  source 1..1389: mol_type = other DNA
atggataacggcatgttctcgggctttattatgatcaagaatctcctgctgttttgcattagcatgaacctgtcttcacactttggattttcacagatgccaacctcttccgtgaaggacgagacgaacgacaatatcaccattttcaccagaatcctcgatggcctgctggatggctatgataataggctgcggcctgggctcggggagcgcatcactcaggtgcgaactgatatatatgtgacttcgtttgggccagtctctgatacagagatggaatatacgattgacgtgttttttcgacaaagctggaaagatgagcgcctcagatttaagggccctatgcaacgtctgccactcaataatctccttgcgagcaagatttggaccccagacacattttttcacaatggaaaaaaaagtatcgcccacaacatgacgactcccaataagctgttacgcctcgaagacgatggaactttattatacactatgcggctaactatctcggccgagtgccctatgcagctagaagatttcccaatggacgctcacgcttgtcccctgaaatttgggtcttatgcctaccccaactccgaggttgtgtacgtctggacaaatggctcgactaagagcgtggtggtggcagaggacggctcaagactgaaccagtatcatctgatgggacagacagtgggcactgaaaacatctcaactagcaccggcgagtacaccatcatgaccgcccactttcatctcaagcggaaaatcggatatttcgtgattcaaacctatctgccttgtataatgactgttatcttgagtcaagtctccttctggctcaacagggagtcagtgcccgcaaggacagtgttcggcgtcactactgttctcacaatgaccacattgagtatttcggctagaaattccctgcccaaggtcgcttacgcaacggctatggattggttcatcgccgtgtgctatgctttcgtcttcagcgcgcttatagagttcgcgaccgtgaattatttcacaaagcgcggttgggcttgggatgggaagaaggcactcgaggctgccaagattaagaagaagcgggaagtcattctgaataaatccacaaatgccttcacaactggcaaaatgtcacatcccccaaatatccccaaggagcagacccccgctggaacatccaacacgacttctgtaagcgtgaagccatccgaggaaaaaacatccgagagcaaaaagacatacaatagcatctctaagatcgacaaaatgagtcgcattgtgtttccagttctgttcggaaccttcaatttggtttactgggccacctacctaaatagagaacctgtgattaagggagccgcatctccgaaatag

SEQ ID NO: 224232 - DNA, 1389 bp, synthetic construct
  misc_feature 1..1389: note = Description of Artificial Sequence: Synthetic coding sequence
  source 1..1389: mol_type = other DNA
atggacaatggcatgttcagtggctttataatgatcaagaacttgctgctcttttgcattagcatgaatctgagtagccacttcggcttctcccaaatgccaacatctagcgtcaaggatgaaactaatgacaatataacaatctttaccaggatcctcgatggcttgctagacggatatgacaatagattacggcctggattgggggaacgcattactcaagttcgcaccgatatatacgtgacgtcctttggacccgtgtccgatacagaaatggagtataccatcgacgtttttttccgtcagtcttggaaagacgagcgcctgcgttttaaggggccaatgcagagactgcccttgaacaatctgcttgccagtaagatttggaccccagatactttcttccataatggcaaaaaatccatcgcacataatatgaccacccccaataagctactccgcctagaggatgatggcactctgttgtacaccatgagacttaccatctctgccgaatgtcccatgcaactagaggattttccaatggacgcccatgcttgtccactgaagtttgggagctacgcttatccaaattcagaagttgtttatgtgtggacaaacggtagtaccaagagtgtcgtggtggccgaggatgggtctagactgaatcaataccacctcatggggcagactgtgggcacggagaacatctccacttctacaggggaatataccatcatgacggcccactttcatctgaaaagaaaaattgggtatttcgtgattcagacatatcttccttgcataatgaccgtgatattatctcaggtttcattttggctgaaccgcgaaagtgtgccagccaggacagtctttggggttaccactgtgctgactatgactactctctcaataagcgctcgaaacagccttcccaaagttgcatatgctaccgcaatggactggttcattgccgtgtgctatgcctttgtgttcagcgcactcatagaatttgctaccgtgaattattttaccaaaaggggatgggcctgggacggcaagaaagcactggaagccgctaaaatcaagaagaagcgggaagtgatcctgaataagagcaccaatgctttcacaactggtaagatgtcacatcccccaaacatcccgaaagagcagacgccagcaggcacaagtaataccacgtccgtatccgtcaagcccagcgaagagaagaccagcgagagcaagaaaacatacaatagtattagcaagattgataagatgtctaggatagtgttccccgtgctgttcggcacatttaacctcgtgtactgggcgacctacctcaatcgagagccagttattaagggagctgcatccccaaagtag

SEQ ID NO: 224233 - DNA, 261 bp, synthetic construct
  misc_feature 1..261: note = Description of Artificial Sequence: Synthetic coding sequence
  source 1..261: mol_type = other DNA
atggacaacgggatgttcagtgggtttatcatgattaaaaaccttctgctgttctgtatttcaatgaatcttagcagccatttcggcttcagccagatgcctacttcgagcgtaaaggacgagacaaacgacaatattacaatattcacacgtatactggatgggctgctagacggatacgataataggctgcgccctggtttgggcgaacggatcacccaggtgagaacagatatttatgtgacttctttcggcccatag

SEQ ID NO: 224234 - DNA, 450 bp, synthetic construct
  misc_feature 1..450: note = Description of Artificial Sequence: Synthetic coding sequence
  source 1..450: mol_type = other DNA
atggacaatggcatgttcagtgggttcatcatgattaaaaacctgctgctgttttgcatcagtatgaacctgtcatctcattttggattcagtcagatgccaacatctagtgtgaaagatgagacgaatgacaacattactattttcacccggattctggatggcttgctggatggatacgataacaggcttcggcctggcctcggagagcggattacacaagtacgtaccgacatttatgtgaccagcttcggcccagtaagcgacactgagatggagtataccatcgacgtattctttagacagagctggaaggatgagaggctaaggttcaagggccctatgcagcgcctccccctcaataacctgctggcctcaaagatatggacccccgacacgttcttccacaacggtaagaaatcaatagctcataatatgacgacaccctag

SEQ ID NO: 224235 - DNA, 501 bp, synthetic construct
  misc_feature 1..501: note = Description of Artificial Sequence: Synthetic coding sequence
  source 1..501: mol_type = other DNA
atggataatggaatgttctcgggctttatcatgataaaaaacctccttctcttctgtatcagcatgaacctgtctagtcacttcggcttctcccagatgcccacatccagcgttaaggatgagacaaacgataacattactatattcacccggattctggacgggcttctcgatggctacgataacagacttcgacccggactcggtgaacgtataactcaagtccggacggacatctatgtgacaagcttcggtcccgtctctgataccgagatggagtatactatcgatgtcttcttccggcagagttggaaggatgagaggttacggtttaaggggccaatgcagcggctaccccttaacaaccttcttgcctctaaaatttggacgcccgatacgtttttccacaacggtaaaaagtcgatagctcataatatgacaaccccaaacaaactccttaggctggaggacgacggaaccctgctgtataccatgcggtag

SEQ ID NO: 224236 - DNA, 51 bp, synthetic construct
  misc_feature 1..51: note = Description of Artificial Sequence: Synthetic coding sequence
  source 1..51: mol_type = other DNA
atggacaacggtatgttcagcgggttcataatgatcaaaaacctcctttag

SEQ ID NO: 224237 - DNA, 1362 bp, synthetic construct
  misc_feature 1..1362: note = Description of Artificial Sequence: Synthetic coding sequence
  source 1..1362: mol_type = other DNA
atggcctcatctctcccatggttgtgcatcattctttggctggaaaacgccctcggaaaattggaggtagaggggaacttctattctgaaaacgtcagcagaattttggacaacttgttggagggctacgacaatcggttacgaccaggctttgggggtgccgttaccgaagtgaaaacagatatctatgttacctcttttggccctgtaagcgacgtagagatggagtacacaatggatgtctttttccgacaaacttggaccgacgagcggctgaaatttggtggcccaacggagatcctaagcctgaataacctaatggtatcgaaaatttggacccccgatacattcttccgcaacggcaagaagagcatagcccataatatgaccactcctaataaactattccggatcatgcagaacggcacaatcctatatactatgcgtctgacgatcaacgctgattgtcctatgcgcctggtgaacttccccatggatggccacgcatgccccttgaagttcggatcctacgcctatcccaaatcggagatcatttatacttggaagaaaggcccactctattcagtagaggtcccagaggagagttcctcactgctacaatatgacctgatcggtcagacagtctccagtgaaactattaaatctaacacaggagaatatgtcatcatgaccgtgtatttccacctgcagagaaagatgggttatttcatgatccagatctacactccatgtatcatgacagtgattctgagccaggtttccttttggataaacaaggagagcgtcccagccaggacagtttttggaatcacgacggttctgacaatgacaaccttgagcatcagcgctaggcacagtttgcccaaggtgagttacgccactgcaatggattggtttattgctgtatgcttcgcattcgtcttttcagctctgatcgagtttgccgcagtgaactacttcaccaatttgcagacacagaaagcaaaacgaaaggcccagttcgccgcaccaccaactgtgaccatctccaaagccacggagccgctggaagcagaaatcgtgctgcacccagactctaagtatcacctcaagaagagaattacttctctttcactgcccatcgtttcttcgtccgaagccaataaagtcctgacaagagctcctatcttgcagtccacacccgtgacgccaccaccacttagccctgccttcggcggaacctcaaaaatcgaccaatatagcagaatactgtttcctgtagctttcgccggtttcaacttagtttactgggtcgtttacttgtcgaaagataccatggaagtctcttcttccgtcgagtag

SEQ ID NO: 224238 - DNA, 1332 bp, synthetic construct
  misc_feature 1..1332: note = Description of Artificial Sequence: Synthetic coding sequence
  source 1..1332: mol_type = other DNA
atggcttcatctctcccttggctgtgtattatcctgtggctggaaaacgctctgggcaaactagaagtggaggggaatttttacagtgaaaatgtctcccggatactggataatctgttggagggctacgacaatcgcttgaggccaggatttggaggtgctgtcacagaggtgaaaactgacatctatgttacgagtttcggccctgtaagtgacgtagaaatgacctggactgacgagcgactgaaattcggaggacccacagagatcttgtccttaaataacctgatggttagtaaaatttggacccctgacacatttttccgcaacgggaagaagtcaattgcccacaacatgacaacccctaataaactatttcggatcatgcagaatggcacaatcctgtatactatgaggctgaccatcaacgccgactgtccaatgcggttagtgaattttccgatggatggccacgcctgccccctaaaattcggtagctacgcttatcctaagtccgaaattatctatacatggaaaaagggtcctctgtactccgtggaagttcctgaggagagcagctctctgttacagtatgacctgatcgggcaaacagtctcatcagagaccatcaagtctaacacaggggagtatgtaatcatgaccgtgtacttccacttgcagcggaagatgggttatttcatgattcagatctacaccccctgtattatgacagtgatcctatctcaagtgtctttctggattaataaagagtcagtgcctgcaagaactgtgttcggtatcaccaccgtgttgacaatgacgacgctgtccatctctgcaagacactcactccctaaagtgtcttatgcaacagctatggattggtttatagctgtttgctttgcattcgtcttctcggcattgattgaattcgcggcagtgaactattttactaacttacaaacacagaaagcaaagagaaaagcacagtttgctgcccctcccacagtgaccatctccaaagctaccgaacccctggaggccgagatcgtcctccaccctgatagcaagtaccacctcaaaaagagaatcacaagtctgagcctgcctatcgtgagctccagtgaggccaataaggtactgacacgtgctcccatcctgcagtctactcccgtgaccccgccaccccttagccctgcgtttgggggaacaagcaagattgatcagtactcccggattcttttccccgtcgcctttgctggtttcaatctcgtctactgggtggtgtacctgtctaaggatacaatggaagtgtcttccagcgttgaatag

SEQ ID NO: 224239 - DNA, 1425 bp, synthetic construct
  misc_feature 1..1425: note = Description of Artificial Sequence: Synthetic coding sequence
  source 1..1425: mol_type = other DNA
atgtggacagtgcagaacagggagagtcttgggctcctgagttttcccgtgatgatcacgatggtgtgctgcgcacacagtaccaacgagccgagcaacatgtcgtacgtgaaagaaacagtcgatcgcctgctcaagggctacgacattcgactgagacctgatttcggcggacccccagttgacgttggaatgcgaattgatgtggcatctatcgatatggtgtcagaggtgaacatggattataccctgacaatgtacttccagcagtcctggaaagacaagagactgtcatattctggcattcctctaaatctcaccctggataatagagtggccgatcagctgtgggtcccggatacctatttcctcaatgacaagaaaagctttgtgcatggtgtgaccgttaaaaacaggatgattaggctgcatcctgatgggacagtgctgtacggactccggattacaacgaccgccgcatgcatgatggatctgcgtcgataccctctcgacgaacagaactgtacgctggaaatcgagtcgtatggatacactaccgacgatatcgaattttactggaacggcggtgaaggggctgtgacaggcgtcaataagatcgaactgcctcagttctctatcgtggattacaagatggtgagcaaaaaggttgagttcaccactggcgcatatcccagactcagtctcagctttaggctcaagcgcaacatcggatacttcattttacagacttatatgccgtccacattgatcaccattctctcctgggtgtcattctggatcaactacgacgcctcggctgctagagtagcactgggcattactacagtgctgactatgacgacaatcagcacacacttgcgcgagactctgcccaaaatcccttatgtgaaagccatagacatttacttaatgggctgtttcgtgttcgttttcctggcgctcctggaatacgcgtttgtgaattacatctttttcggcaagggcccacagaaaaaaggtgccagcaagcaggaccagagtgccaatgagaagaataagttggagatgaacaaggtccaagtcgacgctcatggcaacatcctgttgtctacacttgagattcgaaatgagactagtggatccgaggtgctgacctccgtgagcgacccaaaagccacaatgtactcatacgacagtgctagcattcagtatcgcaaacccctaagcagcagagaagcttatggccgtgcccttgatcggcatggggtgcccagtaaaggcagaatcaggagacgggcttctcaactgaaagttaagatccccgatctaacggatgttaacagcatcgataagtggagcaggatgttttttcccatcacattttctctgttcaatgttgtgtactggctgtattacgtgcactag

SEQ ID NO: 224240 - DNA, 1215 bp, synthetic construct
  misc_feature 1..1215: note = Description of Artificial Sequence: Synthetic coding sequence
  source 1..1215: mol_type = other DNA
atgaccttcgcttgcggaagaacatcggaggattatactctaacaatgtacttccagcagtcctggaaggacaaaagactgtcctacagtggcatccctcttaacctgacacttgataatagggtggccgaccagctgtgggttcccgatacatacttcctgaacgataagaagtcatttgttcacggcgtgacggtgaagaatcgcatgattcgcctccaccctgacggtactgtcctctatggactgagaatcaccaccaccgcagcatgtatgatggacttgcggcgttaccccctggacgaacagaattgcaccttggaaatagagtcttacgggtacaccactgatgatatagagttttattggaacggaggggagggagctgtcacgggtgtaaacaaaatagaactgccccagttcagcattgtcgactacaaaatggtgagcaagaaggtggagtttactactggggcttatccaaggttaagtctgtctttcagacttaagcggaacatcgggtactttatcctgcagacatacatgccgtctacacttattaccatcctgtcctgggttagcttctggattaactacgatgcctcagcagcccgtgtggccctgggaatcacgacagttctgaccatgaccactatctctacccacctgagggaaactttgcccaaaatcccatacgtgaaggccattgacatataccttatgggttgtttcgtgttcgtatttttggccctactcgaatacgcctttgtcaattacattttttttggcaaaggaccacagaagaagggagcatccaagcaggatcaaagtgccaacgagaaaaataagctggagatgaacaaagtccaagtggacgcgcatggtaacattttgctcagcaccctggagatccgcaacgagacttcgggatccgaggtgcttacctctgtcagcgatcctaaggccactatgtatagctacgatagtgcttccatacaatacaggaagcccttgtcttccagggaggcctatggtcgggctctcgaccgccacggagtgccctcaaaggggcgtatccgaaggagagcctcccagctgaaggtaaagatacctgatctgactgatgtgaacagtatcgataagtggagtaggatgttcttccccatcactttctctctgtttaacgtggtgtattggctgtattacgtccattag

SEQ ID NO: 224241 - DNA, 1539 bp, synthetic construct
  misc_feature 1..1539: note = Description of Artificial Sequence: Synthetic coding sequence
  source 1..1539: mol_type = other DNA
atgtggcgggtgaggaaacgtggatattttgggatctggtcttttccattgattattgccgcagtgtgtgctcaatcggtgaatgatccctccaacatgtctctagtgaaagagacagtggaccgcctgttgaaagggtatgacataaggctgagaccagattttggcggacctccagtagcggtgggcatgaatattgatattgcatccatcgatatggtgtcagaagtcaacatggattatactctgaccatgtacttccagcaagcttggcgtgacaagcgccttagttacaatgtcatcccactcaatctcacactggataatcgagttgccgatcaactgtgggtgccggacacctactttcttaacgataagaagtcctttgtacatggggtaactgtgaagaatcgcatgatccggctacaccctgacggaaccgtgctctacgggctgagaatcaccaccaccgcggcttgcatgatggacctacgcaggtacccccttgacgagcagaactgcacacttgagattgagtcatacggttatactaccgatgatatcgagttttattggcgcggtgacgataacgccgtgacgggagttactaaaatcgaactacctcagttcagcatcgttgattacaagctgattacaaagaaggttgtgttctctacaggctcttaccctaggctcagtctatctttcaaattgaagcggaatatcggatatttcatcctgcagacatatatgccgtctatcttgatcactatcctgagttgggtgagcttttggattaactatgatgcttccgcagccagggtagccttaggtatcactactgtactaaccatgaccaccataaatactcacttgcgcgagactcttccgaagataccatacgtgaaagcaatcgacatgtatcttatgggatgcttcgtctttgtgttcatggcactcctggaatacgccctcgtgaactatatcttttttgggaggggaccacaaaggcaaaaaaaggccgcagagaaggccgctagcgccaataatgagaaaatgcgactcgacgtgaataaaattttctacaaggacataaagcagaatgggacccagtatcgcagcttatgggacccaaccggaaatctgtcccccactcgacgtaccactaactatgacttcagtctttacacaatggacccgcacgagaacatccttctgtctactcttgaaataaagaatgagatggcgacctctgaagctgtcatgggactgggagaccctcgcagcacgatgcttgcgtacgacgcatctagcatccagtaccggaaggcaggcctaccacgccactctttcggccgaaacgccctcgagcgccacgtggctcagaaaaagagcagactccgcaggcgcgcttcacagctcaaaattactattccagatctcaccgacgtcaatgctatcgatcgatggagccggattttcttccccgtggtgttctccttcttcaatatcgtgtattggctgtactacgtgaactag

SEQ ID NO: 224242 - DNA, 1425 bp, synthetic construct
  misc_feature 1..1425: note = Description of Artificial Sequence: Synthetic coding sequence
  source 1..1425: mol_type = other DNA
atgtggcgagtgaggaagaggggctacttcgggatctggagctttccgctcatcatcgcggcagtttgcgctcagtccgtcaacgacccttccaacatgagtctagtgaaggagactgtcgatcgattactgaaaggatacgatatcaggcttagacctgacttcggtggtccacccgtggctgttgggatgaacatcgacatcgcctccatcgatatggtatccgaggtcaacatggactacactttgaccatgtactttcagcaggcatggcgggacaagcgtctttcatataatgtgatccctttgaatctgaccttggataacagggtggctgaccagctgtgggtgccagatacctatttcctaaatgacaagaagtcatttgttcacggggtcaccgtgaaaaatcgcatgatacggctccatcctgacggcaccgtcctctatggactccggatcaccacaaccgcagcatgtatgatggacctgcgcagatatcccttagatgaacagaattgcacgttggagatcgaatcttatggctatacgacagacgacatagagttttactggaggggagatgataacgcagtaacaggggtgaccaaaattgaactcccccagtttagcatagtagactacaaactaatcaccaaaaaggtcgtgttttccacgggaagctaccctcgcctgagcctatcctttaaacttaagcgcaatatcggctactttatcttacagacgtacatgccctctatcttaatcactatcctgagctgggtatcattttggattaattacgacgccagcgccgctagggtggcccttggaatcacgactgttctgacgatgactacaatcaatacccatttaagggagacattgcctaagatcccgtatgtgaaggccatagatatgtatctcatgggctgttttgtgttcgtgtttatggctctgcttgagtacgccctcgtaaattatatcttttttggccgaggtccccagcgtcagaagaaggcggcagagaaagcagcaagtgccaacaatgagaaaatgcgcctggacgttaacaagatggaccctcacgaaaacatcctgctgtccacactcgagatcaagaatgagatggccactagcgaggccgttatgggcctaggcgacccacgttccaccatgttagcatatgatgccagttcaatacagtaccgcaaagcaggtttgccccgacacagtttcggcagaaatgccctggagcgacacgtagcacagaaaaaatccagactgcggaggcgcgcaagccagctaaagatcacaatcccagatctgacggacgtcaatgcaatcgaccggtggtctagaatattcttccctgtggtattttcctttttcaacattgtctactggctctactatgtcaattag

SEQ ID NO: 224243 - DNA, 1539 bp, synthetic construct
  misc_feature 1..1539: note = Description of Artificial Sequence: Synthetic coding sequence
  source 1..1539: mol_type = other DNA
atgtggcgagttcgaaaacggggttatttcggcatctggtccttcccactcattattgcagctgtgtgcgcacaaagcgtcaacgacccaagcaacatgagcctggtgaaggaaactgtcgaccggctgctgaagggctatgatatcagacttaggcccgatttcgggggaccacctgttgccgtcggaatgaatatcgatatagcctccattgatatggtcagcgaggttaacatggattataccctgaccatgtattttcagcaggcttggagagacaaacgtttaagctacaatgtgatcccactcaaccttaccctggacaatagagttgccgaccagctctgggtacccgacacttatttcctgaacgacaaaaaaagctttgtgcacggcgtgacggtgaagaacaggatgattagactgcacccagatggtaccgtgctgtacggcctgcggattaccacgaccgccgcttgtatgatggatctccgccgatacccacttgacgagcagaactgcacactggaaatcgaatcgtatggctataccacggacgatattgaattctattggaggggagatgataacgcagtgaccggtgtgactaaaattgagcttccccagttttcaatcgtcgattacaaactgatcacaaaaaaggttgtgttttctaccggctcttatcctaggttgagtctgtcctttaagttgaagaggaacattggctatttcattctccagacttacatgccatcgattcttattaccattctaagttgggtgagcttttggatcaactatgatgcctcggccgcaagggttgctcttggaattacaactgttctgaccatgactacgataaacacccacttgcgcgaaacacttccaaaaattccatacgtaaaggcaattgatatgtatctgatggggtgctttgtttttgtcttcatggccttattggaatatgcactcgtgaattacattttcttcggtcgcggtccgcagcgtcagaagaaggctgccgagaaggctgcctccgctaataatgagaagatgagactggacgtcaacaagatcttctacaaggacataaaacagaatggcacccagtatcgttcgctctgggacccgaccggcaatctctcgccaactaggaggaccacgaattacgatttctctctgtataccatggatccacatgagaatatattgctgtctaccttggagatcaaaaatgagatggctactagtgaggcagtgatgggccttggggaccctcgatccacaatgttagcatatgacgcttccagcattcaataccggaaggccggtctgcccaggcactcttttggcaggaatgctctcgagaggcacgtggcccagaaaaagagcagattaagacgacgggcttcacagctaaagatcaccatccctgatctcacggatgttaacgctatcgacaggtggtcaaggatcttcttccctgttgtgttctctttctttaatatcgtttactggctgtactacgtcaattag

SEQ ID NO: 224244 - DNA, 945 bp, synthetic construct
  misc_feature 1..945: note = Description of Artificial Sequence: Synthetic coding sequence
  source 1..945: mol_type = other DNA
atgatggaccttcgccgttatcctctggatgaacagaattgcaccctcgagatcgaatcgtatggttacacaactgacgacatcgaattttactggaggggagacgacaacgccgtaaccggcgtgacgaagatagaactgccccagttcagcatcgtcgattataaattaattaccaagaaggtggtgttcagtacagggtcctatcccaggctgtctttgagttttaaactgaaaagaaatatcggctacttcatcttgcagacgtacatgcccagcatcttgattacaattctgtcatgggtgagtttttggattaattatgatgccagtgccgcacgcgtggcactgggaattacgacggtcctaacaatgaccactattaatacccatcttagggagacccttccaaagattccctacgtcaaagccattgatatgtatctgatgggatgcttcgtgttcgtgttcatggccctcctcgagtacgctctggtcaactatatcttctttgggagaggaccacaaaggcagaagaaagcagccgagaaagcggcttcggcaaataatgagaaaatgcgtctggatgtaaataagatggacccacacgaaaatatattgctctccaccttagaaatcaaaaatgaaatggctacaagcgaggcagttatggggttgggggaccctcgcagcacaatgcttgcctacgacgctagttctattcaataccgcaaggcagggctgcccagacacagttttggcaggaatgcactggagcgacacgtcgcacagaagaaatcacggctgcgacgacgggcatcccagctcaaaattacaatacccgaccttactgacgtaaatgccatcgatcgctggtcccgaattttcttcccggtcgtgttttctttctttaacattgtgtactggctatattacgtaaactag

SEQ ID NO: 224245 - DNA, 1236 bp, synthetic construct
  misc_feature 1..1236: note = Description of Artificial Sequence: Synthetic coding sequence
  source 1..1236: mol_type = other DNA
atgaatatagacatcgccagcatagacatggtatcggaggtaaatatggattacacactcactatgtattttcaacaggcatggcgagacaagcggctgtcctacaacgtgattccgttgaatctgaccctggacaatcgggtcgccgatcagctctgggtccctgatacctatttcctgaacgacaaaaagagcttcgtgcacggggttaccgtgaaaaatcgaatgatccggcttcatcctgacggaactgtactgtatggactgaggatcactacaacagccgcatgtatgatggacctccggagatatccattggatgagcagaactgcaccttggaaatcgagtcctatggctatacgactgatgatatcgaattctactggcggggtgatgataacgcggtgaccggggttaccaagatcgagttaccacagttttcgatcgtcgactataagctgatcaccaagaaggtagtgtttagcacagggagttacccacgcttgtccctatctttcaaactcaaaagaaacatcggctacttcattttgcagacatacatgccttcgatcctgatcacgatcctgagctgggtgagtttttggatcaactatgacgcatccgctgctcgtgtggcactaggaatcactaccgttctcacaatgaccaccataaacactcatttgcgcgagacgctgccaaagattccttacgtgaaagctatcgatatgtatctgatggggtgcttcgttttcgtctttatggcactgctggaatacgcactggttaattatatctttttcggcagagggccacaaagacaaaagaaagcagccgagaaagcagcaagcgcaaataacgagaagatgcgtctggacgtgaacaagatggatccccacgagaatatactgcttagcacccttgaaatcaaaaacgaaatggcgacctcggaggcagtgatgggactaggcgaccctcgcagcaccatgctggcctacgacgcctcaagcatacagtacaggaaggccggtctgcctcgacattctttcggacgcaatgcgttagagcgccatgtggcacagaagaaatcccggctgcggagacgggcttcgcaattgaagatcacaattcccgacttaacagacgttaatgcgattgatcgatggtcccgtatttttttccccgttgttttttcatttttcaatattgtctactggttatattacgtcaactag

SEQ ID NO: 224246 - DNA, 1425 bp, synthetic construct
  misc_feature 1..1425: note = Description of Artificial Sequence: Synthetic coding sequence
  source 1..1425: mol_type = other DNA
atgtggcgggtccgcaaaaggggttacttcgggatttggagttttccattgattattgctgccgtctgtgcacagtcagtgaatgacccctctaatatgtcgttggtcaaggagactgtggaccgactgctcaaagggtacgacatacgcctgagacccgattttggcggtccccctgtcgcagtcgggatgaacatcgacatcgctagtatcgacatggtatccgaagtgaacatggattacaccctgacaatgtacttccagcaggcatggagagataagaggctctcctacaacgttatacccctgaacctcacactcgataatagggtggccgatcagctgtgggtacccgacacctatttcctgaacgacaagaagtcattcgttcacggcgtcactgtaaaaaacaggatgatccggttgcatccagatggaacagtgctgtatggcttaagaataacaaccactgctgcatgcatgatggacttaaggaggtacccgttggacgaacagaactgcaccctcgaaattgagtcgtatggatacacaacagacgatatcgaattttattggcggggtgatgacaacgcagtgacaggtgttaccaagattgagttaccccagttcagcattgtcgactataaattaatcactaagaaagtggttttctcaactgggtcctacccccgactaagtctgagcttcaagctgaaacggaacattggctactttattctgcaaacctatatgccttctatcctgataaccatcctaagctgggtatccttctggatcaattatgatgcatccgccgcaagagtggctctgggcataacgactgtgcttacgatgactaccattaatacgcacctgagagagacacttcctaaaatcccttacgtgaaggcgatcgatatgtacctgatgggctgcttcgtgttcgttttcatggccctgctggaatatgcactggtcaactatatattctttggccgtggacctcaacggcaaaagaaggccgctgaaaaagcagcgtccgcaaacaacgagaaaatgaggctcgatgttaataagatggacccacatgagaatatcctgttgtctacattggagattaaaaacgaaatggcaacctcagaggccgtcatggggctcggtgatccccgatccactatgctagcctatgatgcttcatccattcagtaccggaaggctggcctgccccgtcactcctttggcaggaacgcactggagaggcatgtcgcacagaagaagagcaggctgcgaaggcgagctagtcaactgaagattaccatccctgacctaaccgacgtgaacgcaattgaccgatggtctcggatttttttccccgtggttttcagctttttcaacattgtctactggctgtactatgtaaactag

SEQ ID NO: 224247 - DNA, 1422 bp, synthetic construct
  misc_feature 1..1422: note = Description of Artificial Sequence: Synthetic coding sequence
  source 1..1422: mol_type = other DNA
atgtgcagtggtctgttggagctgttattgcccatttggttgtcttggacactggggacgcgtggcagcgaaccgaggtccgttaatgatccagggaacatgtctttcgtaaaggaaactgtggacaaattgcttaaaggctacgatattcgcctgcgccctgactttggcggaccgccagtgtgtgtggggatgaatattgatatcgcttctattgatatggtgtcagaggtgaatatggattacactctgaccatgtatttccagcagtactggagggacaagagattagcctatagtggaatccctttaaacttaacactcgataatagggtggccgaccagctgtgggtgccagatacctacttcctcaacgacaagaagagtttcgtccacggagtaaccgtaaaaaataggatgatcaggctgcaccctgacggcaccgtgctgtatggccttcggatcaccactacagcggcatgcatgatggacctacgaaggtaccctctggacgagcagaattgtacactggagatcgagagttacggctatacaacagacgatattgaattctattggagggggggagacaaagccgtcacaggtgtagagcgaatcgagttaccacagttcagtatcgtggaacatagattggtttcacgaaatgtggtatttgccaccggcgcatacccaaggcttagcttgtctttcagactaaaacggaacatcgggtactttatcctgcagacctatatgcccagtattcttatcaccatcctgtcatgggtgtcattctggatcaattacgatgcgtccgccgcacgggttgccctgggcatcacgaccgtgctgaccatgacgacaatcaacacacatctaagagaaaccctacccaaaatcccatatgtgaaggcaatcgacatgtatctgatggggtgctttgtgtttgtgtttctggctctcttggagtatgcattcgtgaattacattttttttggtcggggtccccagagacagaagaagttggccgagaagacagccaaagcaaagaatgaccgaagcaagagcgaaagtaaccgggtggatgcacacggaaatatactgttaacctctttagaggttcacaatgagatgaatgaagtgtccgggggaattggtgatactcgcaacagtgcaatctccttcgataactcaggcattcagtacagaaaacagtccatgccacgagaagggcatggcaggtttctgggcgatcgatctcttccacacaagaagactcatcttagaagacgatcgagccaattaaagattaaaattcccgacctcaccgacgtcaacgcaattgacaggtggtcacggatcgtgtttccatttactttttcactattcaaccttgtctattggctttactatgttaattag

SEQ ID NO: 224248 - DNA, 1422 bp, synthetic construct
  misc_feature 1..1422: note = Description of Artificial Sequence: Synthetic coding sequence
  source 1..1422: mol_type = other DNA
atgtggggcctcgccggaggcagactgtttggcatattcagcgctcccgttctagtcgctgtcgtatgctgtgcccagagcgtaaatgatccgggtaacatgtcctttgtgaaggaaacagtcgacaaactcctcaaaggatatgacattcgcctccgacccgacttcgggggtccccctgtttgtgtggggatgaatatcgacatagccagtatcgacatggtttctgaagtaaacatggactatacactgaccatgtacttccaacagtactggagggataaacggctggcctatagcggaatccccttaaacttaacccttgataaccgcgtcgcagatcagctgtgggtgcccgacacttacttcttgaacgataaaaaaagcttcgttcacggagttacagttaagaatcggatgattaggctccatccggacgggaccgtgctgtacggactacgaattacgactacggccgcttgcatgatggatctgcgcagatacccactggatgagcagaattgcaccctggaaatcgagtcatatggctacaccacggatgatatagaattctattggcggggaggcgataaagcagtgaccggggtggaaaggatcgagctccctcagttcagcattgtcgagcatagattagtgtcccgcaacgtagtgtttgccacgggagcctatcccagattaagtctctcttttagattaaagcgaaacattggctactttattttacagacctacatgccgtcaatccttattaccatactgtcatgggtaagtttctggatcaactatgacgcttccgctgccagggtcgccctcgggataacaaccgtgcttaccatgacaacaatcaacactcacctccgcgagaccctgccgaaaatcccgtatgtgaaggcaatcgatatgtacctgatgggatgcttcgtcttcgtgttccttgctttgcttgagtacgctttcgtcaactacatcttcttcggtagaggacctcagcgacaaaagaaattagcagaaaagacagcaaaggcgaaaaatgatcgctccaagtcagagtccaaccgtgtggacgcccatggaaatattttactgacatctttagaggtccacaacgagatgaacgaggtaagcggcggaattggtgatacacgtaattccgcaatcagcttcgataacagtggcatacagtaccgaaagcagagcatgcctcgggagggacatggccgtttccttggcgaccggtctctgccacacaagaagactcatctgcgacgcaggtcgtcacagttgaaaatcaagatccctgaccttaccgacgtgaacgccatcgatcgatggtcacggatcgtctttccctttacattttcactgttcaacctcgtgtactggttgtattatgtgaattag

SEQ ID NO: 224249 - DNA, 1209 bp, synthetic construct
  misc_feature 1..1209: note = Description of Artificial Sequence: Synthetic coding sequence
  source 1..1209: mol_type = other DNA
atgtgggcaacctatcagacggaggaggactacactctcacgatgtacttccagcaatactggcgagataaacgattggcctattctggaattcctctgaacctgactctggacaatcgggtagcggaccagttatgggtgcctgatacatacttcctcaacgataagaagtctttcgtccacggcgttaccgtcaagaaccgaatgattagattacaccctgacggaaccgtactgtacgggcttaggattaccaccaccgcggcatgcatgatggatctgcgtaggtatccacttgatgaacagaattgcaccttggagattgaatcttacggttataccactgacgatatcgaattctactggaggggcggtgacaaagccgtgaccggagtggagcggatcgagctgcctcaattcagtattgttgagcatagacttgtgagccgcaatgtggtttttgcaacgggagcctatcctcgactcagcctctcctttcggttaaagcgtaacatcggctattttattctgcagacatatatgccaagtattctgattacaattctttcatgggtcagcttttggataaattacgacgcaagtgcagcgagagtggcgctgggtattactacagttctcacaatgaccaccattaacactcaccttagggaaaccctgccaaagattccctatgtgaaggctatagacatgtaccttatgggctgcttcgtgttcgtgtttctggccttgttggaatatgcatttgttaactacatcttctttggcagaggtcctcagcggcagaaaaagctggccgaaaagacggccaaggccaagaatgatcggtctaagtctgaatctaacagagtcgacgctcatggcaacatcctgttaacaagcttggaggtccacaatgagatgaacgaggtatccggtggaattggagatactaggaattctgccatctcctttgataactccggaatccagtaccgcaaacagtctatgccaagagaggggcatgggagattcctgggcgataggtcacttccacataaaaagacccatttgagacgcaggagctcccagttaaagatcaagatccccgacctgactgatgtgaacgctattgaccgttggtccaggatagtgtttcccttcaccttttctctttttaacctggtttattggctttactacgtcaactag

SEQ ID NO: 224250 - DNA, 1167 bp, synthetic construct
  misc_feature 1..1167: note = Description of Artificial Sequence: Synthetic coding sequence
  source 1..1167: mol_type = other DNA
atgtattttcagcagtactggcgagacaaaaggctggcatacagcgggatccctttgaatctcactctcgataaccgcgtggccgatcagctttgggtacctgacacgtatttccttaacgataaaaaaagcttcgtgcacggtgttactgttaagaacaggatgattcgcctgcatccagatggaacggtactttatggtctcaggataacaaccactgctgcctgtatgatggacttgcgtagataccctttggatgaacagaattgcactttagagatcgaaagctatgggtacacgaccgatgacatagagttttattggagaggcggagataaagccgtgaccggagtggagcgtatcgagcttccccagttctctattgtggagcatcgcttggtgtcacgcaacgtggtcttcgcaacaggcgcataccccagactatctctgagtttcagactgaagcgcaacatcggctattttattctgcagacttacatgccgtcaatcttaattaccattctcagttgggtgtctttttggatcaactatgatgcgtcagctgcccgtgtggccctgggtattacgacggtgctgacaatgacgacaattaatactcacctgcgcgagactctccctaaaataccctacgtaaaggccattgacatgtatctgatgggatgtttcgtcttcgtgtttctcgctctgcttgaatatgccttcgtgaactacatatttttcggcaggggcccacagcggcaaaaaaagttagccgagaaaactgcaaaggccaaaaacgacaggagtaaatctgagtcaaaccgcgtcgatgcccacggtaatatcctgctgacctcccttgaagtgcacaacgagatgaacgaagtgtccggcggaattggagatactaggaattccgctatctctttcgacaatagcggcatacagtaccgcaaacagtcgatgcccagagaaggacacggaaggtttctgggagatcgcagtctgccccataagaagactcatctgcgcaggagatccagtcagttaaaaataaaaattccggacttaaccgacgtgaatgccatagaccgctggagccgtattgtgttccccttcaccttttctttatttaacctagtttattggctctattacgtcaattag

SEQ ID NO: 224251 - DNA, 417 bp, synthetic construct
  misc_feature 1..417: note = Description of Artificial Sequence: Synthetic coding sequence
  source 1..417: mol_type = other DNA
atgtactttcaacaatattggcgggacaagagactcgcctactccggcataccactcaatctgaccctggataatcgagtcgctgaccaattgtgggtacccgacacttatttcctgaatgataaaaagagctttgtccatggtgtgacagtcaagaatagaatgattcgcttacaccccgacggaacagtgctttatggccttagaataaccaccaccgcagcctgtatgatggacttgaggcgctaccccctggacgagcagaactgcactttggagattgaatcctacggatacactacggacgacatcgagttttattggaggggcggtgacaaggctgtgactggcgtagaacgcattgagttgccccaatttagtattgtcgaacataggctggtatcgaggaatgtctag

SEQ ID NO: 224252 - DNA, 1359 bp, synthetic construct
  misc_feature 1..1359: note = Description of Artificial Sequence: Synthetic coding sequence
  source 1..1359: mol_type = other DNA
atggacgcgccagccagactgctcgctcccttgcttctgctgtgtgcacagcagctgcggggaactagggcgatgaatgatatcggagattatgtgggatccaatctggaaatctcgtggttgcccaacctggatggcctgatcgctgggtatgcccgaaactttagacctggaattggaggcccacctgtgaacgtcgccttggcactggaagtagcgagcattgatcacatcagcgaggcaaatatggaatacacgatgactgtgttcctccaccagtcctggcgggactcccggctgagttataatcacacaaatgaaacattggggctggactcgagatttgtagacaaactgtggctgccagatacattcattgtgaacgcaaaatccgcctggttccacgatgtgaccgtagagaataaattgattcggctccaacccgatggtgtgatactctatagcatacggatcacctctaccgtggcttgtgatatggatttagcgaaataccctatggatgagcaggaatgtatgctggatttagagtcttatggctatagttcagaagatatcgtctattattggtctgaatctcaggaacacatacacgggcttgataagctccaacttgctcagtttaccatcacttcctatagattcacgaccgaactgatgaactttaagagtgccggacagtttccccgtctgtcactccatttccatctgcgaaggaaccgcggagtttatattatccagtcctatatgcctagtgtactgctggttgctatgtcctgggtcagcttttggatctcacaggcggctgttccggctagagtgtccctcggcattacaactgttctgaccatgaccaccttgatggtgtccgctcgatcttccttacccagggcttctgcgatcaaggcactggacgtctacttttggatctgttatgttttcgtcttcgcagcactggtggagtatgcatttgctcactttaatgcagattacagaaagaagcagaaagccaaagtcaaggtgtctagacctcgggcagaaatggatgtccggaatgctatcgtcttgttttccttgagcgccgctggcgttacccaggaacttgccatatcccgtaggcagcgtcgtgtacccggtaacctcatgggatcctatagatcagtcggcgtggaaaccggcgagactaaaaaagagggcgctgctagatccgggggtcagggcggaatccgggcaagattacggccaatcgacgcagacaccattgacatctatgccagagccgtgtttccggctgctttcgccgctgtgaatgtcatttattgggccgcatacgccatgtag

SEQ ID NO: 224253 - DNA, 1521 bp, synthetic construct
  misc_feature 1..1521: note = Description of Artificial Sequence: Synthetic coding sequence
  source 1..1521: mol_type = other DNA
atgctgtccaaagtgctgccagtgttgctgggcatcttgctgattctgcaaagtcgtgtggagggcccacagacggaaagcaagaatgaggcatctagccgcgatgtagtttacggccctcagccacagccgctggaaaaccagttgctgtctgaggagacaaaaagtactgaaacggagactggctccagagtcggcaagctcccagaggcgtctcgcattttgaatacgatactgagtaattacgaccacaagctaaggcccggaatcggagagaagccgactgtcgttaccgttgagatttctgtaaattctctcggaccactgtccatcctggacatggaatatacaattgatatcatcttctcccagacatggtacgatgaacggttgtgttataacgacacctttgagtcccttgtgctaaatggaaacgtggtcagccagttgtggataccagacacctttttcaggaactctaagcgaactcacgagcatgagataacgatgcccaaccagatggttcgaatctacaaagacggcaaagtcctttacaccattaggatgactatcgatgccggttgttccctgcacatgctaagatttccgatggactctcattcatgccctctgtcattcagttcctttagctaccctgagaacgagatgatatataagtgggaaaattttaagttggagataaacgagaagaacagctggaaattgttccagttcgacttcacgggcgttagcaacaaaactgagatcatcaccacccctgtaggcgacttcatggtcatgacaatattcttcaacgtgtcccggcgattcggttacgttgcctttcaaaactatgtaccatcatctgtgaccaccatgctatcttgggtcagtttctggattaagactgagagcgcacccgctcggacgagcctaggaatcacttccgtcttgacaatgacgacactgggaacattttctagaaagaacttccccagggtgtcatatatcacggccctggacttttacatcgccatctgttttgtcttctgcttctgcgcccttctcgagttcgccgtgctaaactttctgatctacaatcagaccaaggcgcatgcttcgccaaagcttcgccatccgcgaattaactcaagagctcacgccagaacaagggccaggtcaagagcatgcgctcggcagcaccaggaagcatttgtttgtcagatcgtgactaccgaggggtctgacggcgaagagcgaccgagctgttccgctcagcagccaccctctccgggatcccccgagggaccacgatccctctgctcaaaacttgcctgttgtgagtggtgcaaaaggttcaaaaagtacttttgtatggtgccagactgtgaagggtccacatggcaacagggcaggttatgtatccatgtgtatcgcctcgataattacagccgagtcgtttttccagtcactttttttttctttaacgtgctgtattggttggtctgcttaaacctttag

SEQ ID NO: 224254 - DNA, 420 bp, synthetic construct
  misc_feature 1..420: note = Description of Artificial Sequence: Synthetic coding sequence
  source 1..420: mol_type = other DNA
atgagatccccttgtcccacacgatggtcggcgagtactcggatggctcgatgttgcacccaactcgtgagctacccggaaaatgaaatgatttacaagtgggagaacttcaaattggagattaacgagaaaaacagttggaagctgtttcagttcgatttcacaggcgtgtcaaacaagaccgaaatcataactacccccgtcggcgatctcaatgaggagcccagggatctgcccagagtcgctccacgagccacactcgaaacactgtttacacacccagatcaagtccaaggatctgaggggactgcattgattgtatcccgaatgtggatggaaccagtgacccagcccgcaatctgccgagagagacacctggtgttgctaccattcaaaattccaaggcaagaagatttttag

SEQ ID NO: 224255 - DNA, 1398 bp, synthetic construct
  misc_feature 1..1398: note = Description of Artificial Sequence: Synthetic coding sequence
  source 1..1398: mol_type = other DNA
atgggaccgctgaaggccttccttttctcaccgttcctgctccgcagccagtcccgcggagtgcggctggtgttcctcctcttgacattgcacttaggcaattgtgtagacaaagctgatgatgaggacgatgaggatctcaccgttaataagacatgggtattggccccaaaaatacacgagggcgatataacccagatccttaatagtctccttcagggctatgataacaagctccggccagatatcggtgtacggcctacagtgatagagaccgacgtttatgtaaattctatcggacccgtagaccctattaacatggagtacaccatcgatattatttttgcccagacatggtttgattcccggttgaagttcaactccacaatgaaggtgctgatgctcaactccaatatggtggggaaaatttggatacctgatactttctttcggaacagcaggaaatccgatgcgcattggatcacaacgcctaacagactgctccggatttggaatgacggcagggtgctatacactttgagactgaccattaatgccgaatgctatttacaactccataactttccgatggacgagcattcctgtcctctggagtttagtagttatggctatcccaaaaatgaaattgaatacaaatggaaaaagcccagtgtggaggtggctgaccctaagtactggaggctctatcagtttgcatttgtgggcctcaggaattcgactgaaattacccacacaatatccggcgactacgtgataatgacaatttttttcgacctgtcgcggagaatgggttatttcaccatacagacatatatcccgtgtatactaacagttgtgctctcttgggtgtcattctggatcaataaggacgccgtccccgctagaactagcttggggatcaccaccgtcttgacgatgaccacactttcgacaattgctcggaagtctctacctaaagtgagttatgtcactgccatggatttgtttgtcagtgtttgcttcatcttcgtctttgccgctctgatggagtacgggacactgcactattttacttctaatcagaagggaaaaactgctaccaaagaccgcaagctaaagaataaagcctccatgactccgggtcttcaccctgggtccacactcatccccatgaacaatatcagtgtgccccaagaagatgattatggttatcagtgcttggaagggaaggactgcgcttcatttttttgctgcttcgaggattgccgcacggggagctggcgggagggtaggatccatatacgtatcgcaaaaattgattcttacagtcgtatcttcttccctactgcttttgctctgttcaatctggtgtattgggttggatacctctatctgtag

SEQ ID NO: 224256 - DNA, 1260 bp, synthetic construct
  misc_feature 1..1260: note = Description of Artificial Sequence: Synthetic coding sequence
  source 1..1260: mol_type = other DNA
atgggcccactgaaagcgttcttgttttctcccttcttgctgcgcagccagtctcggggtgtgaggctggtttttttgcttctgacccttcatttaggcaattgcgttgacaaagcagacgacgaggacgatgaggacttgaccgtgaacaagacttgggtcctggctccaaagattcatgaaggcgacataacccaaatcttgaatagcctgctgcagggctacgacaataaattgcgacctgatataggggtgagacctactgtgatcgaaacagatgtgtacgttaacagtattggcccagtcgatccaattaacatggaatacaccattgatatcatatttgcccagacctggtttgactcccgcctgaaattcaacagtacaatgaaagtgctcatgttgaactcaaatatggtggggaagatatggattcccgatacgtttttcagaaatagcaggaaatctgacgcccactggataacgacccctaatcgacttctccgaatctggaatgatggacgggtgttgtacactctccggctcactataaacgccgaatgctaccttcagctccataatttcccaatggacgagcattcttgccccctggaattcagtagttatggctacccaaagaatgaaatcgagtacaagtggaagaagccaagcgttgaagtcgcagaccccaaatactggaggctttaccagttcgcctttgttggtctgcgcaactccaccgagatcactcacacgatcagcggcgactatgtgataatgacgatcttttttgatctctcgaggagaatgggttactttaccattcagacctacatcccatgtattctgacagttgtgctcagctgggtgtccttttggatcaacaaagacgccgtccccgctagaacaagccttggcattacaacagttcttaccatgaccactctttccactattgcccgaaagagcctccctaaggtgtcatacgtgacagccatggatctattcgtgagcgtttgtttcatcttcgtgttcgcggcactgatggaatacggtactcttcactattttacaagcaaccaaaaaggaaaaaccgcgaccaaagaccggaaactcaagaacaaagctagcatgacacccggattgcatcccggatcaacactgattccaatgaataatatcagcgtaccccaagaggatgattatggctaccagtgtctggaaggtcgcaaagatacccacacacattgtcagaactag

SEQ ID NO: 224257 - DNA, 1428 bp, synthetic construct
  misc_feature 1..1428: note = Description of Artificial Sequence: Synthetic coding sequence
  source 1..1428: mol_type = other DNA
atgtcatccccgaacatctggagcacgggaagctcagtgtacagtacgccggtgttcagccaaaaaatgactgtatggattctactgcttctgtcgttatacccgggattcacctcccagaaatcagacgacgattatgaggactacgctagcaacaagacctgggtgcttacgccaaaggtgccagaaggagacgttaccgtgatcctgaacaatctgctggagggatatgataacaaactgcgcccagacattggtgtcaaacccaccctaatccataccgacatgtacgtgaacagtataggccctgtaaatgccataaatatggaatacactatcgatatctttttcgcacaaacctggtacgatcgccgtttgaagttcaactccacaatcaaggttctccgcctgaattccaatatggtgggtaagatttggatccccgataccttctttcgaaacagcaagaaggccgacgctcactggatcacaaccccaaacaggatgctacggatttggaatgacggacgggtgttatatacactgagactcaccatcgacgccgagtgtcagctgcagctccacaactttcccatggatgagcacagctgcccactcgaatttagctcttacggctatcccagggaggaaattgtataccagtggaagagaagctcagtcgaggtcggcgatacgcggagttggcggttgtatcagttttctttcgttggccttaggaataccaccgaggtggtgaaaactacatccggtgactacgtggttatgagtgtgtattttgaccttagtagaagaatgggatacttcacaatccagacgtacattccctgtaccctgatagttgtcctgtcatgggtgtcgttttggatcaacaaggacgcagtccctgctcggacttccctgggaatcaccacagtgctaacaatgacaacgctcagcactattgctcggaaatcactgcccaaggtctcatacgtgactgcgatggacctgttcgttagcgtgtgctttatattcgtgttcagcgccctcgtggagtatggcacattacactatttcgtttctaacaggaagccttccaaagacaaggacaagaagaaaaaaaacccgctcttgagaatgttctcctttaaagcccctacaattgacatccgccctagatccgccactatacagatgaataacgcgacacatttgcaagaaagagacgaggaatacgggtacgagtgccttgacggtaaagactgcgcaagcttcttttgttgctttgaagattgcagaactggtgcttggaggcacggacggatccacattcgcatcgccaagatggactcatatgccagaatcttcttcccaaccgctttttgtctgtttaatctagtgtactgggtgagctacctgtacctgtag

SEQ ID NO: 224258 - DNA, 1404 bp, synthetic construct
  misc_feature 1..1404: note = Description of Artificial Sequence: Synthetic coding sequence
  source 1..1404: mol_type = other DNA
atgtcctccccaaacatttggtccaccgggagtagtgtgtattcaacccctgttttcagtcagaagatgacggtgtggatcctcttgctgctatctctgtatcctggttttacatcacaaaaatcagacgatgattacgaagattatgcctctaataagacctgggtcttaaccccaaaagtgcctgaaggcgatgtcactgtgatcctcaacaacctgctcgaagggtatgacaacaaacttaggcctgacatcggggttaaacccacgttaatccacacagacatgtatgtcaatagcattgggcctgtcaatgctatcaatatggaatacactatcgatatttttttcgcccaaacctggtacgaccgcagactcaaatttaattctactataaaagtacttcgcttgaattccaacatggtaggtaaaatttggatccctgatacgttcttccgaaactcaaaaaaggcagatgctcattggatcaccacacccaaccgtatgttacggatctggaatgacggtcgtgtgctgtacaccctgcggctaaccatcgatgctgagtgtcagctgcaacttcacaattttcccatggacgagcacagctgcccactggagttttccagttatggttatccaagagaggagatagtctatcaatggaagagaagctccgtggaggtcggggacaccaggagctggcgactataccagtttagcttcgtcgggctcagaaacaccacagaggtcgtgaaaacaacttccggcgactatgttgtcatgtccgtgtatttcgatttatcacggagaatggggtactttactattcagacttacatcccatgcacactgatcgtggtgctcagctgggtttccttctggatcaataaagatgccgtcccagctaggactagcttaggtattacgaccgtgttgactatgactaccctgagcaccatcgcaaggaaaagcctgccgaaagtgtcctatgttaccgctatggacttgtttgtgtccgtctgtttcatctttgtgttcagcgcactggttgaatacggaacattacattacttcgttagcaaccggaagccttccaaggataaagataaaaagaagaaaaacccggctccaacaatcgacatacggcctcgctccgctacaatccagatgaataatgccacacatctacaggagagggacgaagagtatggatatgagtgcttggatgggaaggactgcgcaagcttcttctgctgcttcgaagattgccggacaggggcatggcgtcacggcagaattcacattaggatcgcgaaaatggacagctacgctcgcatcttctttccaacagccttttgtctgttcaatctcgtgtactgggtgagttacctctatttatag

SEQ ID NO: 224259 - DNA, 1119 bp, synthetic construct
  misc_feature 1..1119: note = Description of Artificial Sequence: Synthetic coding sequence
  source 1..1119: mol_type = other DNA
atgtacgtaaacagcattgggcctgtaaacgcaatcaacatggaatacacaatcgatattttcttcgctcagacgtggtacgatcgccgactgaagttcaactcaaccattaaagtgctcaggttgaacagcaacatggtgggaaaaatctggattcctgacacattcttccggaattctaaaaaagccgatgcgcattggatcactactccaaataggatgttacgcatctggaacgacggaagggtgctgtatacactgagactgactatcgacgccgaatgtcaactgcagcttcacaatttcccgatggatgaacactcctgtcccctggaatttagcagctatggctacccaagggaagagattgtttaccagtggaagcggtctagcgtggaagtgggtgatacacgatcctggcgactgtaccaattctccttcgttggtcttcgaaatacaacggaagttgttaagacaacctcaggcgactatgttgttatgagcgtttattttgacttaagccgtcgcatggggtatttcacaattcagacatatatcccatgcacgctgattgtggttcttagctgggtatccttctggattaataaagatgctgtgccggctaggacgtctctcggaattacgaccgtgctgacaatgaccacgttaagcactattgcccgtaaaagtctgccaaaggtgtcttacgtgactgccatggacctttttgtgtcggtgtgttttattttcgtatttagcgccctggtcgaatatgggacactgcactactttgtttctaacaggaaaccaagtaaagataaggacaaaaaaaagaagaatcctgcaccaactattgacatcaggcccagatcagcaactattcagatgaacaacgctacccatcttcaggagcgggacgaggagtatggctacgaatgcctggatggtaaggactgtgcttcatttttttgctgttttgaagactgccgaacaggtgcatggcgccatggcagaatacacatccggattgcaaagatggacagttacgctcggattttctttcctaccgccttctgcctgtttaatctggtgtattgggtttcttacctatatctgtag

SEQ ID NO: 224260 - DNA, 1404 bp, synthetic construct
  misc_feature 1..1404: note = Description of Artificial Sequence: Synthetic coding sequence
  source 1..1404: mol_type = other DNA
atggctcctaagttactcttgcttctgtgtctgttcagtggccttcatgccagaagtcggaaagtggaggaggacgagtacgaggattccagctctaatcagaaatgggtgttggcaccaaagtctcaggatacggacgttaccctgatactcaacaagctcttacgcgaatatgacaaaaagctgcggcctgacatcggcatcaaaccaactgttatcgacgttgacatctatgtgaactctatcgggccagtttcgagcataaatatggaataccagatcgatatcttttttgcacagacatggactgactcacggcttcgcttcaactcaaccatgaagatcttaaccttaaatagtaacatggtggggctcatctggatccccgacacaatcttcagaaactccaaaactgccgaggctcactggatcaccacgccaaaccagctactgaggatttggaacgatggcaaaatcctctatacgctgcgactgactatcaacgccgaatgccaactccagctccacaatttccccatggatgagcacagctgccctctcatcttctcgtcgtatggatacccaaaagaggaaatgatctacagatggaggaagaatagcgtcgaggccgctgatcagaaatcctggagactgtaccagttcgactttatggggctgaggaacactactgaaattgtcacgaccagcgccggagattatgttgttatgaccatttatttcgaactgtctcggcgtatgggctattttacaatccagacgtatatcccttgcattctgactgtagtcctgagttgggtcagcttctggatcaaaaaagatgcaacccccgctcgcacagccctcggcatcactactgttttgactatgaccacactaagcaccattgccaggaagagtctccctagagtatcttatgtcacagccatggacttgtttgtaaccgtgtgcttcctgttcgttttcgccgcactcatggagtacgcgacgctgaactactatagttcttgtcgaaagcccacaaccacaaaaaagactacatctctactccatcctgactcaagtcgctggattccggagagaattagcctccaggcgccttcaaactattccttgctcgatatgaggccaccgcctactgccatgattacattgaacaattctgtgtattggcaggagttcgaggatacttgtgtgtacgagtgtctggacggtaaggactgccagtccttcttctgctgttacgaagaatgcaagtccggcagttggcggaagggtcgtatccacattgacatcctcgaacttgacagctacagtcgtgtcttctttcccacttcctttcttttattcaatttggtgtattgggtcggttatctctatctttag

SEQ ID NO: 224261 - DNA, 1323 bp, synthetic construct
  misc_feature 1..1323: note = Description of Artificial Sequence: Synthetic coding sequence
  source 1..1323: mol_type = other DNA
atgaattactctctgcatctcgcctttgtatgcctttccttgtttaccgaacgcatgtgcatccaaggaagtcagttcaatgtcgaagttggaaggagtgacaaattgagcctccccggattcgagaacctaaccgccggatataacaaattcctcagacctaatttcggtggagaacccgtacaaatcgcattgacgttggacatcgcttccatttcttctatcagcgagtctaatatggactataccgccactatttatctccgccaaagatggatggatcagaggttggtgttcgagggaaacaagagcttcaccttagacgctcgcctggtcgagtttctgtgggttccagatacctacattgtcgaatcgaaaaaaagttttttgcatgaagtgaccgtgggaaatcgccttattcggttattcagtaatgggacagtcctctacgccctccggatcaccactacagtggcttgtaatatggacctatccaagtacccaatggacacccaaacttgtaaacttcagctggagtcctgggggtatgacggcaacgatgtggaatttacatggctccggggaaatgatagcgtgcgcggactggagcacctcagacttgctcaatatacaattgagcggtactttacactcgtgactagaagccagcaggagacgggaaactacacccgacttgtgctgcaatttgaactgcgtcggaacgtcctatactttatccttgaaacatatgtgccttctacatttcttgtggttctgagctgggtgtctttctggatttccctggatagcgtaccggctagaacatgcattggagtcactaccgttctgtctatgactaccctgatgatcgggagccgtacctcactgccaaatacaaattgttttatcaaagcaattgatgtctatttgggcatttgttttagctttgtttttggcgcattactcgaatatgccgtagcacactatagtagcctgcagcagatggcggctaaggatagaggcacgacaaaggaagtagaggaagtgtctatcactaatatcattaacagtagcatctccagtttcaagaggaaaatttcctttgctagcatcgagatctccagcgataatgtggactactccgatttgaccatgaagactagtgataaatttaagttcgtgttccgtgaaaagatgggcaggatcgtggactatttcaccattcagaatccaagtaacgtggatcactattctaagctgctcttcccattgatttttatgctggcaaacgttttttattgggcctattatatgtacttttag

SEQ ID NO: 224262 - DNA, 159 bp, synthetic construct
  misc_feature 1..159: note = Description of Artificial Sequence: Synthetic coding sequence
  source 1..159: mol_type = other DNA
atgaactatagtctacacttggcttttgtgtgcctgtcgctgtttaccgagcggatgtgtatccagggatcacagttcaatgtcgaggtcggccgatcagacaagctttccctccccggattcgaaaacctgactgccggatataataaattcctgtag

SEQ ID NO: 224263 - DNA, 1323 bp, synthetic construct
  misc_feature 1..1323: note = Description of Artificial Sequence: Synthetic coding sequence
  source 1..1323: mol_type = other DNA
atgaactatagtttacatctggccttcgtctgcctgagtttgtttaccgagcgcatgtgcattcaggggtcacaatttaatgtcgaggtcgggagatctgacaagttgtccctgcctggattcgaaaatctcactgctggttacaacaaattcttacggcctaatttcggaggtgaacccgtacaaatagcccttacactcgatatagcctccattagctcaatttctgaatccaatatggactacaccgcgactatctacctgagacagcgatggatggatcagcgtctggtgtttgagggaaacaaatctttcacactggacgccaggctcgtggaattcctgtgggtccccgacacatatatcgtagaaagtaagaagagctttctgcacgaagttaccgtgggtaatcgcctcatccggctgttttctaatggcacagtgctgtacgccctgcggatcaccaccaccgtagcgtgcaacatggatctgagtaaatatccaatggacacgcaaacctgcaagcttcagctggagtcatggggctacgacggtaacgacgtcgagttcacatggctgcgcggtaacgactccgtcagggggctggagcacctgcgcttagcacagtatactatcgagaggtattttactctcgtgacccgcagccagcaggaaacgggcaactacaccaggctagttcttcagtttgaactccgcagaaacgttctatactttatattagagacttacgtcccctcaacgtttttggtggtcttatcatgggtaagcttctggatttccttggattccgttcctgccaggacctgcattggtgtgactacagtcctgtccatgaccacattgatgatcggtagcaggacaagccttccaaacactaattgcttcattaaggccattgatgtgtacctcggaatctgcttttcctttgtgtttggggcactgttggaatacgctgtggcacattacagttccctgcaacagatggcagcgaaggaccgcggaacaaccaaggaagtggaggaggtttctatcactaacataatcaactcttctatttcttctttcaagcgcaaaattagcttcgcctcaatcgaaatttcctctgacaatgtcgattattcggatttaacgatgaagacatccgacaaattcaaatttgtgttcagagagaaaatgggccgaatcgtagattatttcaccattcagaatccatcaaacgtggaccactatagcaaattactgtttccactgattttcatgctcgccaatgtcttttactgggcttattatatgtacttctag

SEQ ID NO: 224264 - DNA, 180 bp, synthetic construct
  misc_feature 1..180: note = Description of Artificial Sequence: Synthetic coding sequence
  source 1..180: mol_type = other DNA
atgaactacagcttgcacctggcgtttgtatgcctctccctcttcaccgaaagaatgtgtatccagggaagtcaattcaacgtggaagtggggcgttccgacaagctgagtctccccggtttcgagaatctcaccgccggatacaacaaatttctgcgtcctaattttggtggggagtag

SEQ ID NO: 224265 - DNA, 279 bp, synthetic construct
  misc_feature 1..279: note = Description of Artificial Sequence: Synthetic coding sequence
  source 1..279: mol_type = other DNA
atgaattactctttgcatctggcctttgtgtgcctgagtctttttacggaacgtatgtgcatacagggatcccagtttaacgtggaagtgggtagatcagacaaactatctctacctggattcgagaaccttacagcagggtacaacaagttcctcagacctaactttggaggagaaccagtccaaattgccttgactctagacatagccagtatctcgagtatttctgagtccaacatggattatactgcaaccatttaccttaggcagcgatggtag

SEQ ID NO: 224266 - DNA, 516 bp, synthetic construct
  misc_feature 1..516: note = Description of Artificial Sequence: Synthetic coding sequence
  source 1..516: mol_type = other DNA
atgaattatagcctacacctcgcattcgtgtgtctatccctgtttacagaaaggatgtgtatccagggttcccagtttaatgtggaggtggggaggagtgacaaactaagtctacccggtttcgagaatctcacagcaggttacaacaaattcttgagaccgaatttcggcggtgagccagttcagatagccctgacactggacatcgctagcatttctagtataagtgagtccaacatggattacacggccacaatctatctgcgacaacgctggatggaccagcggttggtttttgagggtaacaagtctttcacactcgacgcccgactggttgagttcctgtgggtgcccgacacctatattgtggagtcaaagaaaagcttccttcacgaagtgactgttggcaaccgtctgatccggctgttcagcaatggaacggttttgtacgcacttcgcataacaacaactgtggcatgtaatatggacctgtccaaatatcctatggacacttag

SEQ ID NO: 224267 - DNA, 570 bp, synthetic construct
  misc_feature 1..570: note = Description of Artificial Sequence: Synthetic coding sequence
  source 1..570: mol_type = other DNA
atgaactacagcctgcatctggcctttgtctgccttagccttttcacagagagaatgtgtatccaggggagccagttcaatgtggaggtaggcaggagcgacaaattgtccctgcccggtttcgaaaacttgacagctggctacaacaagttccttaggcccaatttcggaggcgaaccagtgcagattgcattaacgttggatattgcatctatcagttctatctcagaatctaacatggactacaccgctactatctacctccgacagaggtggatggaccagcgtttggtcttcgaaggtaataaatcgtttacactggacgctaggctggtcgagtttctctgggtccctgacacatatatcgtggaatcaaaaaagtccttcttacacgaagtgactgtgggcaatcggctgatccgcttgttttctaatgggaccgtcctgtacgcattgcgcatcaccacgacagtggcctgcaacatggatctttccaaatatccaatggatacccagacctgtaaactacagctcgagagctggggctatgatggcaacgatgttgagtag

SEQ ID NO: 224268 - DNA, 564 bp, synthetic construct
  misc_feature 1..564: note = Description of Artificial Sequence: Synthetic coding sequence
  source 1..564: mol_type = other DNA
atggattatactgccacaatttacctgagacagcgttggatggatcaacgactggtctttgaaggaaacaaaagcttcactctggatgaggtgactgtaggtaatcgactcatccggctgttcagtaatgggaccgttttgtacgccctgagaatcactaccaccgtggcttgtaacatggatctttccaaatatcccatggacacgcagacgtgcaagctgcagctagaatcatggggatatgacggtaacgatgttgagttcacttggctgaggggcaatgattccgtccggggtctggaacacctgcgactcgcacagtatacaattgagagatactttaccctggtgactcgctctcagcaggagactggcaactacaccaggctggtgctgcagttcgagctgcgtcgcaacgtactgtacttcatcctggaaacatatgtccccagcacatttttggtggtgctcagctgggttagtttttggatctccctggacagcgtcccagccaggacctgcataggagacaacaaaggtagtcggaggagccagtattattag

SEQ ID NO: 224269 - DNA, 2826 bp, synthetic construct
  misc_feature 1..2826: note = Description of Artificial Sequence: Synthetic coding sequence
  source 1..2826: mol_type = other DNA
atggcctcccctcgatcttcaggccagcccggtccccctccccctcccccaccaccacctgctcggctcctgctgcttctactcctgccactgctgctgcccctggcaccaggcgcatgggggtgggctaggggcgcacccagaccgcctccctcctcaccacccctctctatcatgggcctgatgcccctcactaaggaggtggccaagggttccataggacggggagtcctgcccgctgttgagctggcaattgagcagatccggaacgaaagcttgctgcgcccatacttcctggacctcagactctatgatactgagtgtgacaacgcaaaggggttaaaggccttctatgatgccatcaaatatggcccaaatcatctgatggtattcgggggagtctgtccgtccgtgaccagcatcatcgctgagtctctgcaaggttggaacctggtgcagttatccttcgctgcaaccactcctgttctggcagacaagaaaaagtacccctacttctttcgcactgtgcccagcgataacgccgtcaaccctgctattctgaagctgctgaagcattatcagtggaaacgtgtcggtacacttacgcaggacgtgcagcgatttagtgaggtgagaaatgatttgactggggtcctctacggcgaggatattgagatttctgacacagaatcatttagtaacgacccttgtactagcgttaagaagctcaagggaaacgacgtgcgcataattctggggcagttcgaccagaatatggccgcaaaggtgttctgctgtgcttacgaagagaatatgtacggatccaagtaccagtggattatccccggatggtacgagccttcttggtgggaacaggttcacactgaggcaaatagctcccgctgcctgagaaaaaacctgttagcagcaatggagggatatattggcgtggattttgaacccttgtcatcaaagcagattaaaacgatctcaggcaaaacccctcagcagtacgagcgcgaatacaacaacaagagatccggtgtcgggccttcaaaattccacggctatgcctacgacggaatatgggtaattgccaagactctccagcgtgcaatggagaccctccacgcgagctcaaggcaccaaagaattcaagatttcaattatacggaccacacattggggaggataatcctgaatgcaatgaatgagaccaatttctttggtgtgacaggtcaggtagtgttccggaacggcgaacgcatgggcaccataaaatttacccaatttcaggattcgagggaagtgaaagtcggtgagtataacgctgtggccgacacactggagattatcaatgacacgatcaggttccagggaagcgaaccccctaaagacaaaaccatcattctcgagcagcttcggaagatcagtcttcccttgtattctatcctcagtgctctaacaatacttggcatgatcatggcaagtgcctttctgttcttcaacatcaaaaatcgaaaccaaaagctcatcaaaatgtccagcccgtatatgaataatctaatcatcctgggcggaatgctgagttacgcctccatatttctgttcggtctggacggttcttttgttagtgaaaagacctttgagaccctgtgtacggtgaggacctggattctgactgtgggatacacaacggcatttggcgcaatgtttgccaagacctggcgagtgcacgccatattcaaaaacgtcaaaatgaaaaagaagatcattaaagatcagaagctgcttgtcatcgtcggcggaatgctgctgatcgacctgtgcattttgatctgctggcaggctgtcgaccctcttcgacgtaccgtcgagaagtactctatggaacctgacccagcaggcagggatatcagcatccgtcccctactggaacactgcgaaaacacacacatgacaatctggcttggcattgtgtatgcttacaagggtctcttaatgttgtttggctgcttcctggcctgggaaacacgcaacgtgtctattcccgcactgaacgattcaaaatacatcgggatgagtgtctacaacgtgggcatcatgtgcattattggagctgctgttagctttctaacccgcgaccagccaaatgttcagttttgtatagtggctctggttattatcttttgttccaccatcaccctgtgccttgtctttgtccccaagctgattactctgcgtaccaatcctgatgccgctactcagaaccgcaggtttcagtttactcagaatcagaagaaagaggactccaagacctctacatcagtgacctctgtgaaccaagccagcacttcaagactcgaggggttacagtccgagaatcacaggttgcgcatgaaaatcaccgaacttgataaggatttagaagaggtgactatgcagctccaagatacacctgaaaaaacgacatatattaagcagaaccattatcaggagctgaacgacatcctcaatctagggaattttaccgaaagcacagatggtggaaaagccatcttgaagaaccatctggatcaaaatccccagctgcagtggaataccacagaacctagccggacttgtaaggatcccattgaagacattaatagcccagaacatattcagcgcaggctttcgttacagctgcccattcttcatcatgcttacttgccgtccataggtggagtcgatgcatcttgtgtgtcgccttgcgtgtccccgacagcctctcccagacataggcatgtgccacctagctttagggtcatggtgtccggattatag

SEQ ID NO: 224270 - DNA, 1179 bp, synthetic construct
  misc_feature 1..1179: note = Description of Artificial Sequence: Synthetic coding sequence
  source 1..1179: mol_type = other DNA
atgagaccaggctttggcggaccagccatccccgtgggcgttgacgtacaggtggaatcacttgattccatttccgaagtggacatggactttacgatgacactgtacttaagacattactggaaagatgagcgtttgagttttcccagcacaaataatctgtccatgacattcgacggcaggttggtcaagaagatttgggtgcctgacatgttctttgtgcattctaagcggtcatttatccacgacacaacgacagataatgtcatgttgcgagtacaacctgatggaaaggtcctgtatagcctgcgggtgactgtgactgccatgtgtaacatggattttagccgcttccctctggacacacagacgtgttctctggaaatagagtcttatgcctacaccgaggacgacttgatgctatactggaagaaggggaatgacagtctgaagaccgacgaacggatctcgttgagccagttcctcatccaggagtttcataccacaactaagctcgcattctacagttccaccggctggtataaccgcctgtatatcaacttcacgttgcgtcgacatattttcttttttctgttgcagacatatttccctgccaccctaatggtgatgctcagctgggtgagcttctggatcgacaggcgcgctgttcccgcacgcgtccccctcggaatcacaaccgtgttaactatgagtacaatcattactggagtcaatgcatctatgcccagagtgagctatatcaaggctgtggacatctatctgtgggtcagttttgtcttcgtcttcctttctgtgctggagtacgccgcagtcaattacttgacgactgtacaggagcgcaaggaacagaaactgcgtgagaagctgccatgtacgagcggcctcccacctcccagaaccgccatgttagatggcaactattcggatggggaggtgaatgacctggacaattacatgccagagaacggagaaaaacccgaccgaatgatggtgcagctgaccctcgccagcgagcggagtagtccccagcggaagagtcagcgatcttcgtatgtctctatgcgcattgatacccatgctattgataagtacagcagaattatctttccagcagcatacattctttttaacctgatctactggtctatcttctcctag

SEQ ID NO: 224271 - DNA, 1389 bp, synthetic construct
  misc_feature 1..1389: note = Description of Artificial Sequence: Synthetic coding sequence
  source 1..1389: mol_type = other DNA
atgctggctgtgcctaatatgagattcgggatatttcttctgtggtggggttgggtactggcaactgagtctcggatgcactggcccggaagagaagttcatgagatgtccaagaaaggcagcccaatcctaagacgatcccccgatatcacaaagagcccactgaccaagtcggaacagctgctgcgtattgacgatcatgactttagtatgagaccagggttcggaggaccagctatccccgtaggggtggacgtccaggtggagtcacttgactcaatctctgaagttgatatggattttaccatgacactttacctgcgtcactattggaaggatgaacggctctctttccccagtactaataatttgtccatgactttcgatggcagattggttaaaaaaatttgggttcccgacatgtttttcgtgcactctaagaggtctttcatccacgacaccaccaccgacaatgtcatgctgcgagtccagccggatgggaaggtgctctattctctgcgggtgaccgttactgcaatgtgtaacatggacttctccagatttcctctcgatacacagacgtgctccttagagattgaatcatacgcatacactgaggacgatctcatgttatactggaagaagggcaacgactctctcaagaccgatgagaggatttcactgagccagttcctcatccaggagttccacacaactacaaagcttgcgttttactcaagcactggatggtataaccgtttgtacattaattttaccctacggcgacatatcttcttcttcctcctccagacttatttccctgcaacgctcatggtcatgttgtcttgggtgagtttctggattgaccgaagggccgtcccagccagggtcccattggggattacaacggttctcaccatgtccaccataattacaggagtgaacgcctcaatgcctagagtaagctacatcaaggccgttgatatctacctctgggtgtcttttgtgtttgtgttcctgagcgtgctggagtatgccgctgtcaattacctcacaacagtgcaggaacggaaagaacagaagctgcgtgaaaaactgccctgcacaagcggtttgcccccacctcgcacggccatgctggatgggaactacagtgacggcgaggtcaatgatctggacaactatatgccagagaatggcgaaaagcctgacaggatgatggtccagctgacactggcctcggagcgatctagtccgcagcggaagagccaacggtcctcctatgtgagcatgcgtatcgacacacacgctatagataagtatagccgaatcatttttccagcagcgtacatactgttcaacttgatatactggagcatcttttcctag

SEQ ID NO: 224272 - DNA, 1179 bp, synthetic construct
  misc_feature 1..1179: note = Description of Artificial Sequence: Synthetic coding sequence
  source 1..1179: mol_type = other DNA
atgcggcctgggttcggaggccctgcaataccggttggcgtagatgtccaagtggagtcattggattctatttctgaggtagacatggactttactatgacactgtacctgcgacactactggaaagacgaaaggctgagcttccctagcacaaataacctcagcatgacattcgacggacggctggtgaagaaaatctgggtgcccgatatgttcttcgtacattcaaaaagaagcttcatccacgacactacaactgacaatgtaatgttgagggtacagccagatgggaaagtgctctactctcttagagtgaccgttacagcaatgtgtaacatggatttttcacgattccctcttgacactcagacatgcagcctggagattgaatcctacgcatacaccgaggacgatctgatgctctactggaaaaagggaaacgactccctaaagacagatgagcgaatctcgctgagtcagtttttgatccaggagttccataccacaacaaagctcgccttttactcaagcaccgggtggtacaatagactttacattaattttactttacgacggcatatattcttctttctgctgcagacttactttccagctaccctgatggtgatgctgtcttgggtctctttttggatcgaccgccgagccgttcccgctcgggtgccactaggcataacaaccgtgctcaccatgtccacaatcatcaccggggtgaatgcctctatgccccgagtatcatatataaaagccgtagatatttatttgtgggtgagctttgtgtttgtgtttctgtctgtccttgagtacgcagctgtgaattatcttacaacagtgcaagagcgaaaagagcagaaactgagggagaagctgccatgtacaagcggtctacctccccctagaaccgccatgctggatggaaattattccgacggagaggtgaacgatctggataattacatgcctgaaaacggcgaaaagcccgaccggatgatggttcagctgacacttgcttctgagcgcagctcaccccagcgaaagagtcagagatcaagttatgttagcatgagaatcgacacgcacgccatcgataagtactctaggatcatcttccccgctgcctatattctgtttaacctcatttattggtcaatttttagctag

SEQ ID NO: 224273 - DNA, 1440 bp, synthetic construct
  misc_feature 1..1440: note = Description of Artificial Sequence: Synthetic coding sequence
  source 1..1440: mol_type = other DNA
atgcttgctgtgcctaacatgcgctttggaatctttctgctgtggtggggctgggtgttggctaccgaaagccgaatgcactggccgggacgggaggtgcatgaaatgtccaagaaagggaggccacagcgccaaaggagggaggtacacgaggacgctcataaacaagtgtccccaatcctacgcaggtcacccgatataactaagagcccactgaccaagtctgagcagctgttgcgcatcgacgatcacgatttttcaatgcgtccgggtttcggtggaccagcaattcccgtgggagtggacgtccaagtcgagtctttagatagcatttcggaggtcgatatggactttacaatgaccctgtatctccgccactactggaaggatgagcgtctcagcttcccatccaccaataatctgagcatgacttttgacggtcgactcgttaaaaaaatatgggtaccagatatgttcttcgttcattctaaacggtcgttcatacatgacaccactaccgataacgttatgctgagagttcagcccgacgggaaggtcctctactccctcagggtaacagtgacagcaatgtgcaacatggacttttcccgttttcctttagatacccagacttgctccctggagatagagagttacgcctacactgaggacgatctcatgttgtattggaagaagggcaatgatagtcttaagaccgatgagcggatttccctttcacagttcttaatccaggagttccacactaccacaaagcttgccttctatagttcgacgggttggtataatcgattgtatatcaactttaccttgcggaggcacatcttctttttcctgcttcaaacctacttccccgcaaccctcatggtcatgctgagctgggtgagcttttggattgaccgcagagccgttccagcaagggttcctctggggattacaaccgtgcttactatgtctacgattatcacaggcgtcaatgccagcatgccgagagtttcctatatcaaagcagtggatatctacctgtgggttagctttgtgttcgtgttcctgtccgtccttgagtacgctgctgttaactatttgaccactgttcaggaacgaaaggaacagaaattgcgcgaaaagctgccgtgcacctctgggctgcctccaccacgtacggctatgttagacgggaactattcagatggcgaagtcaatgacctggacaactacatgcccgaaaacggcgagaagccagaccggatgatggtgcagttgaccttggcctccgagcgctcctccccgcagagaaaatcgcagcggtctagctatgtttctatgaggattgatactcacgcgattgacaagtacagtcgtattatattccctgctgcttacatactgttcaacctcatctactggtccatttttagttag

SEQ ID NO: 224274 - DNA, 1473 bp, synthetic construct
  misc_feature 1..1473: note = Description of Artificial Sequence: Synthetic coding sequence
  source 1..1473: mol_type = other DNA
atggtgaaacccggagggatttgctccgcaacgggatactggaaggctgcattttgcctgaccgatgtccacaagatgccctacttcacacgcttaatactcttccttttttgtcttatggtcttggtggagtcccgcaagcccaaacgaaaacgctggaccggacaggtggagatgcctaaaccatctcacctgtacaaaaaaaatctggatgtgactaagatccgcaaaggaaagccccagcagctacttcgggttgacgagcacgacttttccatgcgacccgcattcggaggccctgcgattcccgttggggttgatgtccaggtggagagtctcgattcaatatcagaggtcgacatggactttacaatgactctctatctgagacattactggaaggatgagaggctggccttctcctcagccagcaataaaagcatgacgtttgacggacggctcgtcaaaaagatatgggtcccggatgtattttttgtgcattcaaagagatcattcactcatgacactacgaccgacaatattatgctcagggtgtttcctgacggccatgtgctttacagcatgcgcatcacagtgactgccatgtgtaatatggatttcagtcattttccactggattcacaaacatgctcactcgaactcgagagctatgcttacacggacgaagatctgatgctgtactggaagaacggtgatgagtctttgaagaccgacgaaaagatatccctgtcacaatttctaatacagaagttccatacaacatctcgactggccttctacagttccactggctggtataatcgactctatataaatttcacattgaggcgccacattttctttttcctgcttcaaacctatttccccgctactcttatggtcatgctatcgtgggtgtcattttggatcgataggagagctgtcccagccagggtatctctggggatcacaaccgtcctgacaatgaccacaataataaccggcgtgaacgcttctatgccccgtgtctcttacgtgaaggccgtggacatctacctatgggtctcattcgtgttcgtgtttctgagcgtccttgaatacgccgctgtcaactacttaactacggtgcaagaacgaaaagaaaggaagcttagagagaagtttccttgcatgtgcggtatgctgcattccaaaactatgatgttggacgggagctacagtgaatcagaagctaacagtcttgccggttatcctcgatcccatatcctcacagaggaggagcgccaagataaaattgttgtccacctaggactgtccggagaagcaaatgcagccaggaaaaaaggcttacttaagggtcagacggggttcaggatttttcagaacacccacgcaatcgacaagtacagccggcttatcttccctgcctcatatatttttttcaatcttatatattggagtgtgttttcttag

SEQ ID NO: 224275 - DNA, 453 bp, synthetic construct
  misc_feature 1..453: note = Description of Artificial Sequence: Synthetic coding sequence
  source 1..453: mol_type = other DNA
atgttgagagccgcagtaattctccttctgatcagaacttggctggcagaagggaattaccccagccctattcctaaattccattttgaattttccagtgctgttcccgaggtggtgttaaacctcttcaattgcaagaactgtgccaacgaagctgtggtccaaaaaatcctggaccgagttttgagccggtatgacgtgagactgaggcctaatttcggaggagtgctcgaaactaactcgacttgggggctcaacgacgatgagctcatggcgcatggccaggaaaaagacagtagttccgagtctgaggactcatgcccccctagcccaggatgtagctttaccgagggcttctccttcgatctgtttaacccagactacgtacccaaggtggacaagtggtctcgattcctgttccctttggctttcggccttttcaatattgtgtag

SEQ ID NO: 224276 - DNA, 1899 bp, synthetic construct
  misc_feature 1..1899: note = Description of Artificial Sequence: Synthetic coding sequence
  source 1..1899: mol_type = other DNA
atgggcattaggggaatgctgcgggcagctgtgatcctcctcctcatcagaacatggcttgcagaagggaattacccaagccctattcccaaatttcattttgaattctcatccgccgtgcccgaagtggtgctgaacttgttcaattgcaagaattgcgccaacgaggccgtggtgcagaagatcctggatagggtcttatctaggtatgatgttcggctgcgcccaaacttcggaggcgctcctgtgccggtcaggatcagcatatatgtgactagcatcgagcagattagcgagatgaatatggactatacaatcacaatgttttttcatcaaacctggaaggattcaagactcgcttattacgagaccaccctgaatctgacattggactacaggatgcacgagaagctctgggtgcccgactgctacttcctgaactccaaagatgccttcgtgcacgacgtgactgtagaaaatagggtatttcagctgcacccagacggaaccgtacgctatggaatcaggctcaccacaacggctgcttgttccctcgatcttcacaagtttccaatggataaacaggcttgcaatctggtggtcgagagttatggttacaccgttgaggacataattcttttctgggacgataacggtaacgctatccacatgacagaagaacttcacatcccccagttcacgtttctggggagaactattacctccaaggaggtgtacttctacaccggttcatacatccgactaatactgaagttccaggtacagcgcgaggtgaatagttacttagttcaggtgtactggccgacagttctcactaccataaccagctggatttccttctggatgaactacgactcctccgcagctcgtgttactatcggtctgaccagcatgcttatactcaccacgattgacagccatcttagagataagctgccaaacatttcctgcataaaggcgatcgatatctacatcttggtctgcctgtttttcgtctttctctccctgctggaatacgtgtatatcaactaccttttctactcacggggtcctcggcgacagcccagacggcatcggaggcctaggcgtgtgatcgcacgttaccgctaccaacaagtggtggtggggaacgtacaggatgggcttatcaacgtggaggatggcgtttcttctctccctataactccagctcaagcgcctttggccagccccgaatctttagggtctttgacctccacctccgaacaggcgcagctggccacctcagaaagcctttcaccactgacctccctaagtggacaggcgccattggcgaccggcgaaagcctgtccgatctgcccagcacaagcgagcaagccagacacagctacggcgtccgttttaacgggtttcaagctgacgacagtatcttcccgactgaaattagaaatcgcgtggaagcacatggacacggcgtcacccacgaccacgaggattccaacgagtctctcagcagtgacgaaagacatggccatgggccttctggcaaaccgatgctgcaccacggagagaaaggggtgcaggaagccggttgggacctggatgacaataatgataaatcagattgtctcgctattaaggagcagttcaaatgcgacacgaacagcacctggggcctgaacgatgatgaacttatggcccatggccaggagaaggacagtagctcagagtctgaggactcgtgtccgccaagccctggctgtagcttcaccgagggcttttcttttgatcttttcaatcccgattacgtacctaaggtcgacaaatggtcccggttcctcttcccgctcgccttcggtctgttcaacatcgtgtattgggtataccacatgtactag

SEQ ID NO: 224277 - DNA, 1083 bp, synthetic construct
  misc_feature 1..1083: note = Description of Artificial Sequence: Synthetic coding sequence
  source 1..1083: mol_type = other DNA
atggacagctccaattgcaaggtgatagcacccctgctatcccagaggtacagacgcatggttactaaggatgggcactctaccctgcaaatggatggggctcagcggggtttggcctacctgcgcgatgcctgggggatcctgatggatatgcgatggaggtggatgatgctggtgttctccgcctctttcgtcgtgcattggctggtttttgccgtactgtggtacgtactggccgagatgaatggagacctcgaactcgatcacgacgctcctcctgagaatcatactatctgcgtgaagtacatcacctcttttacagcagcctttagtttctctctggaaacacagctgacaattggctatgggaccatgtttccatctggagactgtccatccgcgattgcccttctggctatccagatgctgctcggcttaatgctggaggcttttatcacgggcgcttttgtcgccaagatcgccaggccaaagaacagggccttctcaatcagattcacggatactgccgtggtggcgcacatggacggaaaaccgaacctaatttttcaggtagctaacacacggccatccccacttaccagcgtccgcgtctctgcagtgctgtaccaggagcgagaaaatggaaaactataccagaccagcgtggactttcatctcgacggcattagttctgacgagtgtcccttctttatttttccgttgacatactatcattcaataactccgtcatccccattggcaacgctcctgcaacacgagaatccctcgcattttgagctcgttgtgtttttgtctgccatgcaggaagggactggtgagatttgtcagcgccgtaccagttacctgccgtccgaaatcatgctgcatcattgctttgcaagtttgttgactaggggtagcaagggcgagtatcagattaaaatggagaacttcgacaagacagtgcccgaatttcccacaccactggtgtccaaatctccaaatcgcacagatctcgatattcacatcaacggccagtctatcgataacttccagatctccgagaccggcctaacggagtag

SEQ ID NO: 224278 - DNA, 2106 bp, synthetic construct
  misc_feature 1..2106: note = Description of Artificial Sequence: Synthetic coding sequence
  source 1..2106: mol_type = other DNA
atggcagtgtccgctggaagcgctcgcacatccccctccagtggttttctgatggttctggatatccctcaggagagaggattaagctccttggatagaaaatacctggacggcctggatgtgtgtaggtttcccttgctagatgcactgaggccactccctctggactggatgtacttggtgtacaccattatgttcctcggagcgctggggatgatgcttggcctgtgttaccgtattagttgcgtcttgtttctgcttccgtactggtacgtgttcttactcgacaaaacatcttggaacaaccattcatacctgtacggattgctcgccttccagttaaccttcatggacgccaatcattactggagtgtcgatgggctgttaaacgctcacaggaggaatgcccatgtgcctttatggaattacgccgtgctgagaggccaaatctttattgtatactttattgcgggagtgaaaaaattagatgctgactgggtggagggatactctatggaatacctgtcacgccattggctgttcagccccttcaagctgctcctttccgaggaactgacctctctgcttgtggtacattgggggggattactgctggacttatctgctggcttcttgctgtttttcgacgtgtcaaggagtattggcctgtttttcgtgtcctattttcattgcatgaatagtcagctttttagcattggcatgttcagctacgtgatgctcgcaagttctccactgttttgttctcctgagtggcccaggaagttagtatcatactgtcctaggaggctacagcagctgctgccactgaaggccgctccccagccctcagtgtcatgtgtgtataaacgatcgaggggcaaatcgggacagaagcctggattgagacatcagttgggggctgcattcaccctgctctacctgctcgaacagctgttcctcccctactctcactttctgacccagggatataacaattggacaaacgggttatatgggtactcctgggatatgatggtgcatagtcgcagtcaccaacacgttaagattacttaccgtgacggaagaaccggagagctgggatatctgaaccctggtgtatttacacaatcaagaaggtggaaagatcatgcagacatgctcaaacagtacgcaacatgcctgagccgactgctcccaaaatataacgtgacggaacctcagatttattttgacatctgggtgagtatcaacgaccgctttcagcaacggatcttcgatccgagagtggacattgtccaggccgcatggtctccatttcagaggacctcgtgggtccaaccactgctgatggatttatcaccctggcgagctaagcttcaggagattaaaagtagccttgacaatcacactgaagtcgtttttattgcggacttccctggtcttcatctcgagaactttgtaagcgaagacttggggaacacctccatccaactgctgcagggcgaagttacagtcgaacttgtggctgagcagaagaatcagactctaagagagggagagaaaatgcagctgcccgctggggaataccataaggtgtataccaccagcccatctccctcgtgctacatgtatgtctacgtgaacacaactgagctcgctctagagcaagatctcgcatatctccaggaactcaaggaaaaagttgagaacggaagcgaaacaggacctctgccgccagagctgcaaccactcctggaaggggaagttaaaggcggacccgagccaactccattagtccagacattcctgaggagacaacagcggctgcaagagattgagcgcagacgcaacactccgtttcacgaacgctttttcagattccttctgagaaagctctatgtattccgacgcagcttcttgatgacttgcatcagtctgcgcaacctgattctagggaggccatcactggaacagctcgcccaagaagtcacctatgcgaacctgagaccttttgaagccgttggggagctcaatccgtctaacaccgacagcagccatagtaaccccccagaaagcaatccagaccccgtgcacagcgaattctag

SEQ ID NO: 224279 - DNA, 957 bp, synthetic construct
  misc_feature 1..957: note = Description of Artificial Sequence: Synthetic coding sequence
  source 1..957: mol_type = other DNA
atggcatcacctgggtgcttgttgtgcgttcttggccttttgttgtgtggtgccgcatctctagaactgtcgcggcctcacggtgatacagcgaaaaagccaatcattgggattctaatgcagaagtgccgaaacaaggtcatgaaaaactacggacgatattatatcgcggcatcatatgtgaaatacctggagtccgccggagccagagtagtgccagttcggttggatctgacagagaaagattacgagatcttattcaagagcatcaatggcattctgttccctggtggctctgtggaccttagacggtcagattatgccaaggtcgccaagatcttttataacttatccatccagtccttcgatgatggagattatttcccagtgtgggggacttgtctcgggttcgaggagctctctctcctcatctccggcgaatgtctgctaacggctaccgacaccgtggatgttgccatgccactcaacttcaccggaggccaactacacagtcggatgttccaaaacttccccaccgagcttctcctgtctctggcagtggaacctctaactgcaaattttcacaaatggtccctttcggtcaagaattttactatgaacgaaaagctcaagaaattttttaacgtcttgactacgaacactgacggaaaaatcgagtttatatccaccatggaggggtacaagtatcccgtgtacggtgtgcaatggcacccagagaaagcgccttatgaatggaaaaacctggatgggatcagtcacgctcccaacgctgtgaagacagccttttatttggccgagttttttgtaaatgaggctaggaagaataaccaccactttaaatcagagtccgaggaggagaaggctttaatttaccagttcagtcctatttacacaggaaacatcagtagtttccagcagtgctacatcttcgactag

SEQ ID NO: 224280 - DNA, 345 bp, synthetic construct
  misc_feature 1..345: note = Description of Artificial Sequence: Synthetic coding sequence
  source 1..345: mol_type = other DNA
atggctaattccggatgcaaagacgtaaccggacctgatgaggagtctttcctgtactttgcttatggatccaacctgctgacagagcggatccaccttaggaatcccagcgccgcttttttctgtgtcgcaaggttgcaggacttcaaactcgactttggcaacagccagggaaaaacaagccagacctggcatggcggaatagccacaatctttcagtccccgggagacgaggtgtggggtgtcgtctggaaaatgaacaaaagcaatctgaactcgttagatgaactttttgcctgggtccagaaaaagatggtgtgcaggtggagtataaaacgctcttag

SEQ ID NO: 224281 - DNA, 567 bp, synthetic construct
  misc_feature 1..567: note = Description of Artificial Sequence: Synthetic coding sequence
  source 1..567: mol_type = other DNA
atggccaactccggatgtaaagacgtgaccggccctgatgaggagtcctttttgtactttgcatacgggtctaacttactcaccgagaggatacacttaagaaatccaagtgccgctttcttttgcgtagcacgcctgcaggattttaaactcgattttggcaactcacagggcaagacgtcacaaacatggcatggaggcattgcaaccatcttccagtcgcccggagacgaagtgtggggtgtggtctggaagatgaacaagtctaacttaaactctctggatgagcaagagggcgtgaaaagcgggatgtacgtcgtaatcgaggttaaggtggccacccaggagggaaaggagatcacctgtcgtagctacctcatgactaactacgaatcagcacccccttctccacagtataaaaaaattatatgcatgggcgcaaaggagaacggacttccattggagtaccaggaaaaactaaaagccatcgagcctaacgattacactggcaaagtgtcagaggagatcgaggacatcatcaaaaagggcgagactcagacattgtag

SEQ ID NO: 224282 - DNA, 384 bp, synthetic construct
  misc_feature 1..384: note = Description of Artificial Sequence: Synthetic coding sequence
  source 1..384: mol_type = other DNA
atgtttaatccaatccatcacttagactactataaaaaaacgctcccctccgaattgaactggctggggcagatgtggcttaagtttggctgtagtggtttccgccaagagggagtaaaaagcggtatgtatgttgtgatcgaggtaaaggtagccacacaggagggcaaggagatcacatgccgctcgtatcttatgacgaactatgagagtgcacctccttctccccagtataagaaaataatatgtatgggcgctaaggagaacggcctgcctctggagtaccaggaaaaacttaaggccatcgagcctaatgattataccgggaaggtgagcgaagagattgaggatatcattaagaagggcgagacacagacactttag

SEQ ID NO: 224283 - DNA, 285 bp, synthetic construct
  misc_feature 1..285: note = Description of Artificial Sequence: Synthetic coding sequence
  source 1..285: mol_type = other DNA
atggcgaacagcggatgtaaagatgtaacagggcctgacgaggaatccttcctgtacttcgcttacggtagcaacttactgacagaacgcatacatctgcgcaatccaagtgctgcctttttctgtgtcgcaagactgcaaattatttgcatgggcgcaaaagaaaatgggcttcccctagagtatcaggagaagctcaaggccattgagcccaatgactacacgggaaaggtgagcgaagaaattgaagacattattaaaaaaggagagacacagaccctctag

SEQ ID NO: 224284 - DNA, 501 bp, synthetic construct
  misc_feature 1..501: note = Description of Artificial Sequence: Synthetic coding sequence
  source 1..501: mol_type = other DNA
atggcaaacagtggctgtaaagatgtcacaggaccggatgaagaatcctttctgtacttcgcctacggttccaatctcctaactgaacgaattcacctgcgaaacccctctgccgcatttttttgtgtggccagattacaagactttaaactggacttcggcaatagtcagggaaagacaagccagacttggcatggaggcatcgccactatttttcagtccccaggagatgaagtctggggcgtagtctggaagatgaacaaatccaacctgaatagtctggatgaatggcgaaagaagagacacaccgcctttcagaatcaggggaatcatccatgtaagcataagacccggatgtgggatcgcgatcctaagatccctgtgcagaacctttctctggctctgtgctggcaggcacagagtggacatggcacatgtaaccggctgttcgcctgggtccagaagaagatggtttgccgctggtccattaaacgcagctag

SEQ ID NO: 224285 - DNA, 1710 bp, synthetic construct
  misc_feature 1..1710: note = Description of Artificial Sequence: Synthetic coding sequence
  source 1..1710: mol_type = other DNA
atgaagaaaaaattagtggttcttgggctgttggctgttgttctggtgttagtgatagttggtttgtgtctgtggctcccgagtgccagcaaagaacctgacaatcatgtctatactcgggctgccgttgcggcagatgccaagcagtgctcgaagatcggtagggacgcactgcgggacggaggatctgccgtggatgccgcaatagccgctctgctgtgcgttggacttatgaacgcacattcaatgggaatcgggggtggcctcttcttaacgatatacaattccacaactcgcaaagccgaagtcattaacgcgagggaggtggctcccagattagcttttgccacaatgtttaactcctcagagcagtcgcaaaaggggggattgtctgtagctgtgcccggagaaatacgaggctatgaattagcgcaccaacggcacggtcgcctaccatgggccagattgttccaaccttcaatccaacttgcgagacaggggtttcctgttggtaaagggttagccgctgcactggagaacaagcggaccgttatcgaacagcagccagttctgtgcgaggtgttctgtcgtgataggaaggtgctgcgcgagggggaacgtctgactcttccacagctggccgacacttatgaaacactggctattgagggcgcacaggctttctataacggatcactgacagcccagatcgtcaaagacatccaggcagccggaggcatcgtgacggctgaggacctgaataattacagagcagagctaatcgagcatcccctgaacatatccttgggcgatgtagtcctatacatgccatccgcccctctctcggggcctgtcctcgcgttgatcctgaatatcctgaaagggtataacttcagccgagaatccgtagagtctcccgagcagaagggtctgacttaccacagaattgtggaggccttcagattcgcctacgccaaaagaaccctgctgggcgacccaaagttcgtggacgttactgaagtggtgcggaatatgacctccgagtttttcgctgcccagctccgggcacaaatttccgacgatacaacacacccaatctcctactataaacctgaattctatacccctgatgacggcggaacagcgcacctgtccgtagtcgcggaggatgggagcgcagtttcagctaccagtacaatcaatctctacttcggctctaaggtgaggagccccgtatctggcatcttgttcaataatgagatggatgacttcagcagcccctcgatcactaacgagtttggcgtgcctcctagcccagccaacttcatccagcccggtaagcagccgctgtcatcaatgtgccccaccatcatggtgggccaggacggccaggttcgtatggttgtgggtgctgctgggggtactcagatcacaacagccaccgctttggcaattatctataatctgtggtttggatatgatgttaagagagctgttgaagaacctcgacttcataatcagctccttcctaatgtgaccaccgtagaacggaatatagatcaggctgtgaccgcagcactggagacccgccaccaccatacacaaatcgcgtcaacctttatcgccgtggtccaagcaatagtgaggaccgctggtggttgggcagcggcatcggattctcggaaaggcggtgagccagcgggatactag

SEQ ID NO: 224286 - DNA, 1710 bp, synthetic construct
  misc_feature 1..1710: note = Description of Artificial Sequence: Synthetic coding sequence
  source 1..1710: mol_type = other DNA
atgaaaaaaaaactcgtggtactgggtctactggccgtggtactagttcttgtgatcgtggggctgtgtctttggctcccaagcgcgagcaaggagcctgacaaccacgtctacacaagagctgccgtcgcggcagatgctaaacagtgcagtaagatcggtagagatgccctccgtgacggcggatcggccgtggacgccgcaattgccgcactactctgtgtggggctgatgaacgcccattcaatggggatcggaggtggactctttctgacaatctataattcaacgactcgcaaggctgaagtgatcaacgcgcgtgaagttgcacccaggctggccttcgccacaatgtttaacagcagcgaacaatcacagaagggaggcctgtctgtggctgtgccgggtgagattcggggatatgagctcgcgcaccagagacacgggcgactaccctgggccaggctgtttcaacctagcatacagttagcaaggcagggttttccggtgggaaagggcctggctgcagctttagaaaataagcgcacagtcatcgagcagcagccagtgctgtgcgaggtattttgtcgagaccgaaaggtgttacgggagggggagagattgactctcccccagctggccgatacttacgagaccctggctatagaaggtgcccaggctttctacaatggcagtctgaccgcgcagatcgtgaaagacattcaagccgcaggcggtattgtaaccgctgaggatcttaacaactaccgggcagaactcattgagcacccgctgaacatctctcttggtgacgtagtcttgtacatgccttctgctccgctgtcaggtcctgtgctggctctaatccttaacattctgaagggctacaacttctcgcgcgaatcagtcgaatcgcctgagcaaaagggcttgacatatcatcggattgtggaagcttttaggtttgcttacgctaaacggaccctgttgggggacccaaagttcgtcgatgtgacagaggtggtgcggaacatgactagcgaattttttgcagcacagctgcgggcacagatctccgatgataccacacaccccattagttactacaagccggaattctataccccggatgacggtggaaccgcccacctcagtgttgtagcagaagacggctcggctgtcagcgcaacatctactatcaacctctatttcggatcaaaagtgcgtagtcctgtgtccgggattctgtttaacaacgaaatggacgacttctcctccccctcaattacaaatgagtttggcgtgcctccttctcctgccaactttattcagccagggaagcagcctctaagttccatgtgcccaacaattatggtagggcaagacggacaggtacgcatggtcgtgggcgcagccggagggacccagatcaccaccgctactgctctggcgattatatataacctctggttcggctacgacgtgaaaagggccgtagaagaaccccgtcttcataaccaactcctgcccaacgtcaccaccgttgaacgaaatatagatcaggccgtgactgcggctcttgagacacgccaccaccacactcagatagcctccacttttatcgccgtggtacaggctattgtgaggacagcgggaggctgggctgcagccagcgacagtagaaagggcggtgagcctgcagggtactag

SEQ ID NO: 224287 - DNA, 1710 bp, synthetic construct
  misc_feature 1..1710: note = Description of Artificial Sequence: Synthetic coding sequence
  source 1..1710: mol_type = other DNA
atgaagaagaaactggttgtgctgggattgctcgcagtcgtcctggtcctagttatagttgggttgtgtctatggttgcccagcgcttctaaggagccagataatcatgtttatacacgggctgccgtagccgcagatgccaaacaatgttccaaaatcggacgagatgccctgcgcgatgggggttctgcagtggacgccgcaattgctgctctgctgtgtgtgggcctgatgaacgctcacagtatggggatcggtggcggacttttcctcaccatctataactccacaacccgcaaggctgaagtgattaacgcccgtgaggtggctcctcgcctggcattcgccactatgttcaatagttccgaacaatcacagaaggggggactgagcgtagccgtgcctggagagatccgcggatatgaactggcccaccagcgccacggaaggttgccttgggccagattgttccagcccagcatccagctcgctagacagggatttccggtggggaaggggctggctgcagcgctagagaataaacgcaccgtgatcgaacagcagcccgtactctgcgaggtcttctgcagagacagaaaagttctgcgcgaaggcgaaagacttactctgccccagttggccgacacctatgagacccttgccatcgaaggcgcacaagctttctacaatggcagcctgacagcccagattgtgaaggacatccaagccgctggaggcatagtgaccgctgaagatctcaacaattatagggcagagctgatcgaacatcccctgaatatcagcctcggtgacgtggtgctctatatgccgagcgcccctctgtcaggcccagtgctggcccttattttgaatatccttaaaggctataattttagccgtgaatccgtggaaagtcccgaacagaagggcctgacttaccatcgaatcgtcgaggcctttcgctttgcctatgcaaagaggactcttctcggcgatccgaaatttgtagacgtaactgaagtggtccgcaatatgacctctgaattcttcgccgcacagctcagggcacagatctccgacgataccacccatccgatcagctactacaaacctgaattctacacccctgatgatggcggtactgcccacctctcagtcgtggccgaagacgggagcgctgtgagcgctacgtccactataaacctgtattttggatcaaaggtgcggtccccggtatcaggaatcctgtttaacaatgagatggacgactttagctcccctagtatcaccaatgagtttggggtgcccccatcccccgctaatttcatccagcctggcaagcagcccctctcttctatgtgcccgaccattatggtggggcaagatgggcaggttaggatggttgtcggcgctgccggtggcacgcaaataacaaccgccaccgcccttgcgattatctacaatctgtggtttggctacgacgtaaagcgagccgtggaagaacctcgtctgcataatcagctgctacctaatgtgaccactgttgaaagaaatattgaccaagccgtgactgccgcactggaaactcgccaccatcacacccagatcgcttctacgtttatagccgtcgtgcaagcaattgtgagaaccgctggcggatgggcggcagcttctgacagtagaaagggtggtgaaccagccggatattag

SEQ ID NO: 224288 - DNA, 1710 bp, synthetic construct
  misc_feature 1..1710: note = Description of Artificial Sequence: Synthetic coding sequence
  source 1..1710: mol_type = other DNA
atgaaaaaaaaactggtagttctcggtctgcttgccgtagtgctggtcctggttatcgttggactgtgtctctggctccctagcgcaagtaaggagcccgacaaccacgtatacaccagagccgctgtcgccgcagacgcgaaacaatgttctaagatcgggagggacgccttgcgtgatgggggtagcgctgttgatgctgcaatcgccgctctcctttgcgttgggctgatgaacgcccattctatgggtatcgggggtgggttgttcttgaccatctacaacagtaccacaagaaaggccgaggtgattaacgctagagaggtcgcacccagactggcattcgccaccatgtttaactcgagcgagcaaagccaaaagggcggactctctgtggccgtccctggcgaaatcaggggctatgagttggcccaccagagacatgggaggctgccttgggctcgtctgtttcagccgtcaatccagctggcgaggcagggctttcccgtagggaagggcctcgcggcagccttggagaacaaacggaccgttattgagcagcagcccgtgctctgcgaggtgttttgccgcgatcgaaaggttctgagggagggagaacgtctgacattaccccagcttgccgatacatacgagactctcgccatagaaggggcacaagcattctacaacggaagcctgaccgctcagatagtgaaagacatccaggctgcgggagggattgtcacagccgaggacctgaacaactatagagccgaactcatagaacatcccctaaatatttctctcggtgatgtcgtgctctacatgccttccgcacccctgagtggaccagtgttggctttaatcctgaatatcctgaagggctataacttctcccgcgagagcgtggagtctcctgaacagaagggactcacttaccataggattgtcgaagcttttcggttcgcctatgcaaagcggaccctgctgggtgatcccaaattcgtggatgttactgaggtagtgaggaatatgacctccgagttcttcgcagcacaactgagggcgcaaatcagtgacgacacaactcatccaatctcctattacaagcccgaattctatacacccgatgatggcggaacagcccatctcagcgtagtggccgaagacggatcagctgttagcgctacaagcacaataaacctgtatttcggctctaaggtgcggtctccagtctctggcattctatttaataacgagatggatgatttttccagtccatctatcacaaatgaatttggtgtcccacccagtcccgctaattttatccagcctgggaagcagcctctatctagcatgtgtcctacgattatggtgggacaggatgggcaagtgcggatggtggtaggtgctgccggaggcacacagatcaccaccgcaaccgccctagcaattatttacaatctctggtttggatacgatgtgaagcgggcagttgaagagccgaggctccataatcagctgcttcctaatgtgaccaccgtggagcgcaatattgaccaagccgttactgctgccctggagacacggcatcaccatacacaaatagcctctacctttatcgctgttgtacaggctatcgtccggactgctggaggctgggcggctgcctccgatagtcggaagggcggagaacccgctggctactag

SEQ ID NO: 224289 - DNA, 678 bp, synthetic construct
  misc_feature 1..678: note = Description of Artificial Sequence: Synthetic coding sequence
  source 1..678: mol_type = other DNA
atgacttctgagttctttgccgctcaactgcgggctcaaattagcgatgatacgacccaccctattagttattataagcctgaattttacacgccggacgacgggggaacagcccatctttctgtcgtggctgaggacggctccgccgtaagtgccacctccacaataaatctgtattttggcagcaaagtgcggagtcccgtcagtggcatcctgtttaataacgagatggacgatttttccagcccaagtattacaaacgaattcggggtgccaccatctcctgcgaattttatacagccagggaaacagcctctctcaagtatgtgtcctaccataatggtgggacaggacggccaagtgcgcatggtcgtcggagcagcagggggaacccaaatcaccacggccacggcactggctatcatttacaatttgtggtttggctatgatgtcaagagagccgttgaggaaccacgattacacaaccaactcttgcctaatgtgaccacagtggagaggaacattgaccaggcagtgacggccgcactggagacacggcaccaccacacccagattgcatctacatttatcgccgttgtgcaggccatcgtacgaaccgcgggtggttgggcagccgcttccgacagtagaaagggcggtgagccggctggatactag

SEQ ID NO: 224290 - DNA, 678 bp, synthetic construct
  misc_feature 1..678: note = Description of Artificial Sequence: Synthetic coding sequence
  source 1..678: mol_type = other DNA
atgacgtccgagttcttcgctgcacagctccgggcacaaattagtgatgatactacgcaccccatctcttattacaaacctgaattttacactccggatgatggtgggaccgcccacctctcagtggttgcagaggatggatcggcggtgtctgcgactagcacaatcaatttgtatttcggcagtaaagttagatctccagtgtcggggatcctctttaacaacgagatggatgatttctccagcccttctattaccaatgaattcggggtgccaccatctcctgccaacttcattcagccaggtaaacagccactctcatcaatgtgccccactatcatggtagggcaggatggtcaggtgcgaatggtggtgggagctgctgggggaacccaaattaccactgccactgcactggcaattatatacaatctctggttcggctatgacgtcaaacgcgctgttgaagagcctagactacacaaccagttgttgccgaatgtgacaaccgtggagcgcaacatcgatcaagctgtaacagcggcactggagacacggcatcaccacacccaaatagcttccacatttatagccgtggttcaggccatcgtgcggacggctggtggttgggccgcagctagtgatagtcggaaaggtggcgagccagcaggatattag

SEQ ID NO: 224291 - DNA, 678 bp, synthetic construct
  misc_feature 1..678: note = Description of Artificial Sequence: Synthetic coding sequence
  source 1..678: mol_type = other DNA
atgacctccgaattcttcgctgcacagctgcgggcacagatcagcgacgacaccacccacccgatctcttattataaaccggaattctacactccagatgacggaggcacagcccatctgtcagttgttgcagaggatgggtcagccgttagtgcgacatcaaccatcaacctgtacttcggctcaaaagtacggtcccccgtgtccggaatcctgttcaataacgaaatggacgactttagctccccaagtattacaaacgagttcggcgttcccccaagccctgccaacttcatccaaccaggtaagcaacctcttagttcgatgtgcccgaccattatggtgggccaggacggtcaggtgaggatggtggtgggggctgctgggggaacccagataaccacagcaaccgcactggccataatttacaacttgtggttcggctacgacgtcaaacgagccgtggaggagccacgactccacaaccagctgttaccaaacgtgaccactgtggagagaaatatagatcaagccgtgaccgccgctctcgaaactaggcaccaccatacccagatcgcttcaacatttatcgcagtggtccaggcaattgtccggacagctggcggatgggctgcagcctcagattcccgcaaaggtggagaacccgcaggctactag

SEQ ID NO: 224292 - DNA, 1710 bp, synthetic construct
  misc_feature 1..1710: note = Description of Artificial Sequence: Synthetic coding sequence
  source 1..1710: mol_type = other DNA
atgaaaaagaaactcgtggtacttggattgctggcagtagtccttgtgctggtgatcgtaggtctgtgtctgtggctgcctagcgcctctaaagagccagacaaccatgtttacacgcgggcagctgtcgcagccgatgcaaaacagtgctccaaaatcggcagagatgccctgcgggatggcggatctgctgtggacgccgctattgccgctttgctctgtgtgggtcttatgaatgcccacagcatggggatcggagggggtttatttctgacaatctataattccaccactcgcaaggccgaagtgataaatgccagagaggtggcaccaagattggcgtttgccactatgttcaactcatccgagcagagccagaagggtgggttgagcgttgcggtgcctggtgaaatcagaggttatgaacttgcccatcagagacacggtcggctgccatgggctcggttgtttcagccctcgattcagctggctaggcagggattccccgtcggtaagggtctcgcagctgccctggagaataagaggacagttatcgagcagcagcccgttctctgtgaggtgttttgcagagaccgaaaggtgctaagggaaggcgagcgcctcacccttcctcaactggccgacacctacgaaaccttggccatcgagggcgctcaggctttttataacggctcactgactgcccaaatagtcaaagatatccaggcagccggaggaatcgtaaccgccgaagatctcaataactaccgtgccgagctgatagaacaccccctgaatataagcctgggggatgtggttttgtacatgcctagcgcaccactgtctggaccagtattggctctgatcctgaacatcttgaaggggtataatttctcaagagagtctgtggagagcccggaacaaaaggggttgacttatcatagaattgtggaggccttcaggttcgcttacgccaagcggactctgcttggagaccccaaattcgttgatgtcaccgaagtggtgagaaatatgacgagcgagttttttgcggcacagctgcgggcacaaattagcgatgacacaacacatcctatcagctactacaagccagagttctacacgccggacgacggcggtaccgcacatctgagcgtggtggccgaagacggctctgccgtgtccgccacatcaaccatcaatttgtatttcgggagcaaagtacgctcacccgtatctgggattctgtttaataatgagatggacgacttctcttccccatctattaccaatgagttcggtgtcccgccatcacctgccaactttatacaacccggaaaacaaccccttagtagcatgtgtccgaccatcatggtggggcaagacggtcaggtcaggatggtggtgggggcagcaggcggaacccaaattacaactgctaccgcgctggcaataatctacaacctgtggtttggctacgatgtcaaaagggccgtggaagagccaaggctgcacaatcaactgctgcctaacgtgaccaccgttgagcggaacatcgatcaggccgtcacagccgctttggagactcggcatcatcatacccaaatcgcatccacctttatagcggtcgttcaagcaattgtgcggaccgccggaggatgggcagccgcttctgactccagaaaggggggagagcccgctggatactag

SEQ ID NO: 224293 - DNA, 363 bp, synthetic construct
  misc_feature 1..363: note = Description of Artificial Sequence: Synthetic coding sequence
  source 1..363: mol_type = other DNA
atgaagaagaagctggtggtgctggggctgctggcagtagtactagtgctggtaatcgtcgggctctgcctctggttaccttcagcttccaaggagccagataatcacgtgtacaccagagcagccgtggccgctgacgcaaagcaatgttccaagatcggacgagatgccctgcgggatggcggatcggcagtagatgccgctatagctgctttgttgtgtgttggcctgatgaacgcccatagcatgggtatcggtggcggattgttcctcacaatctataactccacaacgcgaaaagccgaggtgatcaacgctcgggaagtggcacccaggctggccttcgcaaccatgttcaactag

SEQ ID NO: 224294 - DNA, 1392 bp, synthetic construct
  misc_feature 1..1392: note = Description of Artificial Sequence: Synthetic coding sequence
  source 1..1392: mol_type = other DNA
atgaaaaagaagctggtcgttctgggcctcctggctgtagtccttgtactggtcatcgtcggactttgcctgtggttgccatccgcctcgaaggaacctgataatcacgtgtacacacgcgcagcggttgcagctgacgctaaacagtgcagcaaaatcggcagggatgcgcttagggatgggggatctgccgtggacgcagcaatcgcggcacttctctgtgtgggcttaatgaacgcccatagcatggggatcgggggagggctgtttctcactatttataactcaacaacaagaaaggccgaagtgatcaatgcgagggaggtcgcacctaggcttgcctttgcgaccatgtttaactcttccgaacagtctcagaaaggaggtctctcagttgcagtgcccggtgagatcagaggatacgagctggcacaccaaaggcacggtaggctgccctgggccaggcttttccagcccagcatacagctcgctaggcagggattccccgtcggtaaggggctggctgccgctttggagaacaaacggacagtgattgagcagcagcccgtgctgtgtgaagttttctgcagggacagaaaggtgctgcgggagggagaacgcctaaccttgcctcagctcgctgacacctacgagacgctggccattgaaggcgctcaggctttttacaatggctccctcaccgctcagatagttaaagatatccaagcggctggcggaatagtcaccgcggaagatctcaataactatcgggctgagctgattgagcacccactaaacatttccctgggggatgtggtgctgtacatgccatccgcccctctgtctggtccagtcctggcgttgatcctgaacatcttaaagggctacaatttttctagagagtcggttgagtcacccgaacagaagggcctcacctatcaccgaattgtggaggcatttcgctttgcctacgcgaagaggactctgcttggggatcccaagttcgtggatgtgacagaagtagtcagaaacatgactagtgagttttttgcagcacaactccgggctcagatttcagacgacaccacccatccgataagttattacaagccggagttctatacccccgatgacgggggtacggcacacctgtcagtggtcgcagaggacggctcggcagtttctgccacttccacaataaatctatacttcggctcaaaagtgagaagtcccgtttcagggattttgtttaacaacgaaatggatgactttagctccccctctattaccaacgaattcggagtgcctccaagtccagcaaatttcatacaaccagggaaacagccgttgagcagcatgtgccccaccattatggtgggccaagacgggtag

SEQ ID NO: 224295 - DNA, 243 bp, synthetic construct
  misc_feature 1..243: note = Description of Artificial Sequence: Synthetic coding sequence
  source 1..243: mol_type = other DNA
atgaaaaaaaaattagtcgtgctgggattgctggccgtcgtgctggtcctggttattgttggactgtgtctgtggctccccagcgcaagcaaggaacccgataatcacgtctatacaagggcggctgtggcggctgatgctaaacagtgcagcaagattggtcgggatgcgctgcgagatggtggctccgcggttgatgccgctatagcggctttgctgtgtgtggggctgatgaacgcctag

SEQ ID NO: 224296 - DNA, 525 bp, synthetic construct
  misc_feature 1..525: note = Description of Artificial Sequence: Synthetic coding sequence
  source 1..525: mol_type = other DNA
atgaaaaagaagttggtagtcctggggctgctagcagtcgtgcttgttctggtgatagttggactgtgtctgtggctgccgagcgcaagcaaggagcctgacaaccatgtatacaccagagcagctgttgccgcagacgctaaacagtgtagcaagatcggacgagacgctctgagggacggaggaagcgctgtggacgcagcaatagccgcactcctgtgcgtggggctgatgaatgcacatagtatggggatcggcggaggcctatttctgaccatttacaacagtactacgcgaaaagccgaggtgataaatgctagggaagtcgctcctcgcctggccttcgcgacaatgtttaatagttccgaacaatcacaaaagggaggcctctccgtagctgtgccaggcgagattaggggctatgagctagcccatcagcgccacggcaggctaccatgggccagactgttccagccctctatccaactggcgcgacagggatttcctgtgggcaaaggtttatag

SEQ ID NO: 224297 - DNA, 381 bp, synthetic construct
  misc_feature 1..381: note = Description of Artificial Sequence: Synthetic coding sequence
  source 1..381: mol_type = other DNA
atgaaaaagaaattggtcgtcttgggcctgcttgccgtggtcttggtacttgttatcgtgggattatgcctgtggttaccctcggcaagcaaggaacccgataaccacgtgtacactcgtgccgctgtggccgcagacgccaagcagtgcagcaagattggccgagatgctcttagagacggagggtctgctgtggacgccgcaatagcggctctgctgtgcgtgggactgatgaatgcgcactctatgggcatcggagggggactgtttctgacaatatataatagtacaacacgcaaggcggaagtgattaacgcccgtgaggttgcgccaagactggccttcgccacgatgtttaactcttccgaacaaagtcagtag

SEQ ID NO: 224298 - DNA, 330 bp, synthetic construct
  misc_feature 1..330: note = Description of Artificial Sequence: Synthetic coding sequence
  source 1..330: mol_type = other DNA
atgaagaagaagctggttgttctgggcttgctcgccgtggtgcttgtcctggtgattgtaggattgtgcctctggctaccatcggcaagtaaagaacccgataatcacgtctacactagggcagctgtggcagccgacgcaaagcagtgtagtaagattggaagagacgcccttcgagatggcggatctgccgtcgatgccgcaatcgccgctctgctgtgcgtgggcctgatgaacgcccattctatgggaatcggcggaggccttttcttaaccatttacaacagcactacacgaaaggccgaggtgatcaacgcaagggaggtttag

SEQ ID NO: 224299 - DNA, 336 bp, synthetic construct
  misc_feature 1..336: note = Description of Artificial Sequence: Synthetic coding sequence
  source 1..336: mol_type = other DNA
atgaaaaagaagttggtagtacttggactcttagcagttgtccttgtccttgttatcgtcggcctgtgcctctggttgccctctgcatctaaagagccagataatcacgtatacacacgagccgcagtggcagctgatgctaaacagtgctccaagataggaagagatgccctccgggatggtggaagtgccgtcgacgctgcgatcgcagcactgctgtgtgtgggactaatgaacgcccactctatgggtatcggcggaggacttttcttgactatttataattcaacaacaaggaaggctgaggttattaacgcaagagaggtcgcaccctag

SEQ ID NO: 224300 - DNA, 114 bp, synthetic construct
  misc_feature 1..114: note = Description of Artificial Sequence: Synthetic coding sequence
  source 1..114: mol_type = other DNA
atgaagaaaaaactggtggtgctgggtctgctggcagtggtgcttgtgctggtaatcgtaggtctctgtctgtggttgccttcagcatctaaggagcccgataatcatgtgtag

SEQ ID NO: 224301 - DNA, 207 bp, synthetic construct
  misc_feature 1..207: note = Description of Artificial Sequence: Synthetic coding sequence
  source 1..207: mol_type = other DNA
atgaaaaaaaaactggtggttctgggacttctggccgtcgtcctggtgctggtgattgtggggctgtgcctatggctgccctccgccagcaaagagcccgacaatcacgtctacacccgtgccgctgtcgccgctgacgcgaagcagtgttccaagattggaagagatgctcttcgagacggcggatccgccgttgatgcggcatag

SEQ ID NO: 224302 - DNA, 381 bp, synthetic construct
  misc_feature 1..381: note = Description of Artificial Sequence: Synthetic coding sequence
  source 1..381: mol_type = other DNA
atgaagaaaaagcttgtcgttctgggcctgctcgctgttgtgttagtgcttgtgatagtggggctgtgtctatggctaccttccgcatccaaggagccagataatcatgtttacactagggccgctgttgcagccgatgcgaagcaatgtagcaagattggtcgggacgcactgagggacggcggaagcgccgtggacgcagccattgctgccttactgtgcgtgggcctgatgaatgcccacagtatgggcatagggggaggtctattcctcaccatctacaacagtaccacacgcaaggccgaggtgatcaacgcccgagaggtggctcctaggctggcattcgcgacaatgttcaattcctcagagcagagccagtag

SEQ ID NO: 224303 - DNA, 351 bp, synthetic construct
  misc_feature 1..351: note = Description of Artificial Sequence: Synthetic coding sequence
  source 1..351: mol_type = other DNA
atgaagaaaaagctggtggttttaggtctcttagcagtcgtgcttgtgctcgtgatcgtggggttatgcttatggctaccctctgccagtaaggaacccgataaccacgtgtatactcgcgctgcagttgcagctgatgccaaacagtgttcaaagattggcagagacgccctgagagatggcggatctgctgtggacgccgctatcgcagcgctgctgtgcgtcgggctcatgaacgcccatagtatgggcatcggaggcggactgttcctgaccatctacaattccactacacgcaaggctgaggtaatcaatgcgcgagaggtcgctccgagactcgcattcgcttag

SEQ ID NO: 224304 - DNA, 384 bp, synthetic construct
  misc_feature 1..384: note = Description of Artificial Sequence: Synthetic coding sequence
  source 1..384: mol_type = other DNA
atgaagaaaaaacttgtggtcctggggttgctggcggtggtgttagtgttggtcatagtagggttgtgtctgtggttgccatctgccagtaaagagccagataaccatgtgtacacaagggcagccgtggccgctgacgctaaacagtgttctaaaattgggagggatgcactccgggacggcggtagtgccgtcgatgcggcaattgcggctctgttatgcgtgggcttaatgaatgcacactcaatggggattggtgggggattattcttgacaatatataattcgacgacgaggaaggcggaagttatcaacgcaagggaggtcgcccctcggctggcctttgctaccatgttcaatagcagcgagcagtcccagaagtag

SEQ ID NO: 224305 - DNA, 297 bp, synthetic construct
  misc_feature 1..297: note = Description of Artificial Sequence: Synthetic coding sequence
  source 1..297: mol_type = other DNA
atgaaaaaaaaattagtggttttaggactgctggcagtcgtcctggtgctggtcatcgtggggctttgtttgtggctaccctctgccagcaaggagccagacaaccacgtttatacaagagccgcagtggccgctgacgccaaacaatgttcaaagatcggcagggatgctctacgggatgggggttcagccgtggacgccgcaatcgccgctttattgtgcgtgggtctgatgaatgctcacagtatgggtataggcggagggttgtttttgaccatatacaactctacaacatag

SEQ ID NO: 224306 - DNA, 93 bp, synthetic construct
  misc_feature 1..93: note = Description of Artificial Sequence: Synthetic coding sequence
  source 1..93: mol_type = other DNA
atgaaaaagaagcttgtggtgctggggctactggccgtagtattagtgctggtgatagtgggactctgcctgtggctgcccagtgcgtcatag

SEQ ID NO: 224307 - DNA, 1710 bp, synthetic construct
  misc_feature 1..1710: note = Description of Artificial Sequence: Synthetic coding sequence
  source 1..1710: mol_type = other DNA
atgaagaagaagctggtggtgcttggcttgctggctgtcgttttggtcttagtgatagtggggctgtgtctgtggctgcccagcgcctcaaaggaaccagacaatcacgtgtacaccagggcagccatggcggctgatgccaaacagtgcctggagattggacgggacaccctgcgggatggtggaagcgctgtggatgcggcaattgccgcactcctgtgcgtaggcttgatgaacgcacattctatgggtatcggggttggactcttcttaacgatttacaactccaccacccgcaaggccgaagtaattaatgcacgggaagtagcgccacgcctggcattcgcctcaatgtttaacagtagcgagcaatcacaaaaggggggtttaagcgttgctgttccgggagaaatccggggttacgaattagcccaccagcgacatggcagactgccgtgggctcggcttttccagccctccatccagctcgcacgccaagggttccccgtgggaaaggggctcgcggcagtgttggaaaacaaaaggactgttatagaacagcaaccggtgctgtggtatgtgttttgcagagatcggaaagtactccgcgagggagaaagactcacactgcccagactggctgacacttatgagatgcttgctatcgagggcgctcaggcattctataatgggagtctgatggcgcagattgtaaaagacatacaggcggctggaggcatcgtcactgccgaggacctaaacaactatcgcgctgagcttatcgaacaccccctcaacatctctctaggcgacgctgtcctctatatgccctccgccaggctgagcggcccagtgctagcgctcatcctgaacatccttaagggctataatttttctagggaatctgtggagactccagagcagaaaggattaacctatcacagaatcgtcgaggcatttagatttgcctatgcaaagaggacactgctaggtgacccgaagtttgtggatgtcaccgaagttgtcagaaatatgacgagtgagttctttgccgctcaactccgctcccagattagtgatcatacgactcatccaatcagctactataaaccggagttttatacacccgatgatggcggaaccgcacacttgtctgtagtggccgaggacgggtcggcagtttcagcgacaagcacaatcaacttatattttggttctaaggtttgctcccctgtgtcagggatactgtttaacaacgaatggactacctccgcactgccagcctttacaaatgagttcggagcccctccatcacccgctaactttattcagcccggtaaacagccactgctgtccatgtgcctcactattatggttgggcaggatggacaggtgaggatggtagtaggagccgctggcggtacccagataaccacagataccgccttagccattatttataatctctggtttggttacgatgtaaagcgcgctgtcgaggaaccgcgactgcacaacaagctgctgccaaacgtgaccactgtcgagcggaatattgaccaggctgtgaccgctgcgctagaaacccggcatcatcacacccagatcgcgtctacattcatcgctgtagttcaagcaatcgtccgcacagcaggaggatgggcagcagcaagcgattcacgcaaggggggagagccagctgggtattag

SEQ ID NO: 224308 - DNA, 1680 bp, synthetic construct
  misc_feature 1..1680: note = Description of Artificial Sequence: Synthetic coding sequence
  source 1..1680: mol_type = other DNA
atgaagaagaagctggttgtgctaggcctgctagcggtcgtgctagttctagtgatcgtcggcctgtgtttatggctgccgagcgcctcaaaagagcccgacaaccacgtttacactcgagcagccatggctgctgatgccaagcagtgcctggagataggcagagacactctgagggatgggggatcagctgttgatgctgcgattgctgccctgttatgcgtcggcctgatgaacgctcatagcatgggcattggagtcgggttatttctgacgatttataacagtactactcgaaaggccgaagtaatcaacgccagggaagtggccccacggttagcgttcgcttcaatgttcaattcctctgaacagtctcagaagggcggtctttctgtagcagtgcctggcgagataagagggtacgagctggctcatcagcgccatgggagactgccatgggccagactgttccagcctagcatccagttggccaggcagggattccctgtgggcaaaggactcgcagcagttttagagaataagaggacagtgatagaacaacagcccgtactatggtatgtgttctgccgggaccgcaaagtcctccgggaaggggaacggctcactctcccaaggctggccgacacttatgagatgctggctatagaaggcgctcaagccttttataacggatccctcatggcccagatcgtaaaggacatccaggccgctggtggtatagtcaccgccgaagacctgaacaactatagggccgagctgattgaacacccacttaacatttccctgggggacgcggtcttatacatgcccagcgctagactgtccggtcccgtgcttgccctgatactcaacattctgaaaggctacaacttctcacgcgagtcagttgagaccccagagcagaaagggctgacctaccacagaatcgtggaagctttcaggttcgcctatgccaaacgcacattgttgggcgaccccaagttcgtcgacgtgactgaagtagtgaggaacatgacttccgaattctttgcagcacaactccgcagccagatctcagatcacacaacccaccccatatcatactataaacccgagttttatacgccagacgacggtggtactgcccacctgtctgtagtggccgaagacgggtcagcagtgagtgccacttccacaataaatctgtacggtattctctttaataatgagtggacaacctccgctctgcctgcattcaccaatgagttcggggctccgcctagtcccgctaattttatccagcctgggaaacagcccttgctgtcaatgtgtttaacaatcatggttgggcaggatggccaggtccgcatggtggttggcgcagcaggaggaacgcagattacaaccgataccgctctagccatcatctataacctgtggttcggatacgacgtgaaacgggctgtcgaggagcctaggctacacaacaagcttttacccaacgtgacgaccgtggaaagaaatattgaccaggcggtgacagctgccctggagacacgccaccaccacacccagattgcgagtacttttatcgccgtcgtgcaggctattgtgaggaccgccggtggttgggccgctgcgtcagactcacgcaagggaggggagcccgcaggctattag

SEQ ID NO: 224309 - DNA, 1710 bp, synthetic construct
  misc_feature 1..1710: note = Description of Artificial Sequence: Synthetic coding sequence
  source 1..1710: mol_type = other DNA
atgaagaagaagctggtcgttctgggtctgctggctgtggtcttggtgctggttatcgtgggactgtgcctgtggctgccgtcggcatctaaggaacccgataaccacgtctacacgcgggctgcgatggctgccgacgccaaacagtgtcttgaaatcgggcgagatactctgcgggacggaggaagtgctgtggatgcagctattgccgcactcctgtgtgttggcctgatgaatgctcattctatgggtatcggcgtaggcctattcctgacaatctacaactctacaactagaaaagccgaggtgatcaacgctagggaagtcgccccaaggctggcgttcgcttccatgtttaattctagcgagcagagccagaaaggcggtctttcagtggctgttcccggagaaatccgcggatatgaacttgcgcaccagaggcacggcaggctcccatgggcgagactgtttcaaccctcgatccaacttgctcggcagggttttcctgtaggcaagggactggcggctgtgcttgagaacaaaagaacggtcatcgagcagcagccagtgctctggtatgtgttttgcagggatagaaaggtgctccgggagggggagcgacttactctcccccgactggctgacacctatgagatgttggccatcgagggcgcacaggctttctataatggctccttgatggcccagatcgtgaaagacatccaggccgctggaggcatagtgaccgccgaagaccttaacaactatcgtgctgaactgatagagcatcccttaaacattagcctgggagatgccgttctttacatgccctcagcacggttatcaggtccagtgctcgcgctgatccttaacatccttaaaggctacaatttcagcagggagtccgtcgagacaccagagcagaagggtcttacctaccaccgcattgttgaagccttcagattcgcgtacgctaagcggacactcttgggagacccaaaatttgttgacgtgactgaagttgtaaggaatatgaccagcgaattctttgcagcgcagcttaggagccagataagcgaccatacaacccatcctattagctattataagcccgagttttacacccctgatgacggtggcaccgcccatctgtcggttgtggcagaggatgggtccgctgtcagcgccacttccaccatcaacctgtattttggaagcaaggtttgcagtcccgtcagtggaatcctttttaacaatgagtggaccaccagcgccctgcccgcattcacgaacgaatttggagctcccccatcccctgcaaatttcattcagcctggcaagcagcctctgctgtctatgtgcttgactattatggtaggccaagacggccaggtacggatggttgtgggggctgccggaggcactcagataactactgacactgccctcgctattatttataacctttggttcggctacgatgtgaagcgcgctgtcgaggaaccgcgtctgcacaacaagctgttaccaaacgtgacaactgtggaacgcaatatcgaccaagccgtaaccgcagctctcgaaacacggcaccaccacacccagatagcttctactttcattgccgtcgtgcaggcaattgttagaactgctgggggatgggccgcagcttctgactcgagaaagggcggtgaaccggcaggatactag

SEQ ID NO: 224310 - DNA, 1665 bp, synthetic construct
  misc_feature 1..1665: note = Description of Artificial Sequence: Synthetic coding sequence
  source 1..1665: mol_type = other DNA
atggcaaggggttatggagctactgttagcctggtcctgctgggactgggattggcattagcggtcatagtgttggctgtggtgttgtccagacaccaggcaccatgcggaccacaggccttcgcacacgcagccgtggctgcagactctaaggtgtgttccgatattggacgcgcaatccttcagcagcaggggtctccggtggatgccaccatagctgccctagtttgcacatctgtcgtgaacccccagtctatgggactggggggtggagtgatattcacgatctacaacgttacaaccggtgcccagtggataggcgtccccggagagttacgtggctatgcggaggcacaccggcgacacggaaggctgccttgggcacagctgtttcagcccacaattgctttattaaggggaggtcacgtcgtggcacctgtcctgagccggttcctgcataattcaattttaagaccctccttgcaggcctccaccctgcggcagctctttttcaacggaactgaacctctgagaccgcaagatccactcccctggccagccctggctacaactttggagaccgtcgctaccgagggggttgaagtgttttatactggaaggcttggacagatgctcgtggaggacattgctaaggaggggagccagctgacacttcaagatctggccaagttccaacctgaggtggtcgacgcactcgaggttcccctcggcgattataccttgtactccccaccgccacccgctggaggggcaatcctgtcttttatactgaacgtgttgagagggttcaatttcagcacggaaagcatggctcgccctgaggggagagttaatgtttaccatcacctagtggagacactgaagtttgctaaggggcagcggtggagactgggagaccccaggtcccatccaaaattacagaacgcatcgagagacctgctgggcgaaacgctggctcagctgatcagacagcagattgatgggaggggagaccaccagctcagccactactctctagcagaggcttgggggcacggcacagggacatcccatgtttcagtgcttggggaagatggatcggccgtggccgcaacttctactataaataccccttttggtgccatggtatacagtccacggaccggcatcatcctcaacaacgagttgctggatttgtgcgagagatgcccacggggtagcggaaccactccctccccagtgagtggcgaccgcgtggggggagcacctgggaggtgctggccccctgttccgggagaacggagcccgtccagcatggtgccatctatactcataaacaaggcccagggaagcaagcttgtgatcggtggagccggaggcgagctgatcattagtgccgtcgcacaggcgataatgagcaaattatggctgggcttcgacctcagagctgccatcgcggcacccattctgcacgttaactccaaaggctgtgttgagtacgaaccaaactttagccaggaggttcagcggggtcttcaggatcgaggccaaaaccagacccaacggccttttttcctaaatgttgtgcaggccgtgagccaagagggggcatgcgtctacgccgtctccgacctgcgcaagtccggcgaggccgctggctactag

SEQ ID NO: 224311 - DNA, 1761 bp, synthetic construct
  misc_feature 1..1761: note = Description of Artificial Sequence: Synthetic coding sequence
  source 1..1761: mol_type = other DNA
atggctagaggctatggtgcaactgtgtccctcgtgctgctgggactgggactagccctggctgtgatcgtgctggcagtcgtgctatccaggcaccaagcgccttgtggcccacaggccttcgctcacgctgccgtcgcagcagactccaaagtctgctctgacattgggagagctattctgcagcagcagggatctccagtggacgccacaatcgccgcactggtgtgcacatccgtggtgaatccgcaaagtatgggcctgggcggtggggttatctttaccatctacaacgtgaccaccgggaaagtggaggtcattaatgcccgtgagacagtgcccgcttcacacgcaccctcgctgctggatcaatgcgctcaagctctgcctctgggcacgggagcacaatggatcggagttcctggggaattgcgcggttatgccgaagcccatagacggcatgggcgacttccatgggcccagctgttccaacctacgatcgctctgttacggggtggtcacgtcgtggcgccagtactctcgaggttcctacacaattcaatcttgcgcccttctttacaagcgagcactctgagacagttgttcttcaatggaacagagccccttcgcccacaagacccattgccatggcctgccctggcgactacattggaaactgtagccacagagggtgttgaggtgttctatacaggtagacttgggcagatgctagtggaagacatcgcaaaagaagggtcgcagcttaccttacaggatcttgctaagttccagccagaagtcgtggatgcgttagaggtgcctctgggcgactataccttgtattctccccctcccccagccggaggtgcaatcctgtcctttatcctgaacgtgctgcggggattcaatttcagcaccgaatctatggccaggccggagggtagagtcaacgtatatcatcatctcgttgagacgctgaagttcgcaaagggccagaggtggcgattgggtgatcctagaagtcatcctaagcttcaaaatgccagcagagacctgttgggggagaccctggctcagctcatcagacaacaaatcgacgggcgaggtgatcatcagcttagccattactcactcgccgaagcctggggccacggtactgggacgtcccacgtatcagtcctgggggaagacggaagtgctgtagccgcaactagtactatcaacacccccttcggcgcaatggtttatagcccaagaacggggattattctaaataatgagctgctggatctctgcgagcgttgcccacggggatccgggactacacccagtcctgtctccggcgaccgggtgggcggagcccctgggaggtgctggccaccagtgccgggagaacggtccccttcttctatggttccgagtattttgataaataaggcccaaggttccaaactggtcatcggcggtgcgggaggcgagctcatcatctcagctgtggcccaggccatcatgagcaaactttggcttggatttgacctgcgcgctgcgatcgccgcacccatcctgcatgtgaacagcaaaggatgcgtagaatatgaaccgaattttagccaggaggtgcaaagaggacttcaagataggggccaaaaccagacccagcgtcctttcttccttaatgtggtacaggcagtgtctcaagaaggtgcttgtgtttatgcagttagcgacctccgaaagtctggcgaagccgcagggtattag

SEQ ID NO: 224312 - DNA, 1764 bp, synthetic construct
  misc_feature 1..1764: note = Description of Artificial Sequence: Synthetic coding sequence
  source 1..1764: mol_type = other DNA
atggcccgaggatacggcgcaacagtatcactggtgctgctgggcctcgggctggcgctggctgtgatcgttcttgcagtggtgttaagtcggcaccaggcaccctgcggccctcaagccttcgctcacgcagccgtggccgctgattccaaagtctgctctgacatcggacgagcgatcctccagcagcagggctcaccggtggacgctaccattgcagccctcgtgtgtacgagtgtggtgaatcctcagtctatggggttaggtggcggagtcatctttaccatctataacgttaccacaggcaaagtcgaagttatcaatgcgagggagaccgtacccgcaagtcatgccccttctctgctcgaccaatgcgcccaggctttacccctcggcaccggagcacagtggattggtgtcccaggcgagcttaggggatacgctgaagctcataggagacacggcaggttgccatgggcgcagctcttccaaccaactatagcactgttgcgaggcggacacgtagtggcacccgtactgtcgcgttttctccacaattccattctgcggccttctttgcaagctagcacgctgcgacagctttttttcaatgggacggagccgttgagaccacaggaccctcttccttggcccgctcttgcgactaccctggagactgtggccacagagggagttgaggtgttttacactggacgactgggtcagatgctcgtcgaggatatcgcaaaagaggggagtcagttgactctccaggatctcgctaagttccagccagaagtggttgatgccctcgaggttccccttggcgattataccctttactccccaccacccccagcagggggtgccatcctctccttcatactcaacgtcctgagaggatttaatttctcaactgagtccatggctcggccagagggaagggtgaacgtgtaccatcacctcgtcgagaccctcaaatttgcaaagggacagaggtggcgactcggtgacccgagatcacatccaaagctgcagaatgcctcgcgtgatctcctgggggaaaccctggcccaactaatccggcagcaaattgacggcagaggagaccatcagctgagccactattcattagccgaggcatgggggcacggaaccggcacttctcacgtatcagttctgggagaagacggttcagctgtagccgctacctcaactatcaacaccccgttcggcgcaatggtttacagccccagaacaggtatcattctcaacaatgagctgcttgatctgtgtgagagatgtccccgaggcagtggcaccacacctagtccagctgtgtcgggtgatagagtggggggagcgcctggcagatgctggccccctgtccctggagagaggtccccttcttctatggtccccagtatccttattaataaagcacagggtagcaaactagtgattggcggagcaggcggtgaactgattatcagcgctgtggcccaggcaataatgtccaaactgtggctcggctttgatctgcgggcagcgatcgctgccccaatccttcacgttaattccaaaggatgtgtggagtatgagcctaatttttctcaagaggtgcagaggggtctgcaggaccggggacaaaaccagacacagagaccattcttccttaatgtggtccaagctgtatctcaggaaggcgcatgtgtttacgctgtgagcgatctcagaaagagtggcgaggcagcaggatactag

SEQ ID NO: 224313 - DNA, 1533 bp, synthetic construct
  misc_feature 1..1533: note = Description of Artificial Sequence: Synthetic coding sequence
  source 1..1533: mol_type = other DNA
atggccaggggatatggcgctactgtaagtcttgtgttgctggggcttgggttggctctcgctgtaattgtcctcgcagttgtactcagtcgtcatcaggccccttgtgggccacaggcatttgcgcatgcggcagtggcagccgattctaaagtgtgctctgatattggaagaggaccagtagaccggggagctcgcggagccccatggttgtgtagaggaccaccacccccttggccacctgccctcggggctgcagtccccgctcaccacagggctgcacctcggggagcttgcggcggtccgtgtcctcagcccttcccagcccagcagcatcccgcagcttttcttgctggggttaaccctgctctcttttttaacggcaccgagcctctacgccctcaggacccactcccctggcccgctttggccactacattagagaccgtggccacagagggggtcgaggtgttctacaccggccgtctgggccagatgttagtggaagacatcgccaaggaggggagtcagctgaccctccaggatctggcaaaatttcaacccgaggtggtggatgctctggaggtgcctctcggcgattatacattgtactcaccccctcctcctgcgggtggtgccattctttcattcatcctgaatgtcctgagaggcttcaacttcagcactgaaagcatggcacgacctgaaggcagggtcaatgtgtatcatcacttggttgagacactcaagttcgccaaggggcagcggtggcggctgggtgacccacgcagccaccccaagttgcagaacgcttccagagacttgcttggagaaaccctggcccaactaatcagacaacagatcgacgggaggggcgaccatcaactgagccattacagcctggcggaagcgtggggacatggtacaggtacaagccatgtctctgtgcttggggaggacggatcagccgttgccgcaactagcacgattaatactccctttggagccatggtatacagcccccgaacaggaatcatcctgaacaatgagttgctggatctctgcgagcgctgccccagaggtagcgggacgactcccagtcccgcagtcagtggggacagggtcgggggtgcacccggaaggtgttggccccctgtccccggagagcgcagcccttctagcatggtgcctagcatcctgataaataaggctcaaggcagtaagcttgtgatcggcggagctggaggagaactcatcatatctgccgttgcgcaggccataatgtccaagctgtggctgggcttcgacttgcgcgctgctatcgcggcacctatcttgcatgtgaacagcaaaggatgtgtagagtacgagccaaatttttcgcaggaagtacagcgaggactgcaggataggggtcagaaccagactcagcggcctttcttcctcaacgtagtgcaggcagtgagtcaggaaggcgcatgtgtgtatgcagtgtctgacttgcggaaatctggcgaagccgctggatactag

SEQ ID NO: 224314 - DNA, 1506 bp, synthetic construct
  misc_feature 1..1506: note = Description of Artificial Sequence: Synthetic coding sequence
  source 1..1506: mol_type = other DNA
atgggactcggcggaggcgtcatattcaccatctataacgtcacaacggggaaggtggaagtcatcaatgctcgggagacggtgcctgcatctcacgcgccaagtttgcttgaccagtgcgcgcaggctctccccctcggtaccggagcacagtggatcggcgtccctggagagctgcgtggctatgccgaagcccaccgacgccatggcaggctgccctgggcccagttgtttcagccgactattgctctgctccgcggaggtcacgtggtggccccagtcctatcacggtttctgcataacagtatcctgagaccgtcactgcaggcctcaacacttcgccagctgttcttcaacgggacggagccactgcgacctcaggaccccctgccgtggccggcattggctacaaccctggaaactgtagctacagagggagtcgaggtcttttataccggcagattgggacaaatgctggtcgaggacattgcaaaagaaggctcccagctaacactccaggatttggctaagtttcagcccgaggtggtagatgctctggaagtacccctgggagattacacactctactctcctccaccaccagcaggtggggcaatcctatctttcatcctgaatgttctccgagggttcaatttttctacggagtctatggcccgtcccgaaggcagagtaaatgtctatcatcacctggtggaaactttgaagtttgccaagggtcagagatggagactgggcgacccacgcagccatccgaagttacaaaacgccagcagggatctcctcggcgaaactctcgcgcagctcatcagacagcagatcgacggtagaggggatcaccagctgtctcactacagcctcgccgaggcctggggccacggaacaggaacctctcacgttagcgtgcttggtgaagatgggtctgctgtagcagcaacctctacaataaacacgccatttggcgctatggtgtattcaccccgtacaggtatcattctcaacaatgaactactcgatttatgtgaacggtgtcctagaggaagcggcacaactccgagtcccgtgagtggcgaccgggtgggtggcgctccgggtagatgttggcctcccgtgccgggagaaagatctccgagttctatggtgccctccatcctgatcaacaaagctcagggctccaagctcgttattggtggcgcagggggagagctcattatttccgcagtagctcaagccatcatgtcaaaactctggctcggattcgatctgagagctgctatcgctgcccctatactgcacgtgaattccaagggatgcgtagagtacgagcccaactttagtcaggaggttcagcgcggtttgcaggaccggggtcagaatcagacccagaggccatttttcttgaatgtggttcaggcagtcagtcaggaaggggcatgtgtttatgccgtttccgatctacgcaagtctggtgaggcagccggttactag

SEQ ID NO: 224315 - DNA, 1386 bp, synthetic construct
  misc_feature 1..1386: note = Description of Artificial Sequence: Synthetic coding sequence
  source 1..1386: mol_type = other DNA
atggagagagcggaagaacctgtcgtttatcaaaagctgcttccctgggaaccatcactggaatctgaggaggaagtggaggaggaagaaacttccgaagcactggtgctgaatcccaggcgccatcaggacagtagtagaaacaaggctggtgggctgcctggaacctgggcgagagtggtggccgctctgctcctcctcgccgtgggatgcagcctcgcggtccgtcaattgcagaaccagggacggagcaccggaagtctgggatcagtggctcctcccccagggggacattcacatgggcctggagtgtaccaccacggagcaataatttctccagcgggtgctatgttctggggcttattccacgacagcagcagtgggaattcaacagcactaacatcggggccagcccagactctggctcccggactgggtctgcccgctgcattgcccactttgcacctcctgcatgcacgcttcggtcgattgccctggccccgtttgctggtggggcctactaccctggcccaggaggggtttctggtggacacccccttagctagagcactggttgctaggggaaccgagggtctgtgccctctcctgtgccacgccgacggcacgccactgggcgctggcgctagagccacgaatcctcagcttgctgcggtactgagatctgctgctctggcaccaacctccgatcttgctggagatgccctcctgagcctcctggccggtgatctgggtgtagaggtgccgagcgctgtcccaagacctactctggagcccgctgaacaactgcctgtgccccagggcatcctttttacgaccccctctcccagcgctgggcctgaactgctcgccctgctggaggcagctttaagaagtggggcacctattccagacccctgccccccatttctgcagacagcggtttcacctgagtcttcagcgttagctgccgtcgatagctccggctctgtgcttctgctcacatcttccttgaactgttcctttggcagcgcccacttgtcgccatccacgggggtcctgttaagcaacctggtagcgaagagtactaccagcgcatgggcctgccccctgattctacggggttcactcgacgatactgaggcggacgtgctaggattggtggcatccgggacacccgatgtcgccagggcaatgacacacacactgctgagacacttggcagcgagaccacctacccaagcacagcaccaacatcaggggcagcaagagcctacagagcatccctctacctgcggccagggtacattgctccaagttgctgcccacacggagcacgcccacgtgtcctccgtaccccacgcatgttgcccgtttcaaggcttctag

SEQ ID NO: 224316 - DNA, 1482 bp, synthetic construct
  misc_feature 1..1482: note = Description of Artificial Sequence: Synthetic coding sequence
  source 1..1482: mol_type = other DNA
atggaaagagcagaggagccggtagtgtatcaaaaactcctgccatgggagccaagccttgagagcgaagaggaggtcgaagaagaggagacctctgaggcattggtgctgaatcctagaagacaccaggattcgtcacgcaacaaggccggaggattgcccggtacttgggcacgcgtcgtggcagcgctcctcctgctagctgtaggctgcagccttgcggtccggcagctgcagaatcagggcagatcaactggcagcctgggctcagtcgcgcctcctcctggtgggcactcccatgggccaggcgtttatcaccacggtgccatcatttcccccgctggacgtgaactgctggttgctggtggcaacgtcgtggatgcaggtgtgggcgctgccttatgtttggcagtggtgcacccgcatgccaccgggcttggcgctatgttctggggcctctttcacgactcatcttcaggaaactcgaccgccttgaccagcgggcctgcccagactctggcgccagggctgggcttgccagcagcgctgcctacattgcatttattgcacgccaggttcgggagattgccctggccacggcttctggttggacctacaacactggcgcaggagggttttctagttgacactcccctggcgagagctctggttgctagggggaccgagggactctgccctttgctctgccacgcagacggaacaccactcggcgctggcgcaagagccacgaacccacagttggcagcagtcttacggtccgccgctctggcgccaactagtgacctggctggggacgcgttactttcccttctggctggcgaccttggcgtggaagtccctagcgcagtacctagaccgacactcgagcccgctgaacagttaccggttccccaagggattcttttcactaccccgagtccttccgcaggaccagaattactcgccctgctggaagccgcactccgatcaggggctcctatacccgatccgtgcccaccgttcttgcagacagctgtgtcacccgaaagctccgcgctggccgcagtcgattctagcggctcggtgttactcttaacaagcagtctgaattgctccttcggcagcgcccatcttagtcctagtactggagtgctcctgtcaaacctggtggccaagtccacgacctcagcttgggcatgccccctaatcctgcgtgggagcctggatgatactgaggcagatgtgctcggattagtcgcctctggaacacctgacgtagcccgagccatgacacataccctactccgccacctggcagccagacctcccacacaggcccagcaccagcaccaaggacagcaggagcccaccgaacatccgagtacttgcggtcagggcaccctccttcaggtggcagctcacacagagcacgcccacgtctcctccgtaccacacgcctgttgtccttttcaaggcttttag

SEQ ID NO: 224317 - DNA, 1038 bp, synthetic construct
  misc_feature 1..1038: note = Description of Artificial Sequence: Synthetic coding sequence
  source 1..1038: mol_type = other DNA
atgttttggggccttttccatgactctagttccggcaattccacagccctcacctcaggccctgcacagacacttgcccctggactagggctgccagccgctctcccaactctgcatctgctccatgcgaggttcggcagattaccttggcccagactattggttgggcctacaaccctggcccaggaaggatttctagtggatacccctttggcccgagcgctagtcgctagagggaccgaagggctctgccccctactttgtcacgcagacggcactcccctcggtgcaggcgcaagagccaccaaccctcaattagcggctgtgctaagaagcgcagccctggctccaaccagcgatttggctggggatgctctgctgagtctgctggctggggatctgggtgtggaggtgccaagcgccgtaccgagacccacgctcgaaccagccgagcagctccccgtccctcagggaatcctctttacaaccccgagcccctctgctggacctgaactcttagccctgctggaggcagcgttgagatccggcgctccaataccagatccatgtccacctttcctccagaccgctgtaagcccagagtcctctgcgctcgcagccgtggactctagtggcagcgttctgttactgactagttccttgaattgttcattcggatccgcacacctgtcgccatccacaggggttctcttgagcaacctagttgcaaaatctacgacaagtgcctgggcatgtccgttgatactacgcggttcattagacgataccgaggctgacgtgttgggcttagtcgctagcgggacccccgacgtggccagagcaatgacccatacactgttgcggcaccttgccgctcggcctcccactcaggcccagcaccagcaccagggccagcaggaaccaaccgagcatccctccacctgtggccagggtaccctcttacaggtggccgcacacacagagcacgcacatgtcagctccgtgcctcatgcctgttgtccattccaagggttttag

SEQ ID NO: 224318 - DNA, 1482 bp, synthetic construct
  misc_feature 1..1482: note = Description of Artificial Sequence: Synthetic coding sequence
  source 1..1482: mol_type = other DNA
atggagagggcggaagaaccagttgtctaccagaagctactcccttgggaaccgtcattggaatctgaggaggaggtggaagaggaagaaaccagtgaggccctggttctgaatcctcgcaggcaccaagattctagcagaaacaaggccggtgggctgcccggaacttgggcccgagtcgtcgccgctcttcttttactcgctgtgggctgctctctcgccgtgcgacaacttcagaaccaaggaaggagtaccggctctttagggtccgtcgctccccctccaggtggtcacagccacgggccaggcgtgtatcaccacggggcaattattagccccgctggcagggagctgttggtcgccggtggcaacgtggtcgacgccggtgtaggtgccgcactgtgtctagccgtcgtacaccctcacgccactgggctaggggctatgttttggggattgtttcatgactcatcttctgggaacagtactgctcttacctcagggccagctcagactctggcgcctggtctcggactgccagccgctctcccaaccctccacttactccacgccaggtttgggagactgccttggccacgcctgctagtgggccctacgactttagctcaagagggattcttagtggatactcccttggctagggcgttggtcgccagggggactgagggactctgcccgctgctctgccacgcagatgggacaccactcggggcaggagcacgcgcaactaatccacagttggccgctgttcttcgcagcgccgcactggcccctacttccgacctggccggagacgccctactgagtctgctggccggagacctgggagtcgaggtgcctagtgcggtaccacgaccgaccctggaaccggcagagcagcttccggtccctcagggaatcctctttacgacgccctcaccctcagcaggacctgagctgctggccctccttgaagctgctctcaggtctggggctccaatccctgatccttgccccccattcctacagaccgccgtgtctccagagtcatcagccttggcagccgtggattcttccggctccgtcttgcttctgacctcgtcactgaactgctctttcgggtcagcccatttgtcccctagcaccggggttctcctgtcaaacctcgtggccaagagtacaacgagtgcgtgggcttgtccgctcatcctgagaggctcactggatgatacagaagcagacgtcttaggactggtagcttctggcacgcctgatgtggcaagggcaatgacccataccctgctgaggcatttggccgcacgtccccctacccaagcccagcaccagcaccagggacagcaagaaccgacagaacacccttccacctgtggacaaggtaccctcctgcaagtggctgctcatacagagcatgcacacgtttcctctgtccctcacgcctgttgcccatttcaggggttctag

SEQ ID NO: 224319 - DNA, 678 bp, synthetic construct
  misc_feature 1..678: note = Description of Artificial Sequence: Synthetic coding sequence
  source 1..678: mol_type = other DNA
atgacctctgagttctttagcgctcagctgcgggcacaaatctccgatgataccactcacccaatatcatactacaaaccagaattctatatgccggatgacggcggaaccgcccacctctctgtggtcgccgaagatggctcagctgtgagtgccacgagcactataaacctatatttcggaagtaaggtgcgcagccctgtttccggcattctcctcaataacgaaatggacgatttctcttccacctcgatcactaatgaattcggagtgcccccatcccccgcaaatttcattcagcccggaaagcagccactgtcgtcgatgtgtcccacgatcatggtcgggcaggatggacaagtgcgcatggtcgtgggtgccgcaggcggtacgcaaattacgatggcaaccgctctcgcaatcatttataatctttggttcggttatgacgtcaaatgggccgtggaagagccccgattgcacaaccaactcttacccaacgtgactactgtggagcgaaatatcgatcaggaggtgacagccgcactggaaacacggcatcaccatactcagataacctctacattcattgccgtggtccaagcaatcgtcaggatggccggagggtgggccgctgcatccgactccagaaagggaggggaaccagcagggtattag

SEQ ID NO: 224320 - DNA, 678 bp, synthetic construct
  misc_feature 1..678: note = Description of Artificial Sequence: Synthetic coding sequence
  source 1..678: mol_type = other DNA
atgactagcgagttcttttccgcccagttaagagctcagataagcgacgatactacacacccaataagctattacaagcccgagttttacatgcctgacgacggtggtacggctcacctgtctgtagtggccgaagatggcagtgcagtgtctgccacctcaacgataaatctgtatttcggttctaaagtgagatccccagtttccggaatattgctgaacaatgagatggacgacttttcaagcacctctatcaccaatgaattcggggtgccccctagccctgcaaatttcatccaacccggtaaacaaccgctctcatccatgtgccctaccatcatggtgggtcaggacggtcaggtgcggatggtggtgggcgctgcaggcggaactcagattacaatggccacggcactcgctattatatataatctgtggtttggatatgatgtgaaatgggcagtagaggaacctagactgcataaccaactgctgccgaatgtcaccactgtggagagaaacatcgatcaggaggtgacagccgctttagagactaggcaccatcacacacagataaccagcacattcatcgcagtggtgcaggccatcgtgcgaatggcaggcggatgggctgccgcaagcgacagcagaaaggggggagagccagccggatactag

SEQ ID NO: 224321 - DNA, 678 bp, synthetic construct
  misc_feature 1..678: note = Description of Artificial Sequence: Synthetic coding sequence
  source 1..678: mol_type = other DNA
atgacttccgagttcttttcagcacagctacgtgcgcagatctcagatgacacgactcacccaattagctattataaaccggaattttacatgccagatgatggcggaaccgcccacctgtctgtcgtagccgaggacggcagcgcagtgagcgctacatctaccatcaatctgtattttggctccaaagtccgcagtccagtctcagggatactgttaaacaatgagatggatgacttctcgtcaacatcaattaccaatgaattcggcgtgccaccctcccctgctaactttattcaacctgggaagcagccactttcctcaatgtgtccgacgatcatggtcgggcaggacggccaagttaggatggtggtcggtgctgcgggtggcacccaaattaccatggccacagccctagcaatcatctacaatctgtggtttggctacgatgtcaagtgggcagtcgaagagccaagactacacaatcaactgctgccgaacgtgaccactgtggagcgtaacatagatcaggaggtaaccgcagccctcgaaacgcgtcatcatcacacacaaattacctccacatttatagctgtagttcaagccatcgtgagaatggccggaggctgggcagccgcaagcgactcccggaaggggggagagcccgctggctactag

SEQ ID NO: 224322 - DNA, 678 bp, synthetic construct
  misc_feature 1..678: note = Description of Artificial Sequence: Synthetic coding sequence
  source 1..678: mol_type = other DNA
atgacgagcgagtttttcgcagcccaattgcgcgctcagatttctgatgacactacgcaccccatatcttattataaacctgagttttacacccccgtggacggaggcacggcccatctgtcggtggtggccgaagatggtagtgccgtcagcgctacttcaaccattaacttatattttggtagtaaagttcgctcaccagtatctgagatactgtttaatgacgagatggacgatttttccagtcccaacatcaccaacgagttcggagtccctccatcacctgccaattttatacagcccggaaagcagcctctgtcctccatgtgccctactatcatggtcggacaggacgggcaggtccgaatggtggtgggtgctgcgggaggaacccagattactactgcgaccgctcttgcaatcatttataacctgtggtttggatatgatgtgaagagagcagtagaagaacctaggcttcacaaccaactcctcccgaacgtcaccactgtggaaaggaatattgatcaggctgtgactgcggctctggagaccagacatcaccacacccaaatcgccagcacctttattgctgtcgttcaggcgatagtccggactgcgggtggctgggccgcagcctcagattcgcgtaagggcggagagcctgctgggtactag

SEQ ID NO: 224323 - DNA, 657 bp, synthetic construct
  misc_feature 1..657: note = Description of Artificial Sequence: Synthetic coding sequence
  source 1..657: mol_type = other DNA
atgacctctgaattttttgctgcgcagctgagggctcagataagcgacgataccactcatcctatatcgtattataaacccgaattttacacccccgtggacggcggaacagctcatctgtcagtggtcgctgaggatggaagcgccgtgtccgccacatccacaataaatttatactttggcagcaaggtgaggtcaccagtatctgaaatactgttcaacgacgagatggatgacttttctagcccaaatatcacgaatgagtttggggtgccacccagcccagctaatttcatccagcccggtaagcagccgttgtcatccatgtgtccaactattatggtgggccaggatgggcagccaccttctcacgccgaccatactcccatgccgcaggccattatctataacctctggttcggatatgacgttaaaagggccgtggaggagccacgcctacacaatcaactgcttccaaacgtgaccactgttgagcggaacattgaccaggcggttactgctgctctcgagacgagacatcatcacactcaaatcgcctcgactttcatagcggttgtgcaagctatcgtccgtaccgccggaggttgggccgctgctagcgacagccggaaggggggagaacccgctggttactag

SEQ ID NO: 224324 - DNA, 678 bp, synthetic construct
  misc_feature 1..678: note = Description of Artificial Sequence: Synthetic coding sequence
  source 1..678: mol_type = other DNA
atgactagcgaattctttgccgcacagctaagatcccagatttccgaccacactactcaccctattagctactataaacccgagttctacacacccgatgacggcggaactgctcacctaagcgttgtggccgaagatggttctgcagtctcagccaccagtacgatcaatttatacttcggttctaaagtgtgctctcctgtatcagggatcctgtttaacaacgagtggactacctctgccctgccagcttttaccaatgagtttggagcgccaccaagcccagcaaactttattcagcctggcaagcagcctctcctgtctatgtgtcccacgattatggttgggcaggacggtcaagttaggatggtcgtgggagcagctggtggcactcagataacaacagacacagcactggctattatctataatctgtggtttggctatgacgttaagcgagctgtggaggaacccaggctgcacaacaagttgttgcctaatgtcacaactgttgagagaaacatcgaccaggcagtgactgctgcattggagactcgacatcatcatacacaaattgcatcgacatttatcgctgttgtgcaggcaattgtccgcaccgctgggggatgggctgccgcatccgactcccgaaaaggtggcgagccagcaggctattag

SEQ ID NO: 224325 - DNA, 711 bp, synthetic construct
  misc_feature 1..711: note = Description of Artificial Sequence: Synthetic coding sequence
  source 1..711: mol_type = other DNA
cctgcactgggcagccaacaggttgtccgtaacatgacatctgagttcttcgcagctcaactccgctcgcagatctcagaccacaccactcatcctatcagctattacaagcccgagttctataccccagatgacggcggtacggcccacctgagtgtcgttgcagaagatgggtctgctgtttctgccacgtccactatcaatctgtactttggatccaaagtgtgttctcctgtgtctggcatcttgttcaacaacgagtggacgacctccgcacttcctgccttcaccaatgaattcggggcacccccttcacctgcgaacttcatccagcccggtaaacagccccttttgtccatgtgtccaactattatggtcggccaagatgggcaagtgcgcatggtagttggcgctgccggtggcactcagatcactaccgataccgcccttgccatcatctataatctttggtttggttatgacgttaagcgcgcagttgaggagccgaggctccacaacaaactcctgccaaacgttaccaccgtggagaggaacatcgaccaggctgttaccgccgctctcgagaccaggcaccaccatacccagatcgccagcacctttattgcggtggtgcaggctatcgtgaggacggccggtggctgggccgcagcttccgactcaaggaaaggcggtgagcccgctgggtattag

SEQ ID NO: 224326 - DNA, 675 bp, synthetic construct
  misc_feature 1..675: note = Description of Artificial Sequence: Synthetic coding sequence
  source 1..675: mol_type = other DNA
atggtggccgctgtactgttgggcctcagttggctgtgtagccctttaggtgcactggtgctcgatttcaataacataaggtctagtgccgatttgcatggagctcgaaagggcagtcagtgtctctcagataccgattgcaacactcggaaattttgtctgcagcctcgagatgagaaacctttttgtgccacttgtcggggtctgcggagacgatgccagagagatgccatgtgctgcccagggaccctctgcgtgaatgacgtatgcaccaccatggaagatgctaccccaatcctggaacgccagctggatgaacaggatgggacacacgcggagggcacaaccggacaccctgtgcaggaaaaccaacccaagcgcaaaccaagcatcaaaaagtctcaaggacgaaaggggcaggaaggcgaatcctgcctcaggacttttgattgtgggcctggactttgttgcgcaaggcacttctggaccaagatatgtaaacctgttctgctagagggacaggtgtgctcacggaggggacataaggatacggcacaggctcctgagatcttccagcgctgcgactgcggcccaggcctgttgtgtcgttctcagctgacatccaataggcagcatgctcgcctgagggtatgtcagaaaatagaaaaactgtag

SEQ ID NO: 224327 - DNA, 873 bp, synthetic construct
  misc_feature 1..873: note = Description of Artificial Sequence: Synthetic coding sequence
  source 1..873: mol_type = other DNA
atgagactcaattccactggggaggtgccagtcctgattcatggtgaaaacatcatttgcgaagcaacacagatcatagactacctcgaacagacattcttagacgagcgaacacccagactcatgccggacaaagagtccatgtactatcctagggtccaacattacagagagctgctcgacagtctcccgatggacgcctacacccatgggtgtatcctccacccagaactgaccgtggactctatgatccccgcttacgctactacgcggatacgctcccaaattggcaacaccgagagtgaattgaagaagctcgctgaggaaaacccagacctgcaggaggcgtatattgcgaaacagaagcgactcaagagtaaactgttggaccatgataatgtcaagtaccttaaaaagattcttgacgagctggagaaggtgctggaccaggtagagacagagctccagcggcgaaatgaagaaacccctgaagagggccagcagccgtggttgtgcggtgagtccttcacccttgccgacgtatctctggcggttacgctgcaccgactaaagttccttggcttcgcacgtagaaactggggcaatggcaaacgccctaatttggaaacctattatgagcgtgttctgaaaagaaagacttttaacaaagtcctgggacacgtcaataatatcttgatctctgcggtgctgcctaccgcgttccgggttgctaaaaaacgggctccaaaagtgttgggcaccacactggtcgtcgggctgctggctggcgtcggctactttgccttcatgttattcagaaaacggcttggctcaatgatactcgcttttcggcctaggccaaattatttctag

SEQ ID NO: 224328 - DNA, 1632 bp, synthetic construct
  misc_feature 1..1632: note = Description of Artificial Sequence: Synthetic coding sequence
  source 1..1632: mol_type = other DNA
atgggggactggaacttgctgggcggaatcctggaagaagttcactcccattccaccatcgtgggaaagatatggctgacaatattattcattttccgcatgctcgtgctcagagtcgcagcagaggatgtgtgggacgatgagcagtctgcctttgcctgtaatacaagacagcctggatgcaataatatctgttacgacgacgccttccccatctctctcatccgcttttgggtgctgcagatcatcttcgtatcatccccttcgctggtgtatatggggcatgcattgtataggcttagggcctttgagaaagacaggcaacgaaaaaaatctcatctcagggcccagatggaaaaccctgacctggatttggaagaacagcagagaattgaccgcgaactacgaaggttggaagagcagaagaggatccacaaagtgccccttaaggggtgtttgctgaggacatatgtgctccatatactgaccagatctgtgttggaagttggattcatgattgggcagtatattttatacgggttccagatgcacccactgtacaaatgtactcaaccgccttgccccaatgcagtcgactgtttcgtgtctcggcctaccgagaagacaatctttatgctgttcatgcactccatcgccgcaatttcgctgctgctgaacatactagagatctttcatctcggcatccggaaaatcatgagaactttgtataagaagagctcctccgaaggcatcgaggacgagacaggcccaccttttcacctcaagaaatattccgtagcccaacagtgtatgatctgctcctccctgccagaaaggatctctccgctgcaagccaataatcagcagcaggttattcgggtgaacgtgcccaagagtaagaccatgtggcagattccccagccccgacagctcgaagtggacccctctaatggcaagaaagactggagtgagaaagatcagcactccggccagctgcacgttcacagcccttgcccgtgggcagggtccgctggcaatcaacacttgggtcagcagagtgatcattcctcattcggattgcagaacactatgtcccagtcttggttaggcactaccacagccccaagaaattgtccaagcttcgcagttggcacgtgggagcagtcacaggatccagagcctagtggggagcccttgactgacctacactcgcactgcagggatagcgagggctccatgagagagtccggcgtatggatcgacaggtccagaccgggatctcgcaaagcgagttttcttagtaggctgctctctgagaagcgccacctccatagcgatagtggcagctcaggaagcagaaatagctcatgtctggattttccacattgggagaatagtccttcacctctaccatccgtcacaggacatcgaactagcatggttagacaggccgcactgccaatcatggagctgagtcaggaactgttccactctggctgcttcctgttccccttttttcttcccggtgtatgtatgtatgtgtgcgtagatagggaggctgatgggggaggggattatctgtggcgtgataaaattattcatagtatccattccgtgaagtttaattcatag

SEQ ID NO: 224329 - DNA, 1308 bp, synthetic construct
  misc_feature 1..1308: note = Description of Artificial Sequence: Synthetic coding sequence
  source 1..1308: mol_type = other DNA
atgggtgattggagcttccttggccgtctcctggagaacgcacaggagcattccaccgtgatagggaaagtatggctgactgttctcttcatcttccggatcctggttcttggggcagctgccgaggacgtgtggggcgatgagcagtctgattttacttgcaacacccagcaaccaggctgtgaaaacgtgtgctacgatcgagcctttccgatttctcatatcagattttgggccctgcagattatttttgtatcaaccccgactcttatttacctgggccacgtgctgcatatcgtgcgcatggaggagaagaagaaggaaagagaagaggaggagcagttaaagcgggagtcccctagccctaaggagccccctcaggacaaccctagcagccgcgatgaccgaggccgagtcaggatggctggggcactcctgcgcacctacgtctttaacataatctttaagaccttatttgaggtcggcttcattgccggtcagtactttctgtatggcttcgaactcaagcccctctaccggtgcgacaggtggccttgcccaaacaccgtagattgttttatctctaggcctacagaaaagactatctttatcatctttatgctggccgtggcttgcgcctcactcctgttgaacatgctggagatctaccatttgggctggaaaaaacttaagcagggcgtgacctcacggcttggaccagacgcctctgaggctccattgggaaccgccgatccccctcctctccctcctagttcccgaccaccggcagtggcaattggttttcccccatactacgcccacacagcagcgccactgggacaagccagagcggttggctatccaggagctcctcctcccgctgccgacttcaagctgctggcccttacggaagctcggggtaaaggccaatcagccaaactatataacggccaccatcacctgctgatgacggagcagaattgggccaatcaggcagccgagagacagccaccagcactgaaagcataccctgctgcaagtacccctgccgcaccttcccccgtggggagcagctccccacccctggcacacgaggcagaggctggcgcagccccactgctgttagatggatctggctcgtcgttggaggggagcgcgttagccggaactccagaagaagaagagcaggcagttactacagctgctcagatgcaccagcccccactaccactaggagatccgggtagagctagcaaggcatcccgggcttcttccggcagagcacggcctgaagaccttgcgatttag

SEQ ID NO: 224330 - DNA, 1002 bp, synthetic construct
  misc_feature 1..1002: note = Description of Artificial Sequence: Synthetic coding sequence
  source 1..1002: mol_type = other DNA
atgggggattggggctttctagaaaagctgctcgaccaggtacaggagcactctacggtggtgggcaagatctggttgactgttttatttatcttccgaattctaatcctgggacttgctggtgagtccgtgtggggggatgaacagtccgactttgagtgtaacacagcccaacctggctgcaccaacgtctgttatgaccaggcctttccgatcagtcacattcggtattgggtattgcagtttttattcgtttccacccccacgttggtctaccttggacatgtcatttacctgtcaaggcgagaggaacgcctaaggcagaaggagggcgaactaagggccctgcctgccaaggatccccaggtcgagcgggcacttgccgcagtagaacggcagatggcaaagatcagcgtggccgaagacgggagacttcgaattaggggggctctgatgggtacatatgtcgcttctgtcttgtgtaagtccgtattagaggccggtttcctgtacggtcagtggcgtctgtatggatggaccatggaaccagtgtttgtttgtcagcgtgccccatgtccctatctggtcgattgtttcgtctctaggccaaccgaaaagacaatcttcatcattttcatgctggtggtcggactcatttcattggtgctgaatttgttagagctggttcatctgctgtgtcgctgtttgtctcggggaatgcgcgcacgccagggccaggacgcgccaccaacccaggggacctctagcgacccctacacagatcaagtattcttttatctgcctgtggggcagggtccatcgagccctccttgccccacgtacaatggtttgtcttcctccgagcagaactgggcgaacctgacaacagaggaaagactagcttcttcgcgacctccgctcttcctagatcctccaccccagaacgggcagaagcccccatcacggccttcctcatctgcctccaaaaaacagtatgtgtag

SEQ ID NO: 224331 - DNA, 879 bp, synthetic construct
  misc_feature 1..879: note = Description of Artificial Sequence: Synthetic coding sequence
  source 1..879: mol_type = other DNA
atgggagattggggttttctcgagaagctcctggaccaggtgcaggagcacagcaccgtggttgggaagatctggctcacagtgctgttcatctttagaatcctgattcttggcttggccggagaaagcgtatggggcgatgaacagtccgacttcgagtgcaatactgcgcagccaggctgtaccaatgtctgctatgaccaggcctttcctatctcccatatccgatactgggtcctgcagttcttgtttgttagtacacccaccttagtgtatttgggacacgtgatatacctgtctagaagggaagagcgtctccggcagaaagagggagagctcagggcactgcccgcaaaggacccgcaggtggagagggccctggcagcagtcgagcgacagatggccaagatcagcgtggctgaagacggtaggctcaggatcagaggtgccctcatgggcacttatgtggctagcgtcttatgcaaaagcgttttggaggcagggtttctgtatggtcagtggcgcctgtacggatggacaatggagcccgtgtttgtctgtcagagagccccatgtccatacctggtggattgcttcgtctcaagaccaacggagaagacaatcttcattattttcatgctcgtggtgggtctgatatcgttggtgctcaacctgttggagttagtgcacctcctgtgccggtgtttgtcgcgagggatgcgggctaggcaagggcaggatgccccaccaactcagggcacctcgtctgatccttatacggaccaggtgttcttctatctgcccgttggtcaaggcccttcatccccaccatgtccgacttacaatgggttatcttcaagtgagcagaactgggcatag

SEQ ID NO: 224332 - DNA, 882 bp, synthetic construct
  misc_feature 1..882: note = Description of Artificial Sequence: Synthetic coding sequence
  source 1..882: mol_type = other DNA
atgggagattggggcttcctggagaagttactggaccaggtccaggagcactctacagttgtaggcaagatttggctgaccgtgctgtttatattccgaatacttatccttggcctagccggtgagagcgtgtggggggatgagcagtccgactttgaatgtaataccgctcaacccggatgcacgaatgtatgttacgaccaggcttttccaatttctcacataaggtattgggttcttcagttcctatttgtatctacgcctaccctggtgtatttgggccatgtgatatacttgtcccgccgagaagaacgattgcgccaaaaagagggggaactgcgcgcattgccggctaaggatccgcaggtggagagagccctcgcagctgtagagcgacagatggctaaaatcagtgtcgccgaggatggccgtctccgtatacgtggcgcactgatgggaacctacgtggcatctgtcttgtgcaagagtgtcctggaagctggatttctgtacgggcagtggcgactctacgggtggacaatggagcccgtatttgtgtgccagcgagccccatgcccttaccttgtagattgttttgtcagcaggccgactgagaaaaccattttcatcatctttatgttggtggtgggccttatctccctcgtgttgaacctgctggagttagtgcacttgttgtgtaggtgcctctctcgcggtatgcgagctcggcaaggccaggatgcacctcccacgcagggcaccccacagacattgacccgcactcgtagcagttccaccagcccatgggcaaggggaccccacccccatcacgccccacccactatgggttctcatccggtgagccgcaccggaccaacatag

SEQ ID NO: 224333 - DNA, 1077 bp, synthetic construct
  misc_feature 1..1077: note = Description of Artificial Sequence: Synthetic coding sequence
  source 1..1077: mol_type = other DNA
atgggagactggtcgtttctgggtaatttcttggaggaggtccacaaacactccacagttgtgggcaaggtgtggttaacggtgctcttcattttccggatgctggtgctgggaacggccgcagaatctagctggggcgatgaacaggcggatttccgttgtgataccattcagccgggttgtcaaaatgtgtgttacgaccaggccttccccatatcccatatcagatactgggtcctccagatcatctttgtctctactccctccttggtctacatggggcatgcaatgcacacagtgaggatgcaggagaagcggaagcttagggaagccgagcgcgctaaagaagtgcgcggaagcggcagttatgaatatccagtggctgagaaagctgagctgagttgctgggaagagggcaacggaagaatagctctgcaaggcactctgttgaatacatacgtgtgtagtattttaataaggaccaccatggaggtagggttcattgtgggccagtattttatatatggcatattcctgactacactccacgtctgcaggagatcaccgtgcccacaccctgtgaattgctatgtctctcgtcctacagagaaaaatgtgttcattgttttcatgctcgccgtggctgcattgtcacttctgctcagccttgctgaattgtatcaccttggatggaagaaaatcagacagcgcttcgtgaaaccccgtcagcacatggccaaatgccaacttagcggcccaagtgtcgggattgtgcagtcctgcaccccccctcccgattttaaccagtgcttggagaatggacctggaggcaagttctttaatcccttcagcaataacatggcatcacaacagaacactgacaatttggtgacggagcaggtgcgcggtcaggaacagactcctggagaagggtttatccaggtgcggtacggccaaaaacctgaagtgccaaatggagtaagcccaggccatcggctgccacatgggtaccacagcgacaaaaggagactgagcaaggcttcctcaaaagcccgttccgatgatctctctgtttag

SEQ ID NO: 224334 - DNA, 1077 bp, synthetic construct
  misc_feature 1..1077: note = Description of Artificial Sequence: Synthetic coding sequence
  source 1..1077: mol_type = other DNA
atgggcgattggtccttcctgggcaacttcctggaggaggtgcacaaacacagcacagtggtagggaaggtttggctgaccgtcctctttattttcaggatgctcgtgctgggaacagcggcagaatcctcttggggggatgaacaagccgacttcaggtgcgatacaatccaacccggatgccagaatgtctgctacgaccaggcttttcctatcagccatattcgctactgggtgctgcagatcattttcgtctcaacaccctctctggtttacatgggccatgcaatgcatacagtgaggatgcaagaaaagaggaagctaagagaggcggagcgggcaaaagaggtccgcggtagtggcagctacgagtatcctgtggctgaaaaagcagagctatcttgctgggaagagggtaacggtcggattgctttgcaaggaaccctcctcaacacttatgtctgctctattcttattcgaacgaccatggaagtgggttttatcgtcggacaatattttatctacggtattttccttactaccttacatgtatgcagaaggtccccctgcccacacccggtcaattgctatgtgagccggcctaccgaaaagaacgtctttatagtcttcatgctggccgtagccgctttaagcttactgctgtcgttggccgagctctatcatctcggctggaaaaaaatacgccagaggtttgttaagcccaggcagcacatggctaaatgtcaactctctggtcccagcgtgggaatcgtccaaagttgtacgccgcctcctgatttcaatcagtgtcttgaaaacggtccaggtggcaagttcttcaaccccttctccaacaacatggctagccagcagaataccgacaatctcgtcacggaacaagtgagaggccaggagcagaccccgggtgagggcttcatccaggtgagatacgggcaaaagccagaggtccctaatggtgtctcacctggacaccgcctgccgcacggatatcattctgataagagaagactgtcgaaagcgtcgagtaaagccagaagtgatgacctctccgtctag

SEQ ID NO: 224335 - DNA, 759 bp, synthetic construct
  misc_feature 1..759: note = Description of Artificial Sequence: Synthetic coding sequence
  source 1..759: mol_type = other DNA
atgggtgactggtctttcctcggcaattttttggaagaggtgcataaacattccaccgtggtcgggaaggtatggctcactgtcttgttcatatttaggatgctggtgctgggtaccgcggctgagtctagctggggagatgagcaggcagatttccgatgcgacacaattcagccagggtgtcaaaatgtatgctatgatcaagcctttcccatatcccacattaggtactgggtgctccagatcattttcgttagcaccccaagcctagtctacatgggacacgccatgcatactgtccgcatgcaggaaaagagaaagctccgcgaagcggaacgagccaaagaagtgagaggaagtggatcttacgaatacccagtagcagagaaggctgaactgagctgctgggaggagggaaatgggagaattgccctgcaagggacactgctcaatacttatgtctgttcgatcctgattcggaccactatggaggtcgggttcattgtgggtcagtactttatctacggaatttttctgactaccctgcacgtatgtaggcgctctccctgccctcaccctgtgaattgttatgtatcccgcccaacggagaagaacgtgtttatagtctttatgctcgcagtcgcagccctgtcactcctgttgtccctggctgagctctaccacctaggttggaagaaaatccggcagagattcgttaagcctcgccaacatatggccaaatgccagttatcaggatag

SEQ ID NO: 224336 - DNA, 1302 bp, synthetic construct
  misc_feature 1..1302: note = Description of Artificial Sequence: Synthetic coding sequence
  source 1..1302: mol_type = other DNA
atgggcgactggtcctttttaggcaacattctagaagaagtgaacgagcactctaccgtcattggacgcgtgtggttaactgtgctttttattttcaggatcctgattcttggaacagctgctgagtttgtgtggggcgatgaacagagcgatttcgtctgtaatacgcagcagcccggatgcgagaacgtctgttatgatgaggcatttccgattagccacataaggctgtgggtactgcagataatattcgtatcaacaccatcactgatgtatgtgggtcatgccgtgcattatgtgcgtatggaagagaagaggaaaagccgcgaggccgaagagctgggtcaacaggcaggtacaaatggcggacccgaccaaggttcagttaagaagagcagcggctccaagggaactaagaaattccggcttgaaggtaccctgctgagaacctacatctgccacatcatctttaagaccctgttcgaggttggtttcatagtaggacattattttctttatgggtttcgtattctgcccttgtacaggtgtagtagatggccatgtcctaacgtcgttgattgctttgtgtctcggcctacagagaagaccatcttcattcttttcatgctgagtgtggcctcagtgagtctgtttctgaacgtgatggagttgggccatctcggccttaaaggcatcagatccgctttgaaacggccagtggagcagccactcggcgagatcccagaaaagagcctgcattccattgcagtgtcgagcatccagaaggccaaaggctaccaattgctggaggaggaaaaaattgtaagccactacttccccctgacagaggttggcatggtggaaacgtctccactccctgcaaaaccgtttaaccagttcgaagaaaagatttcgaccgggcctttaggcgacctctcccggggataccaagagacattaccatcctatgcgcaggtaggggctcaagaggtggaaggtgagggcccaccagctgaggagggcgcagagcccgaagtgggggagaagaaggaagaggctgaacgattaaccaccgaagaacaagagaaggtggccgtacccgagggagagaaagtggaaacaccgggagttgacaaggaaggtgagaaagaggagccacagtccgagaaggttagtaagcaggggcttccggctgaaaagaccccgagtctgtgccccgagctgacgacagatgatgcacgcccactgtcacggctgtcaaaagcaagcagtcgggctaggtctgacgaccttactgtatag

SEQ ID NO: 224337 - DNA, 1302 bp, synthetic construct
  misc_feature 1..1302: note = Description of Artificial Sequence: Synthetic coding sequence
  source 1..1302: mol_type = other DNA
atgggggactggtccttccttggcaacattttggaggaggtgaatgaacattcaactgtaatcggccgagtctggctcacagtcctattcatattccgtatcctcatcctgggcaccgctgcggagttcgtttggggtgacgagcagtccgactttgtgtgtaatacacagcaacccggttgcgaaaacgtgtgttacgatgaagcatttcctattagtcatattcgcctgtgggtcctgcagataatcttcgtcagcacaccttcactgatgtatgtcggccatgctgttcattatgttcgcatggaggagaagaggaagtcccgcgaggctgaagaactgggccagcaggctgggaccaacggcggtcctgaccagggttctgtcaaaaagtcctcaggatccaaagggacaaagaagtttaggttagagggcacattattgcggacttatatttgccatattatcttcaagaccctgttcgaggtcgggtttatagtgggtcactatttcttatacgggttccgcatactgcctctttataggtgctccaggtggccatgccctaacgtagtggattgctttgtgtcccgccctacagagaaaacaattttcatcctcttcatgctgtccgtcgcttccgtgtccctctttttgaacgtgatggagctggggcacttgggcctaaaagggatccgttcggctctcaagcgacctgtagaacagcctctcggagaaataccagaaaaatccctgcactcgatcgctgtgtcatcaatccagaaggctaagggatatcagctcttagaggaggaaaaaatcgtcagccactacttccccctcactgaagtcggaatggttgaaacttccccactccctgcaaagccctttaaccagttcgaggaaaaaattagcactggaccactcggcgatttatctcgagggtaccaggagacactgccgtcttacgctcaagtaggtgcccaggaggtggaaggggaagggccacctgcggaggagggtgctgagccggaggtgggcgaaaagaaagaggaagcggaacgcctgactacagaggaacaggaaaaggtcgctgttcccgaaggggaaaaagtcgagactccaggcgtggataaagagggagagaaagaggagccacagtctgaaaaggtctctaagcagggactgccagctgagaaaaccccttccctgtgcccagagctcactacagacgatgctaggcccctgtctcgcctgtctaaagcatctagcagagcccgatccgacgacttgaccgtctag

SEQ ID NO: 224338 - DNA, 1548 bp, synthetic construct
  misc_feature 1..1548: note = Description of Artificial Sequence: Synthetic coding sequence
  source 1..1548: mol_type = other DNA
atgggggactggaacttgctcggtgacacccttgaggaggttcacatccacagtaccatgattggtaagatttggcttacgatcctgtttatcttccgaatgttggtgctaggcgtcgcagcggaggatgtatggaacgacgagcaaagcggctttatttgcaatacggaacagcccggatgccggaatgtgtgctatgatcaggccttcccgatctccctcattcgatactgggtgcttcaggtgatctttgtgagttctccaagcctggtttacatgggacacgctctgtacagacttcgggtgctagaagaagaaagacaacgaatgaaggcacagctgagagtggaacttgaggaagttgaatttgagatgcctcgggaccggcgtagattggagcaggagctgtgtcagctggagaaaagaaaactcaacaaggcaccactgcgcggaacactgttgtgtacatacgtgattcacatattcactagatccgtggtggaagttggatttatgatcggacaatatctcctgtatggctttcatttagaacctctgttcaagtgtcacgggcacccttgtcctaacataatagattgttttgtgtcccgacctaccgagaaaactatttttctgctttttatgcagtcaatcgcaacaatttctttgtttcttaatattctagagatttttcacctgggcttcaagaaaatcaagagaggcttatggggcaaatataagttaaagaaggagcacaacgagtttcacgcaaataaagccaagcagaatgtagccaaataccaatctacgtcagctaattcattgaagcgcctgccctccgctcctgactacaatttactcgtcgagaaacagacccacactgcagtatacccctccttaaacagctcctccgtgtttcagcccaacccggataaccactcagtgaacgatgagaagtgcatcctggacgagcaggagactgtactgagtaatgagatttcaactctctctaccagttgttctcatttccagcatataagctccaataataataaggatacccacaagatttttggcaaagaactgaacgggaatcagctgatggagaaacgcgagacagaagggaaagacagcaaacggaactattactctcgaggacatcgctctattccaggagtggccatcgatggcgagaataacatgaggcagtctccccagacagtcttctctttgccagccaactgcgattggaaacccagatggctcagagccacgtggggatcctcgacagagcacgagaatcggggttccccacctaaggggaatctcaagggtcagttccggaaagggactgtgaggaccctacctcccagccagggagactcccaatccctggacatccctaacacagccgatagtctggggggactcagcttcgaaccaggtctcgtgcgcacttgtaacaatcccgtgtgcccccctaaccatgtggtatctttaacgaataatctaattgggagaagggtgccgactgatctgcagatttag

SEQ ID NO: 224339 - DNA, 1548 bp, synthetic construct
  misc_feature 1..1548: note = Description of Artificial Sequence: Synthetic coding sequence
  source 1..1548: mol_type = other DNA
atgggcgactggaatcttctcggggacaccttagaggaggtccacattcacagtaccatgataggaaagatttggctcacgatcctgttcatcttcagaatgcttgttctgggcgttgcggctgaagacgtttggaatgacgaacagtccggcttcatttgcaacaccgaacagccgggatgtcgcaatgtgtgctatgaccaggccttcccaataagcttgatccggtattgggtgctacaagttatcttcgttagtagcccttccctagtgtacatgggacacgcactatatcgactcagagtgttagaagaggagaggcagcgcatgaaagctcagttgagggtcgagctcgaggaggtggagtttgaaatgccccgtgatcggcgaagactggagcaggaactttgtcagctagagaagcggaagctaaacaaggcgcctctccggggaaccctgctgtgtacatacgtcattcacatatttactcgctcagtcgttgaggtgggcttcatgataggacaatacttattgtacgggttccacttggaacccctcttcaaatgccacgggcacccatgtccgaacatcatagattgttttgtctcgcgacctacagagaagacgattttcctgctgttcatgcagtcaattgcaactattagcttatttttgaatatcctcgaaattttccacctgggattcaaaaagatcaagcgaggtttgtgggggaagtataagctgaaaaaggagcataacgagttccacgccaacaaggctaagcagaatgtggctaaataccaaagcactagcgccaatagcctaaaaaggctcccctccgctccagactacaacctgctggtggaaaaacagacacacacagccgtttacccgagcttgaacagctcatccgtgtttcagcctaaccccgataaccattccgtgaacgacgagaagtgtatcctcgatgagcaggaaaccgtgctctcgaatgagataagcactttgtccacgagctgttcccactttcaacatatttcttccaataacaataaggacactcacaagatatttgggaaggagctgaatggtaaccaattgatggaaaaacgagaaaccgaaggcaaggactcaaaacggaattactactctcgcggacatcgctccatccctggcgtggccattgacggcgaaaataacatgaggcaatctccccagaccgtcttctcgcttcctgccaactgtgactggaaacccaggtggctgagggccacttgggggtccagcaccgaacacgaaaaccggggaagccccccaaagggaaatctcaaaggccagtttagaaagggcaccgtgcgcaccctccccccttctcagggggattcacaatctctggacatacctaatacggccgacagcctgggtggcctatctttcgagccaggactggtacggacatgcaacaatccggtctgtccgccaaatcacgtagtaagcctaacgaacaatctaatcgggagaagagtgccaactgacctccagatatag

SEQ ID NO: 224340 - DNA, 1545 bp, synthetic construct
  misc_feature 1..1545: note = Description of Artificial Sequence: Synthetic coding sequence
  source 1..1545: mol_type = other DNA
atgggtgactggaatctactgggtgataccctcgaagaagttcacattcacagtaccatgatcggcaagatttggctgacaatactgtttatcttcagaatgctggtacttggtgtcgccgcagaggatgtttggaatgatgaacagtctggctttatttgcaataccgagcagcctggctgtagaaatgtgtgttacgaccaagccttcccaattagtcttatcagatactgggtgctgcaggttatttttgtcagctcacccagcctcgtctacatgggccacgctctgtatcgcctgcgggtactggaagaagaaaggcagaggatgaaagcgcagttgcgcgttgaactcgaagaagtggaatttgaaatgcctagggaccggcgacgcctggagcaggagttatgtcagctggaaaagcgcaaactcaataaagctccactgagaggcaccctactgtgcacatatgtgattcatatttttacccgcagcgtggtggaggtgggctttatgatcggacaatacctcctgtacggatttcatctagaacccttgtttaagtgccacgggcatccctgtccaaacataattgactgtttcgtgtcccggccaactgaaaagacaatttttctcctcttcatgcaatccatcgctactatttcactttttctcaacatcctcgaaatcttccatctgggattcaaaaagatcaaacgagggctgtgggggaagtacaaactgaagaaggagcataatgagttccacgccaataaggccaagcagaatgtggccaaatatcaatccacctccgcaaattctctgaagcgacttcccagtgctccggactataacctgctagtcgaaaagcagacacacacggctgtatatccgtcccttaattccagctctgtttttcaacccaatcctgataatcattcagtgaacgacgagaaatgtatcctggacgaacaggagaccgtgctgagcaatgagatttcgaccctctctacaagctgcagccatttccagcatatttcctccaataacaataaagacacacataagatctttgggaaagaactgaacgggaatcagctcatggagaaaagagaaacagaaggcaaagactccaagaggaactactacagtcgcggacacagatctatcccgggagtggcaatagatggtgaaaataatatgagacagtccccccaaacagttttttccctccccgctaactgtgattggaagccacgttggctgcgggctacttggggatctagtaccgagcacgagaatcgcggaagtccacccaaggtcccagggagcaaggctaccgctagcagcttacttttaattttacagaggccgacatcctcccagcctcgcctgaaggagacacccaaaattaaggctgaggcaaagatctacgattcgaagcatccaccacggctgttgcagagtacggtttctactttcagcggccgagaaccgagatctcctgcacccatgggacaccactcctttcggggaccgagatag

SEQ ID NO: 224341 - DNA, 852 bp, synthetic construct
  misc_feature 1..852: note = Description of Artificial Sequence: Synthetic coding sequence
  source 1..852: mol_type = other DNA
atgaactggacaggtctttatacccttctctcaggcgtgaaccggcacagcacagccatcggcagagtgtggctgagtgtgatcttcatctttcgaatcatggtactagtggttgcggctgagtccgtgtggggtgatgaaaaaagttcatttatttgcaacactctccagcccggatgcaactctgtgtgttacgatcagttcttcccaattagccatgtgcggctatggagcctccagctgatcctcgtcagtacccctgccttgctggttgcaatgcacgtcgctcaccagcagcacattgaaaagaagatgctgcgtctggaaggccacggcgatccattgcacttggaggaagtaaaaagacataaggtccacatcagcggtactttatggtggacttatgttatctcggtcgtgttccggcttttattcgaagcggtgttcatgtacgtattctatctgctgtatcctgggtatgcaatggtgaggctcgtgaaatgtgatgtttacccatgtccaaatacagtggattgtttcgtatctagaccgactgagaaaaccgtttttacagtattcatgctagcagcttccggtatatgtattatcctgaacgttgccgaggtggtctacctgatcatccgggcatgcgcgagaagggcccagagacgttcaaacccaccatcaaggaaggggagtggctttggacacagactcagcccagagtacaagcagaacgaaattaataaactcctgtcggagcaggatggctcgctcaaggacatcctgcgtcgctcaccgggaaccggcgctggactggccgagaagagcgaccgatgttctgcctgctag

SEQ ID NO: 224342 - DNA, 852 bp, synthetic construct
  misc_feature 1..852: note = Description of Artificial Sequence: Synthetic coding sequence
  source 1..852: mol_type = other DNA
atgaattggacggggctttacactctcctctccggggtgaacagacattccactgccatcggtcgggtgtggctgtcagtgatcttcatctttagaattatggtccttgtcgtggcagctgaatccgtttggggagatgagaaatctagcttcatttgcaacaccctgcaacctgggtgcaatagtgtgtgctacgaccagttctttcccatttctcacgtgcgtttgtggagcctgcaattaatccttgtgagcacaccggcattgctcgttgccatgcatgtggcccaccaacaacatatcgagaagaagatgctgaggctagagggacatggtgatcctttgcatctggaggaggtgaagcggcacaaagtgcacatcagtggtaccctgtggtggacctacgtaatcagcgtcgtctttagactcctttttgaggctgtcttcatgtatgtcttttacctcctgtatcccggatatgccatggtgcgtctcgtcaaatgcgacgtctatccatgccccaacactgttgactgctttgtcagtcgcccaactgaaaaaactgtgtttacggtgttcatgctggccgcttcaggcatctgcattatactcaacgttgcggaggtggtgtacctgataatcagggcctgtgccagacgtgcccagcggagatcaaaccccccttcaagaaaaggttcggggttcggacatcgcctatcccccgaatacaagcagaatgaaatcaataagttgctaagcgagcaggacggcagtctgaaggacattctgcgtaggtctccaggaaccggcgctgggctggccgaaaaatccgataggtgctcggcatgttag

SEQ ID NO: 224343 - DNA, 852 bp, synthetic construct
  misc_feature 1..852: note = Description of Artificial Sequence: Synthetic coding sequence
  source 1..852: mol_type = other DNA
atgaattggaccggtctgtatacccttctgagcggagtgaacagacacagcactgctattgggcgagtctggttgtcagtgatcttcatttttcggataatggttctggttgtggcagctgaatccgtgtggggtgatgagaaatcttcgtttatctgtaacaccttacagcccggttgtaacagcgtgtgttacgaccagttctttccgatttcacacgtgcgattgtggagcctgcagctgatactggttagcacgcccgcattgctggtagcaatgcacgtagcccatcaacaacatatagagaagaagatgttgcggctcgaggggcatggggaccctcttcacctggaagaagttaaacgccataaggtacatatatcaggcacgttgtggtggacatatgtgatttcggtggtgtttaggctgctgttcgaggccgtattcatgtatgtattctatctcctgtatcccggatacgccatggtgcgcctggtcaaatgtgatgtgtatccctgtcctaacaccgtcgactgctttgtgtctagaccgaccgagaagacagtgtttacagtgttcatgctggcggcttcgggcatatgtataatactgaatgtcgctgaagtcgtgtacctcatcattagagcctgtgccagaagagcccaaagacgaagcaaccctccgtctcgcaagggcagcggtttcggccacagactgtctccggaatataagcaaaatgaaataaataaactcctgtccgagcaagatggctcattgaaggatattctacggagaagcccagggaccggggctggcctcgctgagaaatcagatcgatgtagcgcttgttag

SEQ ID NO: 224344 - DNA, 255 bp, synthetic construct
  misc_feature 1..255: note = Description of Artificial Sequence: Synthetic coding sequence
  source 1..255: mol_type = other DNA
atgaactggaccggtctttacactttgttgtctggggtcaaccggcactctactgccatcggtagggtctggctgagcgtgatatttatcttccggatcatggtgttggtggttgccgctgaaagtgtctggggcgatgaaaaatccagcttcatctgtaacaccttacagcccggatgtaatagcgtctgttatgatcagttcttccccattagccacgtaagattgtggagcctacagctgattctggtgtag

SEQ ID NO: 224345 - DNA, 681 bp, synthetic construct
  misc_feature 1..681: note = Description of Artificial Sequence: Synthetic coding sequence
  source 1..681: mol_type = other DNA
atggactgggggaccctgcagaccatcctcgggggagtcaacaaacactccactagcattgggaagatctggctgactgttctcttcatcttccggattatgatcctggtagtcgccgcaaaagaagtgtggggcgacgagcaggcagatttcgtgtgtaacacattgcaacccggttgcaaaaatgtgtgttacgatcactactttcccatatcccatatcaggctgtgggctctgcaactgattttcgtgagcacgccagccctgttggtggccatgcacgtggcctaccgaagacacgagaagaaaaggaaattcatcaagggagagattaagtcagagtttaaggatatcgaagaaatcaagacccagaaggttcgaattgaaggctccctgtggtggacctacacatcctcaatcttctttagagtcatcttcgaagctgcttttatgtacgtgttctatgttatgtacgacgggtttagtatgcagcggcttgtgaaatgcaacgcttggccctgtcccaacacagtggattgttttgttagccgccctacagagaagaccgtgttcactgtgtttatgatcgctgtctcggggatttgcattcttctgaatgtaaccgagctctgttacctccttattcgctactgctccggtaaatccaagaaaccagtctag

SEQ ID NO: 224346 - DNA, 681 bp, synthetic construct
  misc_feature 1..681: note = Description of Artificial Sequence: Synthetic coding sequence
  source 1..681: mol_type = other DNA
atggactggggaaccctccagaccatccttggcggagttaacaagcactctacctctattgggaagatctggctgactgtgctcttcatcttcagaataatgatcctggtggtggcagccaaggaggtgtggggcgacgagcaggcagacttcgtttgtaacacattacagccaggatgcaaaaacgtgtgctacgaccattacttccccataagccatatccggctatgggctcttcaactgatattcgtaagcacccctgctcttctcgtggccatgcacgttgcttaccggcgacatgaaaaaaagagaaagtttataaaaggggagataaaatctgagttcaaggatattgaggagataaaaacgcaaaaagtgcggatcgagggaagtctgtggtggacatacacctcaagtattttcttcagggtgatttttgaggcggcttttatgtatgtgttctacgtaatgtatgacggattttcaatgcagcgacttgtgaaatgcaacgcctggccatgccctaacacggtggattgttttgtgagccgcccaacagaaaaaactgtgttcactgtgtttatgattgccgtgtctggcatctgtatactgctcaacgttactgaactctgttaccttcttataaggtactgttcaggcaagagcaaaaagcccgtgtag

SEQ ID NO: 224347 - DNA, 813 bp, synthetic construct
  misc_feature 1..813: note = Description of Artificial Sequence: Synthetic coding sequence
  source 1..813: mol_type = other DNA
atggattggaagactctgcaggcgttgctgtccggagtgaacaagtatagcacagcgttcggcaggatttggttaagcgtcgtgtttgtgtttcgcgtcctagtgtatgtagtggcagccgagcgggtgtggggggacgaacaaaaagattttgattgcaatacaaaacaacctggctgcactaacgtctgttatgacaactacttcccaattagtaacattaggctctgggctctgcaactcatttttgtgacttgtccaagcctactggtgatcctccacgtggcctaccgggaggagcgtgagcgccgtcataggcaaaagcatggggatcagtgcgcaaagctttacgacaatgccggaaaaaaacatggcggtctttggtggacttatctgttttccctcatctttaaactgattatcgagttcttattcctataccttctgcacactttgtggcatggatttaacatgcccaggttggtgcagtgtgcaaatgtggctccttgccctaatattgtcgactgttatattgcacgtcctacagaaaagaagattttcacatatttcatggtgggggcatccgccgtgtgtatcgtgctgaccatatgcgagctttgctatctgatttgtcatcgcgtcctgaggggcctgcacaaggacaaacctcgaggtgggtgctcaccctccagctccgcctctcgcgcttcaacatgcagatgccaccacaagctggtggaagctggcgaggtcgatcccgatccgggaaacaacaaattgcaggcgagcgcccctaacttgacccctatttag

SEQ ID NO: 224348 - DNA, 813 bp, synthetic construct
  misc_feature 1..813: note = Description of Artificial Sequence: Synthetic coding sequence
  source 1..813: mol_type = other DNA
atggactggaaaactttgcaggctttgttatccggtgtgaataagtactctacggcctttggccgtatatggctgtccgtagtgtttgtctttagggtcttggtgtatgtggtcgccgcagagcgtgtttggggcgacgagcagaaggatttcgactgcaatacgaagcagcccggatgcacgaacgtgtgctatgataattacttcccaatcagtaatatccgactgtgggccctgcaacttatctttgtgacttgtccctccctgttagtgatccttcatgtggcataccgggaggagcgggaacgcaggcacagacaaaagcacggcgaccagtgcgcaaagctctatgataacgcaggcaaaaagcacgggggactctggtggacatacctgtttagtttgattttcaagctgatcatagagttcttgttcctttatttgttgcacactttgtggcatgggttcaacatgccgagacttgtgcaatgcgccaatgtggccccttgtcctaatatagtggattgctacattgctaggcccaccgagaaaaaaatcttcacctattttatggtgggtgcgtccgccgtgtgcatcgtgctgaccatttgcgagctgtgctatctgatatgccatcgagtgctgcgcggtctgcataaggacaagccaagaggagggtgctccccaagcagtagcgcgagtcgcgcttctacctgccgctgccatcacaaactcgtggaggccggagaagtcgacccggacccaggcaacaacaagctgcaggctagcgccccaaatctcacccccatttag

SEQ ID NO: 224349 - DNA, 765 bp, synthetic construct
  misc_feature 1..765: note = Description of Artificial Sequence: Synthetic coding sequence
  source 1..765: mol_type = other DNA
atggactggaaaacgctgcaggcactcctgagcggcgtgaataagtacagcactgccttcggcaggatttggctctccgttgttttcgtattccgggtcttggtgtacgtggtggccgctgagagggtctggggagacgaacagaaagatttcgattgtaacacaaagcagccgggttgtacaaatgtctgctatgataattacttcccaatctccaacattcgattatgggcattgcaactgatatttgttacatgtccttcgttactggtgattctccacgttgcctatcgcgaagagcgcgagcgcagacatcggcaaaagcacggggaccagtgcgctaaactgtatgacaatgccggtaagaagcatggtggtttgtggtggacctacctgttacacacgctgtggcatgggttcaatatgcccaggctggtgcaatgcgctaacgtggccccatgtcctaatatcgttgactgctacatagcacgcccaacggaaaagaagatctttacttatttcatggtgggcgctagtgccgtctgtatcgttcttactatttgtgaactgtgttacctgatttgccatcgagtcctccggggactccataaagataagcccaggggcggatgctccccctcctctagcgcgtctcgtgcgagtacgtgccgctgccatcataagcttgtggaagccggagaggtggatcccgaccctggtaacaataagctgcaggccagtgccccaaacctgacccctatatag

SEQ ID NO: 224350 - DNA, 801 bp, synthetic construct
  misc_feature 1..801: note = Description of Artificial Sequence: Synthetic coding sequence
  source 1..801: mol_type = other DNA
atgaactgggcctttcttcaaggactactctccggcgtgaacaaatatagtaccgttctctcaagaatatggttgagcgtggtgttcatatttagagttctggtttatgtagtcgcagctgaggaggtttgggatgatgagcagaaagacttcgtgtgcaatactaaacagccaggatgtcctaacgtttgctatgacgagtttttcccggtttcacacgtgaggctgtgggcattgcagcttattttggtgacatgtccatcgctcctggtcgtgatgcatgtggcatatcgcgaggagcgagagcgcaaacatcatttaaaacatggccctaacgcgccatccttgtacgataatctcagcaaaaaacgtggcggtctttggtggacgtacctcctgtccctgattttcaaagccgctgtagacgccggtttcctgtatatttttcaccggctgtataaagactacgacatgcctagagtcgtggcctgcagtgtggagccctgtccccatactgtagactgttatattagccgtcccacagaaaagaaagttttcacatatttcatggtcacaaccgcagccatttgcatcctgctgaacctttccgaggtcttctatttagttggcaagcggtgcatggagatcttcggtccgcgacacaggcgacctcggtgccgcgagtgtctgcccgatacctgcccgccatacgtgctgtcgcaggggggacatccggaggacggaaacagtgtgttgatgaaggcaggctctgcccctgttgatgccggaggatatccttag

SEQ ID NO: 224351 - DNA, 822 bp, synthetic construct
  misc_feature 1..822: note = Description of Artificial Sequence: Synthetic coding sequence
  source 1..822: mol_type = other DNA
atgaattggtcaatcttcgaggggctgctttcaggggttaacaaatattccacggccttcgggcgaatatggctgagtctcgttttcattttccgagttctggtttatctcgtcaccgctgagcgagtgtggtcagatgatcacaaagattttgattgcaacacgaggcaacctgggtgctcaaatgtctgcttcgatgagttctttccagtgagccacgtgaggctctgggctctccagctaatcctggttacatgcccgtctctgctagtcgtgatgcacgtggcataccgcgaagtacaagagaagcgacaccgggaagcccatggagagaactccgggcgtctgtacctgaaccctggaaagaaacgcggtggactgtggtggacttatgtctgctccctggtgttcaaagcatcagtggacatcgcctttttatacgtttttcattccttttaccctaaatacattttacctccggtcgtgaaatgccacgccgatccatgtccaaatatagttgactgttttatctctaagccatccgagaaaaatatcttcacactattcatggtcgccacagctgcaatctgtattctattaaacctggtggagttgatatatctagtaagcaagaggtgccacgaatgtctcgccgcacgcaaggctcaggcgatgtgcaccggacaccatccccacggcacaacttcttcttgcaagcaagatgacctcctgagtggcgatttgatttttttgggcagtgatagtcacccgccacttttaccagacaggccaagggaccacgtaaagaagactattctttag

SEQ ID NO: 224352 - DNA, 786 bp, synthetic construct
  misc_feature 1..786: note = Description of Artificial Sequence: Synthetic coding sequence
  source 1..786: mol_type = other DNA
atggattggggaacgctgcataccttcatcgggggtgtgaataaacatagcacatcaatcggtaaggtttggattacagtcatatttatttttcgcgttatgattctggtcgttgccgctcaggaagtgtggggggatgaacaggaggatttcgtgtgcaatactcttcagccaggctgcaaaaatgtgtgctacgaccactttttccccgtgagtcatatccgactttgggccctgcagctgatcttcgtctccacacctgctcttttggtggctatgcacgtcgcatactatcgccatgagaccacacggaaattccgaaggggagaaaagagaaatgatttcaaagatatcgaggacatcaagaaacagaaggttcgcattgaggggtctctgtggtggacgtatacgtcttccatttttttcaggatcatttttgaggccgctttcatgtacgtattttacttcctgtacaacggctatcatctgccctgggtactcaaatgtggtatcgatccttgtccaaatctggtcgactgcttcatctctagaccaactgaaaaaactgtgttcacaatcttcatgatcagcgccagcgtaatctgtatgctgttgaatgtggccgaactgtgttatctgttgctgaaggtttgtttcagacgcagtaaaagggcccagactcaaaaaaaccaccctaaccatgccctgaaggagagcaagcaaaacgaaatgaatgaactcattagcgactcaggacagaatgctatcaccggattccccagctag

SEQ ID NO: 224353 - DNA, 786 bp, synthetic construct
  misc_feature 1..786: note = Description of Artificial Sequence: Synthetic coding sequence
  source 1..786: mol_type = other DNA
atggattggggaaccttgcacacattcatcggaggggtgaacaagcatagtacgtctataggtaaggtttggattaccgtgatcttcattttccgcgtaatgatcctcgttgtcgccgcacaggaggtgtggggcgacgaacaggaggatttcgtgtgtaacacattacagcccggatgcaagaacgtctgctatgaccactttttccctgtttcgcacataagactgtgggcgctccagttgatcttcgtgagcactcctgcactgctcgtggccatgcacgtggcgtactaccgtcatgagacgacaaggaagttcaggagaggcgaaaagaggaatgacttcaaagacatcgaagacatcaaaaagcagaaagtgagaatcgagggttcgctgtggtggacttacacaagctcaatttttttcagaattatctttgaggctgctttcatgtacgtattctatttcctgtacaatggctaccacctcccttgggtgttgaaatgtggtattgatccatgtccaaacctggtggactgcttcattagtcgtcccaccgaaaagactgtttttacaatttttatgatctccgcatctgtgatttgcatgctgctgaatgtggccgagttgtgctatttattgctcaaagtgtgttttaggaggagcaaacgcgcacagacacaaaaaaaccatccgaatcatgctttgaaggaatccaaacagaatgagatgaacgaattaatttctgattcaggccagaacgctatcactggattcccatcatag

SEQ ID NO: 224354 - DNA, 786 bp, synthetic construct
  misc_feature 1..786: note = Description of Artificial Sequence: Synthetic coding sequence
  source 1..786: mol_type = other DNA
atggattgggggaccctgcacacctttatcgggggagtgaataaacatagtactagcatcggaaaggtgtggatcaccgtcatcttcatttttcgggttatgattctggtcgttgcagctcaagaagtatggggcgatgaacaggaggattttgtgtgtaatacgctgcagcccggttgtaagaacgtgtgctatgaccactttttccccgtttcacacatccggttgtgggctctgcagctgatctttgtctccacgcccgctctgttagttgccatgcacgtggcttactatcggcacgagaccacgcgcaaattccgtcgaggggagaaaaggaatgatttcaaggatattgaggacattaagaaacagaaagtgcggatcgagggatccctgtggtggacctacacttccagcatctttttcagaattatttttgaagcagcattcatgtacgtgttctattttctgtacaacggatatcatctcccctgggtgctcaaatgcgggatcgatccctgcccgaatctggtggactgtttcatcagccgtccaactgagaaaaccgtgttcaccatcttcatgattagcgcctcggtgatctgtatgctactgaacgtagcagagctgtgttatctgttgttaaaggtttgctttcggcgatctaaacgagctcagacccagaagaatcatcccaaccacgctctgaaagaatctaaacaaaatgaaatgaacgaactgataagtgactccggccagaacgctattacgggattcccttcgtag

SEQ ID NO: 224355 - DNA, 786 bp, synthetic construct
  misc_feature 1..786: note = Description of Artificial Sequence: Synthetic coding sequence
  source 1..786: mol_type = other DNA
atggattgggggacactccatacctttataggcggtgtcaataaacacagtactagcatcggtaaggtctggattaccgtgatttttattttcagggttatgattttagtggtcgctgcccaagaagtctggggcgacgagcaagaagattttgtttgcaacaccctccagccaggctgtaagaacgtgtgctacgaccacttcttcccagttagccacatccggctctgggcacttcagctgatatttgtgtctactccggctctgttggttgcaatgcacgtcgcctattacagacacgagactactcgcaagttccggagaggcgagaagaggaacgatttcaaggacattgaggacatcaagaagcagaaggtccggattgagggatccctgtggtggacgtatacgtcctctatcttctttcggatcattttcgaggctgcgttcatgtacgtgttctattttctgtataatggctaccacctcccctgggtgctgaagtgcggtatcgatccttgtcctaatctggtggactgctttataagccggcctacggagaagaccgtctttacaatattcatgatctctgcttccgtaatatgcatgctgcttaatgtggcagagctctgctacttactgcttaaagtctgttttaggcgatctaaaagagcccagacccaaaagaaccacccaaatcatgcactgaaggagtcgaagcagaacgaaatgaatgagctgatcagcgattctggccagaacgcaattacgggatttccttcttag

SEQ ID NO: 224356 - DNA, 672 bp, synthetic construct
  misc_feature 1..672: note = Description of Artificial Sequence: Synthetic coding sequence
  source 1..672: mol_type = other DNA
atgtcctggatgttcctgagagatctgttgtcgggggttaacaagtactcaacaggcaccggttggatctggctggccgtggtgttcgtgttccgattgttagtatatatggtcgcagcagaacacgtgtggaaagatgaacagaaagagttcgagtgtaactcacgacaaccgggttgcaaaaatgtctgtttcgacgatttttttcctatctcccaggtcaggctttgggccctacagctaataatggtttctaccccaagcctgctagtcgtgctacacgtggcctatcacgaaggcagagagaagcgccatcgaaagaagctctatgtgagccctggaacaatggacggcggtctctggtatgcgtacttaatctccttgattgtcaagaccgggtttgagatcggcttcttggtgctcttctacaaactatatgatggtttctctgttccatacctcattaaatgcgacttaaagccctgtccgaataccgtagattgctttatatctaaacctacagaaaagacaatcttcatactgttccttgtgattacttcctgcctgtgcattgtactcaacttcattgagctcagcttcttagtcctgaaatgttttattaagtgctgtcttcaaaagtatttaaagaagcctcaggtgctgtctgtgtag

SEQ ID NO: 224357 - DNA, 492 bp, synthetic construct
  misc_feature 1..492: note = Description of Artificial Sequence: Synthetic coding sequence
  source 1..492: mol_type = other DNA
atgtcctggatgttcctgagggatctgttatctggggtgaacaaatacagtacggggactgggtggatttggctggccgtggtatttgtgttcaggctcttggtgtatatggtggcagcagagcatgtttggaaggatgaacagaaggaatttgagtgtaattcaagacagcctggttgcaagaatgtttgcttcgatgactttttcccaatcagtcaggtgcgcttgtgggccctccagctgattatggtgtccacaccttcactgttggtcgtgctgcatgtggcgtaccatgaaggcagagaaaaaagacaccgcaaaaaactgtacgtctcaccaggtaccatggatggaggtctgtggtacgcttacctgatcagtctaattgtgaaaacaggtttcgagattggttttctggtgctcttctataagttatatgatggcttcagcgttccgtaccttatcaaatgtgatctgaaaccatgcccctag

SEQ ID NO: 224358 - DNA, 672 bp, synthetic construct
  misc_feature 1..672: note = Description of Artificial Sequence: Synthetic coding sequence
  source 1..672: mol_type = other DNA
atgagctggatgttcctccgggaccttctcagcggcgtgaataagtatagcaccggtacaggatggatatggctagcagtggtgttcgtttttcgactcttggtgtacatggtggctgccgagcacgtgtggaaggatgaacagaaagagttcgaatgcaatagccgccagccaggctgtaagaacgtctgctttgacgatttctttccaatttcccaggtcaggctctgggctctccaacttatcatggtaagtacgccctcgcttctggtggtgctgcatgttgcctatcacgagggtagagagaagcgtcaccgcaagaaattgtacgtcagtccagggacaatggacggtggcctttggtatgcgtatctgatctcactcattgtcaagacagggtttgagatcggtttcttggtcttattctataagctgtatgatggattctctgttccttatttaattaaatgtgacctgaaaccctgccccaacaccgtggactgcttcatctcaaagcccaccgagaagacaatctttatccttttcctcgtgataacttcttgtctttgcatagtccttaacttcatagaactgtctttcctggtccttaagtgcttcataaagtgctgccttcagaaatatctaaaaaaacctcaagtgcttagtgtgtag

SEQ ID NO: 224359 - DNA, 966 bp, synthetic construct
  misc_feature 1..966: note = Description of Artificial Sequence: Synthetic coding sequence
  source 1..966: mol_type = other DNA
atgggagaatggacaatcctcgaacgactccttgaggcggctgtccagcagcactctacgatgatcggaaggatcctactgactgtggttgtgatcttccgaatcctgatagtggctattgtgggggaaaccgtgtacgatgacgagcagactatgttcgtgtgcaataccctgcagccagggtgcaaccaggcatgttacgatcgggcttttccaatctcccacatccgatattgggtgtttcagatcatcatggtttgcacacctagtttgtgcttcattacctactctgtccaccagtcggctaagcagcgggagagacgttatagcaccgttttcctggccctggatcgagacccgcctgaaagcatcgggggaccagggggaacaggaggcggaggctccgggggaggcaaacgcgaggacaaaaaactccagaatgccatcgtcaatggcgtgctgcagaacaccgaaaataccagcaaggagactgaacccgactgcctggaagtgaaagagctgactcctcatccctctggcctcagaactgcatcaaagagtaaattacggcgtcaggaaggcattagcaggttctatattatccaagtagtgttccgcaacgctctggaaatcggattcctcgtcggccagtacttcttgtacgggttttcagtcccagggttgtatgaatgcaatcgatatccttgcatcaaggaagtagaatgctacgtcagtaggcctactgagaagactgtctttctggtctttatgtttgcggtatcggggatctgtgtcgtgttgaacctggctgagctgaaccacctaggttggcgaaagattaagctagccgttaggggtgctcaggccaaacgtaagtctatatacgaaattagaaacaaggatttgccacgggtgtcagttccgaacttcggacgtacccagtcgagcgatagcgcgtacgtgtag

SEQ ID NO: 224360 - DNA, 891 bp, synthetic construct
  misc_feature 1..891: note = Description of Artificial Sequence: Synthetic coding sequence
  source 1..891: mol_type = other DNA
atgggggagtgggcttttctggggtcattacttgacgccgtgcagctccagtcaccgctggtcggccgactctggttggttgtaatgcttatttttcgcatactggttctggccactgttggcggtgcagtgtttgaagacgaacaggaagagtttgtatgtaataccctgcagccaggttgtcgacagacctgttacgacagagcgttcccagtgagccactatcgattctggctgtttcacatcctgctgctcagtgcccctccagtgctgttcgtcgtgtactccatgcaccgtgctggtaaggaggcaggaggtgccgaagctgcagctcaatgcgctcctggattgccagaggctcagtgtgcaccctgcgctctgcgcgcaagacgggcaaggaggtgttaccttttgtcagtcgcgctcaggcttctggcagaactgactttccttggcggacaggcgctgttgtatgggtttagggtggccccacacttcgcatgcgccggacctccttgtccacataccgttgattgctttgttagcaggccaactgaaaagacagtgtttgttctgttctactttgctgtaggacttctctctgcacttttgtccgtggcagaattgggtcacctgttatggaaggggagaccacgggctggggagcgggataataggtgcaacagagcacacgaagaggcgcaaaagcttttgccaccaccccctcctcccccacctatagttgtcacgtgggaggagaacagacacctacaaggagagggtagccctggctctccacacccgaagaccgagctggacgccccaaggtttcgcagggagtccacaagtccagcaggttggcactgttcactgccttttcacggtacctag

SEQ ID NO: 224361 - DNA, 1113 bp, synthetic construct
  misc_feature 1..1113: note = Description of Artificial Sequence: Synthetic coding sequence
  source 1..1113: mol_type = other DNA
atggagggagttgacctcctcggattcctcattattactttgaattgtaacgtaaccatggtggggaaattgtggtttgttctgacaatgctcctgcggatgttggttatcgtacttgctggtagacccgtgtaccaggatgaacaggagagattcgtctgcaacacccttcagccgggttgcgccaacgtctgctacgacgtgtttagcccagtctctcacttacgtttttggctaatacaaggagtgtgcgtgctgctcccaagcgcggttttcagcgtctatgtacttcatagaggagcgactcttgccgcactgggcccacgaagatgtccggaccccagggagccggcttcgggacagcgacggtgcccaaggccattcggtgagaggggcggacttcaggtccccgacttctctgccggatacataatccacctcctcctacgtacactgcttgaggcagccttcggcgctttacactattttctcttcgggttcctggccccaaaaaaattcccctgtacacgacctccctgcacaggagtggtagactgctacgtgagcaggccaactgagaagagtctcttgatgctattcctctgggccgtgagcgctctttccttcctgcttgggctagcagatctcgtatgcagtctgcggcgacggatgcgcaggagacccggtcctcctacgtcaccaagtatacgtaaacagtctggagcatcagggcatgccgagggccgtcggactgatgaggaggggggtagggaggaagagggcgctcctgcaccgcctggcgctagggctgggggagagggagccggaagccctcggagaacgtcacgagtatcaggccacaccaagatcccggatgaggacgagtccgaggtgacaagctctgccagcgagaagctgggaaggcagcccagaggacggcctcacagagaggccgctcaagaccctagaggctcagggagtgaagaacagccctccgcagccccaagccgccttgccgctcctcctagctgtagctcacttcagcccccagatccaccagcaagtagttctggggcacctcatctgcgggcaaggaaatctgagtgggtgtag

SEQ ID NO: 224362 - DNA, 1191 bp, synthetic construct
  misc_feature 1..1191: note = Description of Artificial Sequence: Synthetic coding sequence
  source 1..1191: mol_type = other DNA
atgtcttggtcttttctgacacggctccttgaggagattcacaatcacagtacattcgtaggcaagatatggttaacagtattaatcgtgttccgaattgtgctgactgcagtgggaggcgagtctatttattacgatgaacagagcaagtttgtctgcaacaccgagcagcccggatgcgagaacgtgtgctatgacgccttcgccccattgagtcacgtgcgtttctgggtattccagatcattctggtggccactcctagcgtgatgtatctgggctacgcaatacataaaatagctaagatggagcatggagaggcagataagaaggctgctcgcagcaaaccctacgccatgaggtggaagcagcaccgcgctctggaggagacagaagaggacaatgaagaagaccctatgatgtaccccgaaatggagttggagtcagacaaagagaataaggaacagtcccagcccaaaccaaaacacgacggacgaaggcggattagggaagacgggcttatgaagatctatgtgttgcagctcctagccagaacagtgtttgaagttggatttctcattggccagtatttcctatacggcttccaggtgcatcccttttatgtctgtagcagactgccatgcccccacaaaatcgattgcttcatctcacgaccaaccgagaagaccatatttctccttataatgtatggtgtcacgggcttatgtctgctgctaaacatttgggaaatgctgcacctgggattcggcaccatccgagactcattaaacagtaaacggagggagctggaggatccgggagcctataactatccgttcacgtggaacacccccagcgcacccccagggtataacatcgctgtaaagcccgatcagattcagtacactgagctaagcaacgcaaaaattgcgtacaaacagaataaagcaaacaccgcccaggaacagcaatacgggtctcatgaggagaatctgcctgctgaccttgaggctctccaacgagagattcgaatggcacaggaaagactcgatctcgctgtccaggcatactctcatcaaaacaatccacatggacccagggaaaaaaaagctaaagtcggttcaaaagcgggttctaacaagtctactgccagttccaagagtggcgacggtaaaactagcgtctggatctag

SEQ ID NO: 224363 - DNA, 1191 bp, synthetic construct
  misc_feature 1..1191: note = Description of Artificial Sequence: Synthetic coding sequence
  source 1..1191: mol_type = other DNA
atgagttggagcttccttacccggctgctggaggaaatccacaaccattctaccttcgtcggtaagatttggctgacagtactcatcgtgtttcgaatcgttctaacagcagtgggcggtgagagcatatattatgacgagcaaagcaagtttgtgtgcaatacagagcagccaggctgcgagaatgtctgctatgacgcttttgcacccttgtcccacgtacggttctgggtgtttcagatcatactggtggcaacaccctccgtgatgtacctgggctatgcaattcacaagatagccaaaatggagcatggtgaggcggataagaaggctgccagaagcaagccttacgctatgaggtggaagcagcatcgggcattggaagagactgaagaggacaacgaggaggatcctatgatgtaccccgagatggagttagaaagtgacaaggagaacaaggagcaaagtcaacctaagcccaaacacgatggacgcaggcgaatccgggaagacggactcatgaaaatctatgtgctgcagctgctggcccgtacggtgtttgaggtcggcttcctgattggacagtacttcttgtatggtttccaggtgcacccattctatgtgtgctctcgcctgccctgccctcacaagatagactgctttatcagtagacccactgagaaaacaatcttcctcctgatcatgtatggagtgacaggcttgtgtctgctgctcaacatatgggaaatgctgcacctgggcttcggaacgatccgtgattctctgaactccaagaggcgcgagctcgaagatcctggtgcgtataactatccatttacctggaacactccaagtgcaccgcctggatataacatcgctgtcaaacctgaccaaatccagtatactgaactttcaaatgctaaaatcgcatataagcagaacaaggctaacactgcccaggagcaacagtacggatcccatgaggaaaacctcccagcagacctggaggctctgcagagggagatccggatggcccaggagcgcctcgatctggcggtccaggcctacagccaccaaaataacccccatggtccacgggagaaaaaagctaaggtggggtctaaagctggaagtaacaagtcaacagcatcatctaaatctggcgatggtaagactagtgtctggatttag

SEQ ID NO: 224364 - DNA, 1320 bp, synthetic construct
  misc_feature 1..1320: note = Description of Artificial Sequence: Synthetic coding sequence
  source 1..1320: mol_type = other DNA
atgaccaacatgagctggtcttttctcacgcgtctgctcgaggagattcacaatcatagtacctttgttggaaaagtctggctgaccgttctagtcgtgtttagaattgtgctgaccgctgtcgggggagaggcgatatattccgatgagcaggcgaaatttacctgcaatacgaggcaacccggttgcgataacgtgtgttatgacgccttcgcacccttgagtcatgttcgtttctgggttttccagatcgtggttatcagcacaccctccgttatgtatctgggctacgcagtgcacagattggctcgggcttccgaacaggagcgcaggcgcgcattgaggagacgcccagggcctcgtcgggctccaagggcacacctaccaccgcctcacgccggatggcccgaacccgcagacctgggggaggaggaaccgatgctggggctgggagaagaggaggaagaggaggaaacaggcgcagccgagggcgcaggcgaggaggccgaagaggcaggggctgaagaggcgtgcactaaggcagttggagcagatggcaaggcggcaggaactccaggccctactggacagcacgacggtagacgcagaattcaaagggaggggttaatgcgggtctacgttgcccaactggttgctcgcgcagccttcgaggtagcgttccttgtgggccagtaccttctttacggttttgaggtgaggccattcttcccctgttctagacaaccctgcccgcacgtggtcgattgttttgtgagtcggccaactgaaaagacagtgttcctgctggtcatgtatgtagtttcctgtctctgtcttctgctgaacttatgcgagatggcccacttaggcctgggctccgcacaggatgccgtgcgcggtagaagagggcctccagcctcagctccggcacctgccccacgccctcccccatgcgcattcccagcagccgctgcaggcctagcatgccccccagattacagtctggtcgtgcgagccgcagagcgggctagggcacacgaccagaacctcgctaacctggccctgcaggcccttcgcgatggtgccgctgcaggagacagggaccgagattcgtctccatgcgtgggcctcccagccgcaagtcgaggcccacctagagccggtgctcccgcatcccgtacgggatcagctacaagtgctggtactgtgggcgagcaggggcgtcctggcacacatgagaggccaggtgcaaaacctcgggctggctcagaaaaaggtagtgctagcagtcgagacggaaagaccactgtgtggatttag

SEQ ID NO: 224365 - DNA, 840 bp, synthetic construct
  misc_feature 1..840: note = Description of Artificial Sequence: Synthetic coding sequence
  source 1..840: mol_type = other DNA
atgtgcggccgattcctcagaaggctcctcgctgaggaatcacgacgtagcaccccggttggcaggctcctgctgcctgttctgttagggtttcggctggttctgctagctgcttcaggccctggcgtctatggggacgaacagtcagagttcgtctgccatacgcaacagcctggctgcaaagccgcatgttttgatgcattccatcccctgtcaccactccgtttttgggtctttcaggtgatcctggtagccgtaccttctgccctatatatggggttcacactgtatcacgtgatatggcactgggaactgtcgggaaagggaaaagaggaggagacattgattcaggggcgagaaggcaataccgatgtgcctggcgctggcagcctaaggctgctgtgggcatacgttgcccagctcggcgctcgcctggtgctggagggagcggcactgggacttcagtaccatctgtacggattccaaatgccttcgagctttgcgtgccgtcgcgaaccgtgtctgggatctatcacatgtaatctgagtaggccttctgaaaaaaccatctttctgaaaacaatgtttggcgtgagtggtttctgcttgctcttcacttttctggagctggttcttctggggctcgggaggtggtggcgcacctggaagcataagtcatcaagtagcaagtattttctaacgagcgagagcactaggcggcacaaaaaggcaacggattccctcccagtcgtggagacaaaggagcagtttcaggaagcggtgccaggcaggtctctggcccaggaaaagcagagacctgtcggcccacgggatgcatag

SEQ ID NO: 224366 - DNA, 1338 bp, synthetic construct
  misc_feature 1..1338: note = Description of Artificial Sequence: Synthetic coding sequence
  source 1..1338: mol_type = other DNA
atgactatgtttgaaaatgtgacccgggcactggctaggcagttgaacccccgaggcgatcttacccccctcgattccctgatcgattttaaaagatttcatccgttctgtctggtgctccggaaacgtaagtctacactcttctggggggcacgctatgtccgaaccgactacactctcctcgacgtgctcgaacccggatcttcgcctagtgatccaaccgacacagggaacttcggttttaagaatatgttagacactagggtggaaggagatgtcgatgtgccaaagaccgtcaaagtgaaaggcaccgctggactatcccagaattccaccctcgaagttcagacgttgtccgtggctccgaaggcactcgaaactgtacaggagcgcaagctggcagccgatcacccattcttaaaggagatgcaagatcaaggagagaatctgtatgtggtgatggaagtggtggaaaccgtccaggaggttacactggaacgtgcaggcaaggccgaagcatgcttcagcttaccatttttcgctcccttgggactccaggggagtatcaaccacaaagaagccgtcaccattccaaaaggctgtgtcttggcatttagggtgcggcagttgatggttaaagggaaggatgagtgggatattccccacatttgcaatgacaatatgcagacattccctcccggtgagaaatctggggaagagaaagttatactgatccaggccagcgatgtgggtgatgtccatgagggatttcggacgctgaaggaggaggttcagcgcgagactcagcaggttgaaaagctgtctcgggtgggtcagagctcacttctttctagtctgtctaagcttctcggaaagaagaaggaactacaagaccttgagctcgcccttgaaggagctctggacaaagggcatgaagttaccctggaagctcttcccaaggatgttttacttagcaaggaggccgtcggagcgatcctgtatttcgtcggggctttaacagagttatctgaagcacagcagaaactgctggttaagtccatggagaaaaagatacttcctgttcagctgaagctggtggagtccaccatggagcaaaattttctccttgacaaagaaggagtgttccctctgcagccagaactcctgtcctccttaggggatgaggaattgaccctcaccgaagccctggtcgggctctcaggactcgaggttcagagaagtggtccgcagtatatgtgggacccagatacactaccccgactgtgtgcactgtatgctggcctgagcctgctgcagcagttaaccaaggcgagttag

SEQ ID NO: 224367 - DNA, 1212 bp, synthetic construct
  misc_feature 1..1212: note = Description of Artificial Sequence: Synthetic coding sequence
  source 1..1212: mol_type = other DNA
atgtttagcgtcttcgaggagatcacacggattgtggtcaaggaaatggatgcaggcggtgatatgatagcagtccgaagcctggtggacgccgatcggtttcgatgtttccacttggtcggcgagaagagaacgttttttggttgccggcattacacaacaggtctgacccttatggatatcctcgacaccgacggtgacaagtggttggacgaactggatagtgggctgcagggacagaaggcagagttccaaatccttgacaatgtcgactcaacaggagaacttatcgtccggttgccgaaggagattacgatcagcggaagctttcaaggattccatcatcaaaagataaagatttctgaaaataggatcagtcagcagtatctggccaccctcgaaaaccggaagcttaagcgggaactgcctttttcctttcggtcgatcaacaccagggaaaacctgtatctggtaacagagacattggagaccgtcaaggaagaaacgctgaagagcgaccgccagtacaaattctggtctcagatatcacagggccacttgtcttataagcacaaaggacagcgggaggtaaccatacctcctaatagggttttaagctacagggtgaaacaactggtgttcccgaacaaggaaacgatgaaaaaagatggagcttcatcatgcttgggcaagtccttgggctccgaggatagccgcaacatgaaagaaaaactggaagatatggagagcgtgctgaaggatctgaccgaggaaaaaaggaaggacgtcctcaacagcttggcaaagtgcttgggcaaggaagatattcgccaggatctggaacagcgggtcagcgaggtcctgatctcaggcgaactacatatggaggatcccgataagcccctgctgtcaagcctattcaatgctgccggagtactggtggaagcacgagccaaggcaatccttgatttcttggacgcactgctagaactgtccgaggagcagcagtttgtggcagaggccttggagaaggggaccctgcccctgcttaaagaccaagtcaagtcagtcatggagcagaattgggatgagctggcgtcgtctcctccggacatggactacgaccctgaggctcgaatcctctgcgcattgtatgttgttgtgtccattctactggagttggccgaaggccctaccagcgtgagcagctag

SEQ ID NO: 224368 - DNA, 1236 bp, synthetic construct
  misc_feature 1..1236: note = Description of Artificial Sequence: Synthetic coding sequence
  source 1..1236: mol_type = other DNA
atgttttcagtcttcgaggagattacccgcatagtggtaaaggaaatggacgcaggaggggacatgatcgccgtccgcagtctggtagatgccgataggttcaggtgtttccacctggttggcgagaagcggacattctttggttgtcggcattacaccacaggccttacactgatggacattctcgatacagatggggacaagtggttagatgagctggactctgggctgcaaggccagaaggcggaatttcagatcctggacaacgttgactctactggcgagcttatcgtgcgcctgcccaaagaaatcaccatttcggggtcattccagggattccaccatcaaaaaattaagatctcggagaatagaatatcccagcagtacctggctacacttgagaaccgtaaactcaagcgggagctgccattctccttcagatcaattaacactcgtgagaacctatatctggtgaccgagacactggaaacagtgaaagaggaaacgcttaagagcgataggcagtataaattttggtcccagatcagtcagggacatttgtcttacaaacataagggccagagggaggtcacaattccacccaatcgggtcctcagttacagagtcaaacagctagtgttccccaacaaggaaacaatgtcagccggacttgatatacacttcaggggaaaaactaagtcctttccagagggcaagtctcttggctcagaggactctaggaatatgaaggagaagctggaagacatggagtctgtactgaaggacttgactgaggagaagcgcaaagacgtattgaactcactggccaaatgcctcggaaaggaggatatccgacaggatttagagcaacgcgtgtccgaagtactaatttcgggagagctccatatggaggaccccgataagcctctgctttcttcactcttcaacgccgctggggtactcgtggaagcacgcgcaaaggccatcctcgactttctagacgcactgctcgagttgagcgaggagcagcagtttgtcgccgaagcattggaaaaaggcacacttcctttattgaaggatcaggtgaagtcagtgatggagcagaattgggacgaactcgcgtcttccccgcctgatatggactatgacccggaggcgaggatcttatgtgccttgtacgtggtagtcagtatactgttggaattagcagaaggccctacgagtgtgagtagttag

SEQ ID NO: 224369 - DNA, 1185 bp, synthetic construct
  misc_feature 1..1185: note = Description of Artificial Sequence: Synthetic coding sequence
  source 1..1185: mol_type = other DNA
atgtttagtgttttcgaagagattacaaggatcgtggtcaaagagatggatgcaggcggagacatgattgccgtgagatccctggtcgacgcagatcgctttcgatgctttcatctggtaggggaaaaaaggactttcttcgggtgccggcactataccacagggctgacactgatggatattctcgataccgatggtgataaatggctcgatgagctggacagtggcctgcagggtcaaaaagctgagttccaaattctagataacgtggatagcaccggggagctcatagtcagactgcccaaagagattactatctccgggagcttccaggggttccaccatcaaaagattaagatctcagagaaccgcatttcccagcagtacctggccaccctggagaatcggaagttgaagcgcgaactgccttttagcttcaggtctataaataccagggaaaacctgtacctcgtcactgagaccctggaaacagtaaaagaagagactctgaaatcggaccggcagtacaagttttggtctcagatttctcagggccacctgtcgtataagcacaaagggcagcgtgaagtaaccatccctcctaatagagtgctgtcatatcgcgtaaaacagttggtcttcccaaacaaggagacaatgcggaagagcctgggaagtgaagacagtagaaatatgaaagagaagttagaggacatggagagtgtactcaaggacttaaccgaggaaaagaggaaggacgtgctgaattcactggctaagtgtctcggcaaggaggatattcgtcaagatcttgagcagagggtctctgaagtccttatctccggggagctgcacatggaagaccctgacaaaccacttctatcatccttgtttaatgcagcgggtgtgcttgtggaggcgagggcaaaggctatcctagactttcttgacgctctgcttgagctttctgaggaacagcagttcgtcgctgaagcgctagagaagggcacactgccgttactcaaggatcaggtaaagtcggtcatggaacagaattgggatgagttagcttcgagcccccctgatatggactatgacccagaggctaggattttatgcgcactgtacgttgtggtgagcatcttgctggagttagctgagggacctacctctgtgagttcatag

SEQ ID NO: 224370 - DNA, 1236 bp, synthetic construct
  misc_feature 1..1236: note = Description of Artificial Sequence: Synthetic coding sequence
  source 1..1236: mol_type = other DNA
atgtttagcgtctttgaagaaattacccgaatagttgtgaaggaaatggacgcagggggagatatgatagcagtgcgttcattggttgatgctgatcgatttaggtgtttccacctggtgggggaaaagagaactttttttggttgtcggcattacactacagggctcacgttgatggacattctcgacaccgacggcgataaatggctggatgagctggacagtggtttacaaggacagaaggctgagtttcagattctggacaatgttgatagtaccggtgagctaatagtaaggcttccgaaggaaattaccatttcaggatccttccagggattccaccatcaaaagatcaagatctcagaaaatcgaatatcccaacaatatcttgctacgctggaaaataggaagctcaaacgagaactgccgttttctttccgaagtatcaacacaagggagaatctatatctcgtaactgaaacattggaaacggtcaaggaagagacccttaagtccgataggcagtacaagttctggagccagatctctcagggtcatctgtcctacaagcacaaagggcaacgagaggttacaatcccgcctaatcgtgtgttaagctatcgcgtcaaacagctcgtcttccccaacaaagagactatgagtgccggactagatatacattttcggggtaagactaagagcttcccggagggaaagtccttaggctcagaagacagtcgcaatatgaaggagaaactggaagacatggagtcagttctcaaggacttaacagaagagaagcgcaaggatgttctgaattctttggccaagtgtctcggcaaggaggatatccgacaggatctggaacagagagtgtcggaggtcctaataagcggcgagctccatatggaggatcctgacaaacctctcctatcatcactgtttaatgcagctggcgtgctggtggaggccagggcgaaggcaattctggacttcttagacgcccttttggagctctctgaagaacagcagttcgtggccgaggcccttgagaaaggtactctcccccttttgaaggatcaggtcaagtccgtgatggagcagaactgggacgagctggcctcttctcctccggatatggactacgatcctgaagcaaggatcctgtgtgccctttatgtcgttgtatcgatcctgctagagctggccgagggcccaacctccgtttcaagctag

SEQ ID NO: 224371 - DNA, 1251 bp, synthetic construct
  misc_feature 1..1251: note = Description of Artificial Sequence: Synthetic coding sequence
  source 1..1251: mol_type = other DNA
atgtttagtgtgttcgaggaaatcacaagaattgtagtgaaggagatggacgcaggtggagacatgatcgctgtacgatctcttgtcgacgccgaccggtttagatgttttcatctcgtgggggagaaaagaacctttttcggctgtcgccactacacgactggccttactctaatggacatcttagatacagacggagacaagtggcttgacgaactcgactccgggctgcagggccagaaagcagaattccaaatcctggataacgtggactctacaggcgaattaattgtaaggctgccaaaagagattaccatatctgggtcattccagggctttcaccaccagaaaattaagatttccgaaaacaggatctcgcaacagtacctggcgacccttgaaaacaggaaacttaagcgggagctgccctttagttttcgttctattaataccagagagaacctatatctggtgaccgagacactggaaactgtgaaggaagagactctgaagtcagatcgccagtacaagttttggagccaaatctcccagggccacctcagttataaacataaaggacaaagagaggtgacaattcccccaaaccgggttctgagttaccgtgtcaagcagttggttttcccgaacaaagagacaatgaacattcatttccgagggaagacaaagtcttttccagaggagaaagacggagcaagctcatgtttgggtaaatctctcggctcagaagacagcaggaatatgaaggagaagctggaggatatggagagcgtgttgaaagatctgaccgaggagaaacggaaggatgtgctcaattctcttgcaaaatgtctcggaaaggaggatatacgccaggatctggaacagcgagtgtccgaggtcctgataagcggagagctgcatatggaggatccagataagcccctgctgagcagtctgttcaacgccgctggggtcttggtggaggccagggcaaaggcaattctcgactttctcgacgccctcctggagctgtcagaagagcagcagttcgtggccgaggctctggagaaaggtacacttccgctgctaaaggatcaagtgaagtccgttatggaacagaattgggatgaattagccagctctcccccagacatggactatgaccctgaggctcggattctgtgcgcattatacgtcgtggtcagcatcctgctggagcttgctgaaggccctactagtgtgtccagttag

SEQ ID NO: 224372 - DNA, 1047 bp, synthetic construct
  misc_feature 1..1047: note = Description of Artificial Sequence: Synthetic coding sequence
  source 1..1047: mol_type = other DNA
taacttgacgagctggattctggcttgcagggccagaaagctgaattccagattctcgacaatgtggactcgactggagagcttattgtgaggctccccaaggaaattaccatcagcgggtcgttccagggatttcaccaccaaaagatcaaaatttccgaaaaccgtattagccagcaatatctggccacattggagaacaggaagcttaaacgtgagctaccattctcctttaggtcaatcaatactcgagagaacctgtatcttgtgacagaaactttggagacagttaaggaggagacgttaaaatctgacagacagtacaagttttggagccagatcagtcagggccacctgtcatacaaacacaagggacagcgcgaagttaccatcccacccaatcgggtgctgtcataccgtgtgaagcagctggtgttcccaaacaaggaaactatgaatattcatttccgtggaaaaacaaaaagcttccccgaggaaaaggacggggctagctcgtgtctgggaaaatcccttggatcagaggactcaaggaacatgaaggagaaactggaagatatggagtcagtcctgaaggacctcactgaggagaagcggaaggatgtgctgaattctctggcgaaatgccttggcaaggaggacatacgacaggacctcgaacagcgggtgtcggaggttctcatcagcggggagctccatatggaagaccccgacaagccactcctgagctccttattcaatgccgctggagtgcttgtggaagcccgagcaaaggctattctagactttttagacgctttattggagctttcagaggaacagcaattcgttgccgaagcactggaaaagggaactttaccactgctgaaggaccaagtgaaaagcgttatggagcagaattgggacgagctggcctcatctccaccagacatggattacgatcccgaagccagaatcctgtgtgccctatatgtcgtggtaagtattctgctggagctggcagagggaccaacctctgtgagtagctag

SEQ ID NO: 224373 - DNA, 1224 bp, synthetic construct
  misc_feature 1..1224: note = Description of Artificial Sequence: Synthetic coding sequence
  source 1..1224: mol_type = other DNA
atgttttccgtattcgaagagataacaagaatcgtggtgaaggagatggacgcgggtggagacatgatcgctgtccgctcgctggtggacgccgatcgattccgctgcttccatttagtcggcgagaagagaacatttttcggttgtcggcattatacaacaggattaacgctgatggatattctggataccgatggcgacaagtggttggatgagctggacagcggactgcagggccagaaagccgagttccagatcctggataatgtcgatagtactggggaactcatcgtgcggttacccaaagagatcactatctccgggagcttccagggttttcatcaccagaagatcaaaatatccgagaatcgcattagtcagcagtacttggccactcttgagaacaggaagctgaagcgggagctcccgttcagttttaggtcaatcaatacacgggagaatctgtacctcgtcaccgagacactcgaaactgtgaaggaagagacccttaagtcggaccgtcagtacaagttctggagtcagatctcacagggacatctgagttacaaacataaggggcagcgggaagttacgatacccccaaaccgagtactgagctatcgcgttaagcagctggtctttcctaacaaggagacaatgaatatccatttccgcggtaagactaagtcgtttcccgagggcaagagtttaggtagtgaggattctaggaatatgaaagagaagttggaagatatggaatccgtactgaaagacctcaccgaggaaaagaggaaagatgtcctcaactcgcttgctaagtgcttaggtaaggaggacatcagacaagatctggagcaaagggtcagtgaggttctaatcagcggtgagttgcatatggaggatcctgataaacctctcctttccagtctgttcaacgcggcaggtgttctggttgaagcaagggctaaggccatcttagatttcctggacgccctactggagctgtcagaggagcagcagttcgtggcagaggccctcgaaaaaggaacgctgcctttgcttaaggaccaagtgaaaagcgtaatggaacaaaactgggacgaactggccagcagccctcctgacatggactatgatccggaggccagaatcctgtgcgccctgtatgtggttgtgagcatactgcttgaattggccgagggcccaacatctgtcagttcctag

SEQ ID NO: 224374 - DNA, 1527 bp, synthetic construct
  misc_feature 1..1527: note = Description of Artificial Sequence: Synthetic coding sequence
  source 1..1527: mol_type = other DNA
atgccctcaatgttggagcgcatctccaaaaatctcgtgaaggagattgggagcaaagatcttacacctgttaagtatctgctgtccgcgaccaaactcaggcagttcgtcatcctacggaagaagaaagattccaggagcagcttttgggaacagtctgactatgtgccagtagagttcagcctgaatgatattttggagccttcctcttcagtgttagaaaccgtggtgacgggaccattccactttagtgacatcatgatccaaaaacacaaagccgacatgggggtgaatgttggcatagaagtaagcgtaagcggagaggcctcagtggaccacgggtgttccctcgagttccagatcgtgaccattccttcccctaacttagaggacttccaaaaacgcaaactcctggaccctgagccgagtttcctcaaagagtgtcgcagaagaggggacaatctgtacgtcgtgacagaggccgtggagctcattaacaatactgtcctgtatgattcgagtagcgttaacatcctgggtaaaatcgctctctggataacatacgggaaagggcagggacagggcgagtccttacgtgttaaaaagaaggcgctgaccttgcaaaaagggatggtcatggcttataagcggaaacagctcgtgattaaggaaaaagccattctgatcagcgacgacgacgaacagaggacctttcaggacgagtacgagatatccgagatggtgggttactgcgctgcgagaagcgaaggccttctgccatccttccacacaatttcacccacgctgttcaacgcttctagcaatgatatgaagctcaagccagagttgttcctaacacagcaattcctgagcggccatcttcccaagtatgagcaggtccatattttgcccgttggcagaatcgaggagcctttctggcagaactttaagcacttgcaggaggaggtgttccagaaaataaaaaccctagcccagttgtccaaggacgtacaggacgtaatgttctattccattctggctatgcttagggacagaggcgcactgcaggacctcatgaatatgctagagctcgatagttccggacatctggatggcccaggtggggctattctgaaaaaactgcagcaggatagcaaccacgcgtggttcaaccctaaggatccaatcctgtacctcttggaggccatcatggtcctgagcgacttccaacacgaccttctcgcttgctccatggagaagcgaatattgctccagcagcaggaactggtacggtcgatcctcgagcccaacttccgctacccatggtccattccattcacattaaagcctgagttactggcgcctctccagtctgagggactggccatcacctacggcctgttggaggaatgcggtcttagaatggagctcgataatccgagaagcacttgggatgtcgaggccaagatgcccctgtcggctctatatggcacgctctctctgctgcagcagctcgctgaggcgtag

SEQ ID NO: 224375 - DNA, 462 bp, synthetic construct
  misc_feature 1..462: note = Description of Artificial Sequence: Synthetic coding sequence
  source 1..462: mol_type = other DNA
atggttgctacaaagaccttcgccttactgttgctcagcttgttcctcgctgtcgggcttggagagaaaaaagagggccacttcagcgctctacctagcctgcccgtcgggtcacacgctaaagtaagcagtccccagcccaggggtcctcgctacgccgaagggacattcatttccgattattctattgccatggataagatccaccagcaagacttcgtgaattggctgctggctcagaagggaaagaaaaatgactggaaacacaatatcacgcaaagagaggcgagagccctcgaactggcctcgcaggctaatcggaaggaggaggaggcagtggaaccccagtcatcacctgccaaaaatccctctgacgaggacctgctgcgggacctgcttattcaagaactgcttgcttgtctgcttgaccaaaccaatttgtgcagactccgttctagatag

SEQ ID NO: 224376 - DNA, 1401 bp, synthetic construct
  misc_feature 1..1401: note = Description of Artificial Sequence: Synthetic coding sequence
  source 1..1401: mol_type = other DNA
atgaccacaagccccatcctccaactactgctgcgattgtctctgtgtggtctcctgctccagagggctgagacggggtccaaaggacagactgccggagaactctatcaacgctgggaacggtaccggagggagtgccaggaaactctcgccgctgccgaacctccatctggactggcttgcaatgggtcattcgatatgtatgtttgttgggactacgccgcacctaacgctacagctagggcctcctgcccttggtacctgccctggcatcatcacgttgccgctggtttcgtgcttcgtcagtgtggtagcgacggccagtggggactctggcgtgaccacacacagtgtgagaatccggaaaagaacgaagcttttctcgatcagagactcatactggagcgcctacaggtcatgtacacagtaggctattcactgtccttagctacccttctactggctttgttaatcctgtccctgttcaggagactccactgcacgagaaattatatccacattaatcttttcacctcttttatgttaagggcagccgcaattctgagtcgagatcgactgttgcctagaccagggccttatctgggcgaccaggcactcgcactctggaaccaggctcttgctgcctgtcgcaccgcccagatcgtcactcaatactgtgttggcgctaattacacctggctcctggttgagggcgtctatttgcacagtctcctggttctggtgggtggtagcgaggaggggcatttccggtactaccttctgctagggtggggagcacccgctctcttcgtgataccatgggtgatcgtgcggtacctgtacgaaaacacacagtgttgggagaggaatgaagtgaaggcaatctggtggattatcagaactcctattcttatgaccatccttatcaacttcctgatatttattcgcatactaggcatactactgtccaaactgcgaacacgacagatgcgatgcagggattacaggcttaggctggccagatctactctcactctggtcccactcctgggtgtccatgaggtcgtctttgcacctgtgactgaagaacaggcccgtggcgctctgaggtttgccaagctcggctttgaaatatttttgagttcctttcaggggtttttagtcagcgtgttatattgctttattaataaggaagtgcagtcagagattaggcgcggttggcatcattgtaggttacggaggtctctgggggaggaacagcgacagctcccagaaagagcttttagggccctccctagcggctcaggacccggtgaggttccaacgtctcggggattgtcttccgggacactccccggtccaggcaacgaggcgagccgagagcttgagtcgtattgctag

SEQ ID NO: 224377 - DNA, 1293 bp, synthetic construct
  misc_feature 1..1293: note = Description of Artificial Sequence: Synthetic coding sequence
  source 1..1293: mol_type = other DNA
atgacgacttcccctatcctgcaactgctgctgcggctgtccctgtgcggcctgctcctccaaagagccgagacagggagtaaagggcaaactgccggagaactgtatcagaggtgggaaagatatcgcagggaatgccaagagacactggcagctgccgaacctccatcagttgctgctggtttcgtcctaagacagtgcggaagcgatgggcaatggggtctctggagagaccacacgcagtgtgaaaacccagaaaaaaacgaagcattcttggatcagcgtctcatattggagcgtttgcaggtcatgtacacggttggatattccctctccttggccacactgctgttggccttactcatcctctccctgttccggaggttgcattgcacgcgcaattacattcacattaatctgttcacgagctttatgctgcgcgctgcagccatcctgtcccgcgaccgcctcctgccacggccaggcccatacctgggcgatcaagcactagccttgtggaaccaggccctagcggcttgtcgaacagcccagatagtgactcaatattgtgtaggtgccaactacacatggctccttgtggaaggtgtgtatttacatagcttactggtgctagtcggaggctccgaagaaggacatttccggtactacctcctgctgggctggggagcacccgcactgttcgttatcccttgggtgatagtccgctacttgtacgagaatacgcagtgctgggagcgcaatgaagtgaaggcgatctggtggataatccgcacacctattcttatgactatccttatcaatttcttgatattcatcaggatccttgggattttgcttagtaagctccggaccagacagatgcggtgtcgcgattatcgacttcgcctggctcgctccacgttaacccttgtgcccctgttaggagtgcacgaggtggtcttcgcacccgtcacagaggaacaggctagaggtgcactcaggttcgccaaactcggcttcgaaatctttctatccagttttcagggatttcttgtcagtgtcctctactgttttatcaataaggaagttcagagcgagatcagacgcggatggcaccattgccgcctgagaagaagtctgggggaggagcagcgccagttgcctgaaagggcattcagggccctaccctctggctctggaccaggggaggtccccaccagtcgaggcttgtcaagtggcaccctgcctggacccggaaatgaagccagcagagagctggaatcctattgttag

SEQ ID NO: 224378 - DNA, 1401 bp, synthetic construct
  misc_feature 1..1401: note = Description of Artificial Sequence: Synthetic coding sequence
  source 1..1401: mol_type = other DNA
atgacaacctccccaatcctgcagctgctcctgcgactgtcactgtgtggtctcctgctgcagcgcgcagagacggggagcaaaggacaaacagccggagaattatatcagcgctgggagaggtaccgtagagaatgtcaggagacactggccgctgctgagccgcctagcggactggcctgcaacggatcattcgacatgtatgtttgttgggactacgccgctccaaatgccacagcgagagccagttgcccctggtacttgccctggcatcatcacgttgctgctggatttgtcctacgccagtgtggctccgacggacagtggggtctctggcgggaccacacacagtgcgaaaatcctgagaagaatgaggcattccttgaccagcgacttattctggagcgactgcaggttatgtatacagtgggctactctttgagcctagctacactcctactagccttgctcatactctcattatttaggcgtttgcattgtacccgcaactacatccatataaatctcttcaccagtttcatgctacgcgctgctgccatcctttcccgagaccggctgctgccaagacccggaccctatctaggggatcaggcactcgcactctggaaccaggcgcttgctgcttgccgcacggctcagatagttactcaatactgtgttggcgctaattacacttggctactcgtcgagggtgtatatcttcacagcctgttagtgctcgttggcggttctgaggaaggtcatttcaggtactacctcttgctggggtggggagctcccgcactgttcgtgattccttgggtgattgtcagatatttgtatgagaatacccagtgctgggagcgaaacgaggttaaggccatatggtggatcatacggactcccatactgatgacaattctgataaattttctcatctttatacggattctgggaatactcttatccaagttgcggactaggcagatgaggtgtcgtgactaccggcttcggctggctaggtctaccctgacgctggtacccctacttggagtgcacgaggtggttttcgcaccagttacagaggaacaggctcgtggggctctgcgttttgcgaaattaggattcgagatcttcctgtcaagtttccaaggattcctcgtctccgttctttactgttttattaacaaggaggtgcaatcagaaatccgacgaggctggcatcactgccgacttcgtcgctccctaggagaggagcagagacagcttcccgagagagcctttagggcactcccctcaggaagcggccctggggaggttccaacctccaggggtctatccagcgggacattgcccggtcctggaaacgaggccagtcgggaactcgagagttactgctag

SEQ ID NO: 224379 - DNA, 1254 bp, synthetic construct
  misc_feature 1..1254: note = Description of Artificial Sequence: Synthetic coding sequence
  source 1..1254: mol_type = other DNA
atggcctggttcgccctttatctactttctctgctgtgggctaccgcaggcaccagcactcagacacagtcaagttgcagtgtaccgagtgcccaggagcccctagtcaatggcatccaggtgcttatggagaacagcgtgactagcagcgcttatcccaaccccagtatcctgattgcgatgaatctggccggagcctacaatcttaaggcacagaagttgctcacttatcagcttatgtcctcagacaacaacgatttgactatcggccaactgggactcactatcatggcgctgacttcatcttgccgagatcctggagataaagttagcatccttcagagacaaatggagaactgggctccttctagccccaatgcggaagcaagtgctttttacgggccttccttggcaatcctggccctgtgtcagaaaaactcggaagcaaccttacccatagcggtccgcttcgctaaaaccctccttgctaacagctccccctttaacgtggataccggtgcaatggctactctggcactgacttgcatgtacaacaagattcctgtgggttctgaggagggatacaggagcctctttggccaggtgctcaaagatatcgtcgaaaaaatcagcatgaaaatcaaggacaacggcattattggagacatctatagcactgggcttgccatgcaggccttgtccgtaacacctgagccctctaagaaagaatggaactgtaaaaagacaaccgatatgatcctcaacgagataaagcagggaaagtttcataacccaatgagtattgctcagatactcccctcgctgaaagggaagacttatctcgacgtaccccaggtgacatgctcccccgatcacgaggtccaacctacgctgcctagcaaccccggtccagggcctacttcggcctcaaatatcactgtgatttacacaatcaataatcaactccgtggggtggaactgctgttcaatgagactatcaatgtgagtgtgaagtctgggtctgtgttgctggttgtcctggaagaggcacaaaggaagaatcctatgttcaagttcgagaccacaatgactagttggggcctcgtggtgagcagtattaataatatcgctgagaatgtgaaccataagacctactggcagtttctgagtggggtgacacccctcaacgaaggtgtggctgattacattcccttcaatcacgaacatattacagcgaatttcactcaatactag

SEQ ID NO: 224380 - DNA, 1179 bp, synthetic construct
  misc_feature 1..1179: note = Description of Artificial Sequence: Synthetic coding sequence
  source 1..1179: mol_type = other DNA
atggcagtaccatctgcacaggaacctctcgtcaacggtattcaagtgctcatggagaattcagtgacgtcgtccgcataccccaatccgagcattttgatcgcgatgaaccttgcaggggcttataacttgaaagctcaaaagctgctaacttaccaactcatgtcaagcgacaataatgacctgacgatcggacaattgggtttgaccattatggctctgacctcttcttgtcgggatcccggtgacaaagtgagcatcctacagcgacagatggagaattgggcgccttcgagccccaatgctgaggctagcgcattttacggaccctccctcgccatactggcattatgtcagaagaacagtgaggctacactcccgatcgccgttaggttcgctaaaaccctccttgcgaatagtagtccttttaacgtggacaccggagctatggcgactttagccctaacctgcatgtataataagattcctgtggggagtgaagaagggtacagatctttatttggccaagtcctgaaggatatcgtcgagaagatatccatgaaaatcaaagacaatggcattatcggcgatatatattcaacgggcttggccatgcaggccctcagtgtcacaccggaaccctccaagaaagagtggaattgtaagaagaccacggacatgatactgaacgagattaaacaaggaaaattccataacccaatgagtatagcccaaattctcccctctttgaagggtaaaacctatctggatgtgccacaggtaacctgtagccccgatcacgaggtgcagcccacccttcctagcaatcctgggccaggacccacctcagcctctaatatcacggtgatctacactataaacaatcagctgcgcggagttgaattactgttcaatgagactatcaatgtgtccgttaaatctggctcagtgctcctcgtggtcctggaggaggctcagaggaagaaccccatgtttaaatttgagacaactatgacctcctggggtctggttgtgagttctattaacaacatagctgaaaacgtcaatcataagacgtattggcagtttctgagcggagtgacgccgcttaatgaaggggtagccgattacatcccatttaatcatgagcatatcaccgccaatttcacacagtactag

SEQ ID NO: 224381 - DNA, 306 bp, synthetic construct
  misc_feature 1..306: note = Description of Artificial Sequence: Synthetic coding sequence
  source 1..306: mol_type = other DNA
atgcagagactgtgcgtctatgtactaatttttgccctagccctggctgctttcagcgaggccagctggaagcctcgatctcagcagccagatgcgcctctggggacaggcgctaaccgggaccttgagctgccttggctggaacagcagggtccagcttctcatcatcggagacagcttgggccacagggacctcctcacctcgtggccgaccctagcaagaagcaaggaccgtggttggaggaagaagaagaagcatatggatggatggatttcggtaggcggagtgccgaagacgagaactag

SEQ ID NO: 224382 - DNA, 447 bp, synthetic construct
  misc_feature 1..447: note = Description of Artificial Sequence: Synthetic coding sequence
  source 1..447: mol_type = other DNA
atgaggggtagggaactgccgttagttctactcgccctcgtcctctgtttggcccctaggggtagggccgtgccgcttcctgcgggagggggtacagtgctgaccaagatgtacccgaggggaaatcattgggctgttggtcacttgatgggaaaaaaatcaactggagaaagtagttcggtttcagagcggggaagtttgaaacagcagctgcgcgagtatatccggtgggaagaggccgctagaaaccttcttgggctgatcgaggccaaggagaataggaatcaccagcctccacagcccaaggcacttgggaaccaacagccaagttgggattctgaagattcaagcaattttaaggacgtgggctctaaggggaaagtggggaggttgagcgctcctggctcacagagagagggacgcaatccacaactgaaccagcaatag

SEQ ID NO: 224383 - DNA, 426 bp, synthetic construct
  misc_feature 1..426: note = Description of Artificial Sequence: Synthetic coding sequence
  source 1..426: mol_type = other DNA
atgcgcggacgcgagctgcccctcgtcctactggctctggtcctgtgcctggcaccccgaggaagagccgtgcctctacccgctggcggaggaaccgttctgaccaagatgtatcctcgaggcaaccactgggctgtgggacacctaatgggaaagaagagcacgggcgagtcaagcagcgtttcggagcgcggttctctgaaacagcagttaagggagtacattcgatgggaagaggcagccagaaaccttctgggcctgatcgaggcaaaggaaaacaggaaccatcaacccccacaaccaaaggccctcggaaatcagcagccatcttgggacagcgaggactcctcaaattttaaggacgtgggatcaaagggaaagggatctcagcgggaaggtagaaacccccagctcaaccagcagtag

SEQ ID NO: 224384 - DNA, 417 bp, synthetic construct
  misc_feature 1..417: note = Description of Artificial Sequence: Synthetic coding sequence
  source 1..417: mol_type = other DNA
atgcgtggcagggaacttccacttgtgcttctcgcactggttctgtgtttggctccaagaggcagggctgtcccgttgccagctggaggcggtacagtcttaactaagatgtaccccagaggcaaccattgggccgtgggccacctgatgggcaaaaagtctacaggagagagttcttcagtttctgaacgaggatctctgaaacagcagctccgagagtatatcaggtgggaagaggccgcacgcaatttactggggctcatcgaagccaaggaaaatcgcaaccaccagccccctcagcctaaggcccttggcaaccagcagccgtcgtgggactcagaagattccagcaacttcaaagacctcgtggactctctcttgcaggtgcttaatgtgaaggagggtactccaagctag

SEQ ID NO: 224385 - DNA, 1155 bp, synthetic construct
  misc_feature 1..1155: note = Description of Artificial Sequence: Synthetic coding sequence
  source 1..1155: mol_type = other DNA
atggctcttaacgactgttttctgctgaaccttgaagtggaccatttcatgcactgtaatatatcctctcattctgccgatttacccgtgaacgatgactggtctcatcccggtatcctgtacgttatccccgcagtgtatggcgtgataattctgattgggctgatcgggaacatcacgctgatcaaaatcttctgcactgtgaagagcatgagaaatgtgccaaatttattcatttcctccttagctttgggcgaccttctgctcctaataacatgcgcccctgtcgacgcttcccgctatttggctgacagatggctgttcgggcgtatagggtgcaaattgatcccttttattcagctgacatcggtcggggtgtctgtgtttacactaactgctttatccgctgaccgttacaaggctatagtccggcctatggatatacaagcgtctcacgcccttatgaaaatatgtttaaaagcggctttcatctggattattagcatgctcttggcgattccagaagctgtcttctctgatctgcacccatttcatgaggaatcgacaaaccagactttcatctcgtgcgcgccataccctcattcaaacgaactgcatcccaagatacatagtatggcatcattccttgtgttttacgttattccacttagcattatctctgtttactactacttcattgcaaagaatttgatacagtctgcctataatctgcccgtggaaggcaatatccatgtcaaaaagcagatagaatctagaaaaaggttagcaaaaacagtgttggtgttcgtaggccttttcgctttttgttggttgcctaaccatgtcatctatctttaccggtcttatcactacagcgaggttgatacctcaatgctgcacttcgtgacctcaatctgcgcgaggctccttgcttttacaaattcttgtgtgaacccattcgccctgtacctgttaagcaaaagcttccgcaagcagtttaacacccagctgctgtgctgccaacccggattgatcataagaagtcactcaacaggtaggtctactacctgcatgacttcattgaagtcgaccaacccttcagtcgccacattcagccttataaatgggaatatctgccatgaaagatacgtatag

SEQ ID NO: 224386 - DNA, 480 bp, synthetic construct
  misc_feature 1..480: note = Description of Artificial Sequence: Synthetic coding sequence
  source 1..480: mol_type = other DNA
atggcctccttcttagtgttctatgttattcccttgtcaataattagtgtgtactattatttcattgcaaagaacctgatacagagtgcgtacaatttgcctgtggagggcaacatccacgtgaaaaagcagatagagagtcgcaaacgcttagcaaaaaccgttctggtgtttgtgggcttattcgccttctgctggctccctaaccatgttatatacctatacaggtcttatcactatagcgaagtagacacttctatgcttcattttgtgacaagcatatgcgccaggctgctggcctttacaaatagctgtgtgaaccccttcgccctgtacctgttaagcgagttccaggagaccgtacagcactccgccgcactgctgcccgcatggcctgaccaccctgtgtctcagcactggaaggagtacaacctgcacgacctcccccaagaataccagccgctgagaggccatctgtag

SEQ ID NO: 224387 - DNA, 600 bp, synthetic construct
  misc_feature 1..600: note = Description of Artificial Sequence: Synthetic coding sequence
  source 1..600: mol_type = other DNA
atgcttgcgtactcttctgtacactgttttagggaagacaagatgaagttcaccatagtctttgcgggtctgttgggcgtgttcctggctccggctctggctaattacaatatcaatgtgaacgatgataataacaacgcagggagcggccagcagtccgtgagcgtcaataatgaacataatgtggctaacgtggataataacaatgggtgggacagttggaactccatctgggactacggcaacggttttgctgcaactcgcttgttccagaagaagacctgcatcgtccacaagatgaacaaggaggtcatgccaagtattcagtccctggatgcccttgtcaaagagaagaaacttcaaggtaagggcccagggggtccaccccctaaaggattgatgtatagcgtgaatccaaataaagtcgatgacctttctaagttcggaaaaaacatcgccaacatgtgtaggggtattcctacctatatggcggaggagatgcaggaggcttccttattcttttactccgggacgtgctatactacctccgtcctgtggatcgtggatatctcattttgcggcgatacagtagaaaactag

SEQ ID NO: 224388 - DNA, 1092 bp, synthetic construct
  misc_feature 1..1092: note = Description of Artificial Sequence: Synthetic coding sequence
  source 1..1092: mol_type = other DNA
atgcaacgagccggaggcggatccgcaccaggtggaaatggtggtggtggcggtggcggtccaggtaccgcttttagtattgacagccttatcggcccacccccaccgagatcaggacatttattgtacacaggctaccctatgtttatgccttaccgcccactggtattgccgcaggctttggcacccgctccactcccagctgggcttccaccactggccccattggcctcattcgcagggcgactgaccaataccttttgcgccggattagggcaagccgtccctagtatggtggccctcaccacggccctaccttcctttgccgagcccccagacgccttttacggcccacaggagctagcggcagcggctgcggcagctgccgctacggcagcccgaaataaccctgagcctggtggtaggcgtccagagggtggacttgaggcagacgagctgctccccgctcgtgagaaggtcgccgagccacccccaccaccccctccgcactttagcgagacgttccccagtctgcccgcagagggaaaggtgtattccagtgacgaggaaaagttggaggcttctgctggagaccccgcagggagcgagcaggaagaggagggcagcggcggtgattcagaagacgacggattcttagacagcagtgctggtgggcctggggcactgctaggtcccaagcccaagctgaaaggctccctgggtactggcgctgaggaaggcgcacctgtgacagctggagtcacagcgccaggcggaaaaagccgcaggcgaagaaccgccttcacaagtgagcaactgctcgaactcgaaaaggagtttcattgcaagaaatacctgtccctgactgagagatcccagatagcccatgctctgaagctgtcggaagtgcaagttaagatttggttccagaatcgcagggcgaaatggaagcgcatcaaggctggcaatgttagctccaggagcggagagccggtgcgcaatcctaagatagtggtccctatccctgtgcatgtaaaccgcttcgccgttcggagccagcatcagcaaatggagcagggcgctagaccatag

SEQ ID NO: 224389 - DNA, 1047 bp, synthetic construct
  misc_feature 1..1047: note = Description of Artificial Sequence: Synthetic coding sequence
  source 1..1047: mol_type = other DNA
atgagcgccgcttttccgccttctctgatgatgatgcagaggcctctggggtccagcaccgcttttagcatagacagccttatagggtctccgccacaaccctcccccggtcactttgtctataccggataccccatgtttatgccgtatcgacctgttgtcttaccccctcccccaccacctccaccggctctgccccaggctgctctccagcctgccctaccaccagcccacccccatcaccaaatcccctccctccctactggtttctgctccagcctagcccaaggcatggcccttacctccacccttatggctaccctgcccggtggcttttctgcctcaccgcagcatcaagaagcagccgcagcacgtaaatttgctcctcaaccacttcctgggggaggtaattttgacaaggccgaggcacttcaagctgacgccgaggatggcaaaggtttcctggccaaagagggcagcctcctggcattctcagctgcagagacagtgcaggcttcactggtcggagctgtgagaggtcagggaaaggatgaatcgaaggttgaggacgacccaaagggtaaggaagaatctttcagcctggagagcgacgtggactattccagcgacgacaaccttactgggcaagccgcacataaggaagaggacccaggccacgcactggaggaaacacccccttcttccggagccgcagggtccacgacctcaaccggaaagaacaggaggcgacggaccgcatttacatctgagcagcttctggaactggaaaaggagtttcattgcaagaaatatctatctcttaccgagagatcgcagatcgcacacgctctgaagctgtcagaggttcaggttaaaatttggttccagaacaggagggctaagtggaagagagtcaaagccggtaacgcaaactcgaagaccggggaacccagtcgcaaccctaagatagtggtgccaattccagttcacgtgtcccgcttcgcaatcaggtctcaacatcagcagttggagcaagcgagaccctag

SEQ ID NO: 224390 - DNA, 1443 bp, synthetic construct
  misc_feature 1..1443: note = Description of Artificial Sequence: Synthetic coding sequence
  source 1..1443: mol_type = other DNA
atggaggtggcacctgaacagccgcgatggatggcacatccagccgtcttaaacgcccagcatccagactctcaccacccaggtctggcacacaattatatggaaccagcacagctgctgccacccgacgaggtggacgtcttcttcaatcacctggatagtcagggcaacccttattatgcaaaccctgcacatgcacgcgcaagagtgagctattctcccgcacacgcaagactaaccggcggacagatgtgcagaccacatctactgcatagtcctggtttgccctggctagatggtgggaaggcagcccttagcgccgcagctgctcatcatcataatccttggactgtcagccccttcagcaagactccattgcacccctctgcagcaggcggaccaggaggcccactctcagtctatcctggcgcaggcggtgggagcggtggcggatctggttcttctgttgcaagtctcacccccactgccgcacattcgggcagtcacctctttggcttccctcctacaccgccaaaagaagtgtccccagacccaagcacgaccggtgcagcgtcccccgcaagctcttctgcgggtgggtctgcagccaggggcgaagacaaagacggggtgaagtaccaggtctcactgacagagagcatgaaaatggagagcggcagtcctttgagaccaggtctggccaccatgggcacgcagcccgcaactcatcatccaatcccaacctatcctagttacgtcccagctgctgctcatgattactcctctggattgttccaccccggaggtttccttggaggcccagcttcctcctttacgcccaagcagcggtccaaggcaaggagctgctcagaaggtcgggagtgtgtcaactgcggggctaccgccactcccctttggaggcgcgacggtactggccactacctttgcaatgcttgtggcctctatcacaagatgaatggacagaatcgccctctgataaagcccaagcgcagactgtccgccgctaggcgagccggtacatgttgcgctaactgtcagacaaccacgactacactttggcgtcgaaacgctaatggagacccggtgtgtaatgcctgtgggttatactacaagctgcacaatgtaaatcgccctctaactatgaagaaggaagggatccagactagaaacaggaagatgtcaaataaaagtaagaaatctaagaagggtgctgaatgtttcgaggaactttccaaatgtatgcaggagaagagctcccctttttcagcagcagctctggcgggacacatggctccggtcggccacctccctcctttcagccatagtgggcatatcctgcctacaccgacaccaatccacccatccagctctctctcgttcggccatccccacccctctagcatggtgacagcaatgggatag

SEQ ID NO: 224391 - DNA, 1401 bp, synthetic construct
  misc_feature 1..1401: note = Description of Artificial Sequence: Synthetic coding sequence
  source 1..1401: mol_type = other DNA
atggaagtagcccctgaacagccaagatggatggcacatcctgctgtcttaaacgctcagcacccggatagtcatcatcctggactcgcgcataactatatggagccggcacagcttctcccgcctgacgaggtcgatgttttctttaatcacctggattcccaaggaaacccgtattatgccaatccagcccacgctagagccagagtttcgtattcaccagctcacgcaagactgacaggcggacagatgtgccgcccacacctcctgcattcccctggcctgccctggctggacggagggaaagccgcactgtctgccgctgcggctcatcaccataacccttggacggtctcaccattcagcaagacccctttgcacccttcagcagccggaggacctgggggtcctctgagtgtttaccccggtgcaggcggaggctcgggagggggaagtggcagttccgtggcaagtctgacgccaacagccgctcattcagggtcccacctctttgggttccctccaacacccccaaaggaggtgagtcccgatccttccacaacaggagctgcttctcccgcatctagctccgccggaggctctgccgcacgcggagaggacaaggacggtgtgaaataccaagtaagcttaactgaaagtatgaagatggagtcaggcagccccctcaggcccggattagccactatgggaacacaacccgctacccaccaccctatccccacttacccatcgtacgtgcccgcagcagcacacgattacagttcaggattatttcatcctgggggatttctcggcggaccagccagtagtttcacaccaaagcagaggtccaaggctagaagttgttcagagggcagggaatgcgtgaactgcggcgcaacagctaccccactgtggcggcgagacggaacgggacattatttgtgtaacgcgtgtggattgtatcacaaaatgaatggtcagaataggcctctcatcaaaccgaagcgcaggctgaccaccaccaccaccctgtggagacgcaatgcaaatggtgacccagtatgtaatgcatgtggactgtattataaattacacaacgtgaatagaccactgactatgaaaaaggagggcatccagactagaaatagaaaaatgagcaacaagagcaagaagagcaagaagggagctgaatgcttcgaagagctgtctaaatgcatgcaggagaagtcctcaccgttctctgcggctgcgctcgccggtcatatggcgcctgttggacatcttcctccattttcgcattctggccatatactgcccacacctacccctattcacccgagttcctccctgagcttcggccatccccacccaagctccatggtgacagccatgggttag

SEQ ID NO: 224392 - DNA, 1443 bp, synthetic construct
  misc_feature 1..1443: note = Description of Artificial Sequence: Synthetic coding sequence
  source 1..1443: mol_type = other DNA
atggaggttgccccagagcagccacgctggatggcccatcccgcagtcctcaacgcacagcatcctgactcacaccatcctggactggcacacaactacatggaacccgcacaactcctgcccccagatgaggtcgacgtgtttttcaaccacttggacagtcaagggaatccttactacgccaacccagcccacgcccgagccagagtttcttactctcccgcacatgcccgtttaaccggcggacagatgtgccggcctcatttgctccactcaccgggactgccatggttagacggagggaaagcagcactgtcagcagcagccgctcatcaccacaacccctggacagttagtccattttccaagactccgctgcatcctagcgccgcaggcggaccaggtggaccgttgtcagtttatcctggggcagggggagggagcggcggtggttccgggagttccgtcgccagcctaactccaacggccgctcattccggcagtcacctatttggctttccccctacccctcccaaagaagtgtctcctgacccttctaccacgggtgcagcctccccagccagctcatccgctggcggatccgctgccagaggcgaagacaaggacggcgtgaagtaccaagtgtccttgacggaatccatgaaaatggaatccggcagtcccctgcggcctggactcgctacaatggggactcagcctgcaacccatcatccaattccgacatacccctcatatgtgcccgcagccgcacatgattacagttcaggactgtttcatcccggtggctttttaggaggacccgcttcaagttttacccccaagcagaggtccaaggctcggagctgctctgagggcagagaatgtgtgaattgcggcgctacagcgactcctctttggaggagggatggaaccggtcactatctctgcaacgcctgcggtctctatcacaaaatgaatggtcagaacaggcctctgatcaaacccaagagacgcctctctgccgcacggagggcgggaacttgttgtgcaaactgccagacaacaaccactactctgtggcgcaggaacgccaatggggacccggtctgcaacgcctgcggtctctactacaaacttcacaatgtcaatcgacccctcacaatgaaaaaagagggaattcagacgcggaatcggaagatgtcaaataagtctaagaagtctaaaaaaggcgctgaatgttttgaagagctctccaaatgcatgcaggagaaaagctctccttttagcgcagccgcactggcgggacacatggcaccggtgggacatctccccccattctcccactctggtcacatactgccaacacctactcctatccacccctcctcttcactgagtttcggccacccacatcctagctctatggttacagcaatgggatag

SEQ ID NO: 224393 - DNA, 453 bp, synthetic construct
  misc_feature 1..453: note = Description of Artificial Sequence: Synthetic coding sequence
  source 1..453: mol_type = other DNA
atggaagtggctccagagcagcctagatggatggcacatcccgcagtcctgaatgcccaacaccctgactcgcaccaccccggactggcacataactacatggagccagcccagctcctcccccctgatgaggtagacgtgttcttcaatcacctcgacagtcaggggaacccatattacgcaaaccctgcacatgcacgagccagggtttcatatagtcctgcacacgccagattgacgggcggtcagatgtgccgccctcatcttctccatagccctggccttccatggctggatggaggaaaggcggctctgtccgcagcagcggcacaccaccacaacccttggacagtgagcccattttcaaaaacccctctgcatccctcagccgctggaggaccgggaggaccactgtccgtgtacccgggagcaggtggcggtagtggaggatag

SEQ ID NO: 224394 - DNA, 27 bp, synthetic construct
  misc_feature 1..27: note = Description of Artificial Sequence: Synthetic coding sequence
  source 1..27: mol_type = other DNA
atggaggtggcaccagagcagccctag

SEQ ID NO: 224395 - DNA, 1326 bp, synthetic construct
  misc_feature 1..1326: note = Description of Artificial Sequence: Synthetic coding sequence
  source 1..1326: mol_type = other DNA
atgtaccagtccctgccttggccacccacgaccggaagacccccagtgccaactcggagggccgcaccagcacccagctgcacggccagagctcccaggccacgtcagtccacttgtcctcatagaggtgctctgctcagggcaggaccagtcctgcccccaggccgtcggcgtgggttgtgtgtgagacgggcatccggaggatcgagtggaggggctgcaagtggtgctggaccaggcacacagcaggggtcccctgggtggtcgcaggcgggagcagatggggcagcttatacgccccctccagtttcaccaaggttcagtttcccaggaacaacagggtcattggcagccgctgctgccgcagctgccgcaagggaggcagctgcctattcctccggcggaggtgcggcaggcgcaggcctcgcaggcagggaacagtacggccgagccggttttgccggttcttactcatccccttatcccgcatatatggcggacgtcggagcgagttgggccgcagcagccgcagcgtctgctggccctttcgacagcccagtcctgcattctctgcccggacgagcaaatccagcagcccgacatcccaatctggatatgtttgacgacttttccgaaggaagagaatgcgtgaattgcggcgcaatgagcactccactctggcggagagacgggactggacattacttgtgcaatgcttgtggcctgtatcataagatgaacgggatcaacagaccactgattaagccacagcgccgattgagcgctagtaggcgggtcggattatcttgtgctaattgccaaaccacgacaacgaccctttggaggcggaacgctgagggcgagccggtctgtaacgcctgcggcttgtacatgaagctccatggcgtacctagacccctggccatgagaaaggaggggatacagaccaggaagaggaagcctaaaaatttgaacaagtctaaaactcctgcagctccaagtggaagcgagtccctgccacccgcaagcggggcttcctcgaattcaagtaatgcaactacatcgagtagcgaagaaatgcgccctattaagacagagcctggactgtccagtcactatggccattcttcttccgtctctcaaaccttcagcgtgtctgccatgtcaggccacggaccaagtatacacccagtgctttccgcattaaaactaagcccccaaggctatgccagccccgttagccagagccctcaaacctcctccaagcaggattcatggaactccctggttctcgctgattctcacggggacattatcacggcctag

SEQ ID NO: 224396 - DNA, 1329 bp, synthetic construct
  misc_feature 1..1329: note = Description of Artificial Sequence: Synthetic coding sequence
  source 1..1329: mol_type = other DNA
atgtatcagagcctggccatggcggctaatcacgggccacctcctggtgcatatgaggcagggggaccaggggcattcatgcatggtgccggagccgcatcatctccagtatacgttcctacgcctcgggtgccgagtagtgtgctgggcctgagctacctacagggcggtggggcaggcagcgcctccggtggagcctccggcggatcatccggaggtgccgcatcaggtgcgggacctggcactcagcaggggtctcccggttggtctcaggcaggggctgatggggctgcttacacacctccacccgtgtctcctcgtttttctttcccgggaacgaccggaagcctcgctgcagcagctgccgctgccgcagctcgggaagcagcagcctattcctcgggaggcggagccgcaggtgcaggcctcgcaggacgggaacagtacgggcgagctggtttcgccggttcctactcgagcccctaccccgcttatatggcagacgttggagctagctgggcggctgctgcagcagcaagtgcagggccttttgattccccagttctgcactccctaccgggacgtgcgaacccagcagccagacaccccaacctcgacatgttcgatgacttttctgaaggcagagagtgcgtgaactgcggcgctatgagtactccgctgtggcggagagacggcaccggccattacctgtgtaatgcgtgtggcctttaccataaaatgaatgggatcaatcgaccgcttatcaaacctcaacgaaggctgagcgcctccagaagagtagggctgagctgtgctaactgtcaaaccactactaccactctatggcgtaggaatgctgaaggggagccagtttgcaacgcttgcggcctctacatgaagctgcacggggtcccgcgacccctggcaatgagaaaggaaggcatccagacacgcaagcgcaagcccaaaaacctgaataaatcaaaaacgccggcagcgcctagtggttcagagagtctccctcccgctagtggggcaagcagtaattcaagcaatgctacaacatctagtagtgaagaaatgagacccattaaaaccgaaccaggcttaagttctcattacgggcactctagcagtgtaagccagaccttctcagtgagtgctatgtcaggccacggccctagcatccacccagtgcttagcgccctgaagttgagccctcaaggctacgcatcaccagtcagccagagcccgcagacgtcatccaagcaggatagctggaacagcttggttttggctgacagtcacggcgacatcattacggcatag

SEQ ID NO: 224397 - DNA, 528 bp, synthetic construct
  misc_feature 1..528: note = Description of Artificial Sequence: Synthetic coding sequence
  source 1..528: mol_type = other DNA
atgttcgatgacttcagtgaagggcgagagtgtgtgaattgtggagccatgagtactcccctgtggagaagagatgggactgggcattatctgtgcaacgcctgcggactgtaccacaagatgaacggtatcaaccggcctcttataaagccccagcgacggttgagcgcgagtagacgcgtgggcctcagctgcgcaaattgtcagacaactacaacaaccctttggcgtcggaatgccgagggcgagcctgtctgtaatgcatgtggattgtatatgaagttgcacggcgttcctcgaccgctggccatgcggaaggagggtatccaaacgagaaagagaaagcctaaaaatctgaataaaagcaaaactccagctgcgccttctggtagcgaaagcctccccccagcatcgggagcatccagcaactcctcaaatgcgaccactagctcatctgaagaaatgagaccgataaagaccgagcctggcctcagctcacactatggacactcttcatccgtttcttag

SEQ ID NO: 224398 - DNA, 354 bp, synthetic construct
  misc_feature 1..354: note = Description of Artificial Sequence: Synthetic coding sequence
  source 1..354: mol_type = other DNA
atgtaccagtcgctagccatggctgccaatcacgggcctcctccaggcgcatatgaagctggtggtcccggagccttcatgcacggtgctggggcagcaagttcaccggtgtacgttccaacaccacgggtccctagttcagttctgggcctgagctacttacagggagggggagccggtagcgcctctggcggagcgagcggtgggtcttccggcggagctgcaagtggagccggacctggaacccaacaaggatcccccggatggagccaggccggagctgacggcgctgcgtacacaccacctcccgtgtcccccaggttcagcttccctgggaccaccggctcgttgtag

SEQ ID NO: 224399 - DNA, 711 bp, synthetic construct
  misc_feature 1..711: note = Description of Artificial Sequence: Synthetic coding sequence
  source 1..711: mol_type = other DNA
atgtttgatgacttctctgagggaagagaatgtgtaaactgtggcgcaatgtccacccccctctggcggcgtgacgggactggccattacctatgcaacgcttgcgggctatatcataaaatgaacggtattaatagacccctaattaaaccccagaggaggttgagcgccagccgaagagtcggcctgtcctgcgcgaactgtcagactacgaccaccacgctctggcgtcgcaatgccgaaggcgagccagtgtgcaacgcctgcgggctttacatgaagctgcatggcgtgccaagacccttggctatgcgcaaggaaggaatccagacaagaaaacgaaaaccaaagaatctaaacaaaagcaagactcccgcagcacctagcggctctgagagtctgcctcctgcctctggggctagtagcaactcctccaacgcaacgacgtcaagctctgaagaaatgcgccctatcaaaacagagcctggactgtcatctcactatggccacagctcctcagtgtcccagactttctctgtctccgctatgtcaggtcacggaccttccatccaccctgtgttatctgcccttaaattgtccccgcaaggctatgcttctccagttagtcagtctccccagaccagctccaaacaggattcctggaactcgctagtccttgccgacagtcacggcgatatcataacagcatag

SEQ ID NO: 224400 - DNA, 1332 bp, synthetic construct
  misc_feature 1..1332: note = Description of Artificial Sequence: Synthetic coding sequence
  source 1..1332: mol_type = other DNA
atgtaccagtccctcgccatggcagcgaatcacggtcctccacctggagcctacgaagccggtggtccgggtgccttcatgcatggggctggagcagcttcatcccctgtgtatgtacccaccccgagagtgcctagctctgtcctcggcttaagctacctgcagggagggggagcaggatcagctagcggaggagcgagcgggggatcatctggcggtgccgctagcggcgctggccctggaactcagcagggctcacccggatggtcacaggcaggagccgacggagcagcctacactcctcctccagtgtcccccagattcagttttcccggaactaccgggtctctcgctgctgcggctgcagctgcagccgctcgggaagccgctgcatattcaagcgggggaggcgcagccggagctggactggcagggcgagaacagtacggcagagctgggttcgccggatcgtactccagcccatatcccgcatatatggccgacgtcggagccagctgggccgctgccgcagcggcatccgcaggtccgttcgattcccctgtcttacactccctgcccggtcgcgctaatcccgctgcacgccacccgaacttggttgacatgttcgacgatttcagtgaaggccgtgagtgtgttaactgcggggctatgagcactccgctatggcggagggatgggaccggccattacctgtgtaatgcgtgtggattataccacaagatgaatggcatcaatcgtccactcattaagcctcagcgcaggctgagcgcctcccggagggtcggactttcctgcgcgaactgccaaacaacgacgacaacactttggaggcggaatgccgaaggcgagcccgtctgtaacgcctgtgggctatacatgaagttgcatggagttcctcgccctttggctatgaggaaggaggggatccaaacccggaagcgcaagccaaagaaccttaataaatcaaaaactcctgctgctccgtccggctctgaatccctcccaccagctagcggggctagttcaaactccagcaacgccactacctctagcagtgaggaaatgcgacctatcaagaccgagcccggtctcagttcccattacggacattcatcgagcgtgagccagacttttagcgtcagcgccatgtcgggacatgggccatccatccatccagttctttccgctctaaaactgagtccacagggttatgctagcccagtttcgcagagcccacagacctcttcaaaacaggatagctggaattctctggtgctcgctgatagccatggcgacataattacagcatag

SEQ ID NO: 224401 - DNA, 1194 bp, synthetic construct
  misc_feature 1..1194: note = Description of Artificial Sequence: Synthetic coding sequence
  source 1..1194: mol_type = other DNA
atgtatcaaagcctggctctggccgcatctccacgtcaggcagcgtatgccgacagcggctcttttcttcatgctccgggagctggcagcccgatgtttgttcctccagccagagtaccgagtatgttaagttacctgtctggatgcgaaccctctcctcaaccacctgaactggccgcacgccctggttgggcccagactgccacagccgactcaagcgcgttcggacctggttcacctcatccaccggcagcacacccgcctggtgctacggctttcccttttgctcacagccccagcgggcctggcagcggcggttcagcaggcggtcgcgatggctccgcgtatcagggagccttgctgccccgtgaacagtttgccgctccactgggccgaccagtgggcacttcttatagcgcaacatacccagcttatgtgtctcccgacgtcgcacagtcctggacagctgggccatttgacggctctgtgttacatgggctcccagggaggcggcctacttttgtgtctgattttctggaagagttccccggagaaggcagggagtgtgtaaattgcggggctctgtcgacccccctctggcgtcgcgacggtacagggcattatctttgcaatgcctgcgggctgtaccataaaatgaatggggtaaatcgtccactggtgagaccccagaagcgactgagctcatcacggagggctggattgtgctgcactaattgtcatactaccaatacgacactctggcgcagaaactctgagggagaaccggtgtgcaacgcttgtgggctgtatatgaaactgcacggcgtccccagaccccttgctatgaagaaggagtctatccaaaccagaaagagaaaacctaaaacaattgccaaagcgcgaggctcttcagggtctaccagaaatgcttcagctagccccagcgctgttgcttccactgattcttccgctgccacatctaaggccaagcccagcttggcaagccctgtttgtccgggtccaagcatggctccccaggcctccggccaggaagacgacagcctcgctcctggccatctagaatttaagttcgagccagaggactttgcattcccttccacagccccatcaccccaggccggactcagaggcgctcttagacaggaggcttggtgtgcccttgcgttagcttag

SEQ ID NO: 224402 - DNA, 1194 bp, synthetic construct
  misc_feature 1..1194: note = Description of Artificial Sequence: Synthetic coding sequence
  source 1..1194: mol_type = other DNA
atgtatcagagcctggcgctggccgcttctcccagacaagccgcatacgcggactcgggatcttttttgcacgcaccgggtgcgggatcccctatgttcgtgcctccggcaagagtcccgagtatgcttagctatctcagtgggtgcgagccttcaccacagcctcccgagttggctgcaaggcctggctgggcacagaccgcaaccgccgacagcagcgccttcggccctggcagcccacaccctcctgccgcacatccacctggcgctaccgctttcccctttgcccattctccgagcgggcctggttcgggcggttctgccggtggcagggatggctccgcctatcagggagccctgctccccagggagcagtttgctgcgcctctagggcgtcctgtcgggaccagctactcggcaacctatcctgcatacgtcagccctgacgtggcgcagagctggacagccggtccatttgacggatccgtcctgcatgggctgccgggtaggaggccgacattcgtttctgattttctggaagaattccctggcgagggaagagagtgcgtgaactgtggtgcgttgtccactccgctctggcggagagatggtactggccactacctgtgcaatgcctgtgggctctaccataagatgaacggggttaatcggccattggtaaggcctcaaaagcggctgagttcctcacggagggccggtctatgctgtactaattgtcataccacaaacactaccttgtggagaaggaactcagagggcgagcctgtgtgcaatgcatgcgggctttatatgaaactccatggagtcccacggcctctggccatgaaaaaggaatccattcagacgcgaaagcggaagccaaagaccatcgctaaggctcgtggctcctctgggagtaccaggaacgcgtccgcctcccctagcgccgtggcttccactgactccagtgccgctacctccaaagctaaaccgtccctggcgtctcctgtttgccccggaccctccatggctccccaggcttccgggcaagaggatgacagcctggcaccgggtcatctcgaattcaagtttgagccagaggattttgctttcccgtcgaccgccccatctcctcaggcaggtcttagaggagccctgcggcaggaggcttggtgtgctcttgcactggcttag

SEQ ID NO: 224403 - DNA, 1254 bp, synthetic construct
  misc_feature 1..1254: note = Description of Artificial Sequence: Synthetic coding sequence
  source 1..1254: mol_type = other DNA
accgccacagctgtgccttgtagaccaccctgcccactggtcaagacaacgcctgggcgtatgtatcaatcactcgccctagcggcaagcccaaggcaggctgcctacgctgattcagggagctttttgcacgctcctggcgcagggtcccctatgtttgtaccccctgcccgtgtcccatctatgctctcgtatttgtccgggtgcgagccgtctccccaacctcccgagctggcagcccgacccggttgggcccagaccgcaacagccgactctagcgcctttggacctggatccccacacccacccgctgcacatccacccggagctaccgccttcccttttgcgcattcaccatccggcccaggttccgggggttctgctgggggtcgagatggcagcgcttaccagggcgcactgctgccaagggaacagttcgctgctccactgggccgacccgttggcaccagttatagcgcaacttacccagcctacgtgtcacccgacgtggctcagtcctggactgccggtccgttcgatggctccgtactacacggtctcccgggaaggcggccaacgtttgtgtccgacttcttggaggagtttcctggtgagggaagagagtgtgtcaattgcggggcactgtccacccccctgtggcggcgagacggtactggtcattacctctgcaacgcctgtggtctctatcacaaaatgaacggagtgaaccggcctttggtaagaccacagaaaaggctaagtagtagcaggcgggctgggctgtgctgtactaattgtcacaccacgaatactacactgtggaggcggaatagcgaaggcgagccagtgtgcaatgcctgcgggctctacatgaagctgcacggggtgcccagaccgctggccatgaagaaagagtcaattcagacaaggaaaagaaagccgaagaccatcgctaaggccagggggtcctccggctcaactagaaatgcgagtgcctcaccttctgctgtggcctctacagatagcagtgcagcaacaagtaaggccaagccgagcttggcctctcccgtatgccctgggccatctatggctccgcaggcgtccggtcaagaggatgactcccttgctcctgggcatttggaatttaagttcgagccagaagactttgctttcccctcaacagctccgtcacctcaggcaggcctgaggggcgctctgagacaggaggcttggtgcgccctggccttggcctag

SEQ ID NO: 224404 - DNA, 1788 bp, synthetic construct
  misc_feature 1..1788: note = Description of Artificial Sequence: Synthetic coding sequence
  source 1..1788: mol_type = other DNA
atggcccttacagatgggggttggtgcctccccaaaagatttggcgctgccggagctgatgcttcagactctagggctttccctgctcgggaaccatccacacccccaagcccaatctcctctagctcttcctcgtgttccagaggcggagaacggggtcccggaggggcatccaattgcggaaccccccagctggacactgaagccgctgccggtccgccagcgcgatcacttctgctgagtagctatgcttcccacccgtttggggcaccgcacggccctagtgcacccggtgtggcagggccagggggaaatctgagctcatgggaagatttgcttctttttaccgaccttgatcaggccgctacggcctccaaactcctgtggtcttcgagaggtgcaaaattatccccattcgctcctgagcagcctgaggaaatgtatcagaccctcgctgccctatctagtcaaggaccagcagcttatgatggggctccgggaggatttgtacattctgccgctgcagcagcagccgcagcagccgctgctagtagtccggtgtatgtgcccacgactcgtgtgggaagcatgctgccgggattaccctatcatctgcaaggcagtgggtcaggccctgctaaccacgctggaggcgctggtgctcatcctggctggccacaggcgtctgccgactcgcctccgtatggaagcgggggaggggcagccggaggaggtgccgcagggccaggaggagcaggttccgccgcagctcacgtgagcgctcgctttccgtacagccccagcccccctatggcaaatggagcagccagagaaccaggtggctatgccgctgcaggctcgggaggtgcgggaggcgtcagtggcggaggcagcagtctggcagccatgggcggaagggagccccaatattcttcactttcggccgcaagacccctgaatggaacctatcaccaccatcatcaccatcatcatcatcatccgtccccctactcgccatatgtcggcgcacctcttacccccgcttggcccgcagggcctttcgaaacacctgttcttcattcccttcagagcagagcaggggcacctctaccagtccccaggggaccctcggctgacctgttggaggacctttctgagtctcgcgagtgcgttaactgtggcagtatccagacccccttgtggcgaagagacgggactggtcactatctgtgtaatgcctgcggactgtattccaaaatgaatggactgagtaggcctctaatcaaaccgcagaaacgtgtcccgtcttcccggaggctgggtctgagttgcgcgaattgccataccacaactacgactctatggcggcgaaacgccgaaggtgagccagtctgcaatgcatgcggtttgtacatgaagctccacggagttccacggccactggctatgaaaaaagaaggaattcagacccgaaaacgtaagccaaagaacattaacaaaagtaagacttgttcagggaattcaaataatagcatacccatgacaccgacttctacttctagtaactcggacgattgttctaaaaacacgtcccccactacacagccaaccgcatctggggctggtgctccagtgatgaccggcgcaggagagtctacgaaccccgagaactcagaactcaaatatagtggacaggatgggctgtatatcggcgtatcactggcatctccagcagaagtgacaagctccgtccggccagatagctggtgtgccctggcactcgcgtag

SEQ ID NO: 224405 - DNA, 8015 bp, synthetic construct
  misc_feature 1..8015: note = Description of Artificial Sequence: Synthetic coding sequence
  source 1..8015: mol_type = other DNA
atggctgccgacactcaggtgtccgagacactgaagcggttcgccggaaaggtgacaacagcctctgtgaaagagagacgcgaaatcctctctgagctgggcaagtgtgtggcaggaaaggatctgccggaaggggcagtcaaaggtctttgcaagctgttctgcttgacccttcaccgctaccgcgatgcggcatctagaagagctctgcaggccgctatccagcagttggcagaggcccaacctgaggccactgccaagaatctgctccactcactccagtcctctggaataggctcaaaggctggtgttccctccaagtcgtccggttccgctgctctactggccctgacatggacctgcttactggtgcgcatcgtgtttccctccagggcaaagagacaaggggacatttggaataagctggttgaagttcagtgtctactgctgctcgaagttttaggagggagccataagcacgccgtcgacggagctgtcaagaagctgactaagctctggaaagagaatcccggactagtagagcaatacctcagcgcaattctgagcctggagccgaatcagaactacgccggaatgctaggccttctggtccagttctgcacatcccacaaggagatggatgttgtgtcgcagcataaatccgcactgctggacttttatatgaagaacatcctgatgtccaaagtgaagcctccaaaatacctccttgattcgtgtgccccactactccgctatcttagccactctgagttcaaagatttaattctgcctactatccagaagagcctccttagaagcccagagaacgttattgagaccattagttccctgctcgcgagcgtgacactggacctgtcccagtatgccatggatatagttaaaggcctggcgggtcacctcaaatcgaacagccctcgactcatggatgaggctgttctggcccttcgcaacttagctagacaatgttccgattcgtctgctatggagtcattaaccaaacacctgtttgcaatactggggggatctgaaggaaaacttacggtggttgcgcagaagatgtctgtactgtctggcatcggctctgtgagccaccatgttgtatctggcccatcttcgcaagttctcaatggcatagtggctgaactgttcattcccttcctgcagcaagaggtgcacgagggcaccctggtacacgcagtctctgtcctagctctgtggtgcaaccgattcaccatggaggtgcctaaaaaactcacagagtggtttaagaaggccttctctctgaagacctcaacatctgctgtcaggcacgcatatctgcagtgcatgctggcctcttaccggggtgatacgctcctgcaagccctggacttactgccactgctcatacagacagtagaaaaagctgccagccagtccacacaagttcctactattactgaaggagtggccgctgccctcctactgcttaagttgtctgtggccgattcacaggccgaggctaagctatctagcttctggcagttaatcgttgacgaaaaaaaacaagtctttacttctgagaagttccttgtgatggcgtctgaagatgcactgtgcactgtgcttcacctcacagaacgcctgttcctcgaccatccgcaccgactcacaggcaataaggtgcagcagtaccaccgcgcactggtggcagtgctgctctctaggacttggcacgtgagaaggcaggctcagcagaccgtcagaaagctgctgagcagtcttggcggtttcaaactggctcacgggttgttagaggaactgaaaacagtcctttctagccacaaggttttaccactagaggctctggtgacagatgcaggcgaagttactgaagctggcaaggcttacgtacccccacgagtcctgcaggaggccctgtgtgttatctccggcgtccccggacttaagggggatgtgaccgataccgaacagctggctcaggagatgcttatcattagtcatcacccaagcttggtggccgtgcagtctggtttgtggcccgcactcctggctaggatgaaaatagaccccgaagcctttatcactaggcatctggaccagataattcctagaatgaccacacagtctcccctgaatcagtcgtcaatgaacgctatggggtcattaagcgtcctgtcccctgatcgtgttctccctcagctcatctccacaatcactgctagcgtgcagaaccctgcgctcagattggtgacccgggaggagttcgcaattatgcaaactcccgcaggcgaactctatgacaaatcaattatccagtccgctcaacaggattcaatcaagaaagctaatatgaaaagggaaaataaggcgtatagctttaaagagcagatcattgagctggaacttaaggaggaaattaagaagaaaaaaggtatcaaagaggaggtccaactcacaagcaagcaaaaagaaatgcttcaagcgcagttggaccgtgaagcccaggtgaggcgtcgacttcaggagctggacggggaactggaggccgcattaggtctgctcgacatcattctggctaagaatcctagcggcctgacgcagtatattcctgtccttgtggactcttttctaccgctgctgaagtcccctctggccgctcctcgcatcaagaatcccttcctatctctcgcggcatgtgtcatgccatcaaggttgaaagcactggggacattggtcagtcatgtgacactcaggctgcttaaacccgaatgcgtcctcgataagtcctggtgtcaagaggagctctcagtggcagtgaagagggctgtgatgctgctccatacacacaccatcacgtccagggttggcaagggggagcctggcgcagcccctttaagcgcaccggctttctccctcgtgtttccttttttgaagatggtcttaacagagatgccacatcatagcgaggaggaggaagaatggatggctcagatcctgcaaattttgaccgtgcaggcacagctgagggcctcacccaacactccaccaggacgagtggatgagaatggtcccgagttgctgcctcgcgtggcaatgttgcgcctcctgacttgggttataggaactgggtcacccaggctgcaggtcctcgccagtgacaccttaaccactctgtgcgcttcctccagtggcgacgacggttgtgctttcgccgaacaggaagaagtcgacgtgctcctgtgtgccctccagtctccatgtgccagtgtgcgggagactgtgcttaggggcttgatggagctgcacatggtgttgccggcaccggacaccgatgaaaaaaacgggcttaacctgctccgacggctgtgggtggtgaaatttgataaggaagaagagatcaggaaactggccgagcgcctgtggtcaatgatgggactggacctccagcccgatttgtgctctcttctcattgatgacgttatctaccacgaggctgccgtccgtcaggccggagccgaggctctttctcaagccgtggcacggtaccagaggcaagccgctgaagtgatggggaggctaatggaaatttatcaggagaagctctacaggccgcctcctgtgctagacgccttgggtcgcgtgatttccgaaagtcctcctgatcagtgggaggcccgttgcggtctcgcgctggccctgaataaactcagtcagtatttagacagcagtcaggttaagccactttttcagtttttcgtgcctgacgccctcaacgatagacaccctgatgtgcgaaagtgtatgctggacgctgccctcgcgaccctcaacacacatggaaaggagaacgtgaattcactcctgcctgttttcgaagagtttctaaaaaacgccccaaatgacgcttcatatgacgctgtgcggcagagcgtggtcgtgctcatgggatctctggccaagcatcttgacaagtctgatccgaaagtcaaaccaatcgtcgcaaaactcattgcagcactttcaacaccaagccagcaggtacaagagagcgtggcctcatgtctgccccctctcgttccagccataaaggaagatgctggcggaatgatccaacgcctgatgcagcaactgttggagtccgacaaatacgccgagcggaagggcgcagcatacgggcttgctggtttggtgaagggccttggcattctgtcgctaaaacagcaggaaatgatggcagctcttacagatgctattcaagacaagaagaattttcgacgcagagaaggtgctctatttgcattcgaaatgctctgtaccatgctgggaaaactttttgagccgtatgttgttcacgtgctgccgcatctgttactctgcttcggagacgggaaccaatatgtccgagaggctgcggatgactgtgcaaaggccgtgatgtctaatctgtccgcccacggggtgaagctggtcctccccagtttactggccgctttggaggaagaaagctggcgtaccaaggctggtagcgtggagttgttaggtgctatggcctattgcgctccaaagcagctctccagctgcctgcccaacattgtccctaagctaactgaggtactgaccgactcgcatgtaaaggtgcagaaagccggacagcaggcgcttaggcaaatagggagtgtgattcgcaatcctgagatcctggcaatcgccccagtgttgctggatgcactgaccgaccctagtcggaagacgcagaaatgcctacaaaccctactagataccaagttcgttcactttatagacgccccttcccttgcgctaattatgcccatagtgcagcgggcattccaggacaggagcacagacacccgcaaaatggccgctcagataatcggtaatatgtactcgttgactgatcaaaaagatctcgccccttatttacccagtgtgacccccggtctgaaggctagcctccttgaccccgtccctgaggtccggactgtttccgcaaaggcgcttggcgctatggtgaaaggaatgggtgaaagctgttttgaagacctgctgccctggttaatggaaactctgacctatgagcaatcctctgttgatcgcagcggcgctgctcagggcctcgcagaggtgatggccggacttggagttgagaaactcgaaaaactaatgcccgagatcgttgcgacggctagtaaggtcgatattgcaccgcatgtgagggatggctacattatgatgtttaactatctgccaatcacttttggggacaagttcacaccttacgttggccctataatcccctgcatcctgaaggcattagccgatgaaaatgagttcgttcgtgatactgcactgcgcgctgggcagcgggtgatctcaatgtacgctgaaacagctattgctctgttgctgcctcagctggagcaaggcctgtttgatgatctgtggcgaatccgcttttcttcagtccagctgctgggagacctgctctttcatatttctggtgtgacagggaaaatgactactgagacagccagtgaggatgataactttggaacagcgcagtccaataaggctattatcaccgccttaggcgtggaacggagaaacagggtactagccggattatacatgggaagaagcgatacacagctagtcgtgcgccaggcatctctgcacgtctggaaaatcgtagtctcaaacactcctcgaacccttcgtgagatcctacctactctattcggcctcctactgggatttctggcgtcaacatgtgcagataagcgcactattgccgcacgcaccctgggcgatctcgtgagaaagctgggagaaaagatcctccccgaaattataccgattctggaagaagggctgcgtagtcagaaatccgatgagaggcagggagtctgtatcggactgtccgagatcatgaaaagcacttcacgcgacgctgttctctacttctctgagtccttagttcctactgccaggaaagcactctgcgatccactggaggaggtcagagaggctgcggctaaaacattcgaacaattgcactccacaattggccatcaggctctagaggacatcttgccatttttgctgaagcaactggacgacgaagaggtttctgagtttgccttggatggtctgaagcaggtcatggctataaaatccagagttgtcttgccatatctggtccccaagctcactactcctccagtgaacactcgggtgctggctttcctctccagcgtggccggagacgccttgacaagacatctgggggtgatcctgcccgctgtcatgctagcgttaaaagagaaacttgggaccccggacgagcagctggagatggctaactgtcaggcggttatcctttcggtggaggatgacaccgggcacaggattattatagaatatctccttgaagccaccaggagccctgaggtggggatgcggcaagcagcagcaatcatcttaaatatctactgttcccggtctaaggcagactataccagtcaccttaggtctctggtgtccggattaatacgtttgttcaacgattcctctccggtcgtcctggaagaatcctgggacgctctgaacgccatcaccaagaagttggatgcaggaaaccagctggcattgattgaagagcttcataaggagataagactaatcggaaacgaaagtaaaggtgaacacgtgcccggtttttgcctgcctaaaaagggcgtcacatccattctccccgtgttacgcgaaggggttctcactggttctcccgagcagaaagaagaagctgccaaagctcttgggctcgtaataaggttaacatccgctgacgccctgaggcccagcgtcgtcagcattaccggacctctgatccggatcctgggggatcggttttcctggaacgtgaaagctgctttattagagactttgagtctgctgctggccaaggtgggaattgccctgaaacccttcctgccacagctccagaccacttttacaaaggccctgcaggactctaaccggggagtcaggctaaaagcggctgacgcactgggaaagttgatctccattcacatcaaggtggaccctcttttcactgagttactgaatgggattcgggcaatggaagaccctggcgttagagatacgatgctccaggccctcaggttcgtgatccaaggagctggcgcaaaagtcgacgctgtcattagaaagaatatcgtctctctgcttctgagcatgcttggccacgacgaggacaacactagaattagcagtgctggatgcctcggagaactatgcgcctttctaacagaggaagagctttccgcggtgttacaacaatgcctgctggccgatgtgtccggtattgactggatggtaaggcacggtaggtccttggccctgtctgttgctgtgaacgtggcgccagggagactttgtgccggacgctactcctctgacgtgcaggaaatgatcttgagtagcgccaccgctgaccgcattcctattgccgtgagcggcgtgagaggaatgggcttcctgatgcgccaccacatcgaaacaggtgggggtcaacttccagcaaaattaagcagcctgttcgtgaagtgtctgcagaatcccagtagcgacataagactggtggcagaaaaaatgatctggtgggccaataaagatcctttaccaccattagatcctcaagccattaagcccatactcaaggcactgctagataacactaaggacaagaacacagtggttagagcttactcagatcaggccatcgtaaatctcctaaagatgaggcagggagaggaggtttttcaatctctgtctaaaattttagacgtggccagtctcgaggtccttaacgaggtgaatcgaagatctctcaagaaattggcaagccaagccgatagcacagagcaggtggacgatacaatcctgaccta

SEQ ID NO: 224406 - DNA, 1443 bp, synthetic construct
  misc_feature 1..1443: note = Description of Artificial Sequence: Synthetic coding sequence
  source 1..1443: mol_type = other DNA
atggcacagcatgacttcgctccggcatggctgaatttccccacgcccccatcttccaccaaggtcctgacgtcttccttgaagtcaagcttgaattttgaaaaacactctgagaatttcgcatggacggagaacagatatgatgttaatagaaggcggcacaatagctctgacgggttcgatagtgcaataggtcgccctaacgggggaaatttcgggcgtaaggaaaagaatggctggcgcacccatgggaggaatgggaccgagaatattaatcacaggggcggttaccatggaggttcttcaagaagcaggtcttctatcttccacgccggaaaatctcagggcctgcatgaaaataatattcctgacaacgagaccggcagaaaagaggataaacgtgaacgcaaacaatttgaggccgaggacttcccttcgcttaaccctgagtacgaacgcgaaccgaatcacaacaagtcactggccgctggagtgtgggaatacccccctaacccgaagagtcgagctccccgaatgctggtgatcaagaagggcaacaccaaagatctgcaactctcgggctttcctgtggtggggaatctgccgagtcagccagtgaagaacggcaccggccctagtgtgtacaagggtctagtccccaagcccgctgctccccctactaagccaacccagtggaagtcccagactaaagagaacaaggtcggcacttcttttcctcacgaaagtaccttcggagtggggaatttcaatgcctttaagtctaccgccaaaaatttcagcccatccactaacagtgtcaaagaatgcaatcggagcaatagttccagccctgtggataagcttaatcaacagccgaggctcacaaagctgacgcgcatgcgcaccgacaaaaagtctgaatttctgaaagcactgaagagagaccgagtggaagaagaacatgaggacgagtccagggctgggtccgaaaaggacgacgactctttcaacttacacaacagtaactccactcatcaggaacgggacatcaatcgcaactttgatgaaaacgaaattcctcaggaaaacggtaatgccagcgtgatcagccagcagataataaggagtagtacgtttccccagacagacgtgctgtcgtcgtctctggaggctgagcaccgcctccttaaagagatgggttggcaggaggactcggagaatgacgaaacctgtgctccattgacggaagacgagatgcgcgaattccaggtgatatccgagcagttgcagaaaaatggactccgaaaaaacggcatactgaaaaacggattgatctgcgatttcaagtttggcccttggaaaaactccacttttaagcctaccaccgagaatgacgacacagagacaagcagtagcgacactagtgacgacgatgatgtatag

SEQ ID NO: 224407 - DNA, 1482 bp, synthetic construct
  misc_feature 1..1482: note = Description of Artificial Sequence: Synthetic coding sequence
  source 1..1482: mol_type = other DNA
atggcccaacatgatttcgctccagcctggcttaatttcccaacacctccgtcctccacaaaaagttctctgaatttcgagaagcacagtgaaaatttcgcctggacagagaacaggtatgatgtcaaccgaagacgtcataatagttccgacggatttgactctgctatcgggaggccaaacggtggaaacttcggtcgcaaagaaaagaatggatggcgcactcatggccgaaatggcaccgagaacatcaaccatcgcggagggtatcacggcggttcatctagaagtcgcagctccatcttccacgccggaaagtctcagggcctgcacgagaataacataccagataatgaaacggggagaaaggaggataagcgcgaaaggaaacagtttgaagctgaagactttccctcgttgaaccctgagtatgaacgagaacccaaccacaacaaatccctggccgctggagtctggggcctccatgctcagactcacacctatcctaccaaaaagataagccaggcaccactgcttgagtatcctccaaaccccaagtctagggccccacgaatgctcgttattaagaagggtaataccaaggatttacagctttccggatttcctgtagtgggaaatctgccgagccagcctgtgaagaatggcaccggaccctccgtttacaaaggcctggtcccaaagccagccgcacctcccacgaagcctacacagtggaagtcccagactaaagagaacaaggtgggcacctcctttcctcatgagagcacctttggagtaggcaactttaacgcgtttaagtccactgccaagaacttctccccctctacgaatagcgtgaaagagtgcaacagaagcaattcttcctctcccgtcgacaaacttaatcagcagccacggctcaccaaactgactcgcatgcgtactgacaaaaagtccgaatttctcaaagccctgaaacgtgatagggttgaagaagagcatgaggatgaatcacgcgcagggagcgaaaaggacgacgattctttcaatctgcataattctaactccacccatcaggaacgtgacataaatcggaacttcgatgaaaacgagattccccaagagaatgggaatgcttcagtgataagtcaacaaatcatcaggagcagtacatttccacagactgacgtcctctccagctcactggaagcagaacaccgacttttgaaggaaatgggttggcaagaagatagtgagaacgatgagacttgtgcccctctgacggaggacgaaatgagagaatttcaagtgatttcagagcagcttcagaaaaatggtctgagaaaaaatggcatcttgaaaaacgggctgatttgtgactttaagttcggcccatggaaaaactcaacatttaaaccgacaacagagaatgacgacaccgaaaccagtagcagcgatacaagcgatgatgacgacgtctag

SEQ ID NO: 224408 - DNA, 1482 bp, synthetic construct
  misc_feature 1..1482: note = Description of Artificial Sequence: Synthetic coding sequence
  source 1..1482: mol_type = other DNA
atggctcagcatgatttcgcccctgcctggcttaatttcccgacgcctccaagttccactaaatcatcactgaactttgaaaagcacagtgagaattttgcttggacagagaaccgttacgatgtgaacagacgacgccataactcatctgacggcttcgactctgccattggcagaccaaacgggggaaacttcggacgcaaggagaaaaatggctggcgtacccatgggagaaatggcacagagaacatcaaccacagaggcggttatcacgggggatctagccgctctagaagctctatctttcacgcaggcaagagtcagggccttcacgagaacaatatcccagacaacgaaaccggccgaaaagaggataaacgtgagcggaagcaattcgaagcagaggattttccaagcctgaaccccgagtacgaaagggagccgaaccacaataagagccttgctgcgggagtgtgggggctccacgctcagacccacacctatcccactaagaaaatcagtcaggcgccactgttagaatacccccctaaccccaagtcccgtgcaccgcgtatgcttgtgattaaaaaaggaaatacaaaagatcttcaactctcaggctttcctgttgttggaaacttgccgtctcagccagtcaagaatggtacagggccatctgtttataagggcctggtccctaagccggctgcccctcccaccaaacccacacagtggaagagccagaccaaagagaacaaggtcggaaccagtttcccccacgagagtacatttggtgtgggaaattttaacgcttttaaaagcactgctaaaaacttttcccccagtacaaattccgtcaaagaatgcaatcgatctaacagtagctccccggtggacaagctgaatcagcagccccgtctcactaaattgacaagaatgagaactgacaagaagtccgagttcttgaaggcactgaagcgggatcgggtcgaggaggaacacgaagatgagagtcgggcaggatcagagaaggatgacgatagctttaacctgcacaacagcaattccactcaccaggaacgagacatcaaccgcaatttcgatgaaaacgaaatacctcaggagaatgggaatgcctccgtgatctctcagcagatcatcaggtcatcaaccttcccccagaccgacgtgctgagcagttcactggaggctgagcaccggctattgaaggagatgggttggcaagaagactctgaaaacgatgagacgtgcgcccctttgacagaggatgaaatgagagagtttcaagtgataagcgaacaactgcagaaaaacggactaagaaaaaatggaattcttaaaaacggtctgatttgcgactttaaattcggcccttggaagaactccacattcaaacccaccaccgagaacgatgacacggagacatcctcatcggatacctccgacgacgacgatgtgtag

SEQ ID NO: 224409 - DNA, 1422 bp, synthetic construct
  misc_feature 1..1422: note = Description of Artificial Sequence: Synthetic coding sequence
  source 1..1422: mol_type = other DNA
atggctcagcacgactttgcccctgcttggctgaacttcccaacccctccatccagcacaaagagctcattaaacttcgagaagcactcagaaaatttcgcttggaccgagaatcgctacgatgtgaatagaagaagacacaacagctcagatggcttcgactccgccatcggacggcctaacggcggaaatttcggcaggaaagagaaaaatgggtggagaacccatgggaggaatggcacggagaatatcaatcaccggggtggctatcacggaggctcctcgcgctctcgcagctcaatatttcacgctggcaagagccaaggccttcacgaaaacaacattccagataacgaaacaggaagaaaagaggataagagggagaggaagcagtttgaggcggaggactttccctcacttaaccctgagtacgagcgtgagcccaaccataacaagtctctagctgccggagtttgggaatacccgcctaacccaaaatcccgcgctccaagaatgctggtgatcaaaaagggcaatacaaaggacctacagctgtcaggcttccctgttgtaggcaacttgcctagtcaacctgttaaaaatggcacaggtccctctgtgtataaaggactggtgcccaaacctgctgcaccccctacaaagcccacacagtggaaaagtcagactaaggaaaataaagtgggaacctcttttccacatgaatcgacctttggcgtgggcaacttcaatgctttcaagagcacagcaaagaacttttcaccgagtaccaattctgtgaaggagtgcaatagaagcaattccagttctcctgttgacaagctgaatcagcagccacgcctgacgaaactcacccgcatgcgcacagataaaaagagtgagttcttgaaggcactcaagcgggatagggtcgaggaagagcatgaagatgaaagccgggctggaagcgaaaaggatgacgacagcttcaatctacacaattcgaactccacgcatcaggagcgagacataaacagaaattttgatgagaatgaaatccctcaggaaaatggtaacgctagtgtgatctcacagcagatcatccgatcgtctaccttcccacagacagacgttctatcctctagcttggaggctgaacatcggttgttgaaggaaatgggttggcaagaagattcggaaaatgacgagacatgtgcacccctcacggaagacgagatgcgggagttccaggtgatcagcgagcaattacagaagaatggtctgaggaagaatggaattcttaagaacggcctaatttgcgattttaaattcggtccctggaaaaacagcaccttcaaacccaccaccgaaaacgatgatacggagaccagttcatccgatacatcagacgatgacgatgtgtag

SEQ ID NO: 224410 - DNA, 1398 bp, synthetic construct
  misc_feature 1..1398: note = Description of Artificial Sequence: Synthetic coding sequence
  source 1..1398: mol_type = other DNA
atggcccagcacgattttgccccagcgtggttaaacttccccacgcctccctcctcgaccaaagtgctgacgtcaagcctcaagtcaagcctgaacttcgaaaagcatagtgaaaatttcgcctggacagaaaataggtacgacgttaatcgtcgcaggcataactcatctgacggctttgacagcgcgatcggaagacctaatgggggtaacttcggcaggaaggaaaagaatggctggcgcacgcacgggagaaatggaacagagaacattaatcaccgcggagggtatcatggcggttcttccaggtcaagatctagcatcttccacgccggtaagagtcaagggctccacgaaaacaacatacccgacaacgagaccggcagaaaggaagataaacgggaaagaaagcagttcgaagccgaagacttcccatcactcaatccagaatatgagcgggaacctaatcataataagtcattggctgcaggggtttgggagtatcctcccaacccgaagtcacgcgcaccacgtatgttggtcatcaagaagggtaataccaaagatttgcagttatccggcttcccagtggtcggcaatttaccatcccaacctgtgaagaacgggacaggcccttccgtgtacaaaggtctcgtaccgaagccagcagctcctcctacaaaacccacccaatggaagtcccagacaaaggaaaacaaagtgggtaccagcttcccccatgaatcaactttcggagtcggcaattttaatgcctttaagagtacggcaaagaacttctcgcccagcactaactctgttaaggagcaacctcggcttaccaagctgacaagaatgagaacagataagaaatccgagtttctgaaggcactgaaacgggaccgagtcgaggaagaacacgaagatgaaagccgcgcaggcagcgagaaagacgacgactcttttaatctgcataactctaacagcacacatcaggagcgggatattaataggaatttcgatgagaacgaaatccctcaagagaacgggaacgccagtgtgatatcccaacagattatacgatcatcaacttttcctcagaccgatgtgcttagcagctcccttgaagccgagcacaggcttctcaaggagatgggatggcaggaagacagcgagaatgacgagacctgtgcccctctcacagaggatgagatgcgtgagtttcaggtgatctcggagcagctgcagaaaaatggcttacgaaaaaacgggatcctaaagaatggcctgatctgcgacttcaagttcggcccttggaagaatagcacctttaagccaaccaccgaaaatgacgatacggagacgagtagctcagacacatcagatgacgacgatgtctag

SEQ ID NO: 224411 - DNA, 909 bp, synthetic construct
  misc_feature 1..909: note = Description of Artificial Sequence: Synthetic coding sequence
  source 1..909: mol_type = other DNA
atgctggtcatcaagaaaggcaacacaaaagacctccaactgagtggtttcccggtggtgggcaacctgccctcacagccagtgaagaacgggacggggcctagcgtgtataaaggactggtcccaaaacctgctgccccacccacgaagcccacccaatggaagtcacagacgaaggaaaataaagtgggcaccagctttccccacgagtccactttcggagtgggaaacttcaacgctttcaaatccacagcgaaaaactttagcccctctactaattccgtcaaagaatgtaatcgcagcaactcaagtagcccggtggataagcttaatcagcaacctcggttaacgaagctgacccgtatgaggaccgacaagaaaagtgaatttctgaaagctctcaaaagagacagggtcgaggaggaacacgaggatgaatcccgcgctggttccgagaaggatgacgactcattcaacctccataacagcaactctacacaccaggagagagacattaatcgaaattttgatgagaacgaaatcccacaagagaacgggaacgccagtgtcattagccaacagattatcagatcttccacttttccccaaacagacgtcctcagttcctcgctagaggccgaacacagactcctaaaggagatgggatggcaggaggactcagagaacgacgaaacttgcgccccactgaccgaggatgaaatgcgggaattccaagtaatctccgagcagctgcagaaaaatgggctgagaaaaaacgggatattgaagaacggattgatttgtgattttaaatttgggccttggaagaattctacctttaagcctacgacagagaacgatgataccgaaacatcatcatccgataccagcgacgatgacgatgtctag

SEQ ID NO: 224412 - DNA, 1443 bp, synthetic construct
  misc_feature 1..1443: note = Description of Artificial Sequence: Synthetic coding sequence
  source 1..1443: mol_type = other DNA
atggcacagcacgacttcgcaccagcttggctgaatttccctacaccccctagctccaccaaggtgcttagcaatactttgaaaagctccttgaacttcgagaaacacagcgagaattttgcctggaccgagaaccggtacgacgtgaaccggcgaaggcataactctagtgatggctttgattccgctatcggacgccctaatggcggtaacttcggtagaaaagagaagaacggatggagaactcacggcagaaatggtacggagaacattaatcaccgtggcggttaccacgggggaagctcaaggtcacgcagtagcatattccacgcgggaaagtcacagggtctgcatgaaaacaacattcctgacaacgaaactgggcgtaaggaggacaagcgcgaaagaaagcagttcgaggccgaggatttcccaagcctgaaccccgagtacgaacgggagccgaatcacaacaagtcacttgcggctggcgtatgggagtacccgcctaatcctaaaagtagggcccctaggatgctggtcatcaaaaagggtaacacaaaagacctgcaactgtccgggtttcctgtcgtaggcaatctcccttcacaaccagtgaaaaatggaaccgggcctagcgtgtataagggtctggttccaaaaccggcagctccaccaacaaagcctacgcagtggaagtcccagactaaggagaacaaagttggtaccagttttccacatgaatctacctttggagtgggcaatttcaatgcttttaagagcactgcaaaaaatttcagcccctccacaaactcggtaaaggaatgcaacaggagtaactcaagttcacccgtggataagctcaaccagcagccacgattaaccaagctgactagaatgagaacggataagaagagcgaattcttaaaggctctgaaacgtgatagggtggaagaggagcatgaagatgagtctagagcgggttccgagaaggatgatgactcctttaatctgcacaattcaaatagcacacaccaagagcgggacatcaatcgcaatttcgacgaaaacgagattcctcaagaaaatggcaacgcgagcgtcattagccagcagattatacggtcttcaacgttcccacagaccgatgtattgtctagttccctggaagccgaacatcggctgttaaaagaaatggggtggcaggaagactccgaaaatgacgagacatgcgcaccgctaacagaagacgagatgcgagaattccaagtcatcagtgagcaactccaaaaaaatgggttgagaaaaaacggaatcctaaagaatgggctgatctgcgattttaagttcggtccatggaagaacagcaccttcaaacccaccacagaaaatgacgataccgagacctctagtagtgatactagcgatgacgacgacgtgtag

SEQ ID NO: 224413 - DNA, 1383 bp, synthetic construct
  misc_feature 1..1383: note = Description of Artificial Sequence: Synthetic coding sequence
  source 1..1383: mol_type = other DNA
atgttcctggctaccctttatttcgcacttcctctgttggatctgctgctgagcgcggaggtttcagggggtgataggctcgactgcgtcaaggcttcggaccaatgcctgaaagaacagtcatgttcaaccaagtatcgtaccttaagacagtgcgtagctgggaaagaaactaatttctccctcgcttctgggttagaagccaaggacgagtgcaggtctgccatggaggccctgaagcaaaagtccctttacaattgtcgctgcaaacgagggatgaaaaaagagaagaattgcctacgtatttactggagcatgtaccagtccctccaaggcaacgatctgcttgaggattccccatatgaaccagtgaattccagactgtccgacatctttagagttgtgcccttcatctctgtggagcatatacctaagggcaataactgcttggacgccgctaaagcttgtaacctagacgatatctgcaagaagtaccgttctgcttacatcaccccctgcactacgagcgtttcgaacgacgtgtgtaatcggagaaagtgtcacaaagctcttagacagttcttcgacaaggtgccggctaagcacagctatgggatgttgttctgcagctgcagggacatcgcctgtactgagcgccgacgccagacaattgtaccagtttgctcatacgaagagcgggaaaagcctaattgcctgaatctgcaggactcctgcaaaacgaactatatttgtcgatcccgtctggcagatttcttcacaaattgtcagcccgaaagcaggagcgtgagtagttgtttaaaagagaactatgccgactgcctgctggcttactccggactcatcggcacagtgatgaccccaaattacattgactccagctctctctccgtggcgccttggtgcgactgttctaatagtggaaatgatcttgaggagtgcctgaaattccttaatttcttcaaagacaatacttgcttaaagaatgcgatccaggcctttggcaacggcagtgatgttaccgtgtggcagcccgctttccctgtacagacaacgaccgcaaccaccactaccgctctccgagttaagaacaagccgctgggcccagccggttcagaaaacgaaatcccaacgcatgtcttgcctccttgtgctaatcttcaggctcagaagctcaagtctaacgtctcaggtaacacccatctgtgtatatccaatgggaattatgaaaaggagggcttgggagcttcctcccacatcaccaccaagagtatggccgcacccccatcgtgtgggctgagccccctgttagtgctggtggttacagcactaagtacccttctctccctgacggaaacatcctag

SEQ ID NO: 224414 - DNA, 1383 bp, synthetic construct
  misc_feature 1..1383: note = Description of Artificial Sequence: Synthetic coding sequence
  source 1..1383: mol_type = other DNA
atgttcctcgcgaccctatatttcgcgcttcccctgctagatcttctgttaagtgcagaggtcagtggaggagatcgcttagactgcgttaaagcctctgaccaatgcctcaaagaacaaagctgcagcaccaagtatcgtactctaaggcagtgcgtcgccggtaaagagaccaatttttccctggcgtccgggctggaggctaaggatgaatgcagatcggcgatggaggcactcaaacagaaatccctgtacaactgtagatgcaagcgtggcatgaagaaagaaaagaactgtctgcgcatttattggtctatgtatcaatcattgcaaggaaacgaccttctcgaagattccccttacgagcctgttaattcccgcctgtctgatatcttcagggtggtaccattcataagcgtggagcatatccctaagggcaataactgtctcgacgcagctaaggcctgcaatctggatgatatctgcaagaaatatcgctccgcctacatcaccccctgtacaactagcgtctcgaacgacgtctgcaatcgcaggaaatgccacaaggccctaagacagtttttcgacaaagttcccgctaaacacagttacgggatgctattctgctcatgtagggatattgcatgcaccgaaagaagacggcagacaatcgtgcctgtgtgcagttacgaggagcgtgagaaacccaactgcctgaacctgcaggattcctgcaaaactaactacatttgcagatcccgtctcgccgacttcttcacgaactgccaaccagagagtcgctctgtgagttcttgtttaaaggagaactatgctgattgcctgctggcgtattctggattgatcggtactgtgatgacaccaaattacatcgatagttcctctctgagtgttgctccatggtgcgattgttccaactcgggcaacgacttggaagagtgtctgaagtttctcaacttctttaaagacaacacctgcctaaagaacgctatccaggcctttggcaacggaagcgacgtgactgtgtggcagcccgcttttcccgtgcaaacaacaacagccaccaccacgacagcgctgcgcgtgaaaaataaacctcttggtccggctggcagtgaaaatgagataccgactcacgtccttcccccttgcgccaacctgcaggcccagaaactgaaaagtaacgtttccgggaacacccatctgtgtatcagcaatggaaattacgagaaggagggcctgggcgcaagctcacacatcaccacgaaatctatggccgcacctccaagctgcggcctgagccctttgctggtgctcgtcgtgaccgcgctctccacactcctgtccctgactgagacaagctag

SEQ ID NO: 224415 - DNA, 1383 bp, synthetic construct
  misc_feature 1..1383: note = Description of Artificial Sequence: Synthetic coding sequence
  source 1..1383: mol_type = other DNA
atgttccttgccacactgtactttgccttgccgctgttggatctgctgttaagcgccgaggttagcggaggcgatcggctggactgcgtcaaggcttctgaccaatgtctgaaagaacagtcatgttctacgaaatacaggaccctgagacagtgcgtggcagggaaggagactaactttagtctggctagcggactggaagccaaagatgaatgcagatctgctatggaagccttgaaacagaaatcattgtataattgtcgatgtaagaggggcatgaaaaaagaaaaaaattgcctgaggatatactggtccatgtaccaatcacttcaaggaaatgacctgttagaggatagtccctacgagcccgtgaactccaggttgagcgacatatttagagtggtgccatttatctctgtggaacacattcctaagggaaataactgcttggacgccgcaaaggcttgcaatctcgacgacatttgcaagaagtaccgcagtgcttatataaccccctgtacaactagcgtctcaaacgatgtgtgtaatcggcgtaagtgccataaggctctgagacaattttttgacaaggtcccggcaaagcactcttatggcatgttattttgtagttgtcgagatatcgcgtgtactgaaaggcgccgtcagactatcgtccccgtttgttcatatgaagagagagagaagcctaattgtctgaacttacaggactcatgcaagaccaattatatctgcagatcacgattagcagacttcttcacaaattgccagcccgagtcccgttctgtcagcagctgcctcaaagaaaattatgcagattgtttactggcctattcaggcttgatcgggacagtgatgacacctaattacatagactcttcctccttatctgtggcaccttggtgcgattgtagtaactcaggcaatgacctggaagaatgcctaaaatttcttaacttctttaaagacaacacttgcttgaagaatgcaattcaggcctttggcaatggctcagacgtaacagtgtggcagcccgcttttcctgtacaaacaaccactgctaccacaacaaccgcgctgcgcgttaagaataagccactcggacctgccggatcggagaatgagatccccactcatgtccttccaccttgtgcgaatcttcaagctcagaagctgaaaagcaatgtgtccggaaatacacatctgtgtatcagtaacggcaattatgaaaaggaggggctaggggcaagttcacacatcacaactaagtcaatggcagcacccccaagttgcggactgagtccgctcctcgttcttgttgtgaccgcgttaagcactctgctgagcctgactgagaccagctag

SEQ ID NO: 224416 - DNA, 1398 bp, synthetic construct
  misc_feature 1..1398: note = Description of Artificial Sequence: Synthetic coding sequence
  source 1..1398: mol_type = other DNA
atgttcttggctaccctttattttgccctgccgttgctggatctgcttctttccgccgaagtttcaggcggagacagattggattgcgtaaaggccagcgatcagtgcctcaaggagcagtcgtgctcaaccaagtacaggacactaaggcagtgcgttgccggaaaggaaacaaacttctcattggcatcaggcctcgaggcaaaggacgaatgtcgcagcgctatggaggcactgaagcagaagagcctatacaactgccgctgcaaacgaggaatgaaaaaggagaagaactgcctgagaatctattggagcatgtaccaatccctgcaaggaaatgatctattggaggacagtccttacgagccagtgaatagccgtcttagcgacatctttagagtggtgccttttatcagtgatgtgttccagcaggtggagcacattcccaaggggaacaattgtctggacgccgctaaagcttgtaacctggatgatatctgtaagaaataccgttccgcctatatcactccctgcaccacttctgttagcaatgacgtttgcaatcgtcgtaagtgccataaggccctgcgtcagttctttgacaaggtaccagccaagcactcttatggaatgctgttttgttcctgccgcgatatcgcttgtaccgaacggaggcgccagaccattgtgccagtgtgctcctatgaggaaagagaaaaacctaattgcctaaatttgcaggactcttgcaagaccaattacatctgtcgctcccggctggctgatttctttaccaattgccagccagagtctagaagcgtgtctagttgtctaaaagaaaattacgcagactgcttgctggcctactcgggcctgatcggcacggttatgacgccaaactatattgacagctctagcctaagcgtggccccttggtgtgactgcagcaattccggaaatgacctggaggagtgcctcaagttcctcaatttcttcaaggataatacttgtcttaagaacgctattcaggcgtttggcaacggctctgatgtcaccgtctggcaacccgcattccccgtacaaacaactaccgcaacaactacaaccgctctgcgagtgaaaaataagcccttgggccctgccggaagcgagaacgagatccctacacatgtgctgccaccatgcgctaaccttcaggctcagaagttgaagtcaaatgtgtccggcaacacccatttgtgtattagcaatgggaattacgaaaaagaaggcctaggcgcaagtagccatatcactacaaagagcatggctgcccctccctcatgtggactatcccctctgctggtgctcgtggttacagccctgtccacgctgcttagcctgaccgagacgtcttag

SEQ ID NO: 224417 - DNA, 1035 bp, synthetic construct
  misc_feature 1..1035: note = Description of Artificial Sequence: Synthetic coding sequence
  source 1..1035: mol_type = other DNA
atgcaggaggggaaattctggaaaggaatggctgaaacagggatgtggggatgcggggagtggatacccgtggagcatattcctaagggtaataactgcctggacgcggctaaggcttgtaatctcgatgatatttgtaagaaatacagaagcgcatatatcacaccatgcaccacatcggtgtctaacgacgtttgcaaccgccgaaaatgccacaaggccctcagacagttttttgacaaggttccagccaaacatagttacgggatgctgttttgtagctgcagagatatcgcttgcacagaacggaggcgccagactatagtccccgtgtgcagctatgaggaacgcgagaaaccgaattgcttgaacctccaggatagttgcaagacaaattatatatgcaggagcaggctggccgattttttcacaaactgtcagcctgagtcccggagtgtttccagctgcctcaaagagaactatgcagactgcttattggcctacagtgggctgatcgggaccgtaatgacccctaattatattgatagctcctcgttgtccgttgccccatggtgcgactgttccaatagcggcaacgacctggaggagtgtctgaaatttctgaacttttttaaggataatacttgcctaaagaacgccattcaagcctttggcaacggaagcgatgtaactgtctggcagcccgcatttcccgtgcaaaccactaccgctacaactacgaccgcactgagggtaaagaataaaccactcggcccagctggtagtgagaatgagatacctacgcacgtgctaccaccatgcgccaacctccaggcacagaaactcaaatctaacgtttcagggaatacgcacctgtgcatcagcaacggaaactatgagaaggagggactgggggcttcgtcacacattactactaagtcaatggccgcaccccctagctgtgggctctctcctctgctggtattagtggtgactgccctgtccacgctgctgtctttgaccgagacatcctag

SEQ ID NO: 224418 - DNA, 1080 bp, synthetic construct
  misc_feature 1..1080: note = Description of Artificial Sequence: Synthetic coding sequence
  source 1..1080: mol_type = other DNA
atgatcttggcaaatgtcttctgtctgttcttcttccttggggaggagttctatgaggcgtcaccatatgagcccgtgacatcaaggctgagtgacatctttaggctggctagtatcttcagcggcaccggagcagacccagtcgtgagcgccaagagtaatcactgcctggacgcagcaaaggcatgtaacctcaacgataattgcaagaaacttagaagttcttatatctctatctgtaacagggaaattagcccaactgaacgatgtaatcgtagaaagtgccataaggccctcaggcagttttttgacagagttccctcagagtacacttaccggatgctgttttgttcatgccaggaccaggcctgcgccgagcgcagaaggcagactatactcccatcctgtagttatgaagataaagagaaacccaattgcctggatctgaggggagtctgtcggaccgaccacctgtgcagatcacgtctggccgacttccacgccaattgtcgagcaagctaccaaaccgtgactagctgccccgcagacaactaccaagcttgcctcgggagttacgccggaatgataggcttcgatatgacacctaattatgtggactcctcacccacaggcatcgtggtttccccctggtgtagctgtcggggaagtggaaacatggaggaagaatgtgagaaatttctgcgagactttaccgaaaacccatgtctcagaaacgccatacaggcatttggaaacggaaccgatgtcaatgtgtcacctaaggggccatctttccaagctactcaggccccaagggtcgagaaaacgcccagtctcccagacgacctgagcgattctacctctctaggcacctccgtgatcactacctgtacctcggtgcaggagcagggcctgaaagctaacaatagcaaggagttgagtatgtgttttactgaactgacaactaatattataccgggatcgaataaggtcataaaacctaactccggccctagccgggctaggccctccgcggcattaaccgtgcttagcgtattgatgcttaagctagccctgtag

SEQ ID NO: 224419 - DNA, 1395 bp, synthetic construct
  misc_feature 1..1395: note = Description of Artificial Sequence: Synthetic coding sequence
  source 1..1395: mol_type = other DNA
atgattctggccaatgtcttctgtctgttcttcttcctggacgagaccctgcggtcgcttgcgtccccctcatcattacagggaccagagctgcacggctggcgaccaccagtggattgtgttcgggctaatgagctctgtgccgctgaatcaaactgctctagcaggtaccgtacccttcgccagtgtctcgcaggaagagatcgtaatactatgctggccaataaggaatgccaggccgcactggaagtgctccaggagagccccttgtacgattgccgctgcaagagaggcatgaaaaaggaattgcagtgcttgcaaatatattggtcgatccacctggggttgacagagggtgaggaattttatgaagcctctccttatgaacctgtgaccagtagactctccgacatcttcagactggccagtattttcagtggaaccggcgctgaccctgttgtgtccgctaaaagcaatcactgcctggatgcagccaaagcctgtaatctcaatgataattgtaaaaaattacgatcgagctacatctctatttgtaaccgagagatcagccctactgagaggtgtaacagacgtaaatgtcataaagcactgcgacagtttttcgacagagtgccttctgaatatacataccgcatgctcttttgcagttgccaggaccaggcctgcgctgaaaggcgaagacaaaccatcctgccaagttgctcctacgaggataaagagaagcctaactgtctggacctccgcggagtctgtaggacagaccacctttgcaggtcccgtctagctgatttccacgccaactgtcgcgctagctaccagacagtcacatcctgccccgcagacaattaccaggcctgtttggggtcttatgccggtatgattggattcgacatgacccccaattatgttgatagctcgcccactggaatcgtcgtctcgccctggtgttcctgcaggggaagtggaaacatggaggaggagtgcgaaaaatttctcagagacttcacagaaaatccgtgtctaagaaatgccattcaggcttttggaaacgggacagatgttaacgtttcccccaagggaccgagttttcaggccacacaagcccctagggttgaaaaaactccttccttgcctgacgaccttagcgatagcacctcattagggacctcagtgatcactacatgtacttcagtgcaagagcagggtctaaaagccaataattcaaaggagctatctatgtgtttcactgaactgacaactaacatcatacctggaagcaataaggtaattaaaccaaattccggtcccagtcgagctagacctagtgcagctctgaccgtgctctccgttctgatgctgaaactggccctgtag

SEQ ID NO: 224420 - DNA, 996 bp, synthetic construct
  misc_feature 1..996: note = Description of Artificial Sequence: Synthetic coding sequence
  source 1..996: mol_type = other DNA
atgattttggctaacgtgttctgcctgttcttcttcctgggcacaggtgccgatcctgttgtgagtgcaaagagcaatcactgtctggacgccgcaaaggcgtgcaatctcaatgacaactgcaaaaaactgcgaagtagctacatcagcatctgcaatagggagatatcccctaccgagagatgtaacaggaggaagtgtcataaagccttacgccaattttttgacagggttccgtccgagtacacatatcggatgctcttctgctcttgtcaggaccaggcatgtgccgagagacgtcgacaaaccatcctgccgtcttgctcatacgaggataaagaaaagcccaattgtctagatctcaggggtgtgtgtcgaacagaccacctctgccgcagcaggctggctgatttccatgccaactgcagagccagctatcagacggtgacatcttgtccggctgataattatcaggcctgccttggaagctacgccggaatgatcgggtttgacatgaccccaaattatgtggacagctcccccaccgggattgtggttagtccttggtgtagttgcagggggagcggcaacatggaggaagagtgcgaaaagttcctccgggattttacggagaacccatgcctgcgcaacgcgattcaggcttttggaaatgggaccgacgttaatgtctcaccaaaaggcccaagcttccaggctacacaagcgcctcgggtggagaagacgccctccctcccagacgacctgtccgacagcacttccttggggactagcgtgatcactacctgcacaagcgtgcaggaacagggcctcaaagccaataattccaaagagctgagtatgtgtttcacggagctgacaactaacatcattcctgggtcaaataaagtgataaaaccaaactctggccctagtagggcaagaccgagcgctgccctgaccgtgctgagcgtacttatgttaaagctggcgttatag

SEQ ID NO: 224421 - DNA, 798 bp, synthetic construct
  misc_feature 1..798: note = Description of Artificial Sequence: Synthetic coding sequence
  source 1..798: mol_type = other DNA
atgattctggctaacgtgttttgcctgttcttctttctcgatgagacattgaggtctctggcgtctccttcatcactgcagggacctgaactgcacggatggaggccccctgtggactgtgtgcgagccaacgaactgtgcgctgctgagagcaattgttcttcgagatatagaacactgagacaatgtctcgctggacgtgatcgtaatacaatgctggcaaataaagaatgtcaggccgctctcgaggtccttcaggagtcacccttgtatgactgccgctgcaagcgcggaatgaaaaaagaactccagtgtctgcagatctattggagtatccacctagggttaaccgagggcgaggaattttacgaggcatcaccctacgagccagtaacatctcggctcagtgatattttccgtctggccagcattttctcaggaacaggggcagacccagtagtgtctgcaaagagcaaccactgcttagatgccgcaaaggcttgcaacctgaatgataactgtaagaagctccgaagctcatacatatctatctgcaatcgcgaaatcagtcctacagagaggtgtaatagacggaagtgccacaaggcactacggcagttcttcgatcgcgtgcctagtgaatatacatacaggatgttgttctgctcttgtcaggaccaagcctgtgcagagaggaggaggcaaacaatcctcccgtcttgttcctacgaggacaaggaaaaaccaaattgtcttgacttaagaggcgtctgtcgcaccgatcatctctgtcgttag

SEQ ID NO: 224422 - DNA, 1395 bp, synthetic construct
  misc_feature 1..1395: note = Description of Artificial Sequence: Synthetic coding sequence
  source 1..1395: mol_type = other DNA
atgatcctggctaatgtgttttgcctgttctttttcctcgacgaaacacttcgcagcctcgcttctccttctagcctgcaggggccagagctgcatgggtggcggccaccagtagactgtgtgcgggctaatgagctgtgtgccgctgaaagcaactgctctagccgctacaggaccctccgccagtgcctggccggaagagatcgtaacacgatgctcgccaataaagaatgtcaggcagctctggaggttttacaagaatctccgctgtatgactgtcggtgcaaacgaggaatgaaaaaggagcttcagtgtctgcaaatatattggagcatacatctgggtctgaccgaaggagaggagttctatgaggcctcgccttacgagcctgtcacgtctcgcctttctgacatcttccggttggcaagcatcttctccggaaccggtgcagatcccgttgtgtccgcaaagagtaaccactgtctcgatgctgccaaagcctgcaatctcaatgacaactgtaagaagcttcgatctagctatatctctatatgtaatcgggagatcagccccacagaaagatgtaatcggagaaaatgccataaggcactgcgacagtttttcgaccgagtgccttcggagtacacataccggatgcttttttgctcttgccaagaccaggcctgtgcagagcgacggcgacagacaattctcccctcatgttcctacgaagacaaggagaagccaaattgtttagaccttaggggggtgtgtaggacggaccacctgtgccgctcccgcctggccgactttcacgccaattgccgagcttcatatcagactgtcaccagctgcccagctgataactaccaggcctgccttggatcctatgctggcatgatcggattcgacatgacccctaactacgtggactccagtcccaccgggatagtagtatccccctggtgttcatgtagagggtcaggaaacatggaagaagagtgcgaaaagttccttcgagattttacagagaatccctgcctccgcaatgctatacaggcattcggcaacgggactgatgtgaacgtaagcccaaaagggccttctttccaggctacacaggccccacgtgttgaaaaaacaccaagtctccccgatgacctttctgactcaacatccctgggtactagtgtgattacgacatgcacatcagtacaggaacagggattgaaggcaaataactccaaagagctaagtatgtgtttcaccgagttgaccacgaatatcatccccggttctaacaaggtaataaaacccaatagtgggccatcgcgcgctaggccgagtgctgctctaacagtgttgtccgtgctcatgttgaagctcgctctgtag

SEQ ID NO: 224423 - DNA, 1203 bp, synthetic construct
  misc_feature 1..1203: note = Description of Artificial Sequence: Synthetic coding sequence
  source 1..1203: mol_type = other DNA
atggtgcggcctttgaatcccaggccattgcctcccgtagttctcatgctgctgttactgttgcctccctcccccttgccactggctgccggagatcccctgcctaccgagtcccgactcatgaactcctgcctacaggcccgtcgaaaatgtcaagccgatccaacctgctctgcagcctatcaccatttagactcttgtacctcctcaatttcaactccattaccctcagaggaaccatccgtgccagctgactgtctcgaggctgcccagcagcttcgtaattcgtctctgattggctgcatgtgccatagacgcatgaagaatcaagtcgcttgtctggacatctactggaccgttcatcgagcgagaagcctgggtaattacgaattagatgttagcccctatgaagacaccgtgacctctaagccatggaagatgaatctgagcaaactgaacatgctgaaacccgattccgatctttgtctgaaatttgcaatgctgtgtacactgaacgataagtgcgatcggctgcgcaaagcctacggagaggcttgttctggtccacactgccagcgccatgtgtgcctgcgccagctacttactttttttgaaaaggctgccgaaccgcacgctcagggactccttttgtgtccctgtgcgccaaacgaccggggatgtggggagcggcgaaggaatacaattgcacctaattgcgccctaccccctgtggccccaaattgcttggagctgcggaggctctgtttttctgatcccctgtgccgcagtaggctggtggattttcagacacattgtcacccaatggacattctgggaacgtgtgcaactgaacagtccaggtgtctgcgagcctatctgggactgatcggaactgcgatgacccctaactttgtgagtaatgtgaacacaagcgtggccctgtcatgcacgtgtcggggatccggcaacctgcaggaagagtgtgagatgctcgagggctttttcagccacaatccctgcctgaccgaagctattgcagccaaaatgaggtttcactcacagttgttttctcaggattggcctcatcctacgttcgccgtgatggcgcaccaaaacgaaaaccctgccgtgaggccgcagccgtgggttcccagtctattcagttgtaccctgcctctgatcctgttgttgagtttgtggtag

SEQ ID NO: 224424 - DNA, 1110 bp, synthetic construct
  misc_feature 1..1110: note = Description of Artificial Sequence: Synthetic coding sequence
  source 1..1110: mol_type = other DNA
atggtacgtcctcttaacccgaggcccctgcctcccgtggtgttaatgctcctgctgctccttcccccttcacccctgccgcttgcggctggtgaccctctgccaaccgagtcacggctgatgaacagttgtctgcaggcgagacgcaagtgccaggcggatcctacctgcagcgccgcttaccaccatttagattcatgtacctcctcaataagtacccccctccctagcgaagagccttccgttcctgcagactgcctcgaagcagcccagcagttgagaaactcatccctgatcgggtgcatgtgtcaccggaggatgaaaaaccaagtcgcttgtcttgacatatattggactgtccatcgagctcggtcattggacagtgacctctgcctcaagttcgccatgctctgcaccctcaacgacaaatgtgacagactgcgcaaagcttacggagaagcttgcagcggaccacattgccagcgacacgtgtgtctgaggcaactgctaaccttttttgagaaggccgctgagccacacgcccagggtcttttgctgtgcccatgcgcacccaacgatcgcggatgtggcgagagacggaggaatacaattgctcccaattgtgctctaccccctgtcgcgccaaactgcttggaactaagacggttatgcttctcggaccccctgtgcaggtctaggctcgtggatttccaaactcactgtcaccccatggacattctgggtacttgtgcaaccgagcaatcccgctgcttgcgggcttatctcggtctgattggtaccgctatgactcctaattttgtctccaatgtcaacacttcagttgctctgagttgcacttgtaggggctccgggaatttacaagaagagtgcgaaatgctggaaggctttttcagtcacaacccgtgtctaaccgaagctatagccgctaagatgcgattccatagtcaactgttttcccaggactggcctcatcctacctttgcagtgatggcccatcagaacgaaaatcccgctgtgaggccgcagccttgggtgccttcactgttctcgtgtactctgcctcttattctcctcttgagtctgtggtag

SEQ ID NO: 224425 - DNA, 2136 bp, synthetic construct
  misc_feature 1..2136: note = Description of Artificial Sequence: Synthetic coding sequence
  source 1..2136: mol_type = other DNA
atggagagcggggctgtgctgttggaatccaaaagcagccctttcaacctgctgcatgaaatgcacgaactacggttactgggacatctatgcgatgtgaccgtctccgtggagtaccagggggtgcgtaaggatttcatggcccataaggccgtcctggccgctacctcgaaattcttcaaagaggtgtttctcaatgaaaagagcgtagacgggacgagaacgaatgtttaccttaacgaagtccaagtagccgacttcgcgtccttcttggagtttgtctatacagctaaggtgcaagtggaggaggaccgtgtacaaaggatgctcgaggtggccgagaagctgaaatgcctggacctgtctgagacgtgtttccaactcaaaaagcagatgctggaaagtgttctgttggagctacagaatttctctgagtcccaggaggttgaggtgagctccggcagtcaggtgagcgcagcgcctgcccctcgcgcaagcgtggctactgatggtccgcacccaagtggactcacagactcgctggactaccctggcgagagagcctccaatggcatgtcctccgatttaccgcctaagaaaagtaaagacaagttggacaagaagaaggaggtggtaaagccaccctatccaaaaattaggcgcgcatcaggacgactggcgggtcgcaaggtgtttgtagagatcccaaagaagaaatacacaagaaggctcagagaacagcaaaagaccgcagaaggcgatgtcggcgactaccggtgtccgcaggatcagtcgccagacagagtcggcacagagatggagcaggtttccaagaacgaagggtgtcaggctggggctgaactcgaggaactgagcaagaaagccggacctgaggaagaggaggaggaagaagaagaggacgaagaaggagagaagaaaaaatccaactttaagtgttcaatttgtgagaaggcctttctgtacgaaaaaagcttcctgaagcattccaagcacaggcacggggtggcaacggaggtagtgtatcggtgtgacacctgcggccagacgtttgccaatcgctgtaacctgaaatcacatcagcggcacgtgcactcttctgagcggcatttcccttgtgaactgtgcgggaaaaaatttaaaaggaagaaagatgtcaaacgccatgttttacaggtgcacgaaggcggaggcgaaaggcatcgatgcgggcaatgtggcaagggtctctcttccaagactgctctgaggcttcacgagaggacacataccggagatcggccttacggttgtactgagtgcggagcgagattctcccaaccctcagccttgaagacacacatgcgcatccataccggcgaaaagccgttcgtgtgcgatgagtgtggcgcacggttcacacagaatcacatgctgatatatcataagcgctgccatactggagagagaccctttatgtgtgaaacatgtggtaaaagctttgcatccaaggaatatctaaaacatcataatcggatccataccggaagtaagcctttcaaatgtgaggtgtgcttcaggacctttgcccagcgtaattccctctatcagcatatcaaggtgcacaccggggaacgcccttattgctgcgaccagtgtgggaaacagttcacgcagcttaatgcattgcagagacatcgacggatacacaccggagagaggccattcatgtgtaacgcctgcggtaggactttcacagataagagcacactgagacggcacacctcaatacatgataaaaacacgccatggaagtccttcttggtcatcgtcgatggctctccaaagaacgatgacgggcacaagactgaacagccagatgaggagtacgtgtcctccaaactgagcgacaagctgctcagcttcgccgagaatggacacttccacaatctggctgctgtgcaagacacagtaccaacaatgcaggaaaatagtagcgctgataccgcttgtaaagccgatgatagcgtggtcagtcaagatacgcttttggcgacaactatctcagaattgagtgagttgaccccacagactgacagtatgcctacgcaactgcattccctatcgaatatggaatag

SEQ ID NO: 224426 - DNA, 2136 bp, synthetic construct
  misc_feature 1..2136: note = Description of Artificial Sequence: Synthetic coding sequence
  source 1..2136: mol_type = other DNA
atggaatctggagcagtacttctcgaaagcaaatcctccccctttaatctgctgcatgagatgcatgaactacgtctcctcggccatctgtgcgacgtgaccgtgtccgtggagtaccagggcgtgaggaaagatttcatggcccacaaagccgtgctggccgctacaagcaagttttttaaggaagtttttctgaacgaaaagagtgtcgacggcactagaaccaacgtatatctcaacgaagtgcaggttgccgatttcgcctctttcctcgagttcgtatataccgccaaagtgcaggtggaggaagaccgcgtgcagaggatgctcgaagttgctgaaaaactcaaatgcctggatctgagcgagacatgctttcagctcaagaaacagatgctggaaagtgtccttctggagttacagaacttcagcgagtcgcaggaagtcgaagtgagcagtggcagtcaggtatcagctgcccctgcccctcgcgcttccgtcgcaactgatgggcctcaccctagcgggttgaccgatagcctagattatccaggggagagagctagtaacggcatgtcttccgatctgccacctaaaaagtctaaggataagctggacaagaagaaggaggtcgtcaagcccccttatcctaaaatcagacgggcaagcggccgactggccggtcgcaaagtgtttgttgagatccccaagaagaagtacactcggcgactcagagaacagcagaagactgccgagggcgacgtaggagattaccggtgccctcaagaccagtctcctgaccgggtggggactgagatggaacaggtttcaaagaacgaggggtgtcaggccggagctgagttggaagagttaagcaagaaggctgggccagaagaggaagaggaagaggaggaagaagacgaggagggggaaaagaagaagtctaatttcaagtgctcaatatgtgagaaggcctttttgtatgaaaagtcatttctcaaacacagcaaacacagacacggagtggcgaccgaggtggtgtacagatgtgatacctgtggacagacctttgcgaaccggtgcaacttaaagtcgcaccaaaggcacgtacactcttctgaaaggcactttccctgtgagctttgtggaaagaagttcaagcgcaagaaagatgtcaaacgtcatgttctccaagtccacgagggaggtggagagaggcaccggtgcgggcagtgcggcaaagggctaagctcaaaaacggctctacgtttgcacgagaggacacacaccggagatagaccttacggctgtacagaatgtggggctcggttcagtcagccatccgcacttaagacacacatgcgcatccacacgggggagaagccttttgtctgtgatgagtgcggggctcggttcacacagaaccacatgctcatatatcataagcggtgtcacacaggagagcggcctttcatgtgtgagacatgcggtaagtcttttgccagcaaagagtacctcaagcatcataacagaatccataccggcagcaagcccttcaagtgcgaggtatgcttccgcaccttcgcccagcggaatagtctttaccaacacatcaaggtgcataccggggaaaggccatattgctgcgaccagtgcggaaagcagtttacacagctcaatgcactccagagacatagaagaatccacacgggagagcggccattcatgtgcaatgcctgtggtcgaacatttacggataagtccaccctgcggagacatacaagcatccacgacaagaatactccttggaagagctttctcgtcattgtcgatggctcccctaagaatgatgatggccacaagacagagcagccagacgaggagtacgtgagctccaagttgagtgataaactgctgtctttcgcagaaaatggtcatttccataacttggccgcagtgcaggacacggtaccaaccatgcaagaaaattccagtgccgacacagcctgtaaagccgacgactcagttgtctcacaggacacccttctcgctaccacaatctcagaattatccgagttaacaccacagaccgactctatgccaactcagttgcattcgttgtccaacatggaatag

SEQ ID NO: 224427 - DNA, 147 bp, synthetic construct
  misc_feature 1..147: note = Description of Artificial Sequence: Synthetic coding sequence
  source 1..147: mol_type = other DNA
atggagagcggggctgtgcttctggagagtaaaagcagcccattcaatctgctgcatgaaatgcatgaactacgcttactcggtcacttgtgcgacgtgacagtatctgtggaataccagggagtgcgtaaagacttcatggcgtag

SEQ ID NO: 224428 - DNA, 663 bp, synthetic construct
  misc_feature 1..663: note = Description of Artificial Sequence: Synthetic coding sequence
  source 1..663: mol_type = other DNA
atgtgcgagacctgcgggaagagttttgcgtccaaggagtatcttaagcaccataaccgcatccacaccggcagtaagccctttaagtgcgaggtgtgctttcggacctttgcgcagaggaacagcctgtaccagcacatcaaggtccacaccggagagcggccttactgttgtgatcagtgcggcaaacagtttacccaactgaacgccctgcagcgccaccgcagaatccacacaggtgagagacctttcatgtgcaacgcctgcggaaggaccttcactgacaagagtactctgcgtaggcacacaagcattcacgataagaacacaccttggaagagctttctcgttatcgtcgatggttccccaaaaaatgatgatggtcacaaaacagaacaacccgacgaggaatatgtcagcagtaagttgtccgacaaactccttagcttcgccgaaaacggccactttcacaaccttgcggctgttcaagatacagtccccactatgcaagaaaacagcagtgccgacactgcgtgtaaggccgatgattctgttgtgagccaggatactctattagctacaactataagtgaactatccgagctaacccctcaaactgatagcatgccaacacagctgcatagcctatcgaacatggaatag

SEQ ID NO: 224429 - DNA, 708 bp, synthetic construct
  misc_feature 1..708: note = Description of Artificial Sequence: Synthetic coding sequence
  source 1..708: mol_type = other DNA
atgttgatttatcataagaggtgtcacacgggcgaaaggcccttcatgtgtgaaacctgcggtaaaagctttgcttccaaggagtacttgaagcaccacaatcggatccacaccggatccaagcctttcaagtgtgaggtgtgcttcaggaccttcgcccagcggaatagcctgtaccaacacatcaaggtccacaccggagaacgcccttattgctgcgaccagtgtggcaagcagttcacacagcttaatgcccttcaacggcaccgcagaatacacactggcgagcgcccatttatgtgtaacgcatgtggccgaaccttcactgacaaaagtaccctgagacggcacacttcgattcatgacaaaaacactccctggaaatccttcctggtcatcgtggatggaagccctaaaaacgacgatggccacaaaaccgagcaaccggacgaggaatatgtgagttctaaactttctgacaaattgttgtcctttgcagagaacggacatttccacaatctagctgccgtccaggacacagtgcccactatgcaagagaatagctccgccgacacggcatgcaaggccgacgactcagtggtgtctcaagatactcttctcgccacaaccatttccgaactcagtgagttgacacctcagaccgactcaatgccgacccagctacattctctgtccaatatggagtag

SEQ ID NO: 224430 - DNA, 1254 bp, synthetic construct
  misc_feature 1..1254: note = Description of Artificial Sequence: Synthetic coding sequence
  source 1..1254: mol_type = other DNA
atggacgaggaatacgacgtaatcgtgttgggcaccggcctgactgagtgtattctcagcggaatcatgagcgtgaatgggaaaaaggtacttcatatggaccggaacccttattatggaggtgagagcagcagtatcacacccctagaagagctgtacaaacgtttccaacttctagaaggcccaccagaatccatgggtcgaggcagagattggaacgtggatctcatcccgaagtttctcatggctaatgggcagctcgtgaaaatgctcctgtatacagaggttacacggtatcttgatttcaaggtggtggaggggtccttcgtatacaaaggcggaaagatctataaagtgccgtccactgagacagaagcgctcgctagtaacctgatgggaatgttcgaaaacgatcccaaaacattcgaaggcgtcgatccccagacaacgtctatgagggatgtgtatagaaagttcgacctgggtcaggacgtaatcgacttcaccggacacgctctggcactgtaccggactgacgactaccttgaccagccatgcctggagaccgtgaatcgcatcaaactgtactctgagtctctggcaaggtacggcaaatccccatacctgtacccgctgtacggccttggggagctcccccaggggtttgccagactgtcagctatttatgggggaacttacatgcttaataaacctgtggatgatataattatggagaacggtaaggtcgtgggtgtgaagagcgaaggcgaagtggcaaggtgtaaacagttgatttgcgacccatcttacattcccgaccgggtgagaaaagcaggtcaggtgatcaggatcatctgtatcctgagccaccctatcaaaaataccaatgacgctaattcttgccaaatcatcattcctcaaaatcaggtgaatcgaaaaagtgacatttatgtttgcatgatatcttatgcccacaacgtggcagcgcaggggaagtatatcgcaatcgcatcaacaaccgtggaaaccaccgacccagaaaaggaggtggagcctgctctggaattgcttgagcccatagacgatggttgtgagtcccaggtattttgtagttgcagttacgacgccactacacattttgagaccacatgtaatgatatcaaagacatatataaacggatggcaggaaccgcatttgattttgaaaacatgaagaggaaacagaacgacgtcttcggggaagcggaacaatag

SEQ ID NO: 224431 - DNA, 1344 bp, synthetic construct
  misc_feature 1..1344: note = Description of Artificial Sequence: Synthetic coding sequence
  source 1..1344: mol_type = other DNA
atggatgaagagtacgacgttatcgtgcttggaactgggctgaccgaatgcattctgtccggaattatgtctgtaaatgggaagaaggtgctgcacatggataggaacccctactatgggggtgaatccagcagcattacccctctagaggagctctacaaaaggttccagttgctcgagggacctccggagagcatggggcgaggtagggattggaacgtagacctcatcccaaaattcctcatggctaatggacagctcgtgaagatgctgctttatactgaggtgacccgttacctcgattttaaagtggtagaaggatcattcgtgtataagggagggaaaatttacaaagtgccaagtacggagactgaagcgctggcttctaatttaatgggcatgtttgagaaacgtagatttcgaaagttccttgtcttcgtggccaatttcgacgagaatgacccgaagaccttcgaaggggtggaccctcaaactacgagcatgcgcgacgtgtataggaaatttgatctggggcaggacgtgatcgactttactggacatgccctggcactgtatcgcaccgacgactatttggaccaaccctgcttggagactgtgaaccggataaagctatactccgaatccctggctaggtacggaaagagcccttacctgtacccattatacggactgggggagctcccacagggctttgctagactttcagctatttacggagggacctatatgctcaacaagcccgtggatgatatcattatggagaacggcaaagtggtgggcgtcaagtccgaaggcgaggtcgctcgatgcaagcaactaatctgcgatccttcatacatacctgacagagtccgcaaggcagggcaggtgattcgtatcatctgcatactgtcacaccctataaaaaacaccaatgatgccaatagttgtcaaatcataattccacagaaccaggtgaatagaaaatccgatatctatgtgtgtatgatcagttacgcccacaacgtggcagcgcaggggaaatatatagcaatcgcttctactactgtggagaccaccgatccagagaaagaagtagagccagctctcgagctgctggaacccattgatcagaaatttgtggctatatctgacctgtatgaaccaattgatgacggatgcgagagtcaagttttttgctcttgcagttatgacgctacaactcacttcgagacaacctgtaacgacattaaggacatctacaaacgtatggcaggtaccgccttcgactttgagaacatgaagcgcaaacaaaatgatgtgtttggcgaagcagagcagtag

SEQ ID NO: 224432 - DNA, 447 bp, synthetic construct
  misc_feature 1..447: note = Description of Artificial Sequence: Synthetic coding sequence
  source 1..447: mol_type = other DNA
atgagtttgggaaagcggaaacctagcaatttctacttggccaacttcctgggcaaggagtgcatactgagcgggataatgagtgttaatggcaaaaaggtgctgcacatggatcgaaacccatattatggaggggagtctgccagcatcacccctctggaagacctctataaacgctttaagatcccagggagcccaccggaaagcatggggagagggagagattggaacgtggacttaatccctaagtttctaatggctaacggccagctcgtgaagatgctgctctataccgaggtaacgaggtatctcgatttcaaggtgactgagggctctttcgtctacaaaggtggcaaaatatacaaggtaccgtcaaccgaggctgaggctttggccagctcacttatgggcctctttgaaaaaagacgattccgcaagtttctgtag

SEQ ID NO: 224433 - DNA, 1350 bp, synthetic construct
  misc_feature 1..1350: note = Description of Artificial Sequence: Synthetic coding sequence
  source 1..1350: mol_type = other DNA
atgtcgttaggcaagcgcaagccatccaacttttatctcgcaaactttctgggtaaagagtgcatactttccggtatcatgagcgtgaatgggaagaaggtgcttcacatggatcgaaatccttactatggcggagagtcggcaagtatcaccccactggaggatttgtataagcgatttaaaatccccggatcgccacctgagagtatgggacgcggaagggactggaacgtggatctgatccctaagtttctgatggccaatgggcagttggtgaagatgctcttgtacaccgaggtgacgaggtatctcgatttcaaggtgaccgaggggagcttcgtgtataagggagggaagatatacaaggttcccagtactgaggcagaagctttggcctcaagcctgatgggactgttcgaaaagagacgattccgcaagtttctggtgtacgttgctaatttcgacgaaaaggatccacgtacatttgagggtatcgatcccaaaaagacaaccatgcgggacgtgtacaaaaagtttgacttagggcaggatgtgatcgactttacaggccacgccttggccctctatcggacggacgactacctggaccagccctgttacgaaaccatcaatcgaatcaaactgtacagcgagtcactggccaggtatggcaaatcgccgtatctctatcccttatatggcctcggcgagctgcctcagggattcgcaaggctgagcgcaatctacggcggaacatatatgttgaacaagccaatagaggagatcatcgttcagaatggcaaggttatcggcgtgaaatccgaaggcgaaatcgctaggtgcaagcagcttatctgcgatccttcctatgtaaaggaccgcgtggaaaaagtggggcaggtgatcagagtcatttgtatcctttcgcaccccattaaaaacaccaacgatgccaattcctgccagatcataattccacagaaccaggtaaatcgaaaatcagacatatacgtttgcatgatttcgtttgctcacaacgtggctgcgcaggggaagtatattgcaatcgtctctactactgttgaaaccaaggaaccggaaaaggaaatacgtcctgcactcgaactgctggagccgatcgaacagaagttcgtctccatcagcgatttactcgtacccaaagatctcggaacagaaagccaaatttttatatctagaacgtatgatgctacaacccactttgaaactacgtgcgacgatattaagaatatctataagcgcatgaccggctccgagttcgacttcgaggagatgaaacggaaaaaaaatgacatttacggcgaggactag

SEQ ID NO: 224434 - DNA, 627 bp, synthetic construct
  misc_feature 1..627: note = Description of Artificial Sequence: Synthetic coding sequence
  source 1..627: mol_type = other DNA
atgcgtgatgtctacaaaaaatttgacttgggacaagatgtgatagactttaccggacatgcattggcgctgtaccggactgatgattacctcgaccagccatgttacgagacaatcaaccggattaagctttacagcgagagtttggcacggtacggaaagagtccctacctgtaccccctatacgggctgggagagctgccacagggattcgcaagactgtctgccatatacggcggaacatatatgctcaataagccaatcgaagagatcatcgtacagaacggcaaagtcatcggagtcaaatcagaaggggagatcgcacgctgcaagcagctgatctgcgatccatcatatgtgaaggaccgtgtagagaaggtcggccaggttatacgggttatttgtatcctgtcacaccccatcaagaatacaaacgatgcaaattcctgtcaaataatcatccctcagaatcaagtgaaccgcaagagcgatctgctggcttcagtgacgtcctggtatcagaaaacttgggaacagaaggcccgatccctgtttcctgctcatatgatgccaccgcttattctgaggcagcgcgtgatgacgctcaaaacttctatccgtggctag

SEQ ID NO: 224435 - DNA, 1203 bp, synthetic construct
  misc_feature 1..1203: note = Description of Artificial Sequence: Synthetic coding sequence
  source 1..1203: mol_type = other DNA
atgaacgaggaatatgacgttatcgttctgggcactggcctgacggagtgtatattgtccggaattatgtcagtcaatggcaagaaagtgttgcacatggacagaaacccgtactatggtggggaatctgcctctatcactccactggaggatctctacaagaggttcaagattcccggatctcccccagagtctatgggacggggtcgggactggaatgtcgacctgatccctaaatttctgatggctaacggattgatgggcctattcgagaagcggagattcagaaagtttctcgtgtatgtcgccaattttgacgagaaagaccccaggacctttgaaggaattgatccgaagaaaaccacaatgcgggacgtctataagaaattcgaccttggacaggatgtgatcgactttacgggacacgctctcgccctttaccggactgacgattacctcgatcaaccctgctacgaaaccatcaacaggatcaagctctatagtgagagcttggctagatatggaaagagcccgtacctgtaccccctgtatggcctcggggagctcccccaggggttcgcccgactatctgctatctacggcggaacgtatatgctgaataagccgatagaagaaatcattgtgcagaatggcaaagtgatcggagtgaaaagcgaaggtgagattgctcggtgtaaacagctcatatgcgacccgtcctatgtcaaggaccgggttgaaaaagtgggccaggtaatccgcgtgatttgcatccttagtcacccaattaagaataccaacgacgccaacagctgtcagataattatcccgcagaatcaggtcaaccgaaagtccgacatttatgtgtgcatgatttccttcgcgcataatgttgccgctcagggcaagtatatcgccatcgtttccactacggtagagactaaagagccagaaaaagaaattaggccagcgttagaactgctcgaaccgatcgaacagaagtttgtctccattagcgatctgctggtgcccaaggacctcgggacagagtcgcagattttcatctcacgcacatacgatgccaccacgcatttcgagaccacctgcgatgacatcaaaaacatctacaagagaatgaccggctccgagtttgacttcgaggagatgaagaggaaaaagaacgatatctacggcgaagattag

SEQ ID NO: 224436 - DNA, 1338 bp, synthetic construct
  misc_feature 1..1338: note = Description of Artificial Sequence: Synthetic coding sequence
  source 1..1338: mol_type = other DNA
atgaacgaggaatacgacgtgattgtgttaggcacggggctgaccgagtgcatattaagcggcatcatgtccgtgaatggaaaaaaagtgctccacatggatcgcaacccatactacggaggcgaatccgccagcattactcccctcgaggatctctataaaaggttcaaaattccaggatcacccccagaatctatggggcgaggcagagactggaatgttgatctgattcctaaatttctcatggctaatggtcagctggtaaagatgcttctgtatactgaggtgactaggtatctcgacttcaaagtgacggagggttctttcgtgtacaaaggcggaaaaatttacaaagtgccatctaccgaggccgaggcccttgcctcctccctgatggggctgttcgagaagaggcgtttccggaagtttttggtgtacgttgcgaatttcgatgagaaagatcccaggacctttgaggggatcgaccccaaaaagaccacaatgcgcgacgtgtacaagaagttcgatctcggccaggatgtaattgacttcaccggccatgctctggcactgtataggacagacgattacctggaccagccctgctatgaaaccattaaccggatcaaattatacagcgaaagtttagcacgctatggaaaatccccctatctctaccccttgtacggtcttggggaactccctcaaggctttgcacggttgagcgcgatttacgggggaacatacatgctcaataagcccattgaagaaattatagttcagaatggtaaggtgattggcgtgaagtctgaaggggagatcgctcgctgtaagcagctgatttgtgatccgtcatatgtgaaggacagagtggagaaggtgggccaagtgatccgggtcatatgcattttgtcacatcctatcaaaaacactaacgatgcgaacagctgccagatcattattccacagaaccaggtgaatcggaagtccgacatctatgtctgcatgatatctttcgcccacaacgtggctgctcaggggaagtacattgccatcgtgtccacaaccgtggaaactaaggagcccgagaaggaaatccgccctgctctggagttgcttgaaccaattgaacaaaaattcgtgtcaataagtgacctattagtgcccaaggatctgggaactgagtcccagatttttatctcccgtacatacgacgcgaccactcatttcgaaaccacctgcgacgacattaaaaatatttacaagcgtatgacaggatccgagttcgattttgaggagatgaagcgcaaaaagaatgacatttacggtgaagactag

SEQ ID NO: 224437 - DNA, 468 bp, synthetic construct
  misc_feature 1..468: note = Description of Artificial Sequence: Synthetic coding sequence
  source 1..468: mol_type = other DNA
atgaacgaggagtacgatgtgattgtgctggggaccggtcttacactgtataagcgcttcaagatccctgggtctcccccagagtctatgggccgaggcagagattggaatgtggacctcattcccaagttcctcatggcaaacgggcaattggtaaagatgttactatacacagaggtgactagataccttgactttaaggtgacagagggatcattcgtgtataagggcggaaagatatacaaagtgccatcaactgaagccgaggctcttgcgtcatctctcatgggtttgtttgaaaaacggaggttcagaaaattcctagtttacgtcgcaaactttgatgaaaaggatccaagaactttcgagggaatcgaccctaaaaaaaccaccatgcgggatgtgtacaaaaagttcgacctaggccaagatgtcattgattttaccggacacgctctcgccctgtag

SEQ ID NO: 224438 - DNA, 612 bp, synthetic construct
  misc_feature 1..612: note = Description of Artificial Sequence: Synthetic coding sequence
  source 1..612: mol_type = other DNA
aagaaattcgatctgggccaggacgtcattgatttcaccgggcacgccctggcgctataccgcaccgatgattatctggatcagccctgctatgagaccattaatcggattaagctctactctgagagcctggccaggtatgggaagagcccttatctctaccctctttacggccttggtgagcttcctcagggtttcgccagactgtcagctatctatggcggaacctacatgcttaacaagcctattgaagagattattgtgcaaaacggaaaggtaatcggagttaaatccgagggggagattgctcgttgcaagcagctgatctgtgatcccagctacgtgaaggatcgggtggagaaagttggccaggtgatcagagtcatctgcatactgtctcacccaatcaaaaatacaaacgatgccaatagttgccagataataattcctcagaatcaggttaatcgcaagtccgatctcttggcatcagtgacctcttggtaccagaaaacatgggagcagaaagctaggtctctgtttcccgcacacatgatgcctccgctgattctgcgccagagagttatgacactcaaaacatccatccgaggttag

SEQ ID NO: 224439 - DNA, 792 bp, synthetic construct
  misc_feature 1..792: note = Description of Artificial Sequence: Synthetic coding sequence
  source 1..792: mol_type = other DNA
atgaatgaggaatatgatgtgatcgtcttaggcactggcctaacagaatgcatcttgtccggaattatgtcagtcaacggcaaaaaggtgttgcacatggatagaaacccgtattatggcggtgaatcagcctctatcactcccctggaggatctgtacaaaaggtttaaaattcctggctcacccccagaatcaatgggcagaggacgagactggaacgtagatctgatacccaaattcctcatggccaatgaggtcaccagatatctggatttcaaagtaacggaggggtcttttgtgtacaagggtggtaaaatctataaggttccaagcactgaagccgaagccttagcctcgagcctgatgggcctgttcgagaagaggcgttttaggaagttcctcgtctacgtagcaaactttgatgaaaaagaccctaggactttcgagggcatcgaccctaaaaaaaccaccatgcgcgacgtgtacaagaagttcgacttaggccaggacgttattgacttcacaggtcatgctcttgctctgtatcgtaccgacgactatctggatcagccgtgctatgagacaatcaacagaatcaagctttactccgagtcccttgctagatatggcaagagtccctacctgtacccactatacggcctgggtgagttaccacagggtttcgcacgattaagcgctatctatggagggacgtacatgctgaataagcccatcgaggaaatcattgtgcaaaacgggaaggttatcggggtaaaaagtgagggtgagtag

SEQ ID NO: 224440 - DNA, 1119 bp, synthetic construct
  misc_feature 1..1119: note = Description of Artificial Sequence: Synthetic coding sequence
  source 1..1119: mol_type = other DNA
atggctcacgcaccagccaggtgccccagcgccagaggctccggagacggcgagatgggaaaacctaggaatgtcgccttgatcacagggattactgggcaggacggatcctatctcgccgaattcctactcgagaagggctatgaggttcatggtattgtccggaggagctccagttttaatacgggccgtatagagcacctgtacaagaatcctcaggcacacatcgagggtaacatgaaactccactatggagacctgacagatagtacttgcctcgtgaaaataataaacgaagtcaaaccaactgaaatctataacctgggcgcacagtctcacgtcaaaatttcttttgacttggctgaatatacggctgacgtggacggcgtcgggaccctgagactgctggacgcggtgaagacttgtgggttgataaacagtgttaagttctatcaagctagtacttcggagctctacggtaaggtgcaagaaattccacagaaggagactactcccttctatcctaggtctccatatggagccgctaaattgtacgcctattggatcgtggtcaatttccgagaagcctataacctattcgcagtgaacggtatcctgtttaaccatgaatccccaaggagaggggctaatttcgtaacccgcaagatctcacggagcgtggccaaaatatatcttgggcaactggaatgcttctctttgggtaacttggacgcgaaacgggactgggggcatgctaaggattacgtggaagcgatgtggctgatgctccaaaacgatgagcccgaagattttgttattgcaacaggcgaggtgcactctgtaagagaattcgtcgagaagtcatttctgcacattggtaagactatcgtgtgggagggcaaaaatgagaacgaggtcggaagatgcaaggagactggaaaggtccatgtgactgtcgatctgaaatattatagacctacagaagtagattttctgcaaggcgactgcacaaaagcgaaacaaaagcttaattggaaaccacgtgtcgcttttgatgaactggtgcgtgagatggtacacgcggacgtagagcttatgagaacaaatccaaacgcctag

SEQ ID NO: 224441 - DNA, 1029 bp, synthetic construct
  misc_feature 1..1029: note = Description of Artificial Sequence: Synthetic coding sequence
  source 1..1029: mol_type = other DNA
atgtgtaaaatggatgggtcctacctcgctgagttccttctagagaagggatacgaagtgcatggcattgtccgtcggagcagctctttcaatactggcaggatcgagcacctgtataagaatccccaggctcacattgaaggcaacatgaagctgcattatggagacctcacagattccacttgtttggtgaaaatcattaacgaggtgaaacccaccgagatttacaatctgggagcccagagccacgtaaaaattagctttgacctcgccgagtacactgccgacgtggacggggtggggactctcaggctgttggacgctgtgaagacatgcgggctgatcaatagcgtgaagttttaccaagcctctacctctgagttgtatggaaaagtccaggagataccccagaaagaaaccacacccttttaccccaggtctccatatggggctgccaaactgtatgcttattggatagttgtgaattttcgggaagcctataacttatttgccgtgaatggaattttgttcaaccatgaatccccaagacgcggtgctaatttcgttacacgcaaaatttcaagatccgtggcaaaaatatatctgggccagctcgagtgctttagtctcggcaatctggatgctaagcgagattgggggcatgccaaagactacgtggaagctatgtggttgatgctgcaaaatgacgaaccggaggatttcgtgatcgcaacaggggaggtgcactctgtgagggaattcgttgagaagtcttttctacacatcgggaaaactatcgtgtgggaaggtaaaaacgagaacgaggtgggacgttgcaaagagacgggaaaggtccacgtgactgttgatctgaagtactaccgtcctaccgaggtagattttttgcaaggcgattgtacaaaggctaagcagaaactgaactggaagccccgtgtggcttttgacgaattggtgcgtgagatggtccacgccgatgtcgagttgatgcgcactaatcccaatgcttag

SEQ ID NO: 224442 - DNA, 2196 bp, synthetic construct
  misc_feature 1..2196: note = Description of Artificial Sequence: Synthetic coding sequence
  source 1..2196: mol_type = other DNA
atggtagtggaacacccagaattcttaaaggcaggtaaggagcccggtctccagatctggcgggtggagaagttcgatctggttccggtgcccaccaacctgtacggggacttcttcacaggtgacgcctatgttatcctgaagactgtgcagttacgcaacgggaatctccaatacgatctccactattggctcggcaatgaatgctcccaggacgagagtggagccgcagcaatcttcacagtccaattagacgactatctgaatgggagagccgtgcagcaccgagaagttcaaggctttgaaagtgccacctttctgggatactttaaatcaggactcaagtacaaaaaaggcggagtcgcttcaggatttaagcacgtggtgcctaacgaagtggtggtccaaaggttgtttcaggtgaaaggacgccgtgtggtgcgggcaaccgaagtgccggtgagttgggagtcctttaataatggcgactgctttattctcgatttggggaacaatatccaccagtggtgtggctccaacagtaacagatacgagcggctgaaagcaactcaggtctccaagggaatccgagataacgagagatccggcagggccagggtccacgtgtcagaggagggcacggagcccgaggcaatgctgcaggtgctggggccaaagcctgccttgccggctgggactgaggatacagctaaggaagatgctgctaatagaaaactcgccaagctctacaaggtgagtaatggggctggaactatgagcgtgtccctagtcgctgatgagaaccctttcgcccaaggggcactgaaaagcgaggactgctttattttagaccacggaaaggacgggaagatttttgtgtggaagggaaaacaggcaaacacagaagagagaaaagctgctttgaagacggcttcagactttattaccaaaatggactaccctaagcagactcaggttagtgtgttgccagaaggcggtgaaactccactctttaagcagttttttaaaaactggcgggaccctgatcaaacagacggtctggggctgagctatctgtcgtctcacatagcaaacgtggagcgtgtgccatttgacgccgcaaccctccatacctcaacagccatggcggctcagcacggaatggacgatgatgggaccggccaaaaacagatctggaggatagagggatctaataaggtaccagttgaccccgcaacctatggacagttctacggaggggatagctatatcatcctttataactacagacatggcggacgccagggacaaataatctataactggcagggagcccagtcgacgcaggatgaagtcgcagccagcgccatactgactgctcagctggatgaggagttaggtggtacacccgtacagtcaagggtggtacaaggcaaggaaccggcacacctgatgagccttttcgggggtaagccgatgatcatttacaaaggcggaacttcacgcgaaggcggtcagactgctccggcttcgactaggctttttcaggtgagggccaacagcgccggtgctacaagagccgtggaggtcttgccaaaggcgggtgccctaaacagcaacgacgcattcgtgctaaaaacaccgtccgccgcttatttgtgggtgggcaccggggctagtgaggccgaaaagacgggggcacaggaactgctgcgcgtgctgcgggcacaaccagtgcaggtggctgagggtagcgaacccgacgggttttgggaagctctgggcggtaaagcagcatatcggacaagccctcgactgaaagataaaaagatggatgcgcaccccccaagactgtttgcctgcagcaataagattggcaggttcgtaatcgaggaggtgcctggcgagctgatgcaggaggatctggccaccgacgatgtgatgctactcgacacctgggaccaggtgtttgtctgggttggcaaggattcccaggaggaggagaagaccgaagcactgacctctgctaaacgatatatagagacagaccccgctaatagagacaggagaacacctattacagtggtaaagcaggggtttgagcctccatcgtttgtgggatggtttctgggttgggatgatgactattggagtgtggatcccctggaccgggcaatggcggaacttgccgcttag

SEQ ID NO: 224443 - DNA, 2196 bp, synthetic construct
  misc_feature 1..2196: note = Description of Artificial Sequence: Synthetic coding sequence
  source 1..2196: mol_type = other DNA
atggtggtcgaacatcccgagtttctcaaggccggaaaagagccaggcctccagatatggagagtcgaaaaatttgacttggttccagtcccaaccaacttgtacggagattttttcactggcgatgcctatgtcatactaaagactgtgcagttgcgaaacggaaatctgcaatacgatcttcactattggctgggcaatgagtgcagccaggacgagtccggtgcagcggctatatttaccgtgcagctggatgactacctgaatggaagagcagtccagcaccgagaagttcaggggtttgaatccgccactttcttaggctatttcaaatcgggcctaaagtacaagaaaggcggtgtcgcgtccggcttcaagcacgttgtgcccaacgaggtggtcgtgcagaggctgtttcaggtcaaggggaggcgggtagtacgggcaacggaagtcccagtgagttgggagtcgttcaataatggggactgcttcatcctggacctggggaacaacattcaccagtggtgtggctccaactccaacaggtatgagcgcttgaaggctacgcaggtcagcaaggggattcgggataatgagaggagtggaagggcgagggttcatgtgagtgaagagggaaccgaaccagaggccatgcttcaggtccttgggcctaagcctgcgttaccagctggtaccgaggacaccgccaaggaggatgctgctaataggaagttagctaaactttataaagtctcgaacggtgccggaaccatgtctgtttctcttgtggccgacgaaaacccctttgctcagggggctctcaagtctgaggactgctttatcctagatcatgggaaggacggtaagattttcgtttggaagggaaagcaggctaataccgaggaacgaaaggcggcactgaaaacagcttcagatttcatcactaaaatggactatcctaaacaaactcaagtgagcgtgctgcccgagggcggagagaccccattgtttaaacagtttttcaaaaactggcgtgacccagaccagaccgatgggcttggactctcctacctgtcttctcacattgccaatgtggaacgcgtgccctttgatgccgcaacactccacacatccaccgccatggccgctcaacacggcatggacgacgacgggaccgggcagaagcagatatggcgtatcgaaggaagcaacaaggttccggtcgatccggctacatatggccagttttacggcggagattcctatataatcctatacaattatcggcatggtggtaggcaggggcagattatctacaattggcagggcgcacagtcaacccaggacgaggtggccgcaagcgccatcctgaccgcccagctggacgaggaactgggcggaactccagtgcagtcccgtgtagtgcagggaaaagaacccgcacatctcatgtctctgttcggaggtaagcccatgataatctacaaggggggaacatcccgcgagggaggacaaacagcccctgcctctacccggctgttccaagtgagggccaactccgcaggagccacccgggcagtggaggtgctccccaaagccggtgcacttaactcaaatgatgcctttgttttaaaaaccccctccgccgcttatctctgggtgggaacaggtgcgagtgaggcagaaaaaaccggagctcaagagctcctcagggtcttgcgtgcacagcccgttcaggtcgccgaagggagcgagcctgacggattctgggaggcactaggcggtaaagccgcttaccgtaccagcccacggttgaaagataagaaaatggacgctcatccccctcggctgtttgcatgctccaataaaatcggacgatttgtgatcgaggaagtgcccggagagctgatgcaggaggacctggccactgacgacgtgatgctactggacacatgggaccaggtattcgtgtgggtcggaaaggactcccaggaagaggagaagacagaagcactgactagcgctaagcggtatattgagaccgatcctgcaaatagggacaggagaactccgattaccgtggttaagcagggatttgaacccccttccttcgtaggctggttcttaggctgggacgatgactattggagcgtggacccactggaccgcgctatggcagagctggccgcatag

SEQ ID NO: 224444 - DNA, 2349 bp, synthetic construct
  misc_feature 1..2349: note = Description of Artificial Sequence: Synthetic coding sequence
  source 1..2349: mol_type = other DNA
atggcacctcacagaccggctccagccctgctgtgtgcactgagcctcgccctatgcgccttatccctgcccgtacgcgctgctaccgcctctcggggtgctagccaggcaggggctccccagggaagggttcccgaagccagaccgaatagtatggtggtggagcacccagaattcttgaaggccggtaaagagcccggactgcagatctggagagtggaaaagtttgacttggtgcccgtcccaaccaacctttatggcgacttctttaccggagacgcctacgtaattctaaaaaccgtgcagttgaggaacgggaacctgcagtatgaccttcattattggttaggcaacgagtgctcacaggatgaaagcggggctgcggctatctttaccgttcagttagacgactatttaaatggcagagcggtacagcatcgcgaggtgcagggcttcgagagcgcaacttttctgggatatttcaagtctggtttgaagtataaaaaaggaggagtagcgtccggattcaagcacgtcgtaccgaacgaagtggtggttcagagattgtttcaggtaaagggaaggcgcgtggttcgagccacagaggtccctgtgagctgggaaagctttaacaacggagactgttttattctggatctcggcaacaatatccaccagtggtgtggcagtaattcaaatcgatatgagagactcaaggccacccaggttagtaaaggtatcagggacaacgaacgctccgggagggccagagtacatgtgtccgaggaaggcacagaacccgaggcaatgctgcaggttctgggtcctaaaccagcattgcccgcaggtaccgaggatactgctaaggaagatgccgcaaataggaagcttgctaagctttacaaagtgtccaatggagcaggtaccatgagtgtcagcctggtggctgatgaaaatcccttcgcccagggggctctgaaatctgaggattgtttcattcttgatcatggcaaggacggaaagatctttgtctggaaggggaagcaggccaacaccgaagagcgcaaagctgcgctcaagacggcatctgacttcatcaccaagatggactatcccaaacagactcaggtatctgtgctccccgagggaggcgaaacgcctttgttcaagcagttcttcaaaaattggagagatcccgatcaaaccgacgggctggggctgtcctacctctcatctcacattgcaaacgtagagagggtaccgttcgatgcggctactctgcacacatccaccgcaatggccgcacagcacgggatggatgacgatggcaccgggcagaaacagatttggaggatcgaaggctccaacaaggtgcctgtggacccagccacctatgggcaattctatggcggtgattcctacataatattatataattacaggcatggcggtcggcaaggccaaattatttacaattggcaaggagctcagtccacacaggacgaagtagccgcaagtgccatcctgacagctcaactagacgaggaattggggggaacccccgtacaaagcagagtagtccagggaaaggaacccgctcaccttatgtccctgtttgggggtaaacccatgatcatctataaaggaggtacttccagagaggggggacagaccgctcctgctagcaccaggctgttccaggtccgggcaaacagtgccggagctacccgcgctgttgaagtcctgcctaaggccggtgccctgaacagcaatgacgcattcgtgctcaagacaccgtcagccgcttacctctgggtaggaaccggtgcctcagaggccgagaaaacaggcgcacaggagctgttacgggtactacgcgctcaacccgtgcaggtggctgaaggatcagaacccgatggtttctgggaggctctcggcggaaaggccgcatataggacctcaccacggttaaaagataagaagatggacgcacaccccccaaggctgttcgcctgctccaataaaatcgggcgatttgtcatcgaggaggtgccgggtgagctgatgcaggaggatttggccactgatgacgttatgctactggatacttgggaccaggtgtttgtgtgggttggtaaggattcccaagaggaagagaaaaccgaggcgctcacctcagccaaacggtatatagagaccgatcccgctaaccgcgatcgccgaacccctatcactgttgttaagcaagggttcgagccgccatcctttgtgggttggtttctgggttgggatgacgattattggagcgtcgaccctctcgatagagccatggccgagctcgcggcttag

SEQ ID NO: 224445 - DNA, 2196 bp, synthetic construct
  misc_feature 1..2196: note = Description of Artificial Sequence: Synthetic coding sequence
  source 1..2196: mol_type = other DNA
atggtcgtggagcatcccgagtttctcaaggctgggaaggaaccgggtctacagatttggcgagtggaaaaattcgatctggtgcccgtgccgaccaacttgtatggggattttttcactggcgatgcttacgtaattctgaagacagttcagttacggaatggcaatctgcagtatgatctgcactattggctcggcaacgagtgttcccaggatgagagcggggcagctgcaatctttaccgttcaactcgacgactaccttaatggaagggccgtgcagcaccgcgaagtccaggggttcgaatcagccacttttctggggtactttaaaagcgggctgaagtataaaaaaggcggtgttgcctctggattcaagcacgtggtgcctaatgaggtcgtggtgcagcgcctcttccaggttaagggccgaagagtcgtgcgtgctactgaggtgcctgtcagttgggaaagttttaacaatggcgactgctttattctggatttgggcaataatatccaccagtggtgcggctcaaatagcaatcgttatgagaggcttaaggcgacccaagtatctaagggtatcagggacaacgaacggtctggacgagcaagagtgcatgtatctgaggagggcaccgagcccgaagcaatgctgcaggtactgggtcccaaaccagctctccctgcgggaaccgaagatactgcgaaggaggacgccgctaatagaaagctggccaaactatataaagtttcaaatggcgcaggcactatgtctgtgagcctggttgccgacgaaaatcccttcgcccagggagctctaaagtccgaggattgcttcatactcgaccacgggaaggatgggaagattttcgtatggaagggtaagcaggctaatacagaggaaaggaaggccgcactgaaaaccgcctctgacttcatcactaagatggactaccccaaacagacgcaggtctccgtgctgccagaggggggtgagacaccactatttaaacaattcttcaaaaactggcgcgatcccgaccaaaccgacgggctgggcctgtcttatttgagcagtcatatagccaatgtagaacgcgtgcccttcgatgcagccaccttgcacacctctacggcaatggccgctcagcacggcatggatgatgacggcactggccaaaaacagatctggagaattgaaggttccaacaaagttcccgtcgaccctgccacctacggccaattctacgggggagattcttatattattctatacaactatcgtcacgggggtaggcagggacaaataatatataactggcagggcgctcagtccacccaagatgaggttgcggcaagcgcaattttaacggcacagctggacgaagaattaggaggcactccagtgcaatcccgcgtcgttcagggcaaagagccggctcatctgatgtcccttttcgggggtaaacctatgatcatatacaagggaggcacctctcgcgaaggtggtcagactgcaccagcatcaacccgacttttccaggtcagggcaaatagcgccggagcaacccgcgcagtggaggtgctgcctaaagcaggggcattaaactccaatgacgcatttgtgctgaagacaccatcagcagcgtacttatgggtcgggacaggggctagtgaagctgaaaagactggagcccaggagttgctcagggtgcttagggcacagcctgtgcaagtggccgaggggtcagagcccgacggattctgggaggcactgggtggtaaagctgcatacaggacaagcccgaggcttaaggacaagaaaatggacgcacacccgcctagactgtttgcatgtagtaataagatcggtcgcttcgttatcgaggaagtgcctggtgaactgatgcaagaagatctggcgacagacgatgtaatgctcctggacacctgggaccaggtttttgtctgggtgggcaaggactcacaggaagaggagaaaaccgaggccctaacatccgctaagagatacatcgagactgatccagctaatcgtgaccgtaggacaccaatcacggttgtgaagcaagggtttgagcccccttcctttgtgggctggttcctcggatgggatgatgactactggtccgtagaccccctggaccgcgctatggccgaactggctgcatag

SEQ ID NO: 224446 - DNA, 2148 bp, synthetic construct
  misc_feature 1..2148: note = Description of Artificial Sequence: Synthetic coding sequence
  source 1..2148: mol_type = other DNA
atggtcgtggagcaccctgagtttctgaaggccggaaaagagcccggtctgcagatatggcgagtggaaaagttcgatgcttacgttatcctgaagacagtgcagctaagaaatggcaacttacagtacgatctccactactggctcggcaacgagtgctcccaggatgagagcggcgctgcggctatttttaccgtgcagctcgatgactacctcaatggcagagcggtgcagcaccgagaggtacagggattcgagtcggcaacgttcctgggttacttcaagagcggtcttaagtataaaaagggcggagttgcatctggattcaagcacgtagtgccaaatgaagttgtagtacagaggcttttccaagtgaaaggacgcagggtggtgagagccactgaggttccagtatcctgggaaagctttaacaatggcgattgtttcatccttgacttggggaataatattcatcagtggtgcggcagcaacagcaaccggtatgaacggctgaaggcgacacaggtgtcaaaaggcatcagggacaatgaaagatccggtcgggcaagagtgcacgtctccgaggagggcaccgaaccagaagccatgttacaggtactgggcccaaaacctgctctacctgccggaactgaggacaccgctaaggaggacgctgccaaccggaaacttgccaaactttacaaggtatcgaacggagcaggcacaatgagcgtgagtctggtggcagatgaaaaccccttcgcacagggcgcattgaaaagcgaggattgttttatcctggaccacggcaaggacggaaagatcttcgtgtggaaaggtaaacaagctaatactgaggaacggaaggccgctctgaagacagcttcagacttcattacaaagatggactaccccaaacagacccaggtctctgtgctgcccgaaggcggagaaacccctctcttcaagcagtttttcaagaattggagagatcccgatcaaaccgatgggctgggcttgtcgtacctttcttcgcatatcgctaatgttgaacgcgttccatttgacgccgctaccttgcacacctccaccgctatggctgcacagcacggtatggatgacgacgggacaggacaaaaacagatatggcgaatcgaaggctctaacaaagtcccggtggaccccgctacctacggccagttttatggcggagatagctacatcattctgtacaattatcgccatgggggtcgacagggccagattatttacaattggcaaggcgcacaaagcacacaggacgaagtggcagctagcgccatcctgaccgcccagcttgacgaggagctcggaggcactccagtccagtctagggttgtgcaggggaaagagcctgctcatctgatgagcttgtttggcggtaaacctatgataatctataagggcggtacctctagggaaggagggcagactgcacctgccagtacacggctgtttcaggttcgagcgaatagcgccggagctacccgggctgtcgaggtgctgccaaaggctggtgctctgaattccaatgacgcttttgtactgaagacccctagcgctgcctatctgtgggtgggaaccggagcttctgaagccgagaagaccggggcacaggagctacttagagtgctccgggcacagcccgttcaggtggctgagggatccgagccagacggcttctgggaagctttagggggtaaggcggcttatagaacctcccctcgcctgaaggataagaaaatggatgcccaccctcctagactgttcgcatgttctaataagatcggcaggttcgtaatcgaggaggtgcccggtgaacttatgcaggaagacctggccaccgatgatgtgatgctgcttgacacatgggaccaagtgttcgtatgggttggtaaggatagtcaggaagaggaaaaaacggaggccctaacttccgctaagcggtatatcgagaccgatccagcaaaccgggaccgcagaactcctatcactgtcgtcaaacaaggtttcgaacccccttcctttgtaggatggttcctcggttgggatgatgactattggagtgtggaccccttggaccgagccatggctgaactggccgcatag

SEQ ID NO: 224447 - DNA, 2229 bp, synthetic construct
  misc_feature 1..2229: note = Description of Artificial Sequence: Synthetic coding sequence
  source 1..2229: mol_type = other DNA
atggagaagctgttttgctgttttcctaattcaatggtggtcgagcatcctgagttccttaaggccggaaaagagcccggactacagatttggagagtggagaaatttgatcttgtgcctgtccccacaaatctctatggcgatttctttacaggagacgcctacgtcatcttaaaaacagtccagctcagaaacggaaacctccagtacgacctgcattattggttaggtaacgaatgcagccaagacgagtcaggcgctgcggctatctttaccgtgcagctcgatgattacttgaacggccgtgccgttcagcacagggaggtgcaggggtttgagagcgcaacgttcctggggtactttaagtctggtttaaagtacaagaaaggtggcgtggcatcagggttcaagcacgtcgtcccgaatgaagtggtggtgcagcgcttgttccaagtaaaggggagaagagtggtgcgcgcaaccgaagtgcccgtgtcttgggaaagtttcaataacggagattgctttatactagacctaggcaacaatattcaccagtggtgcggttctaattccaaccggtatgagagactcaaagcgacacaggtgagtaagggcataagagataacgaacgctccggccgtgcacgtgtccacgtgagcgaggaagggacggagcctgaggccatgctgcaagttctggggcctaagcctgctttgcctgcgggaactgaagatacggctaaagaagacgccgctaacagaaagttggccaagctgtacaaagtgagtaatggagcaggtaccatgtcagtcagcttggtggcagacgaaaatccttttgctcagggagccctaaaaagcgaggattgttttattctcgaccatggtaaggacggcaaaatctttgtgtggaaggggaagcaggccaacacagaggaaagaaaagccgcactcaagacggcatcagatttcattactaagatggattaccctaaacagacccaggtgagcgttctcccagaaggcggagagactcccttgtttaaacagtttttcaagaattggcgagaccccgaccagacggatgggttggggctctcctacctcagctcccacattgcaaatgtggagagagtgcccttcgatgccgcaacacttcacacatcaacagcaatggcagctcaacatgggatggacgacgacggtacaggacagaagcagatctggcggattgagggttcaaataaggtccccgtggaccccgctacctatggccaattttatggcggagactcatatatcattttatacaattatcgacacgggggtagacaaggacagatcatttataactggcaaggggctcaatccacacaagacgaggtagccgcttcggctatacttacggcacagctggatgaggaactggggggaactccagtgcagtccagagtggtgcaaggaaaggagccagcccatctcatgtccctgtttggcggaaagcccatgattatttacaagggtgggactagccgcgaggggggacagaccgccccagcatccacccggctctttcaggtgcgagccaatagcgctggcgctactagggccgtcgaggtcctcccgaaggccggagctctgaactccaatgacgccttcgtcctgaaaacccctagtgcagcttacttgtgggtcggtaccggcgcttctgaggcggagaaaaccggcgctcaggagttactacgcgtactcagagcccagccggttcaggtggccgaaggtagtgaaccagatggcttttgggaagccttggggggtaaggctgcttacagaacaagtccacgtcttaaagacaaaaagatggacgctcatccgccacgccttttcgcttgcagtaacaaaattggacggttcgtaatcgaggaggtaccaggagagctgatgcaagaagacctcgcaactgatgatgtgatgctgctcgacacttgggaccaagtgttcgtgtgggttggcaaagacagtcaggaagaggagaaaaccgaggcgctgacctccgcaaagcgctatattgaaactgaccctgctaacagggatcggagaacaccgattacagtggtgaagcagggctttgagccaccatcattcgtcggttggtttctgggatgggacgacgattactggtccgtggaccctctagacagagccatggccgaacttgctgcttag

SEQ ID NO: 224448 - DNA, 2196 bp, synthetic construct
  misc_feature 1..2196: note = Description of Artificial Sequence: Synthetic coding sequence
  source 1..2196: mol_type = other DNA
atggtggttgagcaccccgagttcttaaaggcaggaaaagagcccggtttgcagatctggagagtggaaaaattcgatctggttccagtgccaacgaatctgtacggagattttttcaccggagatgcttatgtgatcctgaagaccgtgcaactccgaaacggaaatctgcaatacgacctgcattactggttagggaacgaatgctcgcaagatgagagtggagctgctgccatcttcaccgtgcaactggatgattacctaaacggtcgggctgtccagcatagggaggtgcagggattcgagagcgccactttcctgggttatttcaaatcaggactcaagtataaaaagggtggagttgcctctgggtttaaacacgtggtccccaacgaggtagttgtgcaacggctgttccaggttaaggggcgaagagtggttagggctacagaagttccagtgtcttgggaaagctttaacaatggcgattgctttatcctcgacctaggaaacaacatccatcagtggtgcggcagtaatagtaatcgatacgagcggctcaaggccacgcaggtcagcaaaggtatccgcgacaatgagagatccggaagggctagggtgcatgtttcggaggaaggtacagagcccgaagcaatgctgcaagtactggggccaaagcctgccctccctgcgggaaccgaagacacagccaaggaggacgccgctaacagaaaactagctaagctctacaaagtgtctaacggcgcaggaacaatgtccgtttccctcgttgcagacgaaaacccctttgcccagggcgcactaaagtctgaggactgttttatcttggatcatgggaaagacggcaagatattcgtctggaaaggcaaacaggcgaacacagaagagaggaaagccgcacttaagacagcgagcgacttcatcaccaaaatggactaccccaagcagacgcaagtgagcgtgctccccgagggcggtgagacccccctgtttaaacagtttttcaagaactggcgtgaccccgatcaaaccgacggcttgggcctgagctatctctccagccacattgcaaatgtcgagcgggtaccttttgatgctgccaccctccacacgtcgacggcgatggccgctcagcatggcatggacgatgatggcaccggtcagaagcagatttggcggatcgaaggatctaacaaggtgccggtggatccggctacttacgggcagttctacggaggggactcttacatcatcctctacaattataggcatggagggaggcagggacaaatcatatataactggcagggtgcccagagcacgcaagatgaagtggctgccagtgctattctcacagcccagctcgacgaggagctcgggggtacaccagttcagtcacgtgtcgttcagggcaaggagcccgcacatctaatgagcctattcgggggaaagccaatgattatctacaagggaggcacatctagagagggcggtcagaccgccccagcttcaacacggttattccaggtgcgggcaaactccgctggtgctaccagagccgtggaggtattacccaaagccggtgctctgaacagcaacgacgcattcgtgctcaagactccttcagccgcatacctgtgggtgggcactggagcgagtgaggcagaaaagaccggggctcaagaactcctgcgggtgctaagagcccagcctgtgcaagtagcagaggggtcagaacctgatggcttctgggaggcacttggaggcaaggctgcataccggacctctcctcgtctgaaggacaagaagatggacgcccaccccccaagactgttcgcctgcagcaataaaattgggagattcgtaatcgaggaagtccccggtgagctgatgcaagaggacttggctactgacgatgttatgctcctggacacatgggatcaggtcttcgtttgggtgggaaaggactcacaggaagaagagaaaactgaggcgctgacctccgctaagcgctacatagaaaccgatcccgctaatcgggatcgcagaacgcccatcaccgtggtgaaacagggattcgagcctccctcgttcgtgggctggttcctgggctgggacgatgactactggagtgtcgacccccttgatagagccatggccgaacttgcagcatag

SEQ ID NO: 224449 - DNA, 783 bp, synthetic construct
  misc_feature 1..783: note = Description of Artificial Sequence: Synthetic coding sequence
  source 1..783: mol_type = other DNA
atggtggtcgagcatccggagttccttaaggcgggaaaagaacccggactgcaaatctggcgcgtggaaaagttcgatctagtacccgtcccaacgaatttgtatggcgactttttcactggagatgcctatgtgatactgaagactgtgcagcttcgcaacggaaacctccaatatgacctacattactggctcgggaatgagtgtagccaggatgagtccggggcagctgcgatattcaccgttcagctggacgattatttgaacggtcgtgctgtgcagcacagggaggtacaggggttcgagtctgctacattcctcggatatttcaagagcgggttgaaatataagaagggaggagtcgctagcggatttaagcatgtcgtgcccaatgaagtagtagtacagaggctgttccaggtgaaaggcaggcgggtggtgagggcgacggaggtgccggtgtcttgggaatcatttaataatggagattgcttcatcctcgacctggggaacaatatccatcagtggtgcgggtctaactctaaccggtatgagaggctgaaggctacgcaggtcagtaaaggaatccgggataacgaaagatcaggcagggccagggtgcacgtgagcgaggaggggacggagccagaagccatgttacaagtgctcggccctaaaccagctctgcctgcagggactgaagacactgccaaagaagatgcagccaataggaagctggccaagctgtataaggtctccaatggcgctggcactatgtcatag

SEQ ID NO: 224450 - DNA, 2229 bp, synthetic construct
  misc_feature 1..2229: note = Description of Artificial Sequence: Synthetic coding sequence
  source 1..2229: mol_type = other DNA
atggagaaacttttttgttgtttcccgaatagcatggtggttgagcacccagagtttctgaaagccggaaaggagccaggacttcagatttggagagtcgaaaaatttgacttagttccagtaccaacaaacctgtacggcgatttcttcactggtgatgcttacgtgatcctgaaaaccgtacagctgcgaaatgggaatctgcaatacgaccttcactactggctgggtaacgagtgttcccaggatgagtctggtgcggcagcaatctttacggtgcagctagacgattatctaaatggtcgggctgtgcaacacagagaagtccagggatttgaatctgctacatttctgggatacttcaagtctggcctcaagtacaaaaaaggcggtgtcgcttctggattcaagcacgtcgtgcctaatgaggtcgtggtgcagcgcctttttcaggtgaaagggaggcgggtcgtgagagctaccgaggtccctgtctcctgggaatcatttaacaacggcgattgctttatactggaccttggaaataacattcatcagtggtgcggctccaactctaatagatacgagcgactgaaggcaacccaggttagtaagggcattcgagacaatgaacgaagcggaagggcccgagtacatgtgtcagaagagggcactgaacccgaagctatgttacaggtgctcgggccaaagcctgccctgcccgcaggcacggaagacactgcaaaagaggatgctgccaataggaagcttgctaagttgtacaaggtaagcaacggcgctggcacaatgtccgttagtctcgtggcagatgagaatccctttgcgcagggtgccctcaaatccgaggattgcttcatactggatcatggtaaagatgggaagatcttcgtgtggaaaggaaagcaagcaaatacagaggagcggaaagcagcactcaagaccgcctcagacttcattaccaaaatggattaccctaaacagacgcaagtgtccgttttacctgaggggggtgagactccccttttcaagcagttttttaaaaattggcgagatccagaccaaacagacggattgggtctcagctatctgtcctcccatatcgccaacgtagaaagagtgccattcgacgctgctacgttgcacacaagtaccgccatggctgcccagcatggtatggatgatgacggcaccgggcaaaaacaaatctggagaattgaaggaagcaacaaggttccagtggatccggcaacatatggccagttttacggaggcgattcttacattatactgtacaattacaggcatggtgggaggcaggggcaaatcatttacaattggcagggcgctcagagtactcaggacgaagtcgctgctagtgctatcctgacagctcagcttgacgaagaactaggcggtacaccggtccaaagccgggttgtccaaggtaaggagcccgctcacctcatgtccctcttcggcggaaagccgatgattatctataagggaggcacgtccagggagggcggtcagacagcacctgcaagtacccgtctgttccaggtgagagcaaactctgcaggggctactagggcagtggaggtgctcccaaaagctggagcccttaattccaatgacgcgttcgtcctaaaaacgccaagcgctgcctatctgtgggtcggtacaggggcttctgaagctgagaaaacaggtgctcaggagcttctgcgagtgctgcgggctcagccagtacaggttgccgagggctctgagcccgatgggttctgggaggcactgggaggcaaggctgcgtacaggacgtctccgagattaaaggataagaagatggatgcacatcccccacgcctatttgcgtgttccaacaagatcggaagattcgtaatcgaagaggtgccaggtgaacttatgcaggaggatctcgccacagacgacgttatgctcctcgacacttgggaccaggtttttgtgtgggtgggtaaagactcacaggaagaggagaagaccgaagccctgacgtccgccaaacggtacattgagaccgatcctgctaaccgtgatcgcaggacccccattaccgtggtcaagcaggggtttgaaccaccgtcatttgtcggctggttcctggggtgggacgacgactactggtcagtggaccctctggatcgagctatggcagaactggctgcttag

SEQ ID NO: 224451 - DNA, 2196 bp, synthetic construct
  misc_feature 1..2196: note = Description of Artificial Sequence: Synthetic coding sequence
  source 1..2196: mol_type = other DNA
atggtggtggaacaccctgaatttcttaaggcaggaaaggagcccggtctccagatctggagggttgaaaaatttgatttggtgcccgtgcccactaacctgtacggtgatttctttacgggcgatgcctacgtcatacttaagaccgtgcagctgagaaacgggaacctgcagtacgatttgcactattggctgggtaatgaatgctcacaggatgagtcaggcgctgccgctatttttaccgtacagctggatgattatctgaatggcagggcagttcagcaccgcgaagtgcaaggtttcgagagcgcaacattcttggggtatttcaaaagtgggctgaagtacaagaagggaggagtcgcctcaggattcaagcacgttgtcccaaatgaagtggtggtgcagcggctgtttcaggtcaaggggaggagagttgtacgagccactgaggtaccagtgtcttgggaaagcttcaacaacggggattgcttcattctggaccttggcaataacatccatcagtggtgcggaagcaacagcaaccggtacgagcgcctcaaagcaactcaggtgtccaaggggatccgagacaacgagcggagcggaagagctcgcgttcatgtgtctgaggaaggcacagagcctgaagccatgctgcaggtgctgggacctaaaccagccttgccagctgggactgaagacacggctaaggaggacgctgcgaatagaaaactcgctaaactgtataaggtcagtaatggcgctggcacaatgagtgtgtccttggtggccgacgagaaccctttcgcccaaggagcgctgaagtccgaagattgtttcatcctggaccacggcaaggacggcaagatatttgtttggaagggtaagcaggccaatacagaggagcgcaaggctgcccttaaaaccgcttccgactttattaccaagatggattacccaaaacaaacgcaagtatcagtcctaccagaaggaggcgaaactcccctgttcaagcagtttttcaaaaactggcgcgaccccgaccaaaccgatgggttaggcctcagttacctctcttctcatattgccaatgtggaacgcgttcccttcgacgccgcaactttgcacacctctaccgctatggctgcccaacacgggatggatgacgatggcaccggccagaagcagatctggagaattgagggcagtaacaaggtgcccgtggaccccgcaacatatggtcagttctatggcggtgatagctatattattttatacaactaccgacacggaggccgtcaagggcagattatctataattggcagggagcgcaaagtacccaggacgaggttgcagcatctgcaatcctgacagcccaactggatgaggagttagggggtacccctgtgcaatcacgggtcgtgcagggcaaggagcccgcacatctcatgtccctcttcggcggaaagccgatgataatctacaaagggggaaccagtagggaagggggacaaaccgcccctgcttcaacccgtctgtttcaggtacgtgccaactcggctggcgctacaagggccgttgaggttttgccaaaagctggcgctctgaactctaatgatgcctttgttctgaaaactccgtcagccgcttacctctgggttgggactggcgcttccgaggccgagaagactggggctcaggaattgcttcgggtcttgagggcccagcccgtccaggtcgccgagggatcggaacctgatggcttctgggaggcactcggcggtaaggctgcttatagaacatccccccgtcttaaggataaaaagatggacgctcatcctccaagattattcgcctgttccaacaaaattgggcgttttgtcattgaggaggttccaggagagcttatgcaggaggatctcgccaccgatgatgtcatgttgcttgatacttgggatcaggtgttcgtttgggtaggtaaggatagccaagaggaggagaagaccgaggccttgaccagcgctaagcgctacattgagaccgatcccgctaatcgtgatcgacgcacgccaataactgtcgttaaacagggcttcgagcctccatcgttcgtcggctggtttttgggctgggatgatgactattggagtgtagaccccctggatcgggctatggcggagttagccgcatag

SEQ ID NO: 224452 - DNA, 2118 bp, synthetic construct
  misc_feature 1..2118: note = Description of Artificial Sequence: Synthetic coding sequence
  source 1..2118: mol_type = other DNA
atggtggtggagcaccctgagttcctgaaggcgggtaaagagcccggtttgcagatctggcgcgtggagaaattcgacctggtgcccgttccgacgaatctttacggcgatttttttaccggggacgcctacgtaatcctgaaaactgtccagctgaggaacggcaaccttcagtatgacctccactattggctggggaatgaatgcagtcaggatgaaagtggtgcggcagctatattcacagtgcagcttgatgactacctgaaatacaaaaagggtggtgtcgctagcggcttcaagcatgtcgttccgaatgaagtggttgtgcagaggctttttcaggtgaaaggacgccgtgtggtccgggcaacagaagtaccagtatcctgggaatcttttaacaatggggactgttttatactcgatctggggaacaatatccatcagtggtgcggctcaaattcaaacaggtatgagagattaaaggcaacacaggtgtctaagggtatccgagacaacgagcgctccggcagagcgagagttcacgtttccgaggaaggtacagagccagaggccatgctacaggtactggggccaaagccagccttgcctgccggtacagaggacacagctaaggaagatgcggctaatcgcaaactcgcgaaactttacaaggtttcaaatggagccggaacgatgagcgttagcctcgttgcagatgagaatccctttgcgcagggcgctctcaagtcggaagactgctttatcttagatcatggtaaagacgggaagatctttgtgtggaagggaaaacaggccaatacagaagagcgtaaggccgctcttaaaactgcttcagatttcattaccaagatggattaccccaagcaaactcaagtgtcagtgctgcctgaaggcggtgagacccccctgttcaagcagttctttaagaattggcgtgatccagatcagaccgatggcctcggactgtcgtatctctcttcacatatcgcgaatgttgaacgcgtgcccttcgacgccgctacacttcacacctctacagctatggcggcacagcacggcatggacgatgatggcacagggcagaagcagatctggcgaatagagggatctaacaaagttcccgtcgatcctgccacctatggtcagttctatggtggagatagttacatcatcctgtacaactacaggcacgggggacgccaagggcaaattatttacaactggcagggggcacagagcactcaagacgaagtggctgcatctgcaatcttgacagcccaactagacgaggagctggggggaacacctgtacagagccgggttgtccagggaaaggagcccgctcatctgatgagtctttttggagggaaacccatgattatctataaagggggaacctctagggaaggaggccagactgccccagctagtacacgcctttttcaggtgagagcaaattccgccggagccacccgcgcagtggaagtgttgccaaaagctggcgctctcaactccaatgatgcgtttgtgctaaagaccccctccgctgcttatctgtgggtgggaacaggggcttcagaggccgagaagacaggggcacaggagttattgagggtgctgcgcgcacagcccgtccaggtggccgaaggatctgagcctgatggcttttgggaagccctcggcggaaaagccgcataccgcactagtccaaggctcaaggacaaaaaaatggatgcacatcctccgagattgttcgcctgtagtaataagatcggacgcttcgtaatcgaggaggtgcccggagaactcatgcaggaagacctggccacagacgacgttatgctgctcgatacctgggaccaggtgttcgtgtgggtgggtaaggactctcaggaagaggaaaaaaccgaagcactgacatcagccaaacgctacatcgaaacggatcccgcaaatagggacaggcgcactcccatcaccgtggtgaaacagggctttgagcctccctctttcgttggatggtttctgggctgggacgatgactattggtcagtagacccgcttgaccgagccatggcagagttggccgcatag

SEQ ID NO: 224453 - DNA, 2220 bp, synthetic construct
  misc_feature 1..2220: note = Description of Artificial Sequence: Synthetic coding sequence
  source 1..2220: mol_type = other DNA
atgcccctatgcaccccaaactcaatggtagtggagcacccagagtttctgaaggccggtaaggagcccggactgcagatctggcgcgtggaaaagttcgatctcgtaccagttcccacgaatctctatggcgatttctttaccggcgacgcctacgtcatcctcaaaacggtgcaactccgtaacggtaatctacagtatgatctgcactattggctgggtaacgagtgttcccaggacgaaagcggtgcagccgctatttttaccgtgcagctggatgactacctcaacggcagagctgtccagcaccgggaggtgcaaggatttgaaagtgcaaccttcctgggatacttcaagtccggactcaaatataagaaagggggtgtcgcttctggattcaagcatgtggttcccaatgaggtcgtggtgcaacggcttttccaggtcaaggggcgtcgggtggtgcgggctacagaagtgcccgtttcctgggagtcgttcaataatggtgactgtttcattcttgaccttggtaataatatccatcaatggtgtggaagtaacagcaaccgatacgagcgtctcaaagcaactcaggtttcaaaggggattagggacaatgagcggtcaggcagggcgagggtccacgtgtctgaagaaggaaccgagccagaagcaatgctccaggtgctgggccctaagcccgcactccctgcgggaaccgaagataccgctaaagaagacgctgccaacaggaagttagctaagttgtacaaagtgagcaacggcgctggcactatgtctgtttcactggttgcggacgagaaccctttcgcacaaggggctctgaagtcagaggactgtttcatactcgatcatggtaaagacgggaagattttcgtgtggaaaggtaaacaggcaaacaccgaggagcgcaaggcggcactcaaaaccgcttcagacttcatcacgaagatggattacccaaagcagacgcaggttagcgttcttccagaaggcggtgagaccccgctgtttaaacagttcttcaagaattggagggaccccgaccaaaccgatgggctggggctgtcctacctttcctcacacattgctaacgtcgagagggttccgtttgatgcagcaacattgcataccagcacagctatggcggcacagcacggcatggatgacgacgggactggccaaaaacaaatttggaggattgaaggctccaacaaggtgcctgtggacccagccacctacggtcagttctacggcggagattcttacataatactgtacaactatcggcacggcggaaggcagggacagatcatctacaattggcagggagcccaatcaactcaagacgaggtggccgcaagcgcgatactgaccgctcagcttgatgaggaactgggtggtacccctgtacagtctagagtagtgcaggggaaagagcctgcacacttgatgtcccttttcggaggtaaaccaatgatcatctataaaggcggtacctcccgagaaggcggacagacggcacctgcaagcacgcgcttattccaagtccgggcaaattcagcgggagccacgcgagctgtagaagtgctgccaaaggcaggggctttgaactcgaatgatgcatttgttctgaagaccccatctgccgcttacctttgggtgggaactggggcatccgaagccgagaagacaggcgctcaagagctgctgcgcgttctgagagcgcagccagtccaggttgctgaagggtccgaacccgacgggttctgggaagccttgggcggtaaagcagcctaccgcacttcaccaaggctcaaggataaaaagatggatgctcacccaccaaggttattcgcttgctctaacaagatcggcaggttcgtgatcgaagaagtccctggggaactgatgcaggaagaccttgctactgatgatgttatgctgctcgatacatgggaccaggtttttgtgtgggtgggcaaggattcgcaggaagaggagaagacagaagccttgacaagcgctaaacgatatattgaaaccgaccccgcaaacagagacaggagaactcccattactgtcgttaaacaaggatttgaacccccatcttttgtcggttggttcctggggtgggacgatgactactggtctgtggatccactggacagggcgatggcagagctggctgcttag

SEQ ID NO: 224454 - DNA, 4527 bp, synthetic construct
  misc_feature 1..4527: note = Description of Artificial Sequence: Synthetic coding sequence
  source 1..4527: mol_type = other DNA
atgggccaagaacccagaactctgccaccctctcccaactggtactgtgctcgttgtagcgacgccgtgcccggagggctctttgggttcgccgcaagaacatccgtcttcctggtcagggtaggacccggtgccggtgaatcccctggcacacccccattccgcgtgattggagagctcgtaggacatactgaacgggtgtctggctttactttttcccaccaccctggacagtataatctgtgcgccacttcaagcgatgatggtacagtaaagatatgggacgtagagaccaagaccgtcgtgacagagcacgctctgcaccaacataccatttccaccctccattggtcaccacgcgtgaaggacctcatcgtgtccggtgacgagaagggagtggtcttctgctactggtttaatcgaaacgacagccagcaccttttcatagagccacgcaccatattctgcctcacatgctcgccccaccacgaagacctggtagccattgggtacaaagatggtatcgtcgtgatcattgacatttctaaaaagggagaagtcattcacagactgcggggacatgatgacgagattcactccattgcttggtgcccgctgcccggtgaggattgtctgagcattaatcaggaggagactagtgaggaggctgagatcaccaatggtaatgctgttgcccaggccccagtgaccaaaggatgctatctcgctacgggctccaaagatcagactattagaatttggagttgctctagggggaggggagtcatgatccttaagctgccattcctcaagcgtcgcggtgggggaatcgaccctacagtcaaggagcggctgtggctcacgctccattggcctagcaatcagccaacacagctggtcagctcttgctttggtggcgaattattgcagtgggatctcacccagtcctggcggaggaagtacaccctgttcagcgcctctagcgaagggcaaaatcactctcgcatcgtgttcaatctctgcccgcttcagaccgaggatgataagcagctcctacttagcacctccatggatcgagacgttaaatgttgggatatcgccaccctggagtgttcttggactctgccctctctcggaggctttgcctacagcctggccttctcaagcgtcgatataggatcactggctatcggggtgggtgacgggatgattcgcgtgtggaacacactttccatcaaaaataactacgacgttaagaacttttggcagggagtgaagtctaaagtcactgctctttgctggcacccaactaaagagggttgcttagcctttggcaccgatgacggaaaggtgggcctttacgacacttattctaacaaaccccctcagattagttccacctaccacaaaaagaccgtttacacccttgcctggggtcccccagtgccacccatgtctctcggtggcgaaggagatcgtccgtccctggctctgtattcttgcggcggagagggcattgtgctgcagcataatccttggaagctttccggggaagcgttcgatattaacaagttgattagagacacaaactcaatcaaatataaactgcctgtgcacaccgaaatcagctggaaagccgatggcaagattatggctctggggaacgaagatgggtccatagagatatttcagataccgaatttgaaactaatatgcaccattcaacaacaccataagctggttaacaccatcagctggcatcatgaacacggctctcagcccgagctctcttatcttatggccagcggctccaacaacgccgtcatctacgtgcataatcttaaaaccgtgatcgaaagctcccccgaatctccagttacaataactgaaccgtatcgcacactctcaggtcacacagcaaaaatcacgtccgtggcttggtcccctcaccatgacggtcgactggtttctgcttcatatgacggcaccgcccaggtatgggatgctctcagagaagagccgctttgtaatttcagagggcacagagggcgtttgctctgtgtggcctggagcccgcttgatccagattgcatatactccggggcagatgacttttgcgtgcacaagtggctgaccagcatgcaggaccacagccggcctccccaaggtaagaagtctatcgaactggagaaaaagcgtctaagtcagcccaaggcgaagcctaaaaaaaagaaaaaacctactctgcggacgcccgtcaaactggagtccattgatggcaacgaggaggaatcaatgaaagagaacagcgggccagtggaaaatggcgtgagtgatcaagaaggcgaagaacaggcgcgagagcctgaactgccatgcgggctggctccggcagtgtctcgggagccagtcatatgcacacctgtgtcatctgggttcgagaaaagtaaggtgacaatcaacaataaggtcatcttactcaagaaggagcctcctaaggaaaagccggaaaccctaatcaagaagcgtaaggccaggagtcttctaccattatccacgagtctagaccacagatctaaggaggagctgcatcaggactgtctggtgctggctactgctaagcattcacgagagttaaacgaagatgtgtctgcagatgtagaggagcggtttcacctaggactgtttacagacagggctaccttgtaccgaatgatcgacatcgagggcaaagggcatctggagaatggccacccagaactgtttcatcagctcatgttgtggaaaggcgacctcaaaggggtcctgcaaacagcagctgagaggggagaattgacagacaatctcgtggcgatggcacctgctgccggataccacgtctggttgtgggctgtcgaggctttcgcaaaacagctttgctttcaggatcagtatgtgaaagccgcatcccatctcctgtctatccataaggtgtatgaggccgtggagttattaaaatcgaaccatttctatagagaagcaattgctatagccaaagctagactgaggcctgaggaccccgtgcttaaggacctgtacctgtcttgggggacagtcctggaacgggacggtcattatgccgtcgccgctaagtgctacctgggcgctacctgcgcttatgacgccgctaaagtcttggcgaagaaaggggatgccgcaagcctccgaacagcagccgagttggcggctatcgtcggggaggacgagctctcggcctctttagccctgagatgcgcccaagagctgctgctcgccaacaactgggttggcgctcaggaagcattacagttacatgagtccctccagggccagagactagtgttttgtctactcgagctgctctccaggcatttggaagaaaaacaactctctgagggtaaaagttcatcgagttatcatacttggaacacaggaaccgagggccctttcgtagagagagtcactgctgtgtggaagagcatttttagccttgacaccccagaacaatatcaggaagctttccagaagctccagaacatcaagtacccaagtgccacgaacaacactcctgcgaagcaattgctcctccatatctgtcacgacctgacactcgccgttctgagccaacaaatggcctcttgggatgaagccgtgcaggcacttttgagggccgtggtgcgctcctatgactctggtagctttacaattatgcaggaagtgtatagcgcctttttaccagatggatgcgaccacctcagggataagcttggcgatcaccagtctccggctacccctgctttcaagtctctggaggctttttttctgtacgggaggctctatgagttctggtggagcctatcccgtccatgtcctaactcctccgtatgggtgcgggcaggccataggaccctctctgttgaaccaagtcagcagctggacacagcttccaccgaagagactgaccccgagacaagccagcctgagcctaatagacccagtgagctcgacctgcggctgacggaggagggagagagaatgctctctacctttaaggagctattcagtgaaaaacacgcaagtctccagaatagccagaggaccgtcgcagaagtgcaagagactttagccgaaatgatccgacagcaccagaaaagtcagttgtgtaagtctaccgctaatggcccagacaagaacgaacccgaggtcgaggcagaacagcccttatgctcgagccaatcacaatgcaaggaggagaaaaacgagcctctatcactgcccgagctaacaaaaaggctgaccgaggctaatcagcgcatggctaaattccccgagagtatcaaggcctggccattccctgacgtcctggaatgctgtctggtcttgcttctcatcagatcacacttccctggttgccttgcgcaagagatgcagcagcaagcccaggaactgcttcagaaatacggcaacaccaagacctatagaaggcactgccagaccttctgtatgtag

SEQ ID NO: 224455 - DNA, 396 bp, synthetic construct
  misc_feature 1..396: note = Description of Artificial Sequence: Synthetic coding sequence
  source 1..396: mol_type = other DNA
atgcagactccggtcaatatacccgtccctgttttgcgactaccccgaggacctgatggattcagcagaggctttgcccctgacggccgacgcgcacccctgaggccagaggttcctgaaattcaggagtgtccaattgctcaggagagcctcgagtcccaagaacaaagggccagagcagctctgagggaaagatatcttagaagcctgctcgcaatggtggggcatcaggttagtttcactcttcacgagggcgtgcgcgttgctgctcatttcggagctacagacctggatgtggccaatttttacgtgtcccagctgcagaccccaatcggggtccaggcggaggccctcttgagatgttccgacataatttcttacacctttaaaccttag

SEQ ID NO: 224456 - DNA, 396 bp, synthetic construct
  misc_feature 1..396: note = Description of Artificial Sequence: Synthetic coding sequence
  source 1..396: mol_type = other DNA
atgcagacaccggtcaacatacctgtgcccgttttacgactgccacgtggccctgatggattctccagggggtttgcacccgatggacgccgtgctcccttaagacccgaagtgcctgaaatccaggagtgtcctattgctcaggagagcttggagtctcaggaacagcgagccagagcggcactccgggagcgttacctccgttccttgctagccatggtgggccaccaagtgtcttttactctgcacgagggggtgcgagtcgctgcacactttggggcaaccgatctggatgtggccaatttctatgtgagccaactgcagacccctatcggagtgcaggccgaagctctactgaggtgcagtgacattatctcttatacgttcaaaccctag

SEQ ID NO: 224457 - DNA, 2913 bp, synthetic construct
  misc_feature 1..2913: note = Description of Artificial Sequence: Synthetic coding sequence
  source 1..2913: mol_type = other DNA
atggacgccgcagaacctggactcccccctggacccgaaggtcggaaacgatatagcgatattttccggagcctcgacaatttggagatcagtcttggaaacgtgacgctggaaatgttggctggtgatccgctgttgtccgaggatccagagcccgataagactcccacagccacagtgactaatgaagcttcttgctggtcgggtccctctccggaagggccagtgccactgactggcgaggagctggatctaaggcttattaggaccaagggcggtgtggacgctgctctcgagtacgctaaaacctggtctcggtatgccaaagagctattggcctggacggagaagagggcctcttacgagttggaattcgccaagagtactatgaagattgcagaggcaggcaaggtgtctatccagcagcagagccacatgccgctgcagtacatttatacattgtttctagagcatgacctttccctgggaacacttgccatggaaacagtagcacagcaaaaaagggattactatcaacctctggcggctaaacgcaccgaaatcgaaaaatggaggaaagaatttaaggaacaatggatgaaagagcaaaaacggatgaatgaggctgtacaggccttacgacgagcccagttgcagtatgtgcagcggtctgaagatttgcgagcacgctcccagggcagtcccgaggactccgcaccgcaggcatcacccggaccctcaaagcagcaggagaggcgtcggcgatcaagagaggaagctcaagcgaaggcgcaggaggctgaggcactttatcaggcttgcgtgcgcgaggctaatgcgcgacagcaggacttggagatcgccaaacagcgcattgtttcccacgtccgcaagctggtcttccaaggcgatgaagtgctgaggcgagtcaccctgagtctgttcggcctgcgaggagcccaggcagagcgagggccaagagcctttgctgcactggctgagtgttgtgctccatttgagcctggtcagagataccaggagttcgtacgtgctctcagaccggaggctccacctccgcctccacctgctttcagcttccaagaattcttgcccagtctgaacagctcccctcttgacattcgcaagaagctctccggaccgctccccccacgccttgacgagaattcagcagagcctgggccttgggaggatcccggaactggctggcgctggcagggcacgcccggaccgacccccggatcagatgtggattcagttggagggggatccgaatcacgtagcctcgacagtcctactagttcccccggtgcaggcaccagacaacttgtgaaggcttcttcgaccggtaccgagtccagtgatgatttcgaggagcgcgaccctgacctgggtgacggtctggaaaatggactcggctctcccttcggtaagtggacactgtcctccgctgcacaaacccaccaactgagacgccttcgcggaccagccaagtgtcgggagtgcgaagctttcatggtctcaggaacggaatgcgaggagtgtttcctcacatgccacaaaaggtgcctggagactctcctgatcttatgcggacaccgacgtctgcccgctagaacccctctattcggagtcgactttcttcagctgcctagggactttcctgaagaagtcccttttgtagtgaccaagtgcactgctgagatcgagcaccgcgcactggacgtgcaaggcatctaccgggtgagtggttccagggtgcgcgtggaaagactctgccaggccttcgagaatggacgggctttggttgagctttccggcaacagcccgcacgacgtcagctcagtgttaaagcgcttcctgcaggagcttacggagcctgtgataccattccatctctacgatgcctttatctctttggcaaagactctccacgccgacccgggagatgatccaggtaccccctcaccctcccccgaggtgatccgcagtctcaaaaccctcctggtgcaactgccagactctaactataataccctgaggcatctggttgcccatttgttccgtgtagctgctaggttcatggaaaacaagatgtctgcgaacaatctgggcattgtgttcggtcctaccctcctccgccctccggacggtcctcgggcagcctctgctatccctgttacatgtctgcttgattccggtcatcaagcccagcttgtggaattcctgatcgttcactatgagcagatcttcggaatggacgagctgccccaagccaccgagccaccccctcaggatagctcacctgcaccgggtcctctcacgacttccagtcaacctccccctccccatttggaccctgactcccagcctcccgtgcttgcttcggatccgggtcccgacccgcagcaccactcaaccctggagcagcatcctactgcgacccctaccgaaattcccacccctcagtcagaccagcgcgaggatgtggctgaagacactaaagacggcggaggggaggtctcttcccaaggccctgaggactcgttgctgggcactcaatcacgcggacatttttcgaggcagccggttaagtatcctcggggtggtgtccgtcctgtcacgcaccagctaagtagcctggcacttgttgctagtaagctgtgcgaggagacccccatcacttctgtccctagggggtcgcttagggggaggggacccagccccgcagccgcatccccagaggggtcccctctgcgcagaacgcctctgcctaaacacttcgagataactcaggaaacggctcgcctcctcagcaagttagacagcgaagctgtaccgagggctacctgctgcccagacgtgcagccggaagaggccgaagatcatctgtag

SEQ ID NO: 224458 - DNA, 2826 bp, synthetic construct
  misc_feature 1..2826: note = Description of Artificial Sequence: Synthetic coding sequence
  source 1..2826: mol_type = other DNA
atggacgcggctgagcccggactgcccccaggacccgaaggtcgcaagcgctatagcgacatcttccgcagccttgataacctggagatctctcttggcaacgtgacattggaaatgcttgccggagaccctctgctgtccgaggatccggaacctgataaaactccaactgcgactgtcacaaatgaggccagttgctggagcggacccagtcccgagggccctgtcccactgactggagaggagctggacctccgactcatacgcacaaagggcggagtggacgctgcactggaatacgctaagacatggagtaggtacgcaaaagagctcctcgcctggacagaaaaacgggcttcttacgagctggagttcgcaaaaagtacaatgaagattgccgaggctggaaaagtttcaatccagcagcagtctcatatgcctttgcagtatatctataccctatttttggaacatgatcttagccttggaactttggccatggaaactgtcgcacagcagaagcgagattactaccaaccgctggccgcaaagagaacagagatagaaaagtggagaaaagagttcaaagagcaatggatgaaggagcagaaaaggatgaacgaggcagtgcaggcccttcgaagggcacagctgcagtacgtgcaacgatccgaagacctgagagctcggagtcagggcagccctgaggacagtgcacctcaggcatcacctggaccaagcaagcagcaggaacgacgcagaaggagtcgggaggaagctcaggccaaggctcaggaagcagaggctctttaccaggcatgcgtccgagaggctaacgcacggcagcaggacctcgaaatcgcgaaacagcgcattgtgtctcatgtcaggaagctggtgttccagggggatgaagtgcttcgcagagtcaccctgtcgttatttggactgcgtggcgcacaagcggagagaggtcctcgggcattcgctgcactagccgaatgctgtgcgccatttgagcccggtcagcgctaccaggaattcgtgcgtgcactgcgacccgaagctccacctcctccaccacctgcattctcgttccaagagttcctcccgtccctgaattcctctccactcgacattcgaaaaaaactctccggaccactgccaccccgactcgacgagaactcggccgaaccgggaccttgggaggatcctgggacaggttggcgctggcaagggcctacacctggttccgacgttgatagtgtgggtggtggttctgaatctcgcagcttagattcacccacctcctccccagatctgggagacggacttgagaacgggctggggtccccctttggtaagtggaccctttcatcagccgctcagacccaccagctccggagactcagaggccctgccaagtgcagggaatgcgaggcctttatggtctcaggtactgagtgcgaagagtgctttctgacctgccacaagagatgcctggagacgctactgatactctgtggtcaccgacgcctgcctgctagaactccactctttggggttgacttcctacaactcccacgggatttccccgaagaggttcccttcgtcgtgacaaaatgtacggctgagattgagcaccgcgcacttgatgtccaggggatatatagagtatcaggctcaagggtaagggtagaaagattgtgccaggcattcgagaatgggcgagccttggtagagctgagcggaaattctccccacgacgttagctcagttttgaaacggtttttgcaggagctgacagaacccgtgatcccctttcacctgtacgacgcgtttatcagtctggctaaaaccctgcacgctgatcccggtgacgatcctggcacacctagtccatctcctgaagtaattcgctctctgaagacattactggtccagctgccagattccaactataatacgttgcggcatttggtggcccatctgtttcgcgtggctgccaggttcatggagaacaaaatgtctgcaaacaatttgggcatagtgttcggacctactctgctgaggcccccagatggaccaagggctgcttccgccattccagtgacatgtctgttggattcaggacaccaggctcagttagtggagtttctgatcgttcactatgagcagatatttgggatggatgagctgccccaggctaccgaacctccgcctcaagatagctcccctgctcccggacccctgactaccagctcgcagccaccccctccccacttagatccagatagtcagccaccagttctggctagcgaccccggtcccgaccctcagcatcactccaccctagaacagcacccaactgcaacaccaacagaaatccccactccccagagcgaccagcgcgaagacgtggctgaagacaccaaagacggtggcggtgaggtgtcctcccagggtcccgaagattctttgctcggaacccagagtaggggccacttttcacgacagcctgttaaataccccagagggggtgtgagacctgtgactcaccagctgagttccctcgctctagtggccagcaaactttgtgaagagactcccattacatcagtccctcgcggatcactccggggaagaggtccgtctcctgctgctgcgtctccggaagggagtcctctccgcaggactccactacccaaacacttcgagatcactcaagaaactgccaggctactaagcaaactggactccgaggccgtacccagagcgacatgctgcccagatgtacaaccagaagaggcagaagaccatctgtag

SEQ ID NO: 224459 - DNA, 1005 bp, synthetic construct
  misc_feature 1..1005: note = Description of Artificial Sequence: Synthetic coding sequence
  source 1..1005: mol_type = other DNA
atgaatactatcctgccctgccaggaccagtacttcgttggcggacaaagctataactgcccctactcaactaccacctcagaatcctccgtggatgtgtctaccgagacctgggtctctttctgggccgctggcctgctggataacagggaactgcagcaggcccctcaggcacaggagtctttttcagacagtaattttccattacctgacctttgcagctgggaggaggctcagctatctagccagctttaccgcaacaagcagctccaggatacactcgtgcagaaggaggaagagctcgcgcgactgcatgaggagaataatcaccttcgccagtacctgaacagtgcactggtgaagtgcttagaggaaaaggccaagaagctgctttctagcgacgagttttccaaggcgtatgggaaatttcgaaagggtaagagaaaatccaaagagcagcggtactccccagcagagattccacatcctaaaaacgcaaagaggaacctgagttcagagtttgccaattgcgaagaacaggcaggtccacctgtcgacccgtgggtactacaaactcttgggctgaaagacctcgatactattgatgatacctcttctgccaactattctgcactcgctagccatcctcggagagtagcctcaaccttcagtcagtttcccgatgacgctgtggattataagaacatccccagagaagacatgcccattgactacagaggagataggaccaccccactgcactccacagcaacccatggggaggactttcatatactgagccagcttagtaatcctccggtcggcctgaagacactgccctattacactgcacacgtgtcaccgaacaaaaccgaaatggccttcagtacgagcctctctccccattgcaatgtcaaaacacacagcttccaccagggccaggccttcgtgcggagagacgaggaaggcggttggaaattcacttgggtccccaagcagtcctag

SEQ ID NO: 224460 - DNA, 2727 bp, synthetic construct
  misc_feature 1..2727: note = Description of Artificial Sequence: Synthetic coding sequence
  source 1..2727: mol_type = other DNA
atgggagtcaacgatctgtggcagattctcgaaccggtcaaacaacacatccccttgagaaacctgggcggaaagactatagccgtggatctgagtctgtgggtgtgcgaggcccaaacagtgaagaaaatgatgggcagcgtgatgaagccgcatctgcggaacctcttttttaggatcagctacctgacccagatggatgtaaaactagttttcgttatggaaggcgagccaccaaagcttaaagcggacgtcataagtaaacgtaatcagtcaagatatggctcatcaggtaaatcatggagccaaaaaaccggcaggagccattttaaaagcgtgttgagggagtgtttgcacatgctcgagtgtctggggattccgtgggtgcaggctgctggggaggcggaagcaatgtgtgcttacctcaatgctggaggacacgttgatggatgcctcacaaatgatggagatacgtttctgtatggagcccagaccgtgtatcggaatttcaccatgaacacaaaggacccacacgtagattgttacactatgagttccatcaaatctaagctgggactagaccgggacgctctggtcggactggcaatactgttggggtgcgactatctgccgaaaggagtgcctggagtcggaaaggagcaggccctgaagcttattcaaattctcaagggccaatccttgcttcagcggttcaatcgatggaacgagacttcttgcaacagcagcccccagctcctcgtaactaaaaaactcgcacactgtagcgtgtgctctcatcctgggagccctaaagatcatgaaagaaacggttgccgcctgtgtaaaagcgataaatactgtgaacctcatgactatgagtattgctgtccctgcgagtggcacaggaccgaacacgatcggcagttgagtgaggtggagaacaacattaagaagaaagcgtgctgctgcgagggattcccattccatgaagtcatccaagagttcctgctgaataaggataagctcgtaaaagtgattagataccagagaccagacctgttgctgtttcaacggttcaccttagagaagatggagtggccaaatcattatgcctgtgagaaacttctggtccttcttacacactatgatatgattgagcgaaagctcgggagtcggaattctaatcagctgcaacctattcggattgtcaagacgcggatacgtaacggagtgcactgctttgaaatagaatgggagaaaccagaacactatgccatggaggataaacagcatggagagtttgcccttctgactatcgaggaggagagtttgttcgaggcggcttaccccgaaattgtggccgtctaccagaagcagaagctcgagattaaaggcaaaaagcagaagcgcatcaagcccaaagagaataatctgcccgaaccagacgaggtgatgagctttcagagtcatatgacactcaagccaacctgcgagatttttcacaaacagaatagcaagctgaattcaggcattagtccggacccaaccctgccacaggaaagcatctccgcaagtttgaacagcctgttactcccaaaaaacacaccttgcctgaacgcccaggagcagttcatgtcatccctgcgcccactcgcaattcagcagatcaaggccgtgtccaagtccttgatctccgagtcgagccaacccaacacttcctcacacaacatttctgtgattgctgatctgcacctcagtacaatcgactgggaaggtacatcttttagcaactcccccgcaatccagcgcaataccttcagccacgatctgaagagcgaagtggaatcagaactaagtgccattccagacggcttcgagaacattcctgagcagctgtcatgcgagtcagagcggtatacagctaatatcaagaaggtactcgatgaagactcggacggaatctcacctgaggagcacctcctctcgggaataacagatctgtgcctgcaggacctacctctgaaggagcgcatattcactaagttgtcttatccacaggataacctgcaaccagatgtgaacctgaagaccctctcgatactgtctgtgaaggagtcatgcatagcaaattcaggctcagattgcacgagccacctgagcaaagatctcccaggtataccgctgcaaaacgaatctcgggattctaagattctgaagggagaccaacttctgcaggaagactacaaagttaacacaagcgtaccctactctgtgagcaacacagtggtcaagacctgtaatgtgcggcctcccaatacagccttggatcattcccggaaggttgacatgcagaccacgaggaagattctgatgaaaaagtccgtctgcctcgacagacacagctccgatgaacagagtgccccagttttcgggaaggctaaatatactacccaacgaatgaaacactcttcccaaaagcacaattcaagtcactttaaagaaagcgggcacaacaaacttagcagcccaaagattcacatcaaagagactgagcagtgtgttagatcttacgaaaccgccgagaacgaagagtcatgttttcctgactctactaaaagtagccttagctcgctgcagtgtcataagaaggagaataattcaggtacatgcctggattcccctttaccactgcggcagcgcctgaagctacgctttcagagtacttag

SEQ ID NO: 224461 - DNA, 2727 bp, synthetic construct
  misc_feature 1..2727: note = Description of Artificial Sequence: Synthetic coding sequence
  source 1..2727: mol_type = other DNA
atgggagtgaacgatttgtggcagatcctggaaccggttaagcagcacatcccgctgcggaacctggggggtaaaaccatcgccgtcgacctgtccctctgggtgtgtgaagcgcagacagtgaagaaaatgatgggcagtgtgatgaaaccccatctgaggaatctgtttttccgcatctcctatctaacccagatggatgtcaagttggtattcgtcatggaaggcgagcctcctaaactgaaggctgacgtgatcagcaagaggaatcagagtagatacggatctagcggaaagtcatggtcccagaaaactggtcgctctcatttcaagtcagtgctgagggagtgtctacacatgctagaatgtctcggcatcccttgggtacaagccgctggcgaagccgaggccatgtgcgcgtacctcaatgcaggcggtcacgtggacgggtgcctgacaaatgacggagacacctttttgtacggagcgcaaaccgtatatcggaacttcactatgaacaccaaagaccctcacgtggactgctatacgatgagcagcattaaatcgaagcttggtctggacagggatgccctggttggcctcgctatcctgctgggctgcgactaccttcctaaaggcgttcctggcgtcggaaaagagcaggcactgaagttgatccagatactgaagggccagtccctgcttcaacgcttcaaccgctggaacgaaacatcatgcaatagttcgccccagttgttggtgactaaaaaactcgctcattgttccgtgtgcagccatcccggatcccctaaagaccatgaaagaaacggctgtagactctgtaaaagcgataagtattgcgagcctcatgactacgagtactgttgtccctgtgaatggcataggactgagcatgataggcagctgtctgaggtcgaaaacaacataaagaaaaaagcctgttgctgcgagggattcccattccacgaggttattcaagagtttttgttgaataaagacaaacttgtaaaggtgatccggtaccagcgacccgacctgctcctgtttcaacggttcaccctggaaaaaatggagtggcctaaccactatgcatgcgagaagctcctggtgcttcttactcactatgacatgatcgaaagaaaattaggctctcgaaattccaaccaattacagccaataagaattgtaaaaactcggattaggaacggagttcactgttttgagattgaatgggagaagcccgaacattatgccatggaagataaacagcatggcgagttcgcactactgacaatagaggaagagtcccttttcgaagccgcttacccagagattgtagccgtgtatcagaagcagaaactggagataaagggaaaaaaacaaaaaaggatcaaaccaaaggagaacaacctaccagagcctgatgaagtcatgagcttccagtcccacatgactttaaagcccacgtgcgagattttccacaagcaaaatagcaaacttaatagtggcattagccctgatcccaccctacctcaggaatcgattagcgcctcgctgaactctctgctgctgccaaagaacactccttgcctgaacgcccaggaacagtttatgtcctcactcaggccactcgccattcagcagatcaaggctgtctccaagagtctcatatcagaaagttctcagcctaatacatcctcccacaacatctcggtgattgcagatctgcatctctctaccatcgactgggagggaactagcttctcaaatagcccagcaatccagcgaaacactttctctcacgacttgaaatcggaagttgagtccgagctgtccgccattcctgacggcttcgaaaatatccccgaacagttatcttgtgagtccgaaagatacacagccaatatcaaaaaagtgctggatgaagactctgacggtatttcgcccgaagaacacctattatccgggataaccgacctctgtctccaggatctgcccctcaaggaacgaattttcacaaagttatcatatccacaggacaatttacagccagatgtaaacctgaagacattgagcatcctctcggtaaaagaatcgtgtatagcaaactccggctctgactgcactagccatctttccaaggatcttcctgggattccattgcagaacgaatcaagggatagcaagatccttaagggcgaccagcttctgcaggaagactacaaagtgaacacaagcgtcccttattctgtctctaacactgttgtcaagacttgtaatgtaaggccccctaatacggctctcgaccattctcgcaaagtcgacatgcagacgacccgaaagattctgatgaagaaatcagtgtgcctggataggcatagttctgacgagcagagtgctcctgtgttcggaaaggctaaatataccacacagcgaatgaaacactcaagccagaagcataatagctctcacttcaaagagtctggtcacaacaaactgagcagtcctaagatacacattaaggaaactgaacagtgcgtgagatcctatgagaccgcagagaatgaagaatcgtgtttccctgattccactaagtcctcactgtcaagcctgcagtgccacaaaaaagaaaataacagtggcacatgcctggacagccccctccctctgcggcagagattgaagctccgatttcagagcacctag

SEQ ID NO: 224462 - DNA, 381 bp, synthetic construct
  misc_feature 1..381: note = Description of Artificial Sequence: Synthetic coding sequence
  source 1..381: mol_type = other DNA
atgggagtcaatgacctctggcagattctcgagccagtgaagcagcacattcctctacggaatttggggggaaaaaccatcgcggttgacttatctctgtgggtgtgcgaagcccagacagttaaaaagatgatgggttcggtgatgaaaccacaccttcgcaacttgttctttagaattagctacctgactcagatggacgtaaaactcgttttcgtaatggagggtgaaccacccaaattgaaagccgacgtgatttccaaacgcaatcaatcccggtatgggagcagtggtaagtcttggtcgcagaagacaggtagatcccacttcaagtcagtattacgggaatgtctgcacatgctggagtgcctgggcatatag

SEQ ID NO: 224463 - DNA, 282 bp, synthetic construct
  misc_feature 1..282: note = Description of Artificial Sequence: Synthetic coding sequence
  source 1..282: mol_type = other DNA
atgggggtgaacgatctctggcaaatcctggagcctgtgaaacagcatatacctttacggaacctggggggaaaaacaatagcagttgacctgtcactgtgggtttgcgaagcacagactgtgaagaaaatgatgggaagcgtcatgaaaccgcatcttagaaacctattcttcagaatcagctatcttacccagatggatgtgaaacttgtgtttgtgatggaaggagagcctcccaagctgaaggccgatgttatttcgaagcgtaatcagagcagatag

SEQ ID NO: 224464 - DNA, 1431 bp, synthetic construct
  misc_feature 1..1431: note = Description of Artificial Sequence: Synthetic coding sequence
  source 1..1431: mol_type = other DNA
atggagtggcctaatcactatgcatgcgagaagcttttggttttgctgactcactatgacatgattgagcggaaactaggatcgagaaacagcaaccagctccagcctatccgtatcgtgaaaactcggatcaggaacggggtacactgctttgagatcgagtgggaaaagcctgagcactacgccatggaggataaacagcacggcgaattcgcactgctaacaatcgaggaagagtcactctttgaagcagcctatccagaaatcgtggcagtgtatcagaaacagaagctggagatcaaaggaaagaagcagaaacgaataaagccgaaagaaaacaatctacccgagcccgatgaagtcatgtctttccaatcacacatgaccctgaaacccacctgcgagatattccacaaacaaaacagcaagttgaattccgggatatccccagatccaacccttccccaagaatccatctcagcttccctgaacagtcttttgctcccaaagaacaccccgtgtctcaatgcgcaagaacagttcatgagttctttacggccactcgcaatccagcagattaaggctgtctccaagtctctcatttccgagtctagccagcctaacaccagtagtcataatatatccgtgatagcagacttgcatctgagcaccattgactgggaaggtacttcgttttctaacagccctgcaatacagcgcaacacgttcagccacgacctcaaatccgaggtggagtctgaactttccgccatccctgacggctttgaaaacattccagaacagctgtcctgcgagagtgagcgctataccgccaatattaaaaaagtgctagatgaagactctgacggcatcagtccagaggagcatctgctgtccggaatcaccgatctttgtcttcaggatctgccactcaaggagcgcatcttcaccaagttatcctatccccaggataacctccaacctgacgttaatctcaaaaccctcagtatactgagtgtgaaggagtcatgtatcgcgaattcaggcagcgattgtacttcccacctgagcaaagatcttccgggtattccactgcagaacgagagtcgggatagcaaaatccttaaaggtgaccagctcctccaggaggattacaaggtcaataccagtgtaccatacagtgttagcaatacagtagtgaagacatgtaatgttaggccccctaatacagcccttgaccatagccgcaaggttgatatgcagaccacacgaaagattctgatgaagaagtctgtctgtttggatcgacacagctccgacgaacagtctgcccctgtctttggcaaggctaaatacactacgcagagaatgaaacacagctcccaaaaacacaacagcagccatttcaaagagtctgggcacaatgaatag

SEQ ID NO: 224465 - DNA, 1437 bp, synthetic construct
  misc_feature 1..1437: note = Description of Artificial Sequence: Synthetic coding sequence
  source 1..1437: mol_type = other DNA
atggcatgcctgaatcccgtaccaaaattgtatcgatcagttatcgaagacgtgatcgagggtgtcagaaacctgtttgccgaggaggggatagaagaacaagtgcttaaggatctaaagcagttgtgggagaccaaagtcttgcagagtaaggcgactgaagatttcttccggaacagcattcagagccccctgtttacactccagctaccccatagtctgcatcaaactctgcagagttctacagcttccctggtgattccagctggccgaacactcccaagctttacgacagctgagctcggaaccagcaacagttccgctaactttacattcccagggtaccccatacacgtgcccgcaggagtgaccctccaaaccgttagcggccatctgtacaaggtgaatgtgcccattatggtaacggaaacttcgggcagagcgggtatccttcagcaccccattcagcaagtgttccagcaattggggcaaccttccgtcatccagacgagcgtgccacagctgaatccttggagcttgcaggccacgacagagaagtcccagcgcatagaaaccgtgctgcaacaacccgctatacttccaagtggtccagttgaccgaaagcacttggagaatgcaacctcagatatacttgtatctcctgggaacgaacacaagattgtgccagaggccctgctttgccatcaggaaagctcacactacatttccctgcccggagtggttttttcaccccaggtaagtcagacaaatagcaacgtggagtcagtactgtccggctccgcttctatggcacagaatctccacgatgaatctctgtctaccagcccgcacggcgctctgcaccaacacgtgacggatatccagctgcatatccttaaaaacagaatgtacggctgcgacagcgtgaagcagccccgaaacattgaagaaccttcaaacatacccgtgtccgagaaggatagcaattcgcaggtcgacctcagtattcgcgtgactgatgatgacattggcgaaattattcaggtggatggatccggggatacatcctctaatgaagagattggtagcacgagggacgccgatgaaaacgaattcctggggaacatcgacggcggagatctcaaggtccccgaggaggaggcggattccattagcaatgaggatagcgctacaaacagttctgacaacgaagatccccaagtcaatattgtagaggaagatccgctcaactctggtgatgatgtgtctgagcaggacgtacccgacctcttcgatacagataatgttatagtgtgccagtacgataagatacacaggtctaaaaataaatggaagttctacctgaaggacggtgtgatgtgcttcggcggaagggactacgtgttcgctaaggcaatcggtgacgctgagtggtag

SEQ ID NO: 224466 - DNA, 1335 bp, synthetic construct
  misc_feature 1..1335: note = Description of Artificial Sequence: Synthetic coding sequence
  source 1..1335: mol_type = other DNA
atggcatgtcttaatcctgtcttatgggaaactaaagtcctacagtccaaggctaccgaagacttctttcggaattcaatccagtccccactcttcactctacagctcccccattctctccatcagaccttacagtctagcaccgcatctttggtgatcccagccggacgaactctgccaagtttcactaccgctgagctgggcacaagcaactcttcggccaactttacattcccagggtaccccatccacgtgcccgctggggtgacactccagaccgtgagtggccacctctacaaagtcaacgtgcccataatggtgaccgaaaccagcggccgagctgggatccttcaacacccaatccaacaggtttttcaacagctggggcagccatcagttatccagacatccgtgccacagctgaatccatggtccttgcaagctactaccgagaagtcgcagagaattgagaccgtacttcagcagccagccatccttccgtctggtcctgtggatagaaagcacttggagaatgctacctcagacatcctggtaagccctggcaacgaacacaaaattgtgcctgaggcccttctttgccaccaggagtcatcccattacatctccctgcccggagttgtattctcaccacaggtgtctcaaactaatagtaatgttgagtcagtgcttagcggttccgcatccatggcccaaaacctgcacgacgagtctctttccacaagtccccatggtgccttgcaccaacacgtcaccgatatccagttgcacattcttaaaaatcggatgtacggatgcgactcagttaaacagcctagaaacattgaggagccttcgaacatccccgtcagtgaaaaagatagcaatagtcaggtcgacttatctatcagagtgaccgacgacgatatcggtgagattattcaagtagatggcagcggcgatacatcgagcaatgaggaaatcgggagcacccgggatgctgacgagaatgaattcctgggaaatattgacggcggagacctgaaggtcccagaggaggaagctgactctatctcaaacgaagattccgcgactaactcttcagataacgaagacccccaggttaatatcgtggaggaagaccctctgaactccggtgatgacgtctccgagcaggacgttcccgacctctttgatactgataacgttattgtttgtcagtatgacaagatacatcggagcaagaacaagtggaagttttatcttaaggatggcgtgatgtgtttcgggggacgcgactacgtgttcgccaaagcgatcggtgatgccgagtggtag

SEQ ID NO: 224467 - DNA, 951 bp, synthetic construct
  misc_feature 1..951: note = Description of Artificial Sequence: Synthetic coding sequence
  source 1..951: mol_type = other DNA
atggcttctactagtaggctcgacgcccttcccagagtaacgtgtccgaatcaccctgatgcaatcctggtagaggattatagagcaggggacatgatctgcccagaatgcggcctggtagttggagatcgagtaatcgacgttggcagcgagtggcgcacctttagcaacgacaaagccacaaaagacccatccagggtgggggattctcaaaaccctctgctgtccgacggagatctgtctactatgattggcaaaggaaccggagccgcatctttcgacgagttcggcaatagcaagtatcagaaccggcgtaccatgagcagcagcgaccgtgctatgatgaacgcctttaaagaaatcactaccatggctgatcggataaatctcccaaggaatatcgtggaccgaacgaataacttgtttaagcaggtgtatgagcagaaatctctaaaaggcagagcaaacgacgccatagcatctgcttgtctatacattgcttgccggcaggaaggtgttccacggactttcaaggagatttgcgctgtgagccgtatttcaaagaaagagatcggcagatgttttaagctgatcctcaaggctttagaaaccagcgtggatctcatcaccacgggagatttcatgagtcggttttgctccaacttgtgcttgcccaagcaggtgcaaatggcagccacacatattgctaggaaagccgtagagctcgacctagttcctggtaggtcaccgataagcgttgcggctgccgctatctacatggcctctcaggccagtgcagagaagagaacccagaaggagatcggcgacatcgccggagtcgcagacgtaacaatacgccagtcttatagattgatctacccgagggccccagatctgtttcccacagacttcaagtttgacaccccagtggacaagttaccacaactatag

SEQ ID NO: 224468 - DNA, 696 bp, synthetic construct
  misc_feature 1..696: note = Description of Artificial Sequence: Synthetic coding sequence
  source 1..696: mol_type = other DNA
atggcaagcacctctagactggatgccctgccccgtgtcacttgccccaaccaccctgatgctatattggttgaggactacagagctggggatatgatatgccccgagtgtgaccgagtgatcgatgtcggttccgaatggcggacattctcaaacgacaaagcaaccaaagatccttctagggtgggcgactcacagaacccactgctctctgacggagacctcagtaccatgatcgggaaaggcaccggagcagcaagttttgacgagttcggaaatagcaagtatcagaatcggcgtaccatgagctcgagcgacagggctatgatgaacgcgttcaaggagatcacaacaatggctgatagaatcaatctaccacgcaatattgttgacagaacgaacaatctttttaagcaggtgtacgagcagaagtccctaaagggccgtgcaaatgacgctattgcttcagcctgcttatatatcgcatgccgacaggagggagtgcccaggacttttaaagaaatctgcgcggtctccagaattagcaagaaagagatcgggcgttgcttcaagctgatcctaaaagccttggagacatctgtggaccttattacgactggcgattttatgagcagattttgctctaatctctgtctgcccaaacaggtacaaatggctgcgacgcacattgcttag

SEQ ID NO: 224469 - DNA, 675 bp, synthetic construct
  misc_feature 1..675: note = Description of Artificial Sequence: Synthetic coding sequence
  source 1..675: mol_type = other DNA
gcctccactagccgactggacgcactcccacgagtgacctgccccaatcaccctgacgccattctcgtggaggactacagagccggagatatgatttgcccagagtgtggactcgtcgtgggcgacagggtaattgatgtgggaagtgagtggcggaccttcagtaatgacaaggccacaaaggacccttccagggtgggagattcacagaatcccctgttgtccgatggggatctgagcacaatgatcggtaaagggacaggagccgcatcctttgacgaatttggcaactcaaagtaccaaaaccggaggacaatgtctagctcggaccgagccatgatgaatgccttcaaagaaataaccacaatggccgataggatcaatttacccagaaacattgtagatcgaactaataatctgttcaagcaggtctatgaacagaaatctctcaaggggcgagcgaacgatgcaatcgcctctgcatgtctgtatatcgcttgcaggcaggagggcgttccgaggactttcaaggaaatttgtgctgtttccaggatttcgaagaaagagattggtaggtgttttaagctgatcttaaaggccttggagacgtccgtggatctgatcacaaccggagacttcatgtcacgcaattggcgatattgctggtgttgctag

SEQ ID NO: 224470 - DNA, 876 bp, synthetic construct
  misc_feature 1..876: note = Description of Artificial Sequence: Synthetic coding sequence
  source 1..876: mol_type = other DNA
atggatccttctctcctccgtgaacgcgagttgttcaagaaacgagctctcagcactcctgtggtcgagaagcgctccgcaagctccgagagttcaagctcctcatctaagaagaaaaaaactaaggtggagcacgggggatcaagtggatctaaacagaactccgaccattccaacgggagcttcaaccttaaggcattgtcgggcagtagtggatacaagtttggagtcctggccaagatcgtaaattatatgaagactcgccatcagcggggtgatacccacccacttaccctggatgaaattcttgacgaaacacagcatctggatatcggactgaaacaaaaacagtggttaatgaccgaggctctggtcaataaccctaaaatcgaagtgattgacggcaagtacgcctttaagccaaagtacaacgtcagagacaagaaggccctgctgcgcctgctggaccaacatgaccaacggggactgggcggtattctgctagaagatattgaagaggcactgcctaattcgcagaaagctgtgaaggccctgggcgaccaaattctctttgtgaatagacccgataaaaagaaaattttgtttttcaatgacaaaagttgtcagtttagcgtagacgaagagttccaaaagctgtggagatcagtcaccgtcgattccatggacgaggaaaagattgaggaatatttgaaacggcaaggaatctcttcaatgcaagagtctggtccgaaaaaagtggcccctatccagaggcgcaagaagcccgcaagtcagaaaaagaggcgcttcaaaactcataatgagcacttggctggcgtcctgaaggattatagtgatatcacctcctctaaatag

SEQ ID NO: 224471 - DNA, 381 bp, synthetic construct
  misc_feature 1..381: note = Description of Artificial Sequence: Synthetic coding sequence
  source 1..381: mol_type = other DNA
atggaccccagcctccttagagaacgagaactctttaaaaagcgcgcattgagtacgccagtggttgagaagcgaagtgcaagctcagaaagtagttcctcctcaagcaagaaaaagaagactaaagttgaacatgggggttccagcggctcgaaacaaaattccgaccactctaacggctcgtttaaccttaaagcattaagcgggagctccgggtacaagttcggggtgctggccaaaatagtaaattatatgaagactcgccatcagaggggcgatacacatcctttgaccttagacgaaatcctggacgaaacccagcatctggacattggcctaaaacaaaaacagtggctgatgactgaagcacttgtaaactag

SEQ ID NO: 224472 - DNA, 597 bp, synthetic construct
  misc_feature 1..597: note = Description of Artificial Sequence: Synthetic coding sequence
  source 1..597: mol_type = other DNA
atggatcctagcttattgcgggagagggagttgttcaaaaaacgcgcattaagtaccccagtcgtagagaagcggtctgcgtcctccgaatcttcaagttcgagctctaaaaagaagaagactaaagtggaacacgggggttcatctggatcgaaacagaattcagatcatagtaatggctcctttaacttgaaagctttatctggtagcagcggatacaaatttggggttttagcaaaaattgtcaactacatgaaaaccagacatcaaaggggagacacacatccgctcaccctggacgaaattctcgatgagacccagcacctggatattggcctgaagcagaagcagtggctcatgacagaggcccttgtgaataatcccaagatcgaggtcattgatgggaaatacgcttttaagcccaagtacaatgtgcgggacaaaaaggccttgctgaggctgctggatcagcatgatcaacgtggcctgggtgggattttgctcgaagacatcgaagaggccctaccaaacagccagaaagccgtcaaagctctgggagatcagatcttattcgtcaacaggccagataagaagtag

SEQ ID NO: 224473 - DNA, 1554 bp, synthetic construct
  misc_feature 1..1554: note = Description of Artificial Sequence: Synthetic coding sequence
  source 1..1554: mol_type = other DNA
atggccgcactcggaccatcatctcaaaatgtaaccgaatacgtagtcagagtgcctaagaacaccacgaagaagtacaacattatggcgttcaatgcagctgacaaggtcaacttcgctacgtggaaccaagctcgtctcgaacgcgatctttccaataagaaaatctaccaggaggaggagatgccagagtccggcgcaggctccgaatttaaccgtaagttgcgtgaggaagccagacgtaagaaatacggcatcgtgttaaaggagtttcgacctgaggatcagccctggctcttacgagtgaatggcaagtcaggaaggaagttcaaggggattaagaagggcggagttaccgaaaatacttcgtactacatcttcacccaatgcccagacggagccttcgaggcatttcctgttcacaattggtacaacttcacccccttagccaggcatcgaactctcaccgcagaggaagctgaggaggaatgggaacgtcgcaataaggtcttaaaccactttagtattatgcagcagcgcaggctgaaggaccaggatcaggatgaggacgaggaagaaaaggaaaaaagagggcgaaggaaagcctccgaactgaggatacacgacttggaggacgatcttgagatgtccagcgacgcaagtgacgctagcggcgaggaaggcggaagggtgccgaaagccaagaagaaggcaccactggcaaaaggcggtaggaagaaaaagaagaagaaggggagtgatgatgaagcgtttgaggattccgatgacggcgattttgaaggacaagaagtggactatatgtccgacgggagttcctcatcacaggaagaacctgagagtaaggctaaggcccctcagcaagaagaaggacccaaaggcgtggacgagcagtctgatagcagcgaagaatcagaagaggaaaagcctcctgaagaggacaaagaagaagaagaggagaaaaaggctcctactccacaggagaagaagagaaggaaggactcgtcagaagagtcggattcttccgaagaatcggacatcgattccgaggcatcatcagcactctttatggccaagaagaaaactcccccaaagcgagaacgcaagcccagtggaggatctagtagggggaacagcaggcctgggaccccaagtgctgaaggagggagtacgtccagtactctgagagctgctgcttcgaagctggagcaggggaaaagagtgtcggagatgcccgctgcgaagaggttgcggcttgacacgggtccccagagtctgagcggcaaatctacccctcagccccctagcggcaagaccacacccaatagcggggatgtccaggttactgaagacgccgtgcgtaggtatctgaccaggaaaccgatgacaacgaaagatttgctcaaaaagttccaaaccaagaagactgggctctcttccgagcaaacagttaatgtactggctcaaattctcaagaggctgaatccagaacgtaagatgatcaacgacaaaatgcacttcagtttaaaagagtag

SEQ ID NO: 224474 - DNA, 1299 bp, synthetic construct
  misc_feature 1..1299: note = Description of Artificial Sequence: Synthetic coding sequence
  source 1..1299: mol_type = other DNA
atggctttcaacgctgctgacaaagttaactttgccacctggaaccaggcaaggctggaacgcgacctgtccaataagaagatttaccaagaggaggagatgcccgaatctggagcaggatccgaatttaataggaaactgcgcgaggaggcaagacggaagaagtatggaatcgttctcaaggaatttagacccgaggaccagccctggctgctgagagtcaatgggaaaagcggcaggaagagaaataaggttctgaaccatttctctatcatgcagcagcggaggctcaaagatcaggaccaagatgaggacgaggaagaaaaggagaaaaggggacgacgcaaggccagcgagcttcgtattcacgacctcgaggatgacctggagatgagtagcgacgcctcagatgctagcggtgaagagggaggtagagtgccaaaggccaagaagaaggccccattagcaaaaggcggacgaaaaaaaaaaaagaaaaagggatctgacgatgaagccttcgaagactccgacgacggggacttcgaaggccaggaagtcgactacatgtctgatggaagtagctcctcacaggaggagccggaaagcaaagccaaggcccctcagcaggaggaaggacccaagggggtcgatgaacagagcgattctagcgaagagtcagaggaagagaaacctccagaggaagataaggaagaggaagaggagaagaaggcccctactccccaggaaaaaaaaagacgaaaggacagttccgaagagtccgattcatccgaggagtctgacatagactctgaggcctccagcgctttgttcatggctaaaaagaaaacccctcctaaacgggagaggaaaccctccggtggatcaagtcgaggaaactcccggcctgggaccccatctgccgagggcggaagtacctcaagcactctgagagcagccgcttcgaagctcgaacagggcaagcgtgtttcagaaatgcctgccgctaaacggctgagactggatacgggacctcagtccctttcagggaagtccacaccacagcccccatctggaaagacgacccctaattctggtgatgtgcaggtgaccgaggatgccgtgcgacgctacctcactcggaagcccatgaccacaaaggacctgctgaagaagtttcaaaccaaaaaaacggggctgagttccgaacaaacagtaaatgtgcttgcccaaattctaaaacgtctgaatccagagaggaaaatgattaacgataaaatgcacttcagcctgaaggagtag

SEQ ID NO: 224475 - DNA, 384 bp, synthetic construct
  misc_feature 1..384: note = Description of Artificial Sequence: Synthetic coding sequence
  source 1..384: mol_type = other DNA
atggcagctctcggacccagcagccagaacgtaacagagtacgtggtgagagtacccaagaacaccacaaagaaatacaatatcatggctttcaatgctgctgataaagtcaatttcgccacttggaatcaagcaagattggagagagatttatcaaacaagaagatataccaggaggaggagatgccagagagcggagctgggtccgaatttaataggaagttgagagaggaagctcgtaggaagaaatacggaattgttttgaaagagtttaggccagaggaccaaccgtggttgctgcgggtgaatggcaagtctgggcgaaagttcaagggcatcaaaaaaggaggggtgacagaaaatacctcctactacatcttttag

SEQ ID NO: 224476 - DNA, 1647 bp, synthetic construct
  misc_feature 1..1647: note = Description of Artificial Sequence: Synthetic coding sequence
  source 1..1647: mol_type = other DNA
atggcgacgtcgagcgaagaggtgctgttaattgtgaagaaggtgaggcagaaaaagcaggatggtgcactgtacctcatggcggagagaatcgcctgggcccctgaaggaaaggacaggtttaccatctctcacatgtacgctgacatcaaatgtcagaaaatctctcccgagggtaaagccaaaatccagctacagttggtactgcacgctggcgatacgaccaactttcatttctcaaatgaatccacagccgttaaggaacgggatgccgtcaaggatctgttgcagcaactgttacccaaatttaagagaaaagccaacaaggaactcgaagagaagaatcgtatgctgcaagaggacccagttttgttccagctttacaaagacttggtagtatcccaggtgatcagtgcggaggagttttgggcaaatcgtctgaacgtgaatgccactgactcgtcgtcaacctcaaaccacaaacaggatgtgggcatcagtgccgctttcctggccgacgtgagacctcaaacggatggctgtaacggactgaggtacaatctcacatcagacatcatagagagtattttcaggacttaccctgccgtgaagatgaaatatgcagagaatgtgcctcacaatatgactgagaaagagttctggactcggttcttccaaagccattacttccatagagaccgtctgaacactggtagcaaagacctgtttgcagagtgtgctaaaatcgacgaaaaagggctcaagactatggtgagtctgggagttaagaatccactcctcgatctgaccgcacttgaagacaaacccttagacgaaggatacggcatttcaagtgtgccatcagcttctaactcgaaatcaatcaaggaaaactcgaatgccgcaatcattaagcgctttaatcatcacagtgcaatggtcctcgcagccggactgcggaagcaggaggcgcagaatgagcaaacaagcgaaccaagcaacatggacggtaacagtggcgacgcagactgttttcagcccgcagtaaagcgggctaagttgcaggagtcgattgagtacgaagacctgggcaagaacaacagcgtgaaaaccatcgccctgaacctaaaaaaatcagaccgatactatcacggacctactccgattcagagccttcagtatgctacaagtcaggatataatcaacagttttcaatctatccgccaggagatggaagcctataccccaaagttaacccaggtcctgtctagcagcgctgcgtcctccacaatcacagctctgtctccagggggagcacttatgcagggagggacacagcaggccatcaatcaaatggtccctaatgacatacagtcagagttgaaacacttgtacgtggcagtcggcgaactgttgcgccacttctggagctgctttcctgtgaatacaccgtttctggaggaaaaagtggttaaaatgaagagcaacctggagcggttccaggtgacaaaattgtgcccctttcaggaaaagatacggcgacagtatctgtccactaacttggtgtcacatattgaggagatgctgcaaacagcatacaacaagcttcacacatggcagagccgacgcttgatgaagaaaacttag

SEQ ID NO: 224477 - DNA, 1647 bp, synthetic construct
  misc_feature 1..1647: note = Description of Artificial Sequence: Synthetic coding sequence
  source 1..1647: mol_type = other DNA
atggccacttcgagcgaggaggtgttgctgatagtcaaaaaggttaggcaaaaaaagcaggacggtgccctctacctaatggcagagcgaatcgcttgggcgcctgaaggaaaggaccgcttcacaattagtcacatgtatgctgacatcaaatgtcaaaaaatctcaccagaaggtaaagcaaagatacaactgcagcttgtactccatgcaggggacactaccaacttccatttctctaatgagtccaccgcagtgaaagagagagatgcggtgaaagacctgctgcagcagctcctacccaagttcaagagaaaagcaaacaaggaactcgaagaaaagaaccggatgctccaggaggatccagttcttttccagctgtataaggaccttgttgtcagccaggtcatcagtgcagaggaattttgggctaaccgccttaacgttaacgcaacggactcaagctcgacttcgaaccacaaacaggacgttggaatttcagcagctttcttggccgatgttcggccacagaccgatggttgcaacggtttgcgttataacctaacatcagacatcatcgagtccatctttcgcacttaccccgctgttaaaatgaagtatgccgaaaacgtcccacataacatgaccgagaaagaattctggacgcggttcttccagtcgcactatttccatagggaccgcctgaacacgggtagtaaagatctgttcgccgagtgcgccaagattgacgagaaaggattgaagaccatggtgagtcttggggtgaagaatcccctgctagatctgacggcattagaagataagcctttagacgaagggtacgggatatcaagtgtcccatcagcgtcgaattccaagtccattaaagaaaatagtaacgccgcaatcataaaacgtttcaaccaccacagtgccatggtgctggccgcagggcttcgaaagcaagaggcccagaatgagcagacctccgagccatcaaacatggacggaaatagcggtgatgcggattgtttccagcccgctgttaagagggccaaactccaggagtccatagaatatgaagacttagggaagaacaacagcgtgaaaaccatcgccttaaatttgaaaaagtcggacagatattaccacgggcctacacctatccagagcctccagtatgctacaagccaggacattattaattctttccagtccatccgacaggagatggaagcttatacacccaaactaacacaggtgctgtcgtcatcagccgcatcatctacaattactgctctcagccctgggggagccctgatgcagggcggaacacaacaggccatcaaccagatggtgcccaacgatattcagtcagaactgaaacacctatatgtagctgtgggggagctgcttcgacacttttggtcgtgcttcccagtgaacaccccgttcctcgaagagaaagtcgtgaaaatgaagagtaatttagaaaggtttcaggttacaaagttgtgcccctttcaggaaaaaatccgccgacagtacctgtcaaccaatctggtctcccacattgaagaaatgctccaaactgcctataataaactgcacacctggcaatctcgcaggctgatgaagaaaacttag

SEQ ID NO: 224478 - DNA, 288 bp, synthetic construct
  misc_feature 1..288: note = Description of Artificial Sequence: Synthetic coding sequence
  source 1..288: mol_type = other DNA
atggcgacatcaagcgaggaagtgctccttatcgttaaaaaggttcgccagaaaaagcaggacggagccctatacctgatggctgagagaatcgcgtgggcaccagaaggaaaggatcggtttacaatctcacatatgtatgccgatattaagtgccagaagatctcgcccgaggggaaagccaagatccagcttcaattggtcctccacgccggtgatactacaaattttcatttcagcaatgaatcaaccgcggtgaaagagagggatgctgtgaaagacttgtag

SEQ ID NO: 224479 - DNA, 1299 bp, synthetic construct
  misc_feature 1..1299: note = Description of Artificial Sequence: Synthetic coding sequence
  source 1..1299: mol_type = other DNA
atgctgcaggaggatccagttctgttccagttgtacaaggacctggttgtgagtcaggttatctcagcggaggagttttgggcgaaccgcctgaatgtgaatgctacagactcttcctctaccagcaaccataaacaggacgtagggatctctgccgctttcctggccgacgtgcgtccccaaacggacgggtgcaacgggctgaggtacaatttgacgagtgatattatcgagagcatattcaggacgtacccagctgtaaagatgaaatatgccgaaaacgttcctcacaacatgacggaaaaagagttttggacccgattctttcagagccattactttcaccgcgacaggctgaacaccgggtccaaagacctgttcgcagagtgtgctaaaattgacgagaaaggtctcaagactatggtcagccttggagtgaagaacccacttctggacttgactgcactggaggacaagcccctggatgagggctacgggatatccagcgtcccctctgcgtctaattcaaaatctatcaaggagaattccaacgccgctatcatcaagcggttcaatcatcactctgctatggttttggccgctggcctgcggaaacaggaggctcagaacgaacaaacctctgaaccgtctaacatggatgggaacagcggcgatgctgactgttttcaacccgctgtgaagcgggcaaagttgcaagaaagcattgaatatgaagatttgggcaaaaataactctgtgaaaaccatcgccttgaatctgaagaaatcagaccggtactatcacggccctacgcctatacagagcctgcagtatgctaccagtcaagacatcatcaacagcttccagagtattagacaggagatggaggcctacacacctaagttgactcaggtcctatctagcagtgccgcatcctctacaatcacagccctctcgcctggtggagctcttatgcagggcggaactcaacaggccatcaatcagatggtgccaaatgatatccagtccgagttaaagcatctgtatgttgcggtgggggaactgctgaggcacttctggtcctgcttccccgtgaatactcccttcctggaggaaaaggtggtgaaaatgaagtctaatctggagcgcttccaggtgacaaagttatgtccttttcaagagaagatcaggcgacagtacctgtcaactaacctggtgtctcatatcgaagagatgctgcagacggcctacaacaaactgcatacctggcaatcccgtcgcctaatgaagaagacttag

SEQ ID NO: 224480 - DNA, 1188 bp, synthetic construct
  misc_feature 1..1188: note = Description of Artificial Sequence: Synthetic coding sequence
  source 1..1188: mol_type = other DNA
atggatgaggaacctgaaagaactaagcgatgggagggcggttacgagagaacctgggaaattcttaaggaggacgagagcgggagcctgaaggcaacgattgaggacatcctttttaaggcgaagagaaaacgtgttttcgagcatcacggccaggtccgtctgggcatgatgcgccatttgtatgtggtggtggacgggtcccggactatggaagatcaggatctgaagcccaacaggcttacctgcaccctcaagctgctagaatacttcgttgaagagtactttgatcaaaatcccataagtcaaatcggcatcattgttaccaagagcaaaagagcggaaaaactcactgaactgtccgggaatcccaggaaacatattacgtctctgaagaaggccgtagatatgacctgtcatggcgaaccttctctatataattctctgagcattgcgatgcaaacccttaaacatatgcccggacacactagtcgcgaggtgctcattatatttagttcactgacgacctgtgacccatctaatatatacgatttgatcaagactttaaaggcagcgaagatcagggttagcgtgatcggcctgagcgctgaagtcagagtctgcaccgtactcgcacgggagaccggcggaacctaccatgtaatactggacgaatcccactacaaagagttgctgacacaccacgtttcaccaccccctgctagttcctcatcagagtgttccctgatccgcatgggattcccacaacacactattgcatctctctctgaccaggacgcaaaaccatcctttagcatggctcacctggacgggaatactgagcctggcctaacgctgggtgggtacttttgtccgcagtgccgtgccaagtactgtgagctgcccgtcgagtgtaagatctgtggtttgactttggtctccgcaccacatctggccaggagttaccatcacttatttcctctcgatgcctttcaggaaattccgttggaggaatacaatggggaacgattctgttatggatgccagggggaactgaaggaccagcatgtgtacgtgtgcgctgtgtgccagaacgtcttctgcgtggactgtgacgtgtttgtgcacgattctctccattgctgtcctgggtgtattcacaagatacccgctccctcaggagtttag

SEQ ID NO: 224481 - DNA, 1188 bp, synthetic construct
  misc_feature 1..1188: note = Description of Artificial Sequence: Synthetic coding sequence
  source 1..1188: mol_type = other DNA
atggatgaagagcccgagcgcaccaagcggtgggaggggggatacgaacgaacctgggagatcctcaaagaggacgaatcaggaagcctgaaggcaacgatcgaggatatcctgttcaaggcaaaaaggaaacgagttttcgagcatcacggtcaggttagactgggaatgatgcgccacctgtatgtagtcgtagatgggtcaagaacaatggaagaccaagacttgaaacctaaccgactgacttgtacactgaagcttttagagtattttgtggaggagtacttcgatcagaatcctatctcccagatcggcattatagtcacgaaatcaaagagagcagaaaagttgactgagctcagcgggaacccccgtaagcatatcacgagtctgaagaaagcagttgatatgacatgccacggtgaaccatccctgtacaattccctgtccatagctatgcagacgctgaaacacatgcccggacatacttcacgcgaggtactgattatcttctcaagtctgactacatgcgatcccagcaacatttacgatctgataaaaacactgaaggcagccaagattcgcgtctctgttatcggcctgtctgcagaggtgcgggtctgcacggtgctagctcgcgagacaggcggaacttaccatgttattcttgatgagtctcattacaaagaactgctcacccatcacgttagcccacctcccgctagcagctcaagtgagtgttctctgatccggatgggcttccctcagcacacaattgcctctctatctgatcaggatgcgaagccctccttctctatggctcatctcgatgggaataccgagcccggtttaactctaggcggatatttctgcccacaatgcagggcaaagtactgcgaattacccgtggagtgcaagatctgcggtttaaccctcgtttcagcgcctcatctcgctagatcgtatcatcacctgtttcccctggacgcttttcaagagatacccctggaggagtataacggggagaggttttgctatggctgtcagggggagctcaaagatcaacacgtatatgtgtgcgccgtgtgccagaacgtcttctgcgtagactgtgatgtgttcgttcatgattccctccactgctgtccagggtgcatccacaaaatacccgcaccctcaggggtgtag

SEQ ID NO: 224482 - DNA, 1017 bp, synthetic construct
  misc_feature 1..1017: note = Description of Artificial Sequence: Synthetic coding sequence
  source 1..1017: mol_type = other DNA
atgcgtcatctatacgtagtcgttgacggttcacgcaccatggaggaccaggaccttaaacctaatcgcctcacatgtactctgaaactgctcgagtattttgtggaggaatactttgatcagaatcctatcagccagatcggaataatagtgacgaaatctaagagagcagaaaagctcaccgaacttagtgggaacccaagaaaacacattacatccttgaaaaaagctgtcgatatgacatgtcacggtgagccaagcttgtataattcactctccattgcaatgcaaaccttgaagcacatgccgggacacactagtcgggaggttcttattatcttcagctcccttactacatgtgaccccagcaatatttatgacctcattaaaaccctgaaggctgccaagattagagtgtcagtgatcggtttgtcagcagaggtgcgtgtctgtaccgtgttggcacgggagactggcggtacgtatcacgtgattctcgacgagtcccattacaaggagttgctgacccatcacgtgtctccccctccagcatcctcctcctccgaatgcagtctgattagaatgggattcccccaacacaccatcgcatccctctctgaccaggacgcaaaaccatccttttcaatggcccacctggatggcaatacggaaccaggcttgaccctgggaggatacttctgccctcaatgtcgagccaagtattgtgagttgccagttgaatgtaaaatctgtggacttacactggtgagcgccccacatcttgccagatcataccatcatctcttccctttagacgctttccaagaaatcccattagaggaatacaacggcgaaagattctgttacggctgccagggagaactcaaggaccagcatgtgtacgtgtgtgccgtgtgccagaacgtcttctgcgttgattgcgatgttttcgttcatgactctctccattgctgccccggttgcattcacaaaatacctgcacctagcggcgtctag

SEQ ID NO: 224483 - DNA, 1188 bp, synthetic construct
  misc_feature 1..1188: note = Description of Artificial Sequence: Synthetic coding sequence
  source 1..1188: mol_type = other DNA
atggacgaggagcctgaacggaccaaacggtgggagggcggatatgagcgcacatgggaaattctgaaagaggacgaaagcgggagcttgaaggccacgatagaggacattctcttcaaggccaagaggaaacgcgtcttcgaacatcacgggcaggtacgtctcggcatgatgcggcatctttatgtggtggtcgatggtagcagaacaatggaggatcaggacctcaagcccaaccgcctgacctgcactttaaagcttttggagtacttcgtggaggagtattttgatcagaaccctattagtcaaatcgggattattgtgactaaaagcaaacgagccgagaagttgaccgagctgagtggcaaccctagaaaacatattacatctttgaagaaggctgtggacatgacttgccacggcgagccttcactgtacaactccctgagtatcgctatgcaaacattgaaacacatgcccggacacacaagccgcgaggtgctgattatattctcatccctgacgacgtgcgatcctagcaatatttacgacctaatcaaaaccttgaaggctgcaaaaatacgtgtgtcagtaattggtctttctgctgaggttcgagtttgcaccgtgctggcaagagagactggtggcacttatcacgttattctcgatgagagtcattacaaggagcttctaacccaccatgtgagccctccccctgctagttcttcctcagaatgtagcttgatcaggatgggattcccccagcatacaatcgcaagcctgtcggaccaggacgccaagcctagcttctccatggcgcaccttgacggaaacacggagcctggacttaccctaggcggatatttctgccctcagtgtcgcgctaaatattgtgaattgcctgtcgaatgtaagatttgcggccttacactggtatcagctccacaccttgcccgatcctatcaccaccttttcccactagacgcttttcaggagatacctctcgaggaatacaatggagagaggttctgctacggttgccagggggagctcaaggatcaacatgtctatgtttgtgccgtgtgccagaacgtcttttgtgttgattgtgatgtattcgtccacgacagcctccactgttgccccggttgcatacacaagattccagccccatctggtgtgtag

SEQ ID NO: 224484 - DNA, 1389 bp, synthetic construct
  misc_feature 1..1389: note = Description of Artificial Sequence: Synthetic coding sequence
  source 1..1389: mol_type = other DNA
atggaaagtactccctctcgaggtttaaacagggttcatctgcagtgcagaaacttgcaggagttcctgggaggcctgagcccaggagtgctcgatcgtttgtacggtcacccagccacctgtctagctgtgtttagagagcttccatccctagctaaaaactgggtcatgcgcatgctgttcttggagcagccgctgccacaggccgctgtggcattatgggtgaagaaagaattttccaaggcccaggaggaatcgacgggattactctcgggcctcagaatatggcatacacagctgctgccgggtgggctacagggcctaatactcaatccgatttttagacagaatctgcgcatagcattactcggaggcggtaaagcgtggtccgacgataccagtcagctcggacctgataaacacgcgagggacgtaccttccctggacaaatacgccgaagagcgatgggaggtcgtgttgcactttatggtaggctcgcccagtgccgctgtgagccaggatctcgcccagctgttgagccaggcagggctaatgaaatctacggaacctggggagcctccatgtattaccagcgcgggttttcaatttttgctcctggacacacctgcccagctgtggtatttcatgctccaatacttgcagacggcccagtcccgtggaatggatctggtggaaatactgagctttctgtttcagctgagcttcagcacactggggaaggactactcggtggaagggatgtccgacagcctgctcaatttccttcaacacttgagggagttcggtttagtttttcagagaaagcgcaagagcagacgatattatcctacaaggctcgccataaaccttagctctggcgtgtcaggagccggaggcacggtgcatcagccgggatttattgtcgttgagaccaattatcggctgtacgcctacacggagtccgaactgcagatcgccctgatcgcactgttcagtgaaatgttatatcggttcccgaatatggtggtggctcaggtgacccgggagtcagtccagcaagccatcgctagcggcattaccgcgcagcagatcattcattttctgcggactagggcgcatcctgttatgttgaagcaaacacctgtgctaccgcctactataaccgaccaaattcggctatgggaactggaaagagatcggctgcgcttcactgagggggtgctgtacaaccagtttctttcccaagtggacttcgagttgctgctggctcatgccagagagctcggagtgcttgtgttcgagaactccgccaagcggctgatggtcgttactccggcagggcacagcgacgtgaaaaggttttggaaacggcagaaacattctagttag

SEQ ID NO: 224485 - DNA, 1389 bp, synthetic construct
  misc_feature 1..1389: note = Description of Artificial Sequence: Synthetic coding sequence
  source 1..1389: mol_type = other DNA
atggagagcaccccatcacggggactgaatcgtgtgcatctgcagtgtcgcaatctgcaggagttcctcggagggttgtcccccggagttctggatcgcctgtacggacaccccgctacatgccttgccgtctttcgagaacttcccagtcttgctaagaattgggtcatgagaatgctcttcctagagcagccactccctcaggccgcagttgccctctgggtcaaaaaggagttttcgaaagcccaggaagaatccacagggctgctcagtggactgcgaatctggcacactcaactacttcccggaggtctgcagggcttgattttgaaccccatttttaggcagaatctcagaatcgccctgctgggcggaggcaaggcctggtccgacgatacatcccagttaggcccagataaacatgcaagggacgtgccgtctcttgacaaatacgccgaagagaggtgggaagtcgtcctgcacttcatggtgggttccccgagcgcagctgtgtcccaggatttggcacaactcctgtcacaggctggcctaatgaagagcacagaaccaggggagcccccatgtatcactagcgcgggattccagttcctcctactggacacacctgcccaactttggtatttcatgctgcagtacttacaaaccgcccagtcccgcggtatggatcttgtcgaaattctatccttcctctttcagctgagtttttcaactttgggaaaagactattcagtcgagggcatgtcagattcgctcctcaattttcttcagcacttgagggagtttggtctggtgtttcagaggaagcgtaaatctcggcgttattaccccactcgtctggcaattaacttatcgtctggcgtttccggggctggagggaccgtccatcagccagggttcattgtggtggaaaccaattatcgcctgtacgcctacaccgagtcagagttgcagatcgcactcattgctctgttcagcgaaatgctctaccggttccctaatatggtggtagcccaggtgacacgggagtcagtgcagcaggcaatcgcatccggaattaccgctcagcagattatccactttctccgcactcgggctcatcccgtgatgttaaagcaaaccccagtgctgccccctactattacggaccagatccgtttgtgggagctagaacgtgaccggctgaggtttaccgagggcgtgctttataatcagtttttgagtcaggttgatttcgaactgcttctggcacatgctagggaactcggcgtgctcgtgttcgagaattccgcgaagcgattgatggtcgttacacctgccggacactccgatgtcaaacggttttggaagcggcaaaagcatagcagctag

SEQ ID NO: 224486 - DNA, 1389 bp, synthetic construct
  misc_feature 1..1389: note = Description of Artificial Sequence: Synthetic coding sequence
  source 1..1389: mol_type = other DNA
atggagtcgaccccaagtaggggcctcaatcgtgttcatctgcagtgtagaaatctgcaggagtttctcgggggactgtctcccggagtgttggatagactttacggtcacccagcgacatgcctggcagtctttcgggaactgccgagcttggccaaaaactgggtcatgcgcatgctgttcttagagcagccgcttcctcaggccgcagtcgcattatgggtgaaaaaggagtttagcaaagcccaggaggagagtacagggctgctttcgggcttaagaatttggcatactcagctgttgccaggaggactgcagggcctgatcctcaacccaattttcaggcagaatctcagaatcgcactgttagggggtggtaaagcttggagcgacgacactagtcaactgggacccgataaacacgccagggatgtgccttctcttgacaagtacgccgaggagcgttgggaagtggtgctgcacttcatggtcgggagcccctctgccgctgtatctcaagacttggcccagcttctcagccaggccggactaatgaagagtacagagccaggcgagcctccctgtatcacttctgccggttttcagtttctgttgctagacactccagcccagctttggtactttatgcttcagtacctacaaaccgcccagtcccgcggaatggacctggtcgagatcttgagtttcctattccaactctctttttctacactaggaaaggattatagcgttgaaggtatgtcagattcgctgctgaattttctgcaacacctcagagaattcgggctcgtttttcaacgaaaaagaaagagtaggcgatactacccaacccggttggcgattaatcttagctctggtgtcagcggtgccggaggaaccgtacaccaacccggattcatcgtcgtggaaacgaactaccgtctgtatgcctacactgagtccgagctccagattgcacttatcgccttattctcagagatgctgtataggttccctaacatggtagtggcgcaggtcacccgggagagtgtccaacaggccatagcatctggtattactgcacagcagattattcatttcctccggactcgggcacacccggtcatgctaaagcagacgcccgtcctaccgcctaccatcaccgaccagatccggctgtgggaactggagcgggaccggctgcgcttcacagaaggagtcttatacaaccagtttttgtcccaggtggatttcgagctgctgctcgcacacgctcgggaactcggtgttctagtgttcgagaatagcgccaagagacttatggtggttacccctgcgggacattctgacgtgaaaagattttggaagaggcaaaagcattcctcctag

SEQ ID NO: 224487 - DNA, 1389 bp, synthetic construct
  misc_feature 1..1389: note = Description of Artificial Sequence: Synthetic coding sequence
  source 1..1389: mol_type = other DNA
atggagagcaccccctcacgaggtctgaaccgggtccatctgcaatgcagaaatctacaggagtttctcggcggactctcgcccggagttctggacagactctatggccaccctgctacctgtctcgcagtctttagggaattacccagtctggccaagaactgggtaatgcgtatgctgtttctggaacagcctctgcctcaggccgctgtggccctttgggtgaaaaaggagttttccaaagcccaagaagagagcactggacttctgtccggcctccggatctggcacacccagctcctccctggaggccttcagggcctgatactgaatcctatctttcgccagaatctccgcatcgccctgctgggtggaggcaaagcctggtccgacgacacatctcaattgggcccagacaaacacgcacgcgacgtgccctctctcgacaaatacgccgaagagaggtgggaagtagtcttgcacttcatggttggttctccttcagctgccgttagccaagatttagcccagttattgtctcaggctggcctgatgaaatccaccgaaccgggagagccgccttgtataacgtctgccggatttcaatttttgctgctcgacacacccgcacaactatggtattttatgctgcagtacctgcagactgcgcagtcccgaggaatggatctggtggagattctgtcctttctttttcaactctctttctccacacttgggaaggactattcagtcgagggcatgtccgattcccttctgaacttcctgcaacatttgcgcgagtttggtttagtcttccagcgaaaaaggaaaagcaggagatattacccaactaggctggctatcaatctgtctagtggcgtgagtggtgcagggggtactgtgcaccaacccggtttcatcgtagtggaaacgaattaccggctctacgcttatacagagtcagaattgcagattgcgcttattgctctcttttctgagatgctgtaccgatttccaaatatggtggtagcccaggtgacacgggagagtgtgcagcaagcgattgcatccgggattaccgcccaacagataatccattttttaaggacccgggcacaccccgtcatgctcaagcagaccccagtcttgcctcctacaatcacagatcaaatccggctgtgggagctggagagggaccgcttgcgatttactgaaggggtgctgtacaatcagttcctcagccaagtggactttgaactgctcttggcccacgcgagggaattaggcgtcttggtgttcgagaacagcgctaaacgattaatggttgtcacaccagcgggtcacagcgatgtgaaacgtttttggaaacggcagaagcatagttcgtag

SEQ ID NO: 224488 - DNA, 1389 bp, synthetic construct
  misc_feature 1..1389: note = Description of Artificial Sequence: Synthetic coding sequence
  source 1..1389: mol_type = other DNA
atggaatccacccctagtcgaggtcttaatagggtgcatctccaatgtcgaaacttgcaagaatttctgggagggctgtcgcccggagtcctagaccgcttgtatggacaccccgctacctgcctggctgtttttagagagctgcctagccttgcaaaaaattgggtgatgcgcatgctcttcttggaacagcctctgccacaggccgcagtggccctgtgggttaagaaagagttctcgaaggctcaggaagagtcaaccggtcttctaagcggcctgcgaatctggcatacacagttgctgcctggcggactgcaaggcctgatcctgaatcccatatttaggcagaacctacggatagcactactgggtgggggtaaagcctggtccgacgacacctcccaactggggccagacaagcatgcccgtgacgtgccgtcacttgacaagtacgccgaggagaggtgggaggtggtgctccattttatggtgggaagtccatctgcagctgttagtcaggacctggcccaattactgtctcaagctgggctcatgaaatcaaccgaacctggagagcctccctgtatcactagtgcgggattccagttcctcttgcttgacaccccagcacaactctggtatttcatgttgcagtaccttcagaccgctcagagcagaggaatggacctagtcgagatcttaagtttcctctttcagctttccttcagcaccctgggcaaggactactccgtcgagggcatgagcgattcactccttaatttcttacagcatctccgggagttcgggctggtgtttcagagaaagcgcaagtctcggaggtactacccaactcgtttagctattaacctcagttctggcgtctctggcgctggtggaacagtgcaccagccaggattcatagtggtagaaacaaactatcgactgtacgcatataccgagtctgagctgcagatagctctgattgctctgttctccgaaatgctgtataggttcccaaacatggtggtcgcacaggtcactcgtgagtcagttcagcaggcaatcgcttccggcatcaccgcccagcagattattcatttccttcggacacgggcacatcccgtcatgctaaaacagaccccggtgttgcctcctacaatcaccgatcagattagactgtgggagctggagcgcgacaggctgagatttaccgagggggttctctacaaccagtttctttcccaagtggattttgaactcctccttgctcacgccagggaattgggcgtgctggtctttgaaaattctgccaagagactgatggttgtgacacccgctggccatagtgatgttaagagattttggaaacgacagaagcattcatcctag

SEQ ID NO: 224489 - DNA, 417 bp, synthetic construct
  misc_feature 1..417: note = Description of Artificial Sequence: Synthetic coding sequence
  source 1..417: mol_type = other DNA
atggagagcaccccaagccgcggactgaacagagtgcacctgcagtgtagaaacttgcaagaattcctgggaggtctgagtccaggggttctggaccgtctgtatggccaccccgctacctgtctggccgtcttcagagaactcccaagcctagctaagaattgggttatgcgtatgctgttccttgaacagccactgccacaagccgcagtggccttgtgggtcaagaaggagttcagtaaggcacaagaagagagcaccggcctgctgtctggcctgcgaatttggcatacacagctgttgcctgggggactgcagggactgattctcaaccctatcttccgccagaatctgcgtattgcacttttaggcggaacaggtatcacaggggttagtcattgtgcttggccaggttag

SEQ ID NO: 224490 - DNA, 1389 bp, synthetic construct
  misc_feature 1..1389: note = Description of Artificial Sequence: Synthetic coding sequence
  source 1..1389: mol_type = other DNA
atggaatccaccccatctaggggcctgaaccgtgtgcatctacagtgtaggaacctccaggagtttctcggcggtttatctcccggtgtgcttgatcgactctacggccaccccgctacatgtctagcggtgtttcgagaactgcccagtctggctaaaaactgggttatgcgaatgctgttcctcgagcagccactaccgcaggctgctgttgcattatgggtgaagaaggaattctcgaaggcgcaggaagaaagcacgggactgctctctgggctcagaatttggcacactcagctcttgcccggagggctgcagggcctcatcctcaacccaatcttcaggcagaatcttcgaatcgctctgcttggcggaggaaaagcttggtccgacgacacaagccagcttggtcccgacaagcacgccagagacgtgccttctctggataagtatgctgaagaaaggtgggaggtcgtcttacatttcatggttggcagcccctccgccgctgtgagccaggacctggcccagctactttctcaagcaggattaatgaagagcacagaaccgggtgaacccccatgcattacctccgccggatttcaattcttgcttctggacacgcctgctcagctctggtatttcatgctgcagtatttacagactgcacaatcgcggggtatggacctggttgaaattctgtccttcctgttccaactgagtttcagcactctcggtaaggactacagtgtcgagggcatgagcgatagcctgcttaattttctgcagcatttacgagagttcggactggtgtttcaaaggaaaaggaagtcccggagatactaccctacccggttggcaattaacttatccagtggggttagcggagccggtggaacggttcaccagccgggattcatcgtggtggagaccaattaccgattgtacgcctatactgagtctgagttacagatcgccttgatcgctttattctccgagatgttgtatcggttccctaacatggtcgtggctcaggtgaccagggagtcggtgcagcaggctattgcttcagggattaccgctcagcagataatccacttcctgaggacgcgggctcaccctgtgatgctgaaacagacccctgtgctgccccctaccattacagaccagatcaggttatgggagttggagagagataggcttaggtttaccgaaggggtcctttataaccagtttctgtcccaggtcgactttgaattgctgcttgcccatgcccgtgaactgggagttctagtgtttgagaacagcgccaagagactaatggtcgttactcccgctggacactcagacgtgaaacgattctggaagcgtcagaagcacagtagttag

SEQ ID NO: 224491 - DNA, 417 bp, synthetic construct
  misc_feature 1..417: note = Description of Artificial Sequence: Synthetic coding sequence
  source 1..417: mol_type = other DNA
atggagagcacccccagccgaggcctgaacagggtgcatctgcagtgccggaacctgcaagagtttttgggcggtttgtctcccggagttcttgacaggctgtacggtcaccctgcaacctgtctggccgttttcagagagctgccttccctggccaagaactgggtcatgagaatgctctttttagagcagcctctgccccaggcagctgttgcactttgggtgaagaaagaattctctaaggctcaggaggaatcgacggggctcttgagcgggttgcgtatttggcacacccagctgttaccaggaggcctacagggccttattctgaacccaattttccgccagaatctccgaatcgccctcctgggaggaactgggatcacaggcgtgagccattgcgcatggccgggttag

SEQ ID NO: 224492 - DNA, 1389 bp, synthetic construct
  misc_feature 1..1389: note = Description of Artificial Sequence: Synthetic coding sequence
  source 1..1389: mol_type = other DNA
atggaatctactccatctagaggactcaacagggtccacttacagtgcaggaatctgcaggagtttctaggcggattgtcacctggggtgctagacagactatacggacatcctgctacatgtctcgcagttttccgggagctgcccagcctcgctaaaaattgggtcatgcgcatgctgttcctggaacagcccctgccccaagctgcagttgcgctttgggtaaagaaggagttcagcaaagcccaggaggagagtacgggattgttaagtgggctgagaatttggcatacccagcttctgcctggaggcctgcagggtcttatactgaaccccatattccgtcagaatctgcgcattgccctattgggcggaggcaaggcctggagcgatgatacttctcagctgggacccgataagcatgcgagagacgttccgtcactcgataagtacgctgaggagagatgggaggtcgtcttgcacttcatggtaggatctccatccgctgcagtgagccaagaccttgctcagctgttgtcccaggctggcctgatgaagagtacagagccaggcgaacctccctgcatcacctccgccggtttccaatttctcctgcttgatacaccagcccagctgtggtatttcatgttacaatacctacagactgcccagagtagaggcatggatttggtggaaatactgtcatttctgttccagctgagcttttcaacactgggcaaagactacagcgtggaaggcatgtctgattctcttctcaattttttgcaacacctacgagagttcggactcgtctttcagcgaaagaggaaatctcgtcgttactaccccacaaggcttgccatcaacctaagctctggagtcagcggtgccggtggaaccgtccatcagccaggtttcatcgtggtggaaactaactaccggctgtatgcttatacagagtccgaactgcagatcgcactcatcgccctcttctctgaaatgctataccgcttcccaaacatggtggttgcacaggtgacccgagaaagcgtgcagcaggcaatagcctccggtattacagcacagcagatcatacacttccttcggactcgcgctcatccagtaatgctgaaacaaaccccggtgttacccccaacaattacggaccaaataaggttatgggagttggagcgcgacaggcttcgttttacggagggagtgctttacaatcagtttctctcacaggtcgattttgagctgctgctcgcccacgccagagagctcggtgtcctagtgtttgagaacagtgccaaaagactgatggtggtcactccagccggacactccgatgtgaaaaggttttggaaacgtcagaagcatagctcttag

SEQ ID NO: 224493 - DNA, 417 bp, synthetic construct
  misc_feature 1..417: note = Description of Artificial Sequence: Synthetic coding sequence
  source 1..417: mol_type = other DNA
atggagagtaccccaagccgcggattaaacagggtgcacctgcagtgtcgaaatttgcaggagtttctgggcggactgtcaccgggagttctcgaccgcctctacgggcatcctgctacttgcctcgctgtgttccgcgagttgccgtctctcgccaaaaattgggtaatgcggatgctttttctggagcagccattaccacaggctgccgtcgcactgtgggtcaaaaaggagttctcaaaggcgcaggaggagtcgaccggcctgctttcaggcctgaggatctggcacacacaactgctgcctggcggacttcaaggtcttatcttgaaccccatctttcggcagaacttacgaatcgcgctcctcggcggaactggtattaccggggtttcccactgtgcgtggccaggatag

SEQ ID NO: 224494 - DNA, 1389 bp, synthetic construct
  misc_feature 1..1389: note = Description of Artificial Sequence: Synthetic coding sequence
  source 1..1389: mol_type = other DNA
atggagagcacacctagccgaggcctgaatcgcgtgcacctgcagtgcagaaacctccaggagttcttgggcggtctaagcccaggtgtattggataggctgtacggacacccagcgacatgcctcgctgtctttcgcgaacttccctctttagccaagaactgggttatgagaatgctgtttctggagcagcctcttccacaggccgctgtggctttgtgggtgaaaaaggagttctccaaagcccaggaggaatcgactggcctcttgagcggcctacggatctggcatacccagttgctgcccggtggcctgcagggtctcatcctcaatcctattttccgccagaacctgaggatcgctttgcttggcggtggaaaagcctggtccgatgacaccagtcagttgggtcccgataaacacgcacgcgacgtcccatcacttgacaaatacgcagaggagaggtgggaagttgttctgcactttatggttggctcaccttcagcagccgtgagtcaggaccttgctcaactgctctcacaggcaggtttgatgaagagtactgagcctggggaaccaccttgcattactagcgcaggattccaatttttgctgctggacaccccagcccagttgtggtattttatgctccagtacctgcagacagcacaatcccgtgggatggacttggtcgagattctgtcctttctgttccagctctctttctctacattggggaaagactactctgtggagggaatgtctgattcgttgctcaattttctgcagcacctacgggaattcggactagttttccagcgcaaacggaaaagcaggagatactatccgacccgactcgcaataaatctgtccagcggggtgtccggggctgggggaactgtgcatcagccaggcttcatcgttgtggaaacgaattaccggctgtatgcctacacagaaagcgaactccagattgcgctcatcgcacttttctctgagatgttatacaggttccctaacatggtcgttgctcaagtgacacgcgagtccgttcaacaagcaatagccagcggcattaccgctcagcagataatacacttcttgagaacgcgggctcaccccgtgatgctgaaacagactccagtgctcccacctactatcactgaccaaatcagactttgggaactcgaaagagaccggttgaggtttactgagggcgtcctttataaccagtttctgtctcaagtggattttgaattactcctggcacatgctcgcgaactcggggttctagttttcgagaattccgctaagaggctgatggtcgttacgcccgctgggcactccgatgtaaagagattctggaagaggcagaagcacagttcatag

SEQ ID NO: 224495 - DNA, 1389 bp, synthetic construct
  misc_feature 1..1389: note = Description of Artificial Sequence: Synthetic coding sequence
  source 1..1389: mol_type = other DNA
atggagtcaactcccagcaggggtttaaacagggtccacctgcagtgcagaaacctgcaggagttcctgggcggattgtcgcccggtgttctagaccgcctctacggacacccagctacgtgcttggccgtgtttagagagctcccgagcctggccaagaactgggtgatgcgtatgctgttcctggagcagcccctaccacaagccgctgtggcactctgggtgaagaaagagtttagcaaggcccaggaggaatcgacaggtctgctatctggtctccgtatttggcacacacagctccttccgggtggactgcagggtctgattttgaatccaatctttcgccagaaccttcgtatagccctcttggggggtggtaaagcttggtctgatgatacctctcaacttggacctgacaagcatgcccgagacgtgccgagcttagacaaatacgcagaagaacgctgggaggtcgtgctgcactttatggtggggagccctagcgccgctgtcagccaggacctcgcccagctcttaagccaggccggactgatgaagtccacagaacccggagagccaccatgcatcacaagcgcgggttttcaatttcttctcctggacacccccgcacagctctggtatttcatgctgcagtatttacagacggcccagtcgcgagggatggatctcgtggaaattctgagcttcctgttccagctctccttttccaccctcgggaaggattattcagtagagggaatgagcgacagtctgctcaattttcttcaacacctaagagagttcggactggtgtttcagaggaaaaggaagagcagacgatactaccctacgcgcctcgcgatcaatctgtcttcgggcgtgtctggggcagggggtactgtgcaccagcctggtttcattgttgttgaaactaactaccgtctctacgcttatacagaatctgagctccagattgctctgattgcattgtttagcgagatgctctacagattccctaacatggtggttgctcaagtaacaagagagtctgttcagcaggccatcgcttcaggcataacagcccagcaaatcattcatttcctgagaactagggctcatccggtgatgcttaaacagactccggtgttaccacctacgataactgaccagattaggctctgggagctagaacgggatcgtttgagattcacggagggtgtgctgtacaatcagttcctgagccaggttgacttcgaactccttctggcccatgcccgtgaacttggcgtcctggttttcgagaactctgctaaaagattaatggttgtgacccccgctggacattctgacgtgaagagattctggaagcggcagaaacattcctcttag

SEQ ID NO: 224496 - DNA, 1389 bp, synthetic construct
  misc_feature 1..1389: note = Description of Artificial Sequence: Synthetic coding sequence
  source 1..1389: mol_type = other DNA
atggaaagcacccctagtcgcggactgaaccgggttcatctgcagtgtaggaatctccaggagtttctgggagggttatctcccggagtcctcgataggctttacgggcaccccgctacgtgcctggcagtctttcgcgagcttccatccctggccaaaaactgggtaatgcgcatgcttttcctcgagcaacccctgccccaggccgctgtcgcactgtgggtgaagaaagagttcagtaaagcccaggaggaatcaaccgggcttctgtctggtctccgaatatggcatacccaacttctccctgggggtctgcaaggactgattctgaatcccatatttaggcagaacctgcgcattgccttgctgggtggtgggaaagcttggtcagacgacacttcacaactggggccagataaacatgctagagatgtgcccagcctggacaagtatgccgaagaacgttgggaagtggtactgcatttcatggttggatctccctccgcagcagtgagtcaggacctggcccagctgctctctcaggccggtctgatgaagtccacagagcctggagagccgccatgtattaccagcgcaggattccagttcctgttgctggacacgccggctcaactgtggtacttcatgttgcagtatctgcaaacggcacagtccaggggcatggatctggttgaaatactctcctttttgttccagctgagtttcagcactctgggcaaagactactcagtcgaagggatgtccgacagtcttctcaactttctgcagcatctacgcgagtttggccttgtgtttcagagaaaaaggaaatcccgaaggtactaccctacacgactggcaatcaatttatcctctggggtgtcaggtgccggaggaaccgtgcatcagcctgggttcatcgttgtggaaaccaactacagattgtacgcctatacagagtccgagctgcagatcgccttgatcgccttgtttagcgagatgctctacaggttccctaatatggttgtggcccaggtcacccgcgaaagtgtgcagcaggcaattgcctctggcataacagcacagcagatcattcactttctgcggactagagcccatccagtcatgctgaaacagaccccggtcctgcctcctactataactgatcagataagactgtgggaacttgagagggataggcttcgatttactgagggcgtattgtacaaccagtttttatctcaagtggactttgagctgctactcgctcatgcaagagagttgggggtcctggtcttcgaaaattcagccaaacgcctaatggtggtgacgcctgccggacattcagatgtgaagagattctggaagaggcaaaagcactccagctag

SEQ ID NO: 224497 - DNA, 1389 bp, synthetic construct
  misc_feature 1..1389: note = Description of Artificial Sequence: Synthetic coding sequence
  source 1..1389: mol_type = other DNA
atggaatcgacacccagcagaggcctcaatagggtgcacttacagtgtcgcaacttgcaggaatttctaggaggacttagccccggtgtgttagataggctgtacggtcatcctgcaacatgcttagcagtcttccgagagctgccatcactcgccaaaaactgggttatgcggatgctctttctcgagcaaccactgccccaggcagctgtcgccctgtgggtcaagaaggaattttcgaaggcccaggaggagtccacaggcctcctgagcggtctgcgcatctggcatacacaactcttgcccggaggtctacagggtctcatactaaatccaatttttcgccagaacctgcgtatcgctttactgggtggcggtaaggcctggtccgatgacacatcccagttggggccagataaacacgccagagatgtgccgagccttgataaatacgcagaggagcgttgggaggtggtcctgcacttcatggtggggagcccgtctgccgctgttagtcaggatttggcacagttattaagccaggccggtctgatgaaatctaccgaaccgggagaacctccctgtattacttccgctggattccagttcctgttgttagacacccctgcccaactctggtatttcatgctgcaatacttgcaaacagcacagtccagaggcatggacttggtcgagattctgtcctttctctttcagctgtctttcagcaccctgggtaaagattacagtgtggagggaatgtcagattccctacttaatttcttacaacatctgagagagttcggcctcgtctttcaaagaaagagaaaatccaggagatattaccctacgagactagcgatcaacctgagcagcggtgtgagcggcgcaggcggaactgtccaccaacccggatttatcgtggtggagactaactaccgcctctatgcttatacagagtccgagctgcaaatcgcccttatcgctctcttttctgagatgctgtaccgatttcccaatatggtggtggcccaggtcaccagagaatccgtgcagcaagccattgccagtgggattacagcacagcagatcatccattttctccgaacccgggctcaccctgtcatgctgaagcagacacccgtccttccacctactatcacagaccaaattcgtctttgggaattagagagggatagattgaggtttaccgaaggcgtgctctataatcagtttctctcccaggtagactttgagcttcttctagctcacgcacgggagttgggggtcctcgtctttgagaattcagccaagcgcttgatggtagtcacgccggctggtcattcagatgttaaaagattctggaagaggcagaagcactcctcttag

SEQ ID NO: 224498 - DNA, 417 bp, synthetic construct
  misc_feature 1..417: note = Description of Artificial Sequence: Synthetic coding sequence
  source 1..417: mol_type = other DNA
atggagagtactccaagtcggggtttgaatcgcgtgcacttgcagtgccgcaatctgcaagagtttcttgggggtctgagcccaggggtcctcgatagactgtacggtcacccagcgacatgcctggctgtcttccgagaactccctagtctggccaagaattgggtgatgagaatgctctttttggagcaacccctgcctcaggccgctgttgcactctgggtgaaaaaggagttttctaaagctcaggaagaatccactgggctgctttccggtttaagaatttggcacacccagcttctgcccggtgggctacagggactgatattgaatcccatttttaggcagaaccttcgtatcgccctgctcggcggaacaggcattacaggagttagtcattgcgcatggcctggctag

SEQ ID NO: 224499 - DNA, 417 bp, synthetic construct
  misc_feature 1..417: note = Description of Artificial Sequence: Synthetic coding sequence
  source 1..417: mol_type = other DNA
atggaatcaaccccttcccgcggactgaaccgcgtgcacctgcagtgccggaacctgcaagagttcctcgggggtctgtctcctggggttcttgatcggttgtatgggcaccccgcaacctgcctcgccgtgtttcgtgagctcccatctttggcaaagaattgggttatgcgcatgttgttcctggagcagcctcttccccaggccgcagtggccctctgggtgaaaaaagagttttccaaggcacaagaggagtccaccggcctgctaagcggacttcggatttggcacacccagcttttgcctgggggtttgcaaggtctgatactgaaccctatcttcaggcagaacttgcggatcgctctactgggcggtaccggcatcacaggcgttagccactgcgcttggccgggatag

SEQ ID NO: 224500 - DNA, 417 bp, synthetic construct
  misc_feature 1..417: note = Description of Artificial Sequence: Synthetic coding sequence
  source 1..417: mol_type = other DNA
atggaatctacaccctcacgcggtctcaacagagtccatcttcagtgccgaaacttacaggaatttctgggcggactgtcacctggcgttctggaccgcttatatgggcacccagccacttgcctggcagtgttcagagaattgccgagcctggcgaagaactgggtgatgagaatgctttttctggagcaacctctacctcaggcagccgtcgccctctgggtcaagaaggagttttctaaggcacaagaagagtcaacgggtctgctcagtggtctgcgcatctggcatacacagcttctgcctggtggcttgcaaggcctgattttgaatcctatttttagacaaaacttgcggatcgcactcttggggggaacagggattaccggcgtgagccactgtgcgtggccgggttag

SEQ ID NO: 224501 - DNA, 1389 bp, synthetic construct
  misc_feature 1..1389: note = Description of Artificial Sequence: Synthetic coding sequence
  source 1..1389: mol_type = other DNA
atggagagtacgccgagcagggggctcaatagagtgcatctccaatgccgaaacttgcaagagtttttgggtggcttgtcacctggtgtactggatagactgtatgggcacccggctacctgcttggcagttttcagggagctgccgtccctggcaaaaaactgggtcatgagaatgcttttcctggaacagcccctccctcaggctgccgtggcactgtgggttaagaaagaattctccaaggcccaggaagagtccaccggcttattgtcgggcctgagaatatggcacacccagctgctacccggaggactccagggactcattctgaaccctatattcagacagaatctccgaatcgctttacttggtggaggcaaagcatggtcagacgatacaagccaactgggaccagataaacacgccagggacgtgcccagcctggacaagtatgcagaggagcgctgggaggttgttctacacttcatggtcggatctccttccgccgctgtcagccaggacctggctcaactgttgagccaggccggtctgatgaaatccacagagccgggtgaaccaccctgcatcacatccgcgggtttccagttcctgctcttggacacacccgctcaactgtggtactttatgcttcagtacttgcagaccgctcagtccagaggaatggatcttgtcgagatcctctcattcctttttcagctgtctttttcaacactcggaaaggactattctgtcgagggaatgagtgactcactcctgaatttcctgcaacacctgcgcgagtttggtctggtgttccaaaggaagcggaaatcaagaagatactatcctacaaggcttgctataaacttgagctccggagtgtcaggcgcaggcggaactgtgcaccagcccggttttattgtggtcgagactaactatcgcctttatgcttatacagaaagcgagctgcaaatcgctctgatcgcattgttctccgaaatgctgtatagattcccaaatatggtcgtggctcaggtcaccagagaatccgtccaacaggccatcgcctccggcatcaccgcccagcaaatcattcattttcttcgtactcgggcacaccccgtcatgctaaagcaaacccctgtgttgccacctactatcacagaccagatccggctgtgggaactggagcgggataggctgcgattcactgagggggtgctctacaatcagttcctctcgcaagtcgactttgaactgctgttagctcatgcccgagagctaggtgtcctggttttcgagaacagcgctaaaaggctaatggtggttactccagcgggacattctgacgtcaaacgtttctggaaaaggcaaaaacactccagctag

SEQ ID NO: 224502 - DNA, 663 bp, synthetic construct
  misc_feature 1..663: note = Description of Artificial Sequence: Synthetic coding sequence
  source 1..663: mol_type = other DNA
atgcgaatgctgtttctggagcagcccctgccacaggcggcagtggcactttgggtgaaaaaggagttctcaaaggcacaagaagaatctacagggctgctgtcgggattgagaatttggcacacccagctcctgcccggtggactgcaggggctcatcctgaaccccattttccgacagaatctgcggatagccttgctggggggaggcaaggcttggtctgatgataccagccagttgggtcctgataagcacgcccgagacgtaccctccttagacaagtacgctgaggaacgctgggaagttgttctgcatttcatggtgggctcaccaagtgcggctgtgtctcaagacctcgcgcagttactgagtcaggccggtctcatgaaatctaccgaacctggagaacctccatgtattaccagcgccggttttcaatttctgctcctggataccccagcccaactctggtattttatgctgcagtacctgcagacagcccagtcaagggggatggacctggtggagatcctgagcttcttgtttcagctatcattctctacccttggaaaagactactccgtggaaggtatgagtgacagtctactgaacttcttacagcatcttcgcgaattcggcttggtctttcagcgcaaagtttag

SEQ ID NO: 224503 - DNA, 663 bp, synthetic construct
  misc_feature 1..663: note = Description of Artificial Sequence: Synthetic coding sequence
  source 1..663: mol_type = other DNA
atgaggatgctattcctggagcaacccctgcctcaggccgctgtggcattgtgggtaaaaaaggaattcagtaaggcgcaagaagaatcaaccggtctccttagcggcctgcgtatttggcatacccagttgctaccaggtggactgcagggcctgattttaaatcccatctttcggcagaatctgcggatcgcactgttgggagggggtaaagcctggagcgatgatacaagtcagctgggcccagataaacatgctcgggacgtaccatccttggacaaatatgcagaggagcgatgggaggtcgtgctccacttcatggtgggaagcccgtccgcagctgtgagccaggacctcgctcagctcctgagtcaggctggcctaatgaagtctaccgagcccggagaacctccttgtataacttccgctggctttcaattcctcctgttggacactccagcacagctgtggtacttcatgctgcagtaccttcagactgcgcagtctcgaggtatggatctggtcgaaattttaagttttctctttcagttatccttttcaactttggggaaagactatagtgtggaggggatgtcagactctttacttaatttcttgcaacacctgcgggagttcggactcgtctttcagaggaaagtgtag

SEQ ID NO: 224504 - DNA, 663 bp, synthetic construct
  misc_feature 1..663: note = Description of Artificial Sequence: Synthetic coding sequence
  source 1..663: mol_type = other DNA
atgcgcatgctattcctggaacagcctttgccccaggctgctgtagctctgtgggtgaaaaaggaattctcgaaagctcaggaggagtcaactggtctcctgagcggcctacgtatatggcacacacagttgctgcctggcggattacaggggctgatccttaaccccattttccgccagaacctgaggatcgctcttcttgggggaggaaaggcgtggagcgatgacacaagtcagctcggcccagataaacatgctcgtgacgtcccttcactggataaatacgcagaggagaggtgggaagtcgttcttcatttcatggttggatccccatcggccgctgtgtcacaggacttggctcagttgctctcccaggcagggctgatgaaatcaactgaacctggagagcctccttgtattacatcagccggttttcagtttctcctcctggatacacctgctcagttgtggtacttcatgctgcaatatttacagactgcccagtctcgaggaatggatttggtcgagatcttaagctttctattccaactgtctttcagtaccctcgggaaggattattctgtggagggaatgtccgactcactcctcaatttcttgcagcatttgcgcgagttcggactggtgttccaacggaaagtttag

SEQ ID NO: 224505 - DNA, 663 bp, synthetic construct
  misc_feature 1..663: note = Description of Artificial Sequence: Synthetic coding sequence
  source 1..663: mol_type = other DNA
atgaggatgttgttcctggaacagcctctgccacaagctgctgtggccctttgggtaaagaaggagttttctaaggcacaagaagagtcaactggcctactgtctggactgagaatctggcacacccagcttctgcccggaggtttgcaaggcctcattctcaaccctatctttcgccagaacctacgaatcgctctgttagggggagggaaggcatggtcagatgacactagccagctggggcctgataaacatgcaagagatgtaccttcgctggataaatatgccgaggaaaggtgggaagtggtgttgcattttatggttggatcacccagtgctgccgtgagccaggacctggcgcagctgctgtcacaggccggtttgatgaagtctacagagcctggagaacccccatgcattacaagcgccggatttcagttccttctactagacacacctgcgcagctctggtactttatgctgcagtacctgcagacagcacagtccagagggatggacttggtcgaaattctatcattcttattccagctgtccttcagcaccctagggaaagattactcagtggaaggaatgagcgattccctattgaatttcctccagcatctcagggagttcggacttgtctttcaaagaaaagtgtag

SEQ ID NO: 224506 - DNA, 663 bp, synthetic construct
  misc_feature 1..663: note = Description of Artificial Sequence: Synthetic coding sequence
  source 1..663: mol_type = other DNA
atgcgaatgctttttctcgaacaacccctgccccaggctgccgtggcgctgtgggtcaagaaggagttctccaaagcgcaagaggaatcaacaggtcttttgagtggattgcgtatctggcacacacagttactgcccggtgggttgcaagggctaattttaaatcctatcttccgacagaatcttcggatcgcgctactgggaggcggaaaagcctggtctgatgacacctctcaattggggccagacaagcacgccagagacgtgcccagcctggataagtatgccgaagagcgatgggaggtcgtgctgcacttcatggtgggctctccaagcgcagcagtctcacaagatctggcccagcttctgtcccaggccggattgatgaagagcacagaaccaggtgagcctccctgtatcacttccgcaggcttccaatttcttcttttggacactccagcccagctgtggtattttatgctccaatatctgcagaccgcccagtcccgcggaatggaccttgtagagatcctgagttttctgttccagctgagtttcagcaccctcggcaaagactacagtgttgaagggatgtccgattcactgctgaacttcctccagcacctcagggaattcggcctagtcttccagagaaaagtctag

SEQ ID NO: 224507 - DNA, 663 bp, synthetic construct
  misc_feature 1..663: note = Description of Artificial Sequence: Synthetic coding sequence
  source 1..663: mol_type = other DNA
atgcggatgctgttcctggagcaaccgttaccacaggcagccgtggcgctctgggttaagaaggaattttctaaggcgcaggaggaatctacgggactgctcagtggattgagaatttggcatactcaactcctgcctggcggactccaggggctaatcctcaatcccattttccggcaaaatctgaggatcgccctgctgggcggtggtaaggcgtggtcagatgataccagccagctcgggcctgataagcacgccagagacgttccttccctcgacaagtacgctgaagaaaggtgggaggtggtgctccacttcatggtagggtcccctagcgctgctgtatctcaggaccttgcacagctgctgtcgcaggccggtctgatgaaaagcactgaacccggagagcccccttgcataacctctgccggtttccagttcttattgctggacacaccagcccagctatggtactttatgttacagtacttgcagacagctcagtccagaggtatggacctggtagagatactgtcctttctgtttcaactgtcattcagcacactcggtaaggattattccgtggaaggtatgagcgacagcctgctgaacttccttcaacacctgcgggagtttggccttgtttttcagcgtaaggtgtag

SEQ ID NO: 224508 - DNA, 216 bp, synthetic construct
  misc_feature 1..216: note = Description of Artificial Sequence: Synthetic coding sequence
  source 1..216: mol_type = other DNA
atggtcaatgttctgaagggagtgcttatagaatgtgacccggctatgaagcagttccttctgtacctcgatgagagcaacgctttaggcaaaaagttcatcattcaagatatcgatgacacgcacgtgtttgtcatcgcagagttggtaaacgtgctgcaagagcgcgttggcgagctgatggaccagaatgctttttccctgacgcagaagtag

SEQ ID NO: 224509 - DNA, 2997 bp, synthetic construct
  misc_feature 1..2997: note = Description of Artificial Sequence: Synthetic coding sequence
  source 1..2997: mol_type = other DNA
atggcacaagtggcgatgtctacccttcctgtcgaagacgaggaaagcagcgagagtaggatggtagtgacatttttgatgagcgcattagagagcatgtgtaaagaacttgctaaatcaaaggcagaggtggcctgcatcgctgtctacgagactgatgtattcgtcgttggcacagaaagaggcagggcttttgtcaataccagaaaggatttccaaaaggacttcgttaagtactgcgtcgaagaagaagaaaaagcggctgaaatgcacaagatgaagagtaccacacaggcaaatcgcatgtccgttgacgctgtggagatcgaaactctgcggaagaccgtcgaggattatttctgtttctgctatggcaaggccctcggaaagagtacggtcgtcccagtaccatacgagaagatgctgcgagaccagagtgcagtggtcgtccagggcttaccagaaggcgtcgcctttaagcatcctgaaaactacgacttagccaccctgaaatggattctggagaacaaagcgggaatcagtttcattatcaagagaccctttttggagccgaaaaagcacgtgggcggtcgagttatggtcaccgatgccgaccgctccattctctcccctggtggctcttgtggcccaattaaggtcaaaacggaacctactgaggactctgggataagcctcgaaatggcagccgttacagttaaggaggagagtgaggatcctgactattaccaatacaacattcaggccggaccctccgagacagatgacgtagacgaaaaacagcctctgtctaagccgctgcagggatcccatcactcttcagagggcaacgaaggcacagagatggaagttccggcagaagacagtactcaacacgtcccctccgagaccagtgaagatcccgaggtagaggtcaccattgaagacgatgactacagccctcctagtaagagacctaaagcaaacgaactgccccagccaccagtcccagagccagctaatgccggtaaaagaaaagtgcgagagttcaattttgagaagtggaacgctcggattactgacctacggaagcaggtggaagagctgtttgagcgaaagtacgcacaggcaattaaggccaagggccctgtcaccatcccttatcccctgttccagtcgcacgtggaggatctgtatgtggagggcctgcctgaaggcatccccttccgcaggccaagcacctatggaattccaaggctggagaggatattgctggctaaggagaggatcagatttgttatcaagaaacacgaactgctcaatagcacacgggaggacctgcaactggacaagccagcgtccggcgtcaaagaggaatggtacgcaagaatcacgaagctcaggaaaatggtagatcagctcttttgcaaaaaatttgcagaggcactcggctctaccgaggcaaaagccgtgccatatcagaagttcgaggcccaccctaacgatctgtatgtcgaaggattgcctgaaaacataccattcaggtctccgagctggtatggaatccctcgcttggagaagattatccaggttgggaatagaatcaagtttgttataaagagacctgagctccttacccattctacaaccgaagtgactcagcccaggactaacacccccgttaaagaagactggaacgtcaggatcacaaagttaaggaaacaggtggaagagatctttaacttgaagttcgcacaggctttggggctgaccgaagccgtgaaggtgccttaccccgtcttcgaatctaatccagagtttctttatgtggagggcctgcccgaaggcatcccgttccgcagccctacttggtttggcattcccaggctggaacggatcgttcgcggttcaaacaagatcaaattcgttgttaaaaaaccggagcttgttatttcataccttccgccagggatggcctctaaaattaatactaaagccctccagagccccaaaaggccgagaagccctggctccaactcaaaggtgcccgagatcgaggtcacagtggagggaccaaacaacaataaccctcagactagcgccgttagaactcccactcagacaaacggctcgaatgtcccgttcaagccaagaggcagggagtttagttttgaagcttggaatgccaaaatcactgacctcaagcagaaggttgagaacctgtttaatgaaaaatgcggagaagctctcggcctgaaacaggccgtgaaggtcccatttgcccttttcgagtccttccctgaagatttttatgtggaaggtttgcccgaaggagtgccctttagaaggccctccacctttggaatacctagactggaaaaaatcttacggaataaagcaaaaataaagttcattattaagaagcctgagatgtttgaaactgctatcaaagaaagtacctcatctaagagccccccacgcaagataaactcatcccctaatgtgaataccactgcctcgggggtcgaggatctaaacattatccaggtgacaattccagacgatgataatgagaggctgagtaaggtggaaaaggctcggcagctgcgagagcaggtcaatgacctgttcagtcggaagtttggcgaggccattggaatgggctttcccgtgaaggtaccctatcggaagataaccattaatcctggttgcgtggtggtggacggaatgcctcccggagtgagcttcaaggcccctagctatctggagattagtagcatgcgcagaatactcgattcggcggaattcatcaagtttaccgtcattagaccctttccaggccttgtaataaacaaccaactcgtcgaccagagcgagtccgaagggccagtgatccaggagtccgctgagccgagccagctggaagtcccagcaactgaggagatcaaggaaactgatgggtctagccaaattaagcaggagccagaccccacctggtag

SEQ ID NO: 224510 - DNA, 2934 bp, synthetic construct
  misc_feature 1..2934: note = Description of Artificial Sequence: Synthetic coding sequence
  source 1..2934: mol_type = other DNA
atggcccaggtggccatgtcaacgctgcccgtggaagacgaggagagctctgaatctcggatggttgtcacttttctgatgtccgcactggagtcaatgtgtaaggaattggctaaaagtaaagcggaagtggcgtgcattgccgtttacgaaacagacgtgttcgtggtgggaactgaacggggtagagcctttgttaatacccggaaagattttcagaaagacttcgtgaagtactgtgtagaggaggaggagaaggccgcagaaatgcacaagatgaagtcaacaacccaggctaacaggatgagcgtggacgccgtggagattgagacactcagaaagaccgttgaggactatttctgcttctgttatgggaaagccttggggaagtccaccgtagtacccgtgccctatgaaaaaatgctgcgcgatcagtcagcagttgttgtgcagggactcccagagggagtggcttttaaacatcctgagaactatgatctcgcgaccttgaaatggattctggagaacaaagctggaatttcatttattatcaagcgccctttcctggaacccaagaagcacgttggcggacgggtgatggtgaccgatgcagatcggtcgatattgagtcccggaggcagctgtggccctatcaaagtgaaaactgagccaaccgaagatagcggaatttcgctcgaaatggctgcagttacagtaaaagaagagtctgaggaccctgattactatcagtataatatacaggccggacccagcgaaactgacgacgtcgacgagaagcaacccttgagtaaacccctccagggatcgcaccactcctcagagggaaatgaaggcaccgagatggaagtacccgctgaggacgatgattatagcccgccatccaagcgtccaaaagcaaatgagttgccgcagcctcctgtgcccgaaccagctaacgccggaaagagaaaagtgcgtgaatttaacttcgagaaatggaacgccaggattactgacctcagaaagcaggtggaggagttgttcgaaaggaagtatgctcaagctatcaaagctaaaggccctgtcaccataccgtatcccctttttcagtcccacgtcgaggacctctatgtggaaggtctccccgagggaatccctttcagacgtccatcaacatacggaatacccaggctggagcgcatcctcctggccaaggagagaattcgctttgtgattaagaagcatgagctgctaaatagcacccgtgaggacctgcagcttgacaagcccgcatcgggcgtaaaggaagagtggtacgcccgaataacaaagctgcgaaagatggttgaccaattgttttgtaagaagttcgctgaggccctcggcagtaccgaggctaaggctgtgccttaccaaaagttcgaagcacaccctaacgacctgtacgtcgaggggcttcctgagaacatccctttcaggtcaccgtcctggtacggaattccccgtctcgagaaaatcatccaggtgggcaaccggattaagtttgttattaaacggccagagctgctgacccattctacgaccgaggtcacccagccaaggaccaacacaccagtcaaagaggactggaatgttaggattactaaactgcgaaagcaagtagaggagatcttcaacctgaagtttgctcaggccctcggacttaccgaggcagttaaggtgccgtatcctgtttttgaatctaatcctgagtttctttacgttgagggtctcccagaagggatccctttcaggtccccaacgtggttcgggatcccaagactggagcgaatcgtccgagggtccaataagatcaaatttgttgtgaagaaaccagaactggtgatcagttatctgcccccaggcatggcaagcaagataaatactaaggcccttcagagccctaaacgccctagatcccctggatcaaatagcaaggtgcctgaaatcgaagtcactgtggaaggacctaataacaataacccgcaaacatccgccgtgcggaccccgacgcaaacaaatggtagcaacgttccattcaagccccgagggagggaattttcattcgaagcctggaacgccaagataaccgacctgaagcagaaggtggagaatctgtttaacgaaaagtgtggagaggcactcggcctaaagcaggctgtgaaggttccatttgccttattcgagtcattcccagaagatttctatgttgagggactgccagaaggtgttccctttagacgtcctagtactttcggcatcccaaggctggaaaagatcctcagaaataaagcaaaaattaagttcataatcaagaaaccagaaatgttcgaaactgccatcaaagaatccactagttccaagagcccgccacgtaaaattaacagtagtcccaatgttaatacgacagcctctggagtggaggatctgaatattatccaagtcacaattccagatgacgacaacgagcggttgtctaaggtggagaaggccaggcagctacgcgaacaggttaatgatctgttctctcgaaagttcggagaggcaatcggaatgggatttccagtaaaagtcccttaccgcaaaataaccataaacccgggttgcgttgtcgtcgatggcatgccgccaggcgttagttttaaggctccaagctatctggaaatctcttctatgagacgaattctggatagcgctgagttcatcaagttcacggtgatcagaccatttcccggacttgtgattaacaatcagttggtcgaccaaagcgaaagcgagggtccagtgatccaggagtccgccgaaccaagccagctggaagtccccgcaaccgaagaaattaaagagacagacggttcatcccaaatcaagcaggaaccagaccctacctggtag

SEQ ID NO: 224511 - DNA, 2937 bp, synthetic construct
  misc_feature 1..2937: note = Description of Artificial Sequence: Synthetic coding sequence
  source 1..2937: mol_type = other DNA
atggcccaagtggctatgtcgacattacccgttgaggacgaggaatcctctgagagcaggatggtggtaacttttctgatgtcagccttagaaagtatgtgtaaggagctggccaaatcaaaagccgaggtcgcatgcattgccgtctatgagaccgacgtcttcgtcgtgggtaccgaaagggggcgagcttttgttaatactcgtaaagattttcagaaggacttcgtcaagtactgcgtcgaggaagaggaaaaggctgctgagatgcataagatgaaaagcactacgcaggccaataggatgtcagttgatgctgttgagatagagacgttgaggaaaacagtagaggattacttttgcttctgttatggcaaggccctggggaagtctaccgtggttcccgttccttacgagaagatgttgcgtgaccagagtgccgtggtcgtgcagggcctacccgagggggttgcttttaagcaccccgaaaactatgacctggcaacgcttaaatggattcttgaaaacaaagccggtatctcttttatcatcaaaagaccgttcctggaaccgaagaagcacgtcggaggacgagtaatggtgaccgacgctgataggagtatcctgtccccgggtggatcatgcggccctatcaaagttaaaactgagcctacggaagactcaggcatatcacttgaaatggccgctgtaacagtgaaagaggagagcgaagatcccgattattaccagtataatatccaaggaagtcatcactcatcagagggcaacgagggaaccgaaatggaagttcccgcagaagactctacacagcacgtccccagcgagacgtctgaggacccggaagtggaagtgactattgaggacgacgactactctcctcccagcaaaagaccaaaagctaatgagttgcctcagcctcctgtgcctgaacctgccaatgccggaaagagaaaagtgagggagtttaacttcgagaaatggaacgctcggattaccgacttgagaaaacaggttgaagagctgttcgagcgaaaatacgcacaggctattaaggccaagggacccgtcaccatcccctaccccctgtttcagtcacacgttgaagatttatatgtggagggcttaccagaaggaattcctttcaggcgcccttccacttacggtatccccagactcgaacgcattctattggctaaggagcgcattaggttcgtgataaaaaaacacgaactgctcaattccactagagaagaccttcagttggataagccagcttccggagtcaaggaagaatggtatgccaggattaccaagctccgcaagatggtggatcagctgttttgcaagaagtttgccgaagcgctaggctccacggaagcaaaagccgttccttatcaaaagttcgaagcacacccaaacgacctttacgtagaggggctgcccgagaacatcccattccggtccccctcctggtacggtattccaaggctggagaaaattattcaggtgggcaaccggatcaagttcgtaattaaacggccagaactcctgacccattccaccacagaagtcactcagcctcgcacaaacacaccagttaaggaagactggaacgtgcgaatcacaaagttgagaaagcaggttgaagagatctttaatctgaagttcgcacaagcactgggtttgaccgaagccgttaaagtgccatatcctgtttttgaatcaaaccccgagtttctctacgtcgaaggactccccgagggcatacctttcaggtcccccacttggttcgggatccccagacttgagaggatcgttaggggctctaacaagattaagttcgtggtgaagaaacccgaactggtgatttcatacttaccacccggaatggcatccaaaattaatactaaggcccttcagtctcccaaacgccctcgcagtcccggaagcaacagcaaggttcccgaaatcgaagtgaccgtggaaggaccaaataataataatccgcagacgagcgctgtgagaaccccaacccaaaccaacggaagcaatgtgccattcaagcctcggggtagggagtttagttttgaggcttggaacgccaaaatcactgacctgaagcagaaggtagaaaacctttttaacgagaagtgtggcgaagctttaggactcaagcaggcagtcaaggtgcccttcgccttgttcgaaagctttcccgaagatttctacgtagaagggttaccagaaggcgtcccattccgcagacccagcaccttcggaatccctagactcgagaaaattttacgtaacaaagcgaagattaaattcatcattaaaaaacccgaaatgttcgagactgccatcaaggagagtacctcatccaaatctccccctcgaaagattaactcaagcccaaatgtcaatacaactgccagtggtgtggaggatctcaacatcatacaggtgactatccccgatgatgataatgaaaggctgagtaaagtcgaaaaagcccgtcaactcagggaacaagtaaatgatctgtttagtcggaagttcggggaggcaatcggaatggggtttcccgtcaaagtgccttataggaaaataacaattaaccctgggtgcgttgtcgttgatgggatgccgcctggagtgtcatttaaggccccatcttatttggagatctcaagcatgaggagaatactggatagcgccgagttcatcaaattcacagtcattagaccctttcctgggcttgtgatcaataaccagctggttgaccaatccgaatcagagggcccagtcatccaggagtctgctgaaccatcccagctagaggtccctgcaaccgaagagattaaggaaacagacggctcctctcagatcaaacaggagcctgatcccacatggtag

SEQ ID NO: 224512 - DNA, 2874 bp, synthetic construct
  misc_feature 1..2874: note = Description of Artificial Sequence: Synthetic coding sequence
  source 1..2874: mol_type = other DNA
atggcacaggtggccatgagcacattgccggttgaagacgaggaaagctctgagtcccgcatggtggttacgttcttaatgagcgccctcgaatctatgtgtaaggagttggccaagtctaaggcagaggtggcctgtatcgccgtttacgaaacagacgtgtttgtcgtcggaacagagcgcggacgagcattcgtcaacacccgcaaggactttcaaaaagacttcgtgaagtactgtgtggaagaagaagagaaagccgcagagatgcacaagatgaagagcaccacccaggctaatcggatgagcgtggatgctgtggaaatcgagacactgaggaaaacagtagaagactacttctgcttctgctatggcaaagcgctcggaaaatccacagtggttcccgtgccctacgaaaaaatgttgcgcgatcagagcgctgtcgtcgtacagggcctgcccgaaggcgtcgccttcaaacatcccgaaaactatgatttggccacactcaagtggattctcgagaacaaggccggaatcagttttatcataaaacgccctttcttggagccgaagaaacatgtgggtgggagggttatggtgacggacgcggataggtcaattttgtctccagggggttcttgcggtcccataaaggtgaagacagaacctacggaggattccggcatctctttagaaatggctgccgttaccgtgaaggaggagtcagaggaccctgattactatcagtacaatatccaggggtctcaccactcctccgaggggaacgagggcactgaaatggaagtgcccgctgaggatgacgactactccccaccttctaagcgacccaaggctaacgagttgccccagcccccagtgcccgagcccgcaaacgccggtaagcgaaaagttagggagtttaactttgagaagtggaacgcacgcatcacagacttgcgtaaacaggtcgaagagctctttgaacgcaagtacgcccaggccatcaaggctaaggggcctgtaacaatcccctacccattgtttcagagccatgtggaggacctctatgtggagggcttgccagagggcataccctttcgccgaccctccacgtatggcatcccgaggcttgagcgtattcttctagcaaaagagcggataagatttgtgatcaaaaaacacgaattgctgaatagcacaagagaggacttgcaactcgacaaacccgcaagcggcgtaaaagaagagtggtatgcccgtatcacaaaattaagaaagatggtggaccagcttttctgcaaaaagttcgctgaggctctcgggtccactgaggctaaagcagtgccctatcagaagttcgaggcccacccaaacgatctgtacgtggagggactcccagagaacatcccttttaggagtcccagttggtacggtattccaaggctggagaaaataattcaggtcgggaataggatcaaattcgtaataaaaaggcccgagttgctgacccactcaactaccgaggttacacagcctcggaccaacaccccggtgaaggaggactggaacgtccgtataaccaaattaaggaagcaggtggaggaaatttttaacttaaagttcgctcaggccctgggcctgaccgaagccgtaaaggtcccctaccctgtgttcgaatctaatcccgagttcttgtacgtggagggactaccagagggcataccgtttcgatcacctacctggttcggcatccccaggcttgagcgcatcgtcagaggcagcaacaaaatcaaatttgtagtgaagaagcccgaattggtgatatcatatctgccccctgggatggcatcaaaaattaacaccaaggccctgcaaagcccgaaaagacctagatcacccggttccaactcgaaggtgccagagatcgaagtcaccgtggaaggtcccaacaacaataacccccagacaagcgccgtccgtacccccacccagacaaacggttctaatgtcccgttcaagccgagaggccgagaatttagctttgaggcctggaacgcaaaaattacagatctcaagcagaaagtcgaaaatttgtttaatgagaaatgcggcgaagcgttgggtctgaagcaagccgtgaaagtgcccttcgccctcttcgaaagtttccctgaggatttttatgtagagggtttgcccgagggcgttccttttaggcgaccctccacttttgggatacccaggctggaaaagattttaaggaataaggcaaaaatcaaatttataattaagaaacccgagatgtttgagaccgcaataaaggaatcaacctccagtaagagcccccctagaaaaattaactcttcaccgaatgtgaataccactgcatccggtgtggaagacctgaatatcatccaggttactattcccgacgatgataacgaacggctcagcaaggtcgagaaagcccgacagcttcgggagcaggtcaacgacctgttttctcggaaatttggggaagccatcggcatgggattccccgtcaaggtgccttatcgaaaaataaccattaatccgggatgtgtcgtggttgacggcatgccaccaggcgtatccttcaaggctccctcctatctcgagatctctagtatgagacggatactcgactctgccgaatttattaaatttacggtaatcaggccttttcccggattagtgataaacaaccagttagtggaccagtctgagtctgagggaccggtcatacaggaatcagccgagccttcacaactcgaggtaccagcgaccgaggagatcaaggaaacagacggttcctctcagattaagcaggagcccgaccccacttggtag

SEQ ID NO: 224513 - DNA, 321 bp, synthetic construct
  misc_feature 1..321: note = Description of Artificial Sequence: Synthetic coding sequence
  source 1..321: mol_type = other DNA
atggctcaggttgcaatgtcaacattgcctgttgaggatgaagaaagctcagaatctcggatggtggtgaccttcctaatgtcagccctcgagtctatgtgcaaagagttggctaagagcaaagcggaggtggcttgcatcgccgtttatgaaaccgacgtctttgtcgtgggcaccgaacggggacgcgctttcgtgaacacccgtaaggatttccagaaagattttgtgaaatactgtgtggaggaggaagagaaagctgcagagatgcacaaaatgaaaagcacaacacaggctaatagaatgtcagttgatgcctag

SEQ ID NO: 224514 - DNA, 825 bp, synthetic construct
  misc_feature 1..825: note = Description of Artificial Sequence: Synthetic coding sequence
  source 1..825: mol_type = other DNA
atggcgcaagtggcgatgagcacgctgcccgtagaggacgaggaatcatcagagtctaggatggtggttaccttcctcatgagcgctctcgagagtatgtgtaaagagctggccaaatcgaaagccgaagttgcatgcatagcagtttacgagaccgatgtgttcgtggtgggtactgaacgaggccgagccttcgtcaataccagaaaggatttccagaaggacttcgtgaaatactgcgttgaagaggaggaaaaagcagccgagatgcataagatgaagtccaccactcaggccaatagaatgtctgttgacgccgtggagattgaaactctacggaagactgtggaggattacttctgcttttgttacggcaaggcgttggggaaatccacagtggtgccagtgccctacgaaaagatgctcagagatcaatcagcggtagttgttcaaggtctacctgaaggtgtggcattcaaacatccagagaattacgacctcgcaacgctcaaatggatactcgaaaacaaggcgggtatttcatttattattaagaggccctttctagaaccaaagaaacacgtgggaggtcgagttatggtgacagacgctgatcgatcaatcctgtcacctggcggttcctgcgggccaattaaggtgaagaccgagcccaccgaagacagcggaatctccttggaaatggccgctgttactgtgaaagaagaaagtgaagaccccgattactaccagtataatatccagggctcccatcattcatccgagggaaatgaggggactgaaatggaggtgcctgccgagggatag

SEQ ID NO: 224515 - DNA, 2982 bp, synthetic construct
  misc_feature 1..2982: note = Description of Artificial Sequence: Synthetic coding sequence
  source 1..2982: mol_type = other DNA
atgagcaccctccccgtggaggacgaagagagttctgaatcaaggatggtggtgacttttctcatgagtgctctagagagcatgtgcaaggagctagctaagtctaaagccgaggtggcttgcattgccgtatacgagaccgacgtgttcgtggtggggacagaaaggggacgtgctttcgtgaacacacgaaaggactttcagaaggacttcgtgaaatactgcgtcgaggaagaagaaaaggctgctgagatgcataagatgaagtccactactcaggcaaacaggatgtctgttgacgcggtcgaaattgaaacactgagaaagaccgtggaggactacttttgcttctgctacggaaaagccctcggcaaatccacggttgtgcccgtgccctatgaaaagatgcttcgcgatcagtctgcggttgtggtccaggggctgccggaaggggtggcttttaaacaccctgagaattatgacctggccacccttaaatggatcttggagaacaaggccggaatctccttcatcataaaaagaccctttcttgaaccaaagaagcacgtgggcggacgagtcatggtgactgatgcagatcgcagtatattatccccgggagggagctgtggcccaattaaggtcaaaactgagcctaccgaagactctgggatctctttggagatggcagccgtgaccgtgaaggaagagtctgaagatccggactactaccagtacaatattcaggccggaccctctgaaacagacgatgtggatgaaaagcaaccacttagcaagccattgcaaggatctcaccactccagcgaggggaacgagggaaccgagatggaggtgcccgcagaggacagtacacaacatgtcccgagtgagaccagtgaagatccagaagttgaagtgactatcgaggatgacgactattcgcccccaagcaaacggccaaaagcaaatgagctgccccagcctccagtgccagaacccgcaaatgcaggcaagcggaaagtacgggagttcaactttgaaaaatggaacgccagaattaccgacctcaggaagcaggtggaagaactctttgagcgcaaatatgctcaagcaattaaggccaaggggcctgtgaccataccctatccactattccagagtcacgtggaggatctctacgtcgagggactccccgagggaatcccttttcgtcgtccctcaacatacgggataccacgcctggaaagaatcctgctcgccaaggagcggattcggtttgtgattaagaaacacgaactcttgaatagcaccagagaagatctacaacttgataagccggcaagcggggttaaggaagagtggtacgctcgtattaccaaactccggaaaatggtcgatcagctattttgcaagaagttcgcagaagccctcggaagcaccgaggccaaggccgtcccttatcagaaattcgaggctcatcctaacgacctgtacgttgagggattacccgaaaatattcccttccggtccccgtcctggtatggaatcccgcgattggagaagattatacaggtgggcaatcggattaagttcgtcattaaacgacccgaactccttacccacagtacaacggaggtgacccagcctagaacaaatactcctgttaaggaagactggaatgtcaggattacaaagttgcgcaagcaggttgaagagattttcaacctcaagttcgcacaggccttggggctgaccgaagcggtcaaggtcccgtaccccgtgttcgagtccaatccagagtttctgtacgtagaggggctgcccgagggcattccattcaggtcgccaacatggtttggcatcccaaggttggagagaattgtgcggggaagtaataaaattaagttcgttgtgaaaaagcccgaactggtcataagctacttgccgccaggcatggctagcaagatcaacaccaaagccctgcagtccccaaaacgacccagaagtccagggagtaactccaaggtccccgaaattgaagtcaccgtggaggggcctaacaacaacaacccccagacgagcgcagtgcggacaccaacacagaccaacgggtcaaacgtccccttcaaaccacggggacgcgagttcagcttcgaagcgtggaacgctaaaataacagatctgaaacagaaggtggaaaacttgtttaacgaaaagtgcggcgaggccctcggtctgaagcaggccgtgaaagtgcctttcgccctgttcgaatcattcccagaggatttctacgtggagggtctgccggaaggtgtgcctttcagaagaccaagcaccttcggtattccacgactcgaaaagatcctgaggaataaggccaaaataaagtttatcatcaagaaaccagaaatgtttgaaacagctataaaggaatcgactagttctaagagtccacccaggaagataaactcatctcccaatgtcaacaccactgcctcaggagtagaggacctgaatattatccaggttactataccagacgacgacaatgaacgactgagcaaggtggagaaagcgaggcagctccgtgagcaggttaatgaccttttttccaggaagttcggcgaggccattggaatgggatttccagttaaggtcccatacaggaaaattacgattaatcctggatgtgtggttgtggatggtatgcccccaggtgtaagtttcaaggctccgtcctacctcgagattagcagcatgcgaagaatactcgactctgccgagtttataaaatttaccgttataagaccttttcccggtctagtcattaacaatcagctggtggaccagagcgagagcgaaggccctgttattcaggaaagcgctgagccgagccagcttgaggtacccgctaccgaggagatcaaagagacggatgggagctctcagatcaagcaggaaccagatcccacctggtag

SEQ ID NO: 224516 - DNA, 642 bp, synthetic construct
  misc_feature 1..642: note = Description of Artificial Sequence: Synthetic coding sequence
  source 1..642: mol_type = other DNA
atggcagctgctgcggacgagaggtctcccgaagatggcgaggatgaagaggaggaggaacagctggtgctggtggagctctccggaatcatcgactccgatttcctgagcaagtgcgaaaacaaatgtaaggttctcggcatagacacagaacgaccaatactccaggttgattcttgcgtcttcgccggagagtatgaggatacactagggacttgcgtgattttcgaggagaatgtggaacatgccgacacagaagggaacaacaagactgtcctcaaatacaaatgccacactatgaaaaagctttcaatgactagaacactacttaccgagaagaaagaaggcgaagagaacatcggcggagtcgagtggttgcagatcaaggacaatgatttttcctataggcctaatatgatatgcaacttcttacacgaaaacgaggacgaagaggtggtggcctccgctcccgataagagcctggaactcgaggaggaagaaatacagatgaacgactctagcaatctcagctgtgaacaagaaaagccaatgcacctggagattgaggacagcgggccactgatcgatattccttccgagactgaaggatctgtgtttatggagacacagatgctcccatag

SEQ ID NO: 224517 - DNA, 2118 bp, synthetic construct
  misc_feature 1..2118: note = Description of Artificial Sequence: Synthetic coding sequence
  source 1..2118: mol_type = other DNA
atggctaccgaaggaatgattctgaccaatcacgaccatcagatccgtgtcggcgtgttgactgttagcgattcatgctttcgcaatctcgccgaggaccgatccggcatcaatctcaaggacctggtccaggacccctcattactcggagggactatctccgcctacaagatcgtccccgacgaaatcgaggagatcaaggcgaccaaagaggtgatcgagcgcgaggctcccggaatggcactcgctatgcttatgggatctttaaacgtaacaccattgggcatgttatctaggccggtctgcggcattagaggtaagacacttatcattaacctgccaggatctaaaaagggatctcaagagtgctttcagttcatcctccccgctttgccacatgccatcgacctgctgagagacgcaattgtgaaggtgaaggaggtgcatgatgagttagaggatctcccatccccacctccgcctctcagtccccctcccaccacaagtcctcacaaacagaccgaagacaaaggcgtgcagtgcgaagaagaggaagaggaaaaaaaggattccggggtggcaagcaccgaagacagttcctcgagccacatcacagccgcagccattgcagccaagattccagattcgatcatcagtagaggcgttcaggtgctcccaagagacacagccagtttgagtactacaccttcggaatctccgagagcccaggctactagtagactatcgacagccagttgtcccactcctaaggtccagtccagatgctccagcaaagagaacattctgcgcgcatcacatagcgctgtagacattaccaaggtcgccagaaggcaccgcatgtcgccctttccattgacatccatggataaagcgtttatcactgtgctagagatgacgcccgtactgggcaccgaaattatcaactatagagacggtatgggcagagtgttggcccaggacgtctatgccaaagacaatctgcccccttttcctgctagcgtgaaagacggctatgccgtcagagcggcagacggaccaggggacaggtttatcataggagagagccaagccggagaacaacctactcagactgtgatgcccggacaagtgatgcgggttacaacaggggctcctatcccttgtggcgcagatgccgtggtccaagttgaggacaccgaactcattcgcgaatctgacgatggcacagaggaactggaggttcggattctcgtgcaggccagacctggacaggatatccgcccaatcggtcacgacataaagaggggggagtgcgtgctggccaagggcacccacatggggccaagtgaaatcggcctgttggctactgtgggtgtcacagaggttgaggtcaacaaatttcccgtggtggctgtaatgtctaccgggaatgaactcctcaaccctgaggatgatctactgcccggtaagatccgcgatagtaaccgtagcactctccttgctacaattcaggagcacggataccctacaattaatttgggcatagtcggtgataatccggacgatttactcaatgccctgaacgagggaatttcaagagccgacgttatcatcacctccggcggtgtaagcatgggcgagaaagattacctgaagcaggtcctagatatcgatctgcacgcacaaatccacttcggccgagtcttcatgaagcctggtctgccgactacatttgcgaccctggatattgacggcgtgaggaagattatttttgcccttccagggaacccggtgtctgctgttgtcacctgcaatctgttcgttgttccggcactccggaagatgcagggcattctcgatccaagaccaacaatcataaaggcccgattaagttgtgatgtcaagcttgatccaaggcctgagtatcatagatgtatccttacatggcaccatcaggaacctctgccgtgggctcagtcgacgggtaaccagatgtcaagtcgtctgatgtccatgcgctccgctaatggcctgttaatgctgcccccaaagactgagcagtacgttgagctgcacaagggcgaagttgtggacgtcatggtgattggcagactgtag

SEQ ID NO: 224518 - DNA, 2211 bp, synthetic construct
  misc_feature 1..2211: note = Description of Artificial Sequence: Synthetic coding sequence
  source 1..2211: mol_type = other DNA
atggctactgaaggcatgatcctcaccaatcacgaccaccagatccgagtgggcgtattaaccgtatcagattcatgcttccggaacctggctgaagatagatcaggcatcaatctgaaggatctggtgcaggacccctctctcctcgggggaacaattagtgcttataagattgttcccgatgaaattgaagaaatcaaggagaccttgattgattggtgtgatgagaaggaactgaatctgatactgaccactggcggaacgggctttgcaccgagagacgtgaccccagaggccaccaaggaggtgatcgagcgtgaggctcctggcatggccttggccatgctgatgggcagtctcaatgtcactcctctcgggatgctatctcgccctgtgtgtggaattagagggaaaacgctgatcattaatctgccaggtagtaagaaaggctcacaagagtgtttccaatttatacttcctgccctcccccacgcgatcgatctcctgagagacgccatcgtcaaggtgaaagaggtgcatgatgaactggaggacctgccgagccctcccccaccactatcacctcctccaacgacaagcccccataaacagactgaggacaagggcgtgcagtgcgaggaagaagaagaagagaagaaggactcaggcgttgcctctacagaggattcgtctagctcccacatcaccgctgcagccatcgctgccaagattccagactcaataatctcacggggagtacaggttctcccccgtgatacggcaagtctgtctactaccccaagtgaatcccctagggctcaggccacctcgcggctgtcaaccgcaagttgtcctactcctaaagtccagtctcggtgctccagcaaggaaaatattttacgggcttcccattccgcggtcgatatcaccaaggtcgctcgacgacatcggatgagcccatttcctctgacctctatggacaaggccttcatcaccgtcttggagatgacaccagtattgggaaccgagattatcaactatagagacggtatgggacgggtcctggcacaggacgtatacgctaaggacaacctaccacccttccctgccagtgtcaaggatggttatgccgtgagagcagctgatggacccggtgaccggttcatcattggggaaagtcaagcgggtgagcagccaactcaaacagtgatgcctggccaagtgatgagagtgactaccggagccccaattccttgtggagctgatgccgtggtgcaggtggaggatactgagctgatcagggaatctgatgatggaacagaggagttagaagtgcgcattctagtccaggctcgccctggtcaagatattcggcctatcggccacgacatcaaacgcggtgagtgcgtgctcgccaagggtacccacatggggccttctgagatcggcctcctcgcaacagttggcgtgaccgaggtagaagtaaataaatttccggtggtggctgtcatgtcaacaggaaacgaattactcaaccctgaagatgacctcctcccagggaaaatacgcgactccaaccgatctacattactcgctacaatccaggagcatggctaccccactattaaccttgggatcgtgggagacaaccctgacgatctgctcaatgccttaaatgaggggatttctagagcagacgtcattataaccagcggcggagtctccatgggagaaaaagactatttaaaacaggtccttgacatcgacctgcacgcccagatccactttggcagggtcttcatgaagcccggtctcccgacgaccttcgctaccctagacatcgatggagtgcgaaagataatctttgcactgcccggtaacccagtatccgccgtggttacttgtaacctcttcgtggtgcccgcacttagaaaaatgcaagggatattggaccctcggcctacaattataaaagccaggctcagctgcgacgtgaagctggaccctaggcctgagtaccatagatgcattttaacttggcatcatcaggagcctctcccatgggcacaaagtactggcaaccaaatgtccagcaggctcatgagtatgcgcagcgctaacggtctgttgatgctccctccaaagaccgagcaatatgtggagctccataagggggaggtggtggacgtgatggtgatagggcgtttatag

SEQ ID NO: 224519 - DNA, 2310 bp, synthetic construct
  misc_feature 1..2310: note = Description of Artificial Sequence: Synthetic coding sequence
  source 1..2310: mol_type = other DNA
atggcaacagagggaatgattctgacaaatcacgaccaccaaatccgagtcggggtgctcaccgtgtcagactcgtgttttcggaaccttgctgaagatcgttctggcatcaacctcaaggacctcgtgcaggatccttctctgcttggtgggaccattagcgcatacaagattgtccccgatgagattgaggagattaaggagaccttgatagattggtgcgacgagaaggaacttaacttgatcttgacaactgggggaaccggctttgcacctagagacgtcacccctgaggcaactaaggaagttatcgaacgagaagctccaggaatggctctggccatgcttatgggtagtctcaacgtcacccctctcggcatgcttagcagaccagtgtgcgggatccgaggaaaaaccctcatcattaacctgccaggtagtaaaaagggcagccaggagtgtttccagttcatcctgccagccctgccccacgctattgatttgctgcgcgacgcaatcgtgaaagtgaaggaggtgcacgacgagctcgaagacttaccctctcccccacccccactgagcccccctccaactacaagcccacacaagcaaaccgaggacaagggcgtacagtgcgaggaggaggaggaggagaagaaggattcaggcgtggcatctactgaagactcctcctctagccatatcacggctgccgcaattgccgctaagaagcatccattttacacatcacccgcagtggtcatggcgcacggggagcagccgattcctggcctgatcaactacagtcaccactcgaccgacgaaagaattcccgactctatcatctctcggggtgtacaggtcctgcccagagatactgcctcactgtccactacaccgagtgagtcccccagggctcaggccacctcgcgtctcagtaccgccagttgtcccactcccaaagttcagtcccggtgttctagtaaagaaaatattttaagggctagccacagtgccgtagacattacaaaagtggcaagaagacataggatgagcccgtttcctctgacatcgatggataaagcttttataacagtccttgaaatgaccccggtgctcggaaccgaaatcattaactatagggacgggatggggagggtcctggcacaggatgtatatgcgaaagacaatctccccccatttcctgcctcggttaaagatggatatgctgttcgtgcagcggatggtccaggcgacagattcatcattggagaaagccaggccggagaacagcctacccaaacagttatgcccggacaggtgatgcgggtgactactggagcccctattccatgcggcgctgatgctgtagtgcaggttgaagacacagagctgatccgtgagagcgatgatggaactgaagagctggaagtgaggatcctcgtccaggctaggcctggtcaggatataagacccatcgggcatgacatcaagcgtggagagtgcgtgctcgctaagggaacacacatgggaccctcagaaattggcctgctcgctactgtaggggtgaccgaagtggaagtgaataagtttccagtggtcgccgttatgtcaaccggtaatgagctactgaatcccgaagatgacctgctcccagggaaaatcagagattcaaatcgctcaaccctacttgccactatacaagaacatgggtatccgactataaatctgggcatcgtcggcgataatccagacgacctattgaatgccctgaatgaagggatttccagggcggacgtgataattacaagtggaggcgttagcatgggcgaaaaagactatctgaagcaagtgctggatatcgatctgcatgcccagattcacttcggacgagtgtttatgaaaccaggtttgccaacaacctttgccaccctggatattgacggcgttcgtaaaatcatcttcgccctacccggaaaccccgtgagcgccgtcgtgacttgcaacctgttcgtggtgcctgccctgcgaaagatgcagggcatcctcgatcctaggccaaccatcataaaggccaggctgtcctgtgacgtaaagctggaccctaggcccgagtaccataggtgcatcctaacttggcatcatcaggagcctctgccctgggcccagtcaactggcaatcagatgtctagcagactcatgagtatgcgttcagctaacggactcttgatgctgccgcctaaaacagaacagtatgtggagctgcacaagggcgaagtagtcgatgttatggttattggccgactgtag

SEQ ID NO: 224520 - DNA, 903 bp, synthetic construct
  misc_feature 1..903: note = Description of Artificial Sequence: Synthetic coding sequence
  source 1..903: mol_type = other DNA
atggagaagacccaggagacagtgcagcggatcctccttgagccttacaaatatttactgcagttgcccggaaagcaggtgcgtaccaagttgagtcaagcttttaatcactggctgaaggtgcctgaagacaagcttcaaattattatcgaggtcacagaaatgctgcacaatgccagtcttttgatagacgatatcgaggataactctaagctgcgcaggggctttccggtcgcacacagcatatatggtataccaagtgtcatcaattctgccaattacgtgtatttcttgggactggagaaggtgttaaccctcgaccatcccgatgcagtcaagctctttacccgccaactgctagagctgcatcaaggacaaggcctcgatatttactggcgagataattatacttgtcctaccgaggaagagtacaaagcaatggttctccagaaaaccggaggtttatttggcctagcagtgggactcatgcaactgttttctgactataaagaggacctcaaaccactcctgaacacactgggtttattcttccagatcagagatgactacgccaacctgcatagcaaggaatattctgagaataagtcattctgcgaagatctgacggaggggaagttttctttcccaaccatccacgcaatttggtctagaccagaatcgacccaggtgcagaatattctgcggcagagaactgagaatattgacatcaagaagtattgcgtgcattatctcgaggacgtaggcagctttgagtatacacgtaacacattaaaagagctcgaggctaaagcatataagcagattgatgccaggggcggaaatcctgagctggtggctctggtaaagcacctttctaagatgtttaaagaagagaacgaatag

SEQ ID NO: 224521 - DNA, 903 bp, synthetic construct
  misc_feature 1..903: note = Description of Artificial Sequence: Synthetic coding sequence
  source 1..903: mol_type = other DNA
atggaaaagacacaggagactgtgcagcggattctactggagccctacaaataccttctccagttgccaggcaagcaggtgagaacaaagctctcccaggcctttaatcattggcttaaggtcccggaggacaagctgcagatcattatcgaggttaccgaaatgttacataatgcttctttgctgatcgatgatattgaggataattccaagctcaggcgaggcttcccagttgcgcactctatctatggcataccctccgtgattaatagcgctaactatgtctacttccttggtctcgagaaggtcctgactcttgatcaccctgatgcagtgaaattgtttaccagacagctattagagcttcatcagggtcagggcctcgatatctattggcgcgataattacacatgtccaactgaggaggagtataaggcgatggtgctgcagaagacaggaggattgtttggcctcgccgtggggttgatgcagttgttctcagactacaaggaagatctcaagccgctgttaaatacactgggcctatttttccaaattcgggacgattatgctaatctgcactctaaggagtactccgaaaacaagtctttttgcgaagacctaacggaaggcaagttctcgttccctacaatccacgcaatctggagccggcctgagtcaacccaggtgcagaacatcctccgccagagaacagaaaacatcgatattaagaagtactgcgttcactatctggaagatgttggtagtttcgaatacacaagaaatacacttaaggagttagaggccaaggcttataaacagattgatgctcggggaggaaaccctgaactggtggctctcgtgaaacatctgagtaaaatgttcaaagaggaaaacgagtag

SEQ ID NO: 224522 - DNA, 729 bp, synthetic construct
  misc_feature 1..729: note = Description of Artificial Sequence: Synthetic coding sequence
  source 1..729: mol_type = other DNA
atggagaaaacacaagagaccgtccagcgaattctgctggagccgtacaaatatctgttgcagctacccggaaaacaggtgaggaccaaattgtcccaagcatttaaccactggctcaaagtccctgaggacaagctgcagatcatcatagaggtaacagaaatgctccacaatgcgagccttcttatagacgatatcgaagataacagtaagctgcgtcggggatttcccgtggctcactcgatttatggaattccatcagtgataaactccgcgaattacgtgtacttcctggggttggagaaggttctgaccctggaccatcctgacgccgtcaagctcttcacgagacaactgttagagttgcaccaagggcagggcttagacatctactggcgcgataactacacttgtcctaccgaggaagaatacaaagccatggtgctgcaaaagaccggtggattgtttggcctggccgtggggctgatgcagctcttttcagactacaaggaagatctaaagcctctcctgaacacccttggcttattctttcagatccgcgacgattatgcgaatttacactcaaaggaatattccgaaaataagtctttttgtgaagacctgaccgaaggcaagtttagctttccaactattcatgcaatttggtccaggcctgaatcaacgcaggttcaaaatatactgaggcagcgaaccgaaaatatcgattag

SEQ ID NO: 224523 - DNA, 903 bp, synthetic construct
  misc_feature 1..903: note = Description of Artificial Sequence: Synthetic coding sequence
  source 1..903: mol_type = other DNA
atggaaaaaacccaggaaacagtgcagcggattttgttagagccctataagtatctcttacaacttccgggaaagcaggttcggactaagttgagccaagctttcaaccactggttgaaggttcctgaggataagcttcagatcattatagaggttactgaaatgctacataacgctagcctgcttatcgacgacattgaagacaattctaaactgcgcagggggttcccagtggcacactctatatacggcattccctcagtcataaattccgcaaactacgtgtatttcctcggactggaaaaggttctgactctcgaccacccagacgccgtgaagctgtttacacgccagctactggagctccaccagggccaaggcctggatatatactggagggataattatacttgccccactgaggaagaatacaaggccatggtgctccagaaaactggcggtctgttcgggctggccgtgggtctgatgcagctattctccgattacaaggaagacttgaagccgctgcttaacacactgggcctctttttccagatccgggatgactacgccaacctgcactcgaaagagtatagtgagaataaaagtttctgcgaagatctgactgaaggcaagttttcctttccaaccattcacgctatctggtcccgccctgaatctacacaggttcaaaatatcctccgccagcgcactgagaacattgacattaaaaaatactgtgtgcactatttggaagacgttggatctttcgaatatacacgtaataccttaaaggaattagaagccaaagcttacaaacagattgacgctcgcggagggaatccagagctggtggcactagtgaaacatttaagcaaaatgttcaaggaggagaacgagtag

SEQ ID NO: 224524 - DNA, 903 bp, synthetic construct
  misc_feature 1..903: note = Description of Artificial Sequence: Synthetic coding sequence
  source 1..903: mol_type = other DNA
atggaaaagactcaggagacggttcagcgcattctgctggaaccatataaatacctcttacagttgcccggtaagcaagtgaggaccaaactgagtcaggcatttaaccactggctgaaggtgcctgaagacaaactgcagatcataatagaagtgacagagatgttacacaatgcctccctgctgattgacgatattgaggacaacagtaagctcagacggggattccccgtcgcccactcaatctatggcattcccagcgtaatcaacagcgctaactatgtgtatttcctagggctcgaaaaggtcctaacgttggaccacccggatgcagtcaagctgtttaccaggcaactgctggaactgcaccaggggcagggcctggatatttattggcgcgacaattatacatgcccgacagaggaggagtataaagctatggtcctccagaagactggtggcctctttgggttggctgtcgggctcatgcagctcttctcagactataaagaggacctgaagccgctcttgaatacactgggactgttcttccagatacgagatgactacgccaacttgcactcaaaggagtatagtgagaacaaaagcttctgcgaggacctgaccgaagggaaattttcttttccaacgatccacgcaatctggtcacgaccggaatcgacacaggtacagaatatactccgccagcgcacagaaaacattgatataaagaaatactgtgtccactaccttgaagatgtgggctcgttcgagtatacaaggaatacacttaaggaactggaagcaaaggcctataaacaaatcgacgccaggggcggaaacccagaattagttgccctggtcaagcacctgagcaaaatgtttaaggaggaaaacgaatag

SEQ ID NO: 224525 - DNA, 693 bp, synthetic construct
  misc_feature 1..693: note = Description of Artificial Sequence: Synthetic coding sequence
  source 1..693: mol_type = other DNA
atggaaaagactcaggagactgtgcagagaatcttgttagagccgtacaaatatcttcttcagctgccgggtaaacaggttcgaactaagttgtctcaggcttttaatcattggctgaaggtacccgaggataagctccagatcataatcgaggtcaccgagatgctgcataacgcctcattactcatagacgacatagaggataattctaagttgcgcagaggcttcccggtggctcattccatctacggtatcccgagcgtaatcaactccgctaattatgtgtacttccttggtcttgaaaaagttttgaccctcgaccatccagacgcggttaagttattcacgcgtcaacttctagaactgcaccaaggccaggggcttgacatttattggcgggataattatacctgcccgactgaggaagaatacaaagccatggttttgcagaagaccggaggcctttttggcctcgctgttgggttaatgcagctgttttcagactacaaggaagatcttaaacccttactcaatactctgggactgttcttccagatcagagatgattacgcaaacctccattcaaaggagtattccgagaataagtcattctgtgaagatcttaccgaaggtaaatttagttttccaacaattcacgcaatctggtctcgcccagaatcaacccaggtgtag

SEQ ID NO: 224526 - DNA, 537 bp, synthetic construct
  misc_feature 1..537: note = Description of Artificial Sequence: Synthetic coding sequence
  source 1..537: mol_type = other DNA
atggggaatagcctgctgcgagaaaacaggcggcaacaaaatacccaggagatgccatggaatgtgaggatgcagtcccctaagcagaggacatctaggtgttgggatcaccacatcgctgagggctgcttctgcctgccatggaaaaagatcctcatttttgagaaacgacaggactcgcagaacgaaaatgaacgcatgtcttctacccccatccaagataacgtggaccagacttattcagaagagctgtgctacacacttatcaatcaccgcgtgctgtgtacccggcctagcgggaacagcgctgaagaatactacgaaaacgtgccttgcaaagcggagcgcccaagagagtccctgggcggaaccgaaaccgaatactccttgctgcacatgccttccacagacccaaggcatgccagatccccagaggacgagtacgaactgctaatgccacatcgcattagcagccacttcctgcagcaacctaggccactcatggccccaagtgagacgcagttctctcatttatag

SEQ ID NO: 224527 - DNA, 492 bp, synthetic construct
  misc_feature 1..492: note = Description of Artificial Sequence: Synthetic coding sequence
  source 1..492: mol_type = other DNA
atgggcaactccctcctgcgtgagaataggagacagcagaatacgcaggaaatgccatggaacgtacgaatgcagagccccaagcagaggacctctcgcaagaagatcctgatatttgaaaagcgccaagactcacagaatgagaatgagcgtatgagtagcacaccaattcaagataacgtcgaccaaacttatagcgaagagctgtgctacactctaatcaatcacagagtcctctgcacacgcccttcaggcaactctgccgaggaatactacgagaatgtgccctgtaaagctgagagacccagggaaagcctggggggtaccgaaactgagtactctctgcttcacatgccctcaacagatccccgacatgccagaagcccggaagatgagtatgagctgttgatgccgcaccggattagctcacacttccttcagcagccgaggcctttaatggctccatcggagacccagttttcccatctttag

SEQ ID NO: 224528 - DNA, 543 bp, synthetic construct
  misc_feature 1..543: note = Description of Artificial Sequence: Synthetic coding sequence
  source 1..543: mol_type = other DNA
atgggtaacagtctgttgagggaaaacagcttcaggcgccagcaaaatacccaagaaatgccttggaacgttcgcatgcagtccccaaagcagagaacatcacgttgctgggaccaccatattgcagaaggctgcttctgtcttccatggaagaagattctgattttcgaaaagcgacaggatagccagaacgagaatgagaggatgtctagcactccgattcaggacaacgtggatcaaacatacagcgaagaactatgttacacgctgatcaaccacagagtcctctgcacacggccatcaggtaattcagcggaagagtactatgaaaacgtcccatgtaaagcagaacggcctagagagagcctcggcggaactgaaacagaatactccctgctgcacatgcccagcacggatccccgacatgcccgttcccctgaagacgagtacgagctactgatgcctcacaggatatcatctcacttcttacaacagccgagaccactcatggcaccatccgaaactcagttctcccacctgtag

SEQ ID NO: 224529 - DNA, 351 bp, synthetic construct
  misc_feature 1..351: note = Description of Artificial Sequence: Synthetic coding sequence
  source 1..351: mol_type = other DNA
atgccatccccaggcaccgtctgcagccttctgttattaggcatgctgtggcttgaccttgctatggcagggtcaagttttctgagtccagaacaccagcgagtgcagcgcaaggaatccaaaaagcccccagccaagctccagcctcgtgcacttgcaggctggctgagacccgaagacggcggacaggccgagggagcagaagacgagctggaggttcgttttaacgccccttttgacgtgggaatcaaactctcaggggtacaataccagcagcacagtcaggcccttggcaaattcctgcaagacattctctgggaagaggctaaggaagcacccgctgacaaatag

SEQ ID NO: 224530 - DNA, 354 bp, synthetic construct
  misc_feature 1..354: note = Description of Artificial Sequence: Synthetic coding sequence
  source 1..354: mol_type = other DNA
atgccttctcccggaacagtgtgttccttgctcctactcgggatgctgtggcttgaccttgctatggccggaagttcttttctttctcccgagcaccaaagagttcagcagagaaaagagtcaaagaaacctcctgctaaacttcaaccgcgtgccctcgctggatggctcagacctgaggacggtggacaggccgagggcgcagaggacgaacttgaggtgaggttcaacgctccttttgacgtgggcattaaactgtccggcgtccagtaccaacagcatagccaggcgctggggaagtttctccaggatatcctgtgggaagaagccaaggaggctcccgctgataagtag

SEQ ID NO: 224531 - DNA, 276 bp, synthetic construct
  misc_feature 1..276: note = Description of Artificial Sequence: Synthetic coding sequence
  source 1..276: mol_type = other DNA
atgccttctcccggaacagtgtgctctttgctgctgctgggaatgctgtggctggatcttgctatggcagggtcgagcttcctgagccctgagcaccagagagtgcagcaacggaaggagagcaaaaagccgcctgctaagttgcagcctcgtgcattggcgggatggctgaggcctgaagacggtggtcaagctgagggggctgaggatgaactcgaagttcggcgaccacagcccacatctgaccgcccacaggcattgttaacatccctctag

SEQ ID NO: 224532 - DNA, 102 bp, synthetic construct
  misc_feature 1..102: note = Description of Artificial Sequence: Synthetic coding sequence
  source 1..102: mol_type = other DNA
atgccctcacccggtaccgtctgctctcttctgctcctgggcatgctgtggcttgatctggcgatggccggaagctcgtttttgtcacctgaacatcaatag

SEQ ID NO: 224533 - DNA, 354 bp, synthetic construct
  misc_feature 1..354: note = Description of Artificial Sequence: Synthetic coding sequence
  source 1..354: mol_type = other DNA
atgccatcgccaggaaccgtgtgcagtcttctcctccttggtatgctctggctggacctggccatggctggctctagcttcttgtcaccagaacaccaaagagttcagcagcgaaaagaatctaaaaaaccaccagctaagctgcaacctcgagcgctggcaggttggttgagacccgaggacggcggacaggcagagggcgctgaagacgaacttgaagttaggttcaacgctccgtttgacgtgggcataaagttgagcggcgttcagtaccagcaacactcccaggctctggggaaatttctacaggatatcctgtgggaggaggctaaggaggcaccagccgacaaatag

SEQ ID NO: 224534 - DNA, 351 bp, synthetic construct
  misc_feature 1..351: note = Description of Artificial Sequence: Synthetic coding sequence
  source 1..351: mol_type = other DNA
atgcctagcccgggaacagtctgctccctattactgttgggaatgttgtggctggacctggctatggccggttcttcatttctatcgcccgagcaccagcgcgtccagcggaaggagtccaaaaagccacccgcaaaactgcaaccgagagcactggccggatggttgcggcctgaggatggtgggcaggcagagggcgctgaggacgagctcgaggtaagatttaatgccccttttgatgttgggattaaactgtcgggggtccagtaccagcagcacagccaagctctgggcaagtttctgcaggatattctgtgggaggaggcgaaagaagcgcctgcagacaagtag

SEQ ID NO: 224535 - DNA, 318 bp, synthetic construct
  misc_feature 1..318: note = Description of Artificial Sequence: Synthetic coding sequence
  source 1..318: mol_type = other DNA
atgttcacctgctggtggagttacttaaggagtacattagccgcagtgcctggcgaggccagtcgggtgcagcagagaaaagaatccaagaagccacctgctaaactgcagccgcgagccttggccggttggcttcgccctgaagacgggggtcaggctgagggtgcagaggatgagttagaagtacgctttaacgcccctttcgacgtcggaattaagctgtctggagtccagtaccaacagcattcacaggccctggggaagtttttacaggatatcttgtgggaggaagcgaaggaagctcccgctgacaagtag

SEQ ID NO: 224536 - DNA, 201 bp, synthetic construct
  misc_feature 1..201: note = Description of Artificial Sequence: Synthetic coding sequence
  source 1..201: mol_type = other DNA
atgttcacctgctggtggtcctacctgagatcgactcttgccgcagtccctggtgaagcatctagggtccagtttaacgcacctttcgatgtaggtatcaagttgagtggcgtgcaatatcagcagcactcccaggcactcggtaagttcttgcaagatatcctgtgggaggaggccaaggaggcccctgccgataagtag

SEQ ID NO: 224537 - DNA, 315 bp, synthetic construct
  misc_feature 1..315: note = Description of Artificial Sequence: Synthetic coding sequence
  source 1..315: mol_type = other DNA
atgtttacatgctggtggagctatctgcgatccaccttggctgcggtgccaggcgaggcctctcgtgtgcagcgaaaagaatctaagaaacccccagcaaaactccagcccagggctcttgctggctggctgagaccggaggatggagggcaagccgagggcgctgaggacgagctcgaagttaggtttaatgccccttttgatgttgggattaagctcagcggcgttcagtaccagcagcatagtcaagcactcggcaagttcttacaggacatcctgtgggaggaagccaaagaggccccagcggataagtag

SEQ ID NO: 224538 - DNA, 351 bp, synthetic construct
  misc_feature 1..351: note = Description of Artificial Sequence: Synthetic coding sequence
  source 1..351: mol_type = other DNA
atgccaagtcctggcaccgtttgctcactgttgttactgggaatgctatggctggatctcgctatggcaggatcttcattcctgtctcctgagcaccaacgggtgcaacggaaggaatcaaaaaagccaccagccaagttacagcccagggccctggccggatggctgcggccagaggacggcggtcaggctgaaggagccgaggacgaattagaggtgcgatttaacgctccgttcgatgtaggcattaaactctctggtgtccagtaccaacaacatagtcaggcactgggaaagtttctgcaggacattttgtgggaggaagcaaaggaggcccctgcagataagtag

SEQ ID NO: 224539 - DNA, 354 bp, synthetic construct
  misc_feature 1..354: note = Description of Artificial Sequence: Synthetic coding sequence
  source 1..354: mol_type = other DNA
atgcccagccctggaactgtctgttccctcttgctcttgggcatgctgtggctggatctagccatggcaggaagctcattcctgagcccggaacatcaacgcgtgcagcaacggaaggagagtaaaaaacccccagctaaattacagcccagagcccttgctggttggctacggcctgaagacggcggacaggcggaaggcgcagaggatgagcttgaggttcgtttcaacgctccttttgacgtggggataaagctgagcggagttcaataccagcagcactcccaggcactcggaaagttcctgcaggacattttgtgggaggaggcgaaagaggctcccgcagataagtag

SEQ ID NO: 224540 - DNA, 354 bp, synthetic construct
  misc_feature 1..354: note = Description of Artificial Sequence: Synthetic coding sequence
  source 1..354: mol_type = other DNA
atgccttcccccggaactgtctgtagtctgctactgcttggaatgctctggctcgatttggccatggctggatcaagtttcctgtcgccggagcaccagcgggtgcagcagaggaaggaatccaagaagccaccagcgaagctccaaccacgcgcacttgcgggttggttaagaccggaggacgggggtcaggctgaaggagccgaggacgagttggaggtgaggtttaatgcacccttcgacgtgggcatcaaactgtccggggtgcagtaccagcagcacagccaggccttaggaaagttcctacaggatattctctgggaggaagctaaggaagcacccgcagacaaatag

SEQ ID NO: 224541 - DNA, 1794 bp, synthetic construct
  misc_feature 1..1794: note = Description of Artificial Sequence: Synthetic coding sequence
  source 1..1794: mol_type = other DNA
atggccgagggtagtgcagtcagtgacccccagcacgccgctcgtctgttaagagctttatcgtcctttcgcgaggagtcgcgattctgcgatgcacacctagtgctcgatggtgaggagatccccgtgcagaaaaatatcttggctgccgcttctccctacatccggaccaagctgaactataacccccctaaggacgacggttcgacctataagatcgagctagaaggcatttctgtgatggtgatgagggagattctggattacatcttctctggtcagatacgtttgaacgaagacaccattcaagacgttgttcaagccgcagacctactgcttctaaccgacctcaaaaccctgtgttgtgagttcctggaaggatgcatcgcggctgagaattgcatcggaatacgggactttgccctgcattattgcttgcatcacgtccattacttggccactgaatacctggagactcacttccgggacgtcagttcaacagaggaattcctggagctctccccccagaaactcaaagaagttatatcactcgagaaactgaatgtgggtaacgagcggtatgtttttgaggctgtcattcggtggatcgcccatgatactgaaatccggaaggtccatatgaaggacgtcatgtccgcactgtgggtgtctggcctcgactcttcttatctgagggagcagatgctgaatgagccccttgtgcgagaaattgtgaaggagtgctccaatattccattgagtcagccccagcagggcgaggccatgctagccaatttcaagccacgcggttatagcgaatgtattgtcactgtggggggtgaggagagagtgtcccggaagccaactgccgcaatgcgttgcatgtgtcctctgtatgatcccaatagacagttgtggattgaactcgctcctttaagcatgcctaggattaaccatggtgtactgagcgcggaaggatttctttttgtctttgggggtcaggatgaaaacaagcaaaccctgtcttcaggcgaaaaatacgaccccgacgccaatacttggaccgcgctcccacctatgaacgaggccaggcataactttgggatcgttgagatcgacggcatgctgtatattctagggggtgaggatggagagaaggagttgatctccatggagtgctatgatatctactccaagacctggacaaaacagcctgaccttaccatggttaggaaaattggatgttacgcggcaatgaaaaaaaagatctatgctatgggcggtggcagctatggcaaactgttcgagtctgtcgagtgctatgacccacggacccaacaatggacagcgatttgcccccttaaggaaaggcggtttggagccgtcgcatgcggggtggccatggaattgtatgtgtttggcggagtgcgcagtcgcgaggacgcgcagggatcggagatggtgacctgcaagagtgagttttatcatgatgagtttaagcgctggatctacttgaatgatcagaacctttgcatccccgctagttccagctttgtgtatggggctgttcctattggggcaagtatttacgttataggggatctagataccggtacgaattatgattacgtgcgagagtttaaacggtcaaccggcacctggcaccataccaaacccctccttccatcggatttacgacgaaccggctgtgccgcactacgtatcgccaactgcaagttgttccgcctgcaattgcagcagggcttgttccgcattcgcgtccacagcccatag

SEQ ID NO: 224542 - DNA, 591 bp, synthetic construct
  misc_feature 1..591: note = Description of Artificial Sequence: Synthetic coding sequence
  source 1..591: mol_type = other DNA
atgttctgcgagaaggcaatggagctcatcagagagctgcacagggctccagaaggacaactgcccgcatttaatgaggacggcctgagacaggtgctggaggagatgaaggccctttacgagcagaaccaaagcgacgtaaacgaggctaaatctgggggtcgaagcgatttaatccctaccatcaaatttcgccactgctctctactcagaaacagacgatgtactgttgcatatctctatgacagactgttaaggatccgggctctcagatgggaatatggatctgtgttacccaacgctctgaggtttcatatggcagcggaggagatggagtggttcaataactacaaacggagcctggcgacctacatgagaagcctcggaggagatgagggtttggacattactcaggatatgaaacctcctaagagtctttatatcgaagttcgttgtctgaaagattatggtgaattcgaagtggacgatggcacctctgtgctgctgaaaaagaacagtcagcactttttgccacggtggaaatgcgaacagctgatacgacaaggggtccttgagcatattctcagttag

SEQ ID NO: 224543 - DNA, 498 bp, synthetic construct
  misc_feature 1..498: note = Description of Artificial Sequence: Synthetic coding sequence
  source 1..498: mol_type = other DNA
atgttctgtgagaaagccatggagcttatccgggaacttcaccgggcaccggaaggccagttgcctgcctttaatgaggacgggctacggcaggtcctcgaagagatgaaagccttatacgagcagaatcagtccgatgtgaacgaggcaaagtcaggcggacgcagtgaccttattccgaccattaaattccgtcactgctctctcctgcgcaatcgcagatgtactgtagcctacctctatgatcggctgctgaggatacgggcacttaggtgggaatacggatccgtgctgccgaacgcacttcgtttccacatggctgcagaggagatggagtccagatctgttgcccaagctggcgtgcagtggtgcattctgtgttctctccaattacctccaccaggtttcaaacagttctcctgtctgagtctgccatcttcgtgcgactatagatggagtggactgatcatcattaaagacctgttgctcctcatttag

SEQ ID NO: 224544 - DNA, 558 bp, synthetic construct
  misc_feature 1..558: note = Description of Artificial Sequence: Synthetic coding sequence
  source 1..558: mol_type = other DNA
atggacgctgctgaagttgaatttctggctgagaaggaactggtgaccattatcccaaattttagcttggataagatttatttgattggaggcgatttggggccattcaatcccggtctaccagtagaggtgccactgtggctggcaattaacctgaaacagaggcagaaatgcagactattaccgccagagtggatggacgtcgagaaactggaaaaaatgcgggaccacgaaagaaaggaggagactttcacacccatgccttccccctattacatggaactgacaaagctcctcctcaatcacgcttccgataacattccaaaggcagatgaaattaggaccctggtgaaagatatgtgggacacacggattgccaagctgagggtttctgcagattctttcgtcaggcagcaagaggcgcacgccaagctggacaatctcaccctaatggagattaatacttccggaaccttccttacacaggcattaaaccacatgtacaaactgaggaccaacctgcagcctctggaatcgacccagtcacaagacttctag

SEQ ID NO: 224545 - DNA, 651 bp, synthetic construct
  misc_feature 1..651: note = Description of Artificial Sequence: Synthetic coding sequence
  source 1..651: mol_type = other DNA
atgagcgaggcttacttccgggtggaatccggtgcactaggaccggaggagaacttcctgtccttggatgatatcctgatgtcacatgagaagttacccgtgaggacagaaactgcaatgcctcgactgggagctttctttctggaacgttccgcgggagccgagaccgataacgccgtgccacaaggatcaaagcttgagctcccgctctggctcgcaaaaggcctctttgacaacaagcgcaggatcctgagcgttgagctgcccaagatctaccaagaaggctggaggaccgtgttcagcgccgacccaaacgtggttgaccttcacaagatgggccctcacttttatgggttcggatcacagctgttgcactttgattctcccgaaaatgctgacatcagccagtccctgctgcagaccttcattgggagattccgccgtattatggattccagccagaacgcgtacaatgaagatacaagcgccctggtggcgaggctggatgagatggagcggggtctttttcaaaccggacagaaaggtcttaacgacttccagtgctgggaaaaaggccaggcaagccagatcacagcctccaatctggttcagaattacaagaaaagaaaatttacagacatggaggactag

SEQ ID NO: 224546 - DNA, 417 bp, synthetic construct
  misc_feature 1..417: note = Description of Artificial Sequence: Synthetic coding sequence
  source 1..417: mol_type = other DNA
atgtccgaggcttatttccgcgtcgaatcaggggctctcggaccagaggagaactttctgtcacttgatgatatcctcatgtcacacgaaaaactgcccgtccggactgaaactgcgatgcctaggctcggagctttcttcttggaacgtagtgccggagccgagaccgacaacgcggtcccccagacattcattgggcgattccggaggattatggactctagccagaacgcctataatgaggatacttctgctctcgtcgcgagactcgacgaaatggaacgcggattattccaaactggccaaaagggcctgaacgatttccagtgttgggaaaaagggcaggcttcccaaattacggctagtaacctcgtgcagaattataagaaaaggaaattcactgacatggaagactag

SEQ ID NO: 224547 - DNA, 768 bp, synthetic construct
  misc_feature 1..768: note = Description of Artificial Sequence: Synthetic coding sequence
  source 1..768: mol_type = other DNA
atgtccgaggcttattttagagtggaaagcggcgcattgggtccggaggagaatttcctttctctagatgatatattgatgtcacacgagaagctgcctgtcagaaccgaaacagcaatgcctagattaggagctttctttctggaacggagcgctggggctgaaacagataatgccgttccacagggtttcgcccttctgcctcggctcgaatgctctggagtgatttggctgactgccgctttgacctcccaagcgccagaaattctgcctccgcaaccccctatgtggctcgtgctgcagggttctaagctcgaactccccctctggcttgccaaagggctcttcgacaataagcgcaggatcctttccgttgagttgcccaaaatttaccaagaaggctggcgaaccgtcttcagcgctgatccaaatgtcgtggatctgcataagatggggcctcatttttatgggtttggcagccagttactccatttcgactcacctgaaaacgccgatataagtcagtcgctcttgcaaacatttataggacggttccgtcgaattatggacagctcccaaaacgcatataacgaggatacgagcgcgctggtggcaagactggatgagatggagcgaggcctcttccagacaggccagaagggcctcaacgacttccagtgttgggagaagggtcaagccagccaaatcacagctagtaacttagtgcagaattataaaaagaggaagtttactgacatggaagattag

SEQ ID NO: 224548 - DNA, 672 bp, synthetic construct
  misc_feature 1..672: note = Description of Artificial Sequence: Synthetic coding sequence
  source 1..672: mol_type = other DNA
atgacagaagaagtggactttctgggacaggattccgacgggggatcagaggaggtggttctaacacctgccgagctaattgaacgcttagaacaagcttggatgaatgagaagtttgccccagaattgttggagagtaagcctgagattgtcgaatgtgtgatggagcagttggaacatatggaggagaacttacggagagcgaagagggaagatctcaaagtgagtattcaccagatggagatggagaggattcgatatgtgctttcaagctacttacggtgcagactcatgaagattgaaaaattttttccacatgtccttgagaaagagaagactagaccggagggcgagccctcttccctgtccccagaagaactcgcgttcgcacgggaattcatggccaataccgaaagttacctgaagaacgtcgccctcaaacacatgccacccaacctacaaaaagtggatttgtttagggcagtgcctaagcctgacctcgacagctacgttttcctacgcgttcgcgagagacaggagaatatcttagtggagccagacacggatgagcagcgcgactacgtcatcgaccttgagaaaggcagtcagcatcttatacggtataagacaattgccccactcgtggcctcaggggctgtgcagctgatttag

SEQ ID NO: 224549 - DNA, 672 bp, synthetic construct
  misc_feature 1..672: note = Description of Artificial Sequence: Synthetic coding sequence
  source 1..672: mol_type = other DNA
atgaccgaggaggtggattttctaggccaagactccgatggcggatcagaggaggtagtgcttacaccggctgaactcattgagaggttggagcaggcatggatgaatgagaagtttgctcccgaactcctggagagcaagccagagatcgtggaatgcgtgatggaacagctggagcacatggaggagaatctgcgacgcgcaaaacgcgaagacctgaaggtcagtattcatcagatggaaatggaacgaattaggtacgttcttagctcctacctgcgctgtcgcttaatgaagattgaaaagtttttcccccacgtcttagagaaggagaagacccgcccagaaggcgaaccatcctctcttagcccagaagagctggcatttgccagggagtttatggccaacacagaatcatacctgaagaacgtggcgttgaaacacatgcctcccaatctccaaaaggtggatctatttcgagccgtgcccaaacccgaccttgactcatatgtctttttgcgagtgagagagaggcaggagaatatccttgtagagcccgatactgatgagcaaagagattacgtgatcgacctggagaaagggtctcagcacttgatcagatataaaacaatcgctcccttggtggcctcaggggcagtgcagctgatttag

SEQ ID NO: 224550 - DNA, 303 bp, synthetic construct
  misc_feature 1..303: note = Description of Artificial Sequence: Synthetic coding sequence
  source 1..303: mol_type = other DNA
atgacagaggaggtggatttccttggtcaggatagcgatggcggtagcgaggaggtcgtccttacacctgccgagctcatcgagcgactggaacaggcctggatgaacgagaaatttgctccagagcttctggagtctaagccggagatcgttgagtgtgttatggagcaactcgagcatatggaggagaacttgaggcgcgctaagagagaggacctaaaggtgagcattcatcaaatggaaatggaaagaattaggtacgtgttgagctcatacctaaggtgcaggttaatgaaggtttag

SEQ ID NO: 224551 - DNA, 939 bp, synthetic construct
  misc_feature 1..939: note = Description of Artificial Sequence: Synthetic coding sequence
  source 1..939: mol_type = other DNA
atggaaggtgctgcggcacgcgaagcccgaggcacagagacccctcgcgcttccgcaccaccacctgcgccatcggagccaccagctgcccctagagcaagacctaggctggtctttaggacccagcttgcacacggttcacctactggaaaaatcgaaggcttcactaacgtacgggaattgtatgccaaaatagccgaagcgttcggtatcgcaccaacggaaatccttttctgcactctgaatagccataaagtcgatatgcagaaactgctcggcggacaaataggtctggaagatttcatatttgcccatgtgcggggagagaccaaagaagtggaagtgacgaagactgaggacgctttgggactgaccatcaccgataatggggcagggtacgcctttataaagaggataaaagagggttccatcattaaccggattgaggctgtgtgtgtgggggactccattgaagccatcaatgaccattccatcgtgggatgcaggcattatgaagtcgccaagatgctgagagagctacctaagagtcagccttttactctccgccttgtccagccaaagagagcctttgatatgattggtcagcggtccaggagcagtaagtgccccgtcgaggccaaggtgactagtgggagggagaccctgcggctgcggagcggcggtgcggcaaccgtggaagaagccccatccgagtttgaagaggaagctagtcgcaaggtcgacgatctgctggaatcctacatgggtatcagagacccagaacttgcttctacgatggtcgagacaagcaaaaaaacagcgagcgctcaagaatttgctcggtgcttggattccgtgctgggtgagtttgctttccctgacgaatttgttgtggaggtctgggcagcgatcggcgaagcacgcgaggcgtgtggctag

SEQ ID NO: 224552 - DNA, 2097 bp, synthetic construct
  misc_feature 1..2097: note = Description of Artificial Sequence: Synthetic coding sequence
  source 1..2097: mol_type = other DNA
atgccttccgagggtcgctgctgggaaactttaaaagccctccggagtagcgacaaaggccgtctctgctactatcgtgattggctgctgcgacgcgaggatgtgctggaagaatgtatgagcttgccaaagctgagctcatacagcggttgggtggtagaacatgtgctgcctcatatgcaagagaaccagccgctttcagagacgagcccttcctctacatcagcaagcgcccttgatcaacctagttttgttccaaaaagcccggatgcgagctccgctttcagtcctgcttctcctgccaccccaaatggcaccaaggggaaggatgagagccaacacacagagtccatggtgctgcaaagctctaggggtatcaaagtcgagggctgcgtgaggatgtacgaactggtgcacagaatgaaaggaacagaaggtcttagattatggcaggaggagcaggagagaaaagtgcaggccttgagcgaaatggcaagcgagcaattgaagcgatttgacgagtggaaagaactaaagcaacataaagaatttcaggatctccgtgaggtgatggagaagtcttcgcgcgaggcattaggccaccaagagaagctgaaagccgaacatcgccaccgcgctaagatcctgaacttaaagctgcgggaagccgaacaacaacgggtcaagcaagccgagcaggagcggctgagaaaggaagaggggcaaattaggctgagagctctctacgcacttcaggaagagatgctgcaattgagtcaacaactcgacgcttctgagcagcataaggcacttttgaaagtagatctggcagcctttcagactaggggcaatcagctctgctcccttatttctggcatcatccgcgcttccagcgagtcctcgtacccaacggctgagagccaagcggaggcagagcgcgctttacgggagatgcgtgatttgctgatgaatctcgggcaagagattacaagggcctgtgaagacaagcgacgtcaggacgaggaggaagctcaggtgaagctgcaggaggcccaaatgcaacaaggtcctgaggctcacaaagagcccccagctccaagccaaggacctggcggtaagcagaatgaagacctgcaggtgaaagtgcaggatattaccatgcagtggtatcagcagctccaggacgctagcatgcagtgtgtcctgacatttgagggcctaaccaatagcaaggacagtcaggctaagaaaataaagatggatttgcagaaagctgccaccattcctgtctctcaaatctcaaccattgcgggatcaaaactgaaggaaatcttcgacaaaattcacagcttgcttagtggaaagcccgttcagtcgggtggaaggtccgtctctgtgaccctgaatccccaggggttagactttgtgcaatataagttagccgaaaagtttgttaagcagggggaagaggaggtcgctagtcatcacgaagccgctttccctatcgcagtcgtcgcatcaggcatctgggagctccacccacgggtcggagacctaattctcgcccaccttcacaagaagtgtccctatagtgttccattttatcccacattcaaagaggggatggccctagaggactaccagcggatgctcggataccaggttaaggacagcaaagttgagcagcaggataacttcttaaagcgcatgtcaggtatgatcaggctctacgctgctattatccagcttaggtggccctatggaaaccggcaggaaatacaccctcacggcctcaatcacggctggagatggctggcacagatactgaatatggagcctctgtccgacgtcactgctactttgctttttgacttcctcgaggtgtgtgggaatgctctgatgaaacaataccaggtgcagttttggaagatgctcatcctgattaaagaggactactttcctcgtatcgaggcgatcacttcctctggacagatgggcagttttattagattgaaacagttcctggagaagtgtctgcagcataaagatatcccagttcccaaagggttcctaactagcagtttctggcggagctag

SEQ ID NO: 224553 - DNA, 1980 bp, synthetic construct
  misc_feature 1..1980: note = Description of Artificial Sequence: Synthetic coding sequence
  source 1..1980: mol_type = other DNA
atgccttcagagggtagatgttgggagacactgaaggcactgagatcctccgataaaggacgactctgctattatagagattggttgctgcgacgagaagacgttctggaggaatgcatgtctctcccaaaactgagcagctactctggttgggtcgtggaacatgttctgccacatatgcaagagaatcagccacttagtgagaccagtccttcaagtacaagcgccagcgccctggaccagcctagcttcgtaccgaagtcacccgacgccagctcagcattttcaccagcaagccccgctaccccaaacgggacaaagggtaaggacgagagtcagcacacggagtccatggtcttgcagagctccaggggtatcaaggtggaaggctgcgtgcgaatgtacgagttagtccaccgaatgaaaggcactgagggattgagactgtggcaggaggaacaggagagaaaggttcaggccctctccgaaatggctagcgagcaacttaaacggttcgatgaatggaaggaactcaaacaacataaagaatttcaggatctccgtgaagtaatggaaaaaagctcacgcgaggccctgggacaccaagagaaacttaaagctgaacatcgtcatcgcgctaagatactcaacctcaagctgcgggaagccgaacagcaacgcgtgaagcaggctgagcaggaaaggctccggaaggaagagggtcaaatcaggctcagggctctatacgcactgcaagaggaaatgttgcagttaagccagcagctcgacgctagtgagcagcacaaggcactgctgaaagtggacctggccgcatttcagacaaggggaaatcagctatgctccctaatttcgggaattatccgcgctagttccgagtccagctaccccaccgctgagtctcaggccgaagccgaaagggccctgagagaaatgcgagacctgctcatgaaccttgggcaggagattactagagcttgcgaggataagcgccgtcaggatgaggaagaggcgcaggtgaagctccaggaagcgcagatgcagcagggaccagaggcccacaaggagcctccggctccaagccagggcccagggggaaaacagaacgaggatctgcaagtaaaggtgcaggatattacaatgcagtggtaccagcaactgcaggacgcctcaatgcaatgcgtattgaccttcgagggccttactaactcaaaggattcacaggccaaaaagattaaaatggatcttcagaaagccgctaccatccctgtgtctcaaattagtactatcgctggtagcaagttaaaagaaatcttcgataaaatccacagtctgctcagtggtaaaccagtccagtccggtgggcgatccgtctccgtcacactcaatccacagggactggacttcgtacagtataagttggccgagaagtttgtgaagcagggggaagaggaggtggcctctcaccacgaggccgcttttcccattgccgtcgtcgccagcggcatttgggagctgcacccacgagtcggagacctgattttggcccacctgcacaaaaaatgtccttattccgtgcccttttaccctacctttaaagaaggcatggctctggaggactaccaacggatgctgggctaccaggtgaaagattctaaagtggagcagcaggacaacttcctgaaaaggatgagcgggatgatacgactatacgcagctatcattcaactccgatggccatacggcaacaggcaagaaatccacccccacggactgaatcacggatggcgatggcttgcccagatcctgaatatggagccactgtcggacgtgacagctacactgttatttgattttctggaggtgtgtgggaatgctcttatgaagcaatatcaggtgcagttttggaaaatgctcattctgatcaaggaggattactttcctaggtaccaagcctgttag

SEQ ID NO: 224554 - DNA, 1335 bp, synthetic construct
  misc_feature 1..1335: note = Description of Artificial Sequence: Synthetic coding sequence
  source 1..1335: mol_type = other DNA
atgctgcaactcagtcagcagttggatgcttccgaacagcataaggctttgctgaaagtagatctcgccgcatttcagacccggggtaaccaactgtgttcactaatctccggcattatcagggcatcctccgagagctcttaccccaccgccgaatcccaggctgaagctgagagggctctccgtgaaatgagggacctgctgatgaacttggggcaagagatcacaagggcatgtgaagacaaaagacgtcaagacgaagaagaagcacaagtcaaactgcaggaagcccagatgcagcagggtcctgaagcacacaaagagcctcccgctccttcccagggaccaggagggaagcaaaatgaagatctgcaggtgaaagtacaggatatcaccatgcagtggtaccagcagctccaggacgccagtatgcagtgtgttctcactttcgaggggctcactaattctaaggatagtcaggcgaaaaaaatcaaaatggatctccaaaaagccgctactattccagtgagccagatttcaacaatcgcaggcagtaagctgaaagaaatctttgacaagatccattctttgctgtccggcaagccagtgcagtcaggtggtagatcagttagcgtaaccctcaatccacagggactggactttgtgcagtataagctggcggaaaagttcgtcaagcagggcgaagaggaggtggcaagtcaccacgaggcggcattccccatcgccgtggtcgcctctgggatatgggaattgcaccctcgtgtgggcgacctcattctggcccatttgcataagaagtgcccttattccgtccctttttaccccacgtttaaggaggggatggccctggaagactatcaacgcatgctgggatatcaagtgaaagactccaaggtagagcagcaggataattttctgaagaggatgtccggtatgattcggttgtacgccgctattattcaactccgttggccctatggcaaccgtcaggaaatacatccgcatggccttaaccatggctggagatggttagcccagattttgaacatggaaccccttagcgacgtcacggccactctattgtttgatttccttgaagtctgcggaaatgccttgatgaaacagtaccaggttcagttctggaaaatgctgatcttaatcaaggaggattacttccctcgcatcgaggccatcacatctagcggacagatgggctcttttattcgattaaagcagttcctcgaaaagtgtcttcagcacaaagacatccctgtgccaaagggtttcttaaccagttcgttctggcgcagctag

SEQ ID NO: 224555 - DNA, 2490 bp, synthetic construct
  misc_feature 1..2490: note = Description of Artificial Sequence: Synthetic coding sequence
  source 1..2490: mol_type = other DNA
atggccttgacaagcatcaatgccactccgacacagctgtctagttcttctaactgcttgagcgatacaaaccaaaataaacagtcctccgaaagcgccgtctccagtacggtgaacccagttgccatccacaagcgctcaaaggtcaagaccgagccagaaggcctgaggcccgcttcccctctggccctgacacagggtcaagtttctggacacggctcgtgtggttgcgcccttccgctgtcccaagagcagctcgcagacctcaaggaagatcttgatcgcgacgattgcaagcaagaggcagaagtggtcatttacgaaaccaactgtcattgggaggattgtacaaaggagtatgatacccaagaacagcttgtgcaccacattaacaacgagcatatacacggcgagaaaaaagagtttgtgtgcaggtggcaagcatgcacacgggaacaaaaacctttcaaggcacaatacatgctagtggtacatatgaggagacacactggagaaaagccacacaaatgtacatttgaggggtgctcaaaggcgtattccaggttagagaatttaaaaactcaccttaggagccatactggggaaaagccctatgtatgtgaacacgaaggctgcaacaaggcctttagtaatgcgtccgaccgtgcaaaacatcagaatcgcacccattccaatgagaagccctatatctgcaaaattccgggatgcacaaagaggtacaccgatccttcgtctctacggaagcacgttaaaacagtgcatggccctgatgcacacgtgactaaaaagcagcgcaatgacgtccatctccgcacaccccttctgaaggagaatggtgattctgaagctgggacagaacccggtgggcctgagtcaaccgaggcttccagcacaagccaggcggtagaggactgcttacatgtaagggctataaagaccgaaagctctggtctttgccagagctcacctggggcacagtccagttgttcatccgagccctctcccctgggtagcgcaccaaataacgacagtggtgtcgaaatgccaggcactggcccaggatcattgggcgacttgacggcgttggacgacactccccctggggcagacaccagtgctctggctgcaccttcagccggtggcctccagctgcgtaagcatatgacgaccatgcaccgctttgaacagcttaagaaggagaagcttaagtctctgaaagatagctgcagttgggccggaccgacacctcacaccagaaacactaagctacctccgctgcccggaagcggctctatcctggaaaatttttccggatcgggagggggtggcccagcaggcttgctaccaaacccccgacttagcgaactctctgcttctgaggttactatgttgtctcagctgcaggagcgtagagacagctcaaccagcacagtatcttctgcttacactgtctctaggcggtctagtggaattagtccctactttagctctaggcggtccagtgaggcatccccattgggtgccggtcggcctcacaacgctagtagtgccgactcatatgatccaatttccactgacgcttcaaggcggagcagtgaggcctctcagtgctcaggaggatctgggctgctgaatttgacccctgcacagcagtattctttacgagccaagtacgcagccgctactgggggaccaccgcctacaccacttccgggtttagaaaggatgtcactccgaacacggctcgcattgctggacgctcccgaacgcaccctaccagccggatgcccacgtcccctaggccctcgacgagggagtgatggcccaacctacgggcacgggcatgctggtgcggctcctgcctttccgcatgaggcacccggaggcggtgctcgcagagcctccgaccctgtgcgaaggcccgatgcgttgtctttgcccagggtacagcggttccacagtacgcataacgtgaatcccggaccattgcccccatgcgccgacagacgcggacttcgcctccaaagccaccctagtactgacggaggtctggcgagaggggcttattcccctcgcccaccttctatttctgagaatgtggccatggaggccgtggccgcaggcgtggatggagctggacccgaagctgacctgggcctgccagaagatgacttagtgctgcccgacgacgtagtgcagtacataaaggcacacgcatccggggcacttgacgaaggtactggtcaggtttacccaacagagagtacgggcttcagtgataatcctaggctaccatcacccggactgcacggccagaggaggatggtcgcggcagatagcaatgttggcccatcagcacctatgctcggtgggtgtcagcttggcttcggagctccgtctagcctaaacaagaacaatatgcccgtccaatggaatgaggcgtcggccacctggctgtcagggacgtag

SEQ ID NO: 224556 - DNA, 4761 bp, synthetic construct
  misc_feature 1..4761: note = Description of Artificial Sequence: Synthetic coding sequence
  source 1..4761: mol_type = other DNA
atggagaccagtgctagtgcaaccgcctctgaaaaacaagaggctaaatccggcatactcgaggcagccggatttcctgaccctggcaaaaaagcttccccattggtggtggccgctgccgctgccgcagcggttgccgctcagggggtgccccaacatttgctccctccctttcacgcacccctcccgattgacatgagacaccaggagggccgataccactacgaacctcattctgttcatggggtgcacggcccacccgcattgtcaggcagtcctgtgatctctgacatctctttgatccgcctttcgccacacccggcaggacccggtgaatcgcctttcaacgcccctcacccctacgttaatccacatatggaacactacctccggtcagtgcacagctccccaacacttagcatgataagcgctgccagaggcctgtcacctgctgatgtggctcaggagcatctcaaagaacggggactgttcggcctacctgcacccggtactacaccgagtgactactatcaccaaatgactctggtggccggtcaccccgcaccctatggagaccttctcatgcaaagcggcggagcagcatccgctccacatctccacgactacctgaacccagtggatgtgtctagatttagctcgcccagggtcacacctagactctcgagaaaacgtgctctttctattagccctctttctgacgcgtcattagatctccagcgtatgattcgaacgtcacccaactctctcgtggcctacataaataacagccggtctagctctgctgcatcaggcagctacggccatctgtccgcaggagcactttctcccgcatttaccttcccacacccaatcaacccagtggcataccagcagatcttaagtcagcagcgcggattaggctctgcctttggacacacccctcctctcatacagccaagcccaaccttcttagctcagcaaccaatggccctaacttccatcaatgccaccccaacccagctgtcctctagtagtaattgcttgtctgacaccaaccaaaataagcagtcctctgaaagcgcagtgtcatcaactgtcaatcccgtggcaatacataagcggagcaaagtgaaaaccgaaccagagggcctccgacccgctagcccactagccctgacgcagggccaggtgagcggacacgggtcttgcgggtgcgccctgcccctgtcgcaggaacagctcgccgatctgaaagaagatctggacagagatgactgcaagcaagaggctgaagttgtgatatatgaaacaaactgccattgggaggactgtacgaaggaatatgatacccaggagcagctggtgcatcatattaataatgaacatatacacggggaaaagaaggaatttgtgtgccgctggcaagcttgtactagggaacagaaaccatttaaagctcagtatatgcttgtggtgcacatgcgcaggcatacgggcgaaaaaccccacaaatgtactttcgagggctgcagcaaggcatacagcaggttggaaaacttaaaaactcacctgcgcagtcatactggcgagaagccgtacgtatgtgagcatgaaggatgcaacaaggcgttcagcaacgccagcgatcgagccaaacaccagaaccgcacacattcaaatgagaagccttatatttgtaagatcccaggctgtacgaagcgatacaccgatccttccagcttgcgcaagcacgtcaagaccgtgcacggacctgatgcccacgtgaccaagaaacaacgcaacgacgtgcatctgcgcactccactcttgaaggagaacggtgacagtgaggcgggtaccgagcccggtggtccagaatcaaccgaggcttcatccacgagtcaagccgtcgaagactgtcttcacgtaagagcgattaaaacagaaagttctgggttatgtcaatctagccccggagctcagtcctcatgctcttccgaaccgagcccactggggagtgctcccaacaacgacagtggagtagagatgccgggtaccggccctgggtctttgggagatctgacggccctcgacgatacccccccaggagcagatacttccgctttagccgctccgtctgccggaggactacagctaaggaagcacatgactaccatgcaccggtttgaacagttaaaaaaggaaaaactgaaatcactgaaagactcatgcagctgggcaggccctaccccacacactcgcaatactaaactgcccccacttcctgggtccggtagtattctggaaaatttttctgggtccggcggtggtggccctgctggccttctgcctaaccctagattaagtgagctgtccgcctcagaggtcaccatgctgtcccagctgcaggaacgccgagattcaagcacgtcgacagtatcctccgcttatacagtgagccgcaggtcttcagggatttcgccgtacttctcgtcgaggcgctctagcgaagcttcgccgcttggggcaggtcgacctcacaacgctagtagtgcagactcctatgacccgatatcgaccgatgcttcgcgccgaagcagcgaggcttctcagtgttccggaggatcaggcctcctcaacctaactcctgcccaacagtacagcttgcgggctaaatacgctgccgcaacaggcggacctccacctactccgctgcctgggctcgagcgcatgagcctgcgtacccggctcgccttgctggatgcacccgagcgaactctgccggctggatgcccgagacccctcggaccacgtcgcggtagtgacgggcctacatatgggcatggacacgcaggggctgcccctgccttcccccacgaggcaccgggaggtggtgccagacgagcttctgaccctgtcaggagaccggatgctttaagcctccccagggttcaacgatttcatagcacccacaatgttaacccagggccactccctccctgcgcagacagacgagggttacgcctgcaatcccatccatccacagacggtggattggcgagaggggcatactcccctcggcctccctcaatttcggaaaacgtagccatggaagcggtcgcagccggagtcgacggggctggtccagaggcagatttgggcctgccagaagacgatctggtcctgcccgatgacgtggtgcagtatataaaagcccacgcttcaggtgccctcgatgagggtactggacaggtgtatcccacggaaagcactggcttctccgacaacccacgcttgccaagtcctgggctccacgggcagcggagaatggtggcggctgacagcaatgtaggcccatctgctcccatgcttggaggatgtcagctgggattcggtgctccatccagtttgaacaagaacaatatgcctgtccagtggaatgaagtatctagcgggaccgtggacgcactggcctctcaggtgaagcctcccccatttccacaggggaacttagctgttgtgcagcagaaacccgcattcggacagtatccgggatacagcccgcagggcttgcaggcgtcaccaggcggtttagacagtacacagccccatttgcagccacgctccggtgctccctcccagggcatcccacgggtgaactacatgcagcagctccgccagcctgttgctggttcccagtgtccaggcatgacaaccactatgtccccccacgcctgctacggtcaagttcatcctcagctgtcaccaagcacaatctcaggtgctctgaaccagtttcctcagagttgtagtaatatgcccgcaaagcccggacaccttggccaccctcagcagaccgaagtagcccctgatccaacaaccatgggaaataggcacagagaactaggagtgccagacagcgccttagcaggggtgccacctccccatccagttcagtcctaccctcaacagagtcaccatctagccgcttccatgtctcaggagggttaccatcaagtgccatcccttttgccggcacgccagcccggttttatggaaccccaaactggcccaatgggagtcgcaaccgcaggctttgggctcgtacaacctcggccacccctggagcctagccccacagggagacacagaggcgttcgggcagtgcagcagcagctggcgtatgccagagccactggtcatgccatggccgctatgccatccagccaggaaactgcagaggcagttcccaagggcgctatgggcaacatgggctccgtcccgccacaacctccgccacaggacgctggcggagctccagatcacagcatgttgtactattacggccagatccatatgtatgagcaggacggtggcttagagaacctcgggagctgtcaggtgatgaggtcccagcctccacagccacaagcctgccaagatagtatacaacctcagccccttccctcacctggagttaatcaggtgtcctccacagtggattctcagctgctggaggctccccagatagattttgatgctatcatggatgatggcgaccatagttctctcttcagcggagctttgagcccaagcctcttgcacagcctttcccagaatagctctcggctgacaacaccaaggaatagcctgacgctgccctcaattcctgccggaataagtaatatggcagtgggcgacatgtcatcaatgctgacttcacttgcagaggagtccaagtttctcaacatgatgacttag

SEQ ID NO: 224557 - DNA, 249 bp, synthetic construct
  misc_feature 1..249: note = Description of Artificial Sequence: Synthetic coding sequence
  source 1..249: mol_type = other DNA
atggaaacgtcggcatccgctaccgccagcgagaaacaagaagccaaatcgggcatactggaggccgctggattccccgatcctggtaagaaggcctccccgttggttgtggccgcagccgctgccgcagccgtggcagcgcagggcgtgcctcagcacttgttaccgcctttccacgctcctctgccaattgacatgcgacaccaagagggcagatatcactacgaacctcactcggtccatgggtag

SEQ ID NO: 224558 - DNA, 660 bp, synthetic construct
  misc_feature 1..660: note = Description of Artificial Sequence: Synthetic coding sequence
  source 1..660: mol_type = other DNA
atggagacctccgctagcgcaactgcgtccgagaaacaggaggccaaaagtggcattctggaagcagccggatttcccgatcccggtaagaaagcgagccccctggtcgtggcagcagccgctgccgcagccgtggcggcacagggagttcctcagcacctcctcccaccttttcacgcccctcttcccatcgatatgaggcatcaagaaggacgctatcattatgagcctcactcagtgcatggtgtgcatggcgtgccttttcttcagcccgctggggacgcacctcccgaaccacaggccggagcagtgcacctgcctacactgagaaggcaaccaggtcctgcagcggatgatccccaccttacacagctggcctccgggcttcaccagcaattacctaaacagcttggcggtcagcggtttcttcgagcctccgtctcgggctgcccccagccctcactacatcttccaccccctcatcagcccagagggttgcctgctgactctgaacctgccgaaggatccggcgtgtctttgtggacccacaccactccagatcctgctctgacccatctgcccggtcccgctgcacacggcccacatctgcatcagtgccacgcccacccagcacagcagcaacaacaactgagtgagtag

SEQ ID NO: 224559 - DNA, 4761 bp, synthetic construct
  misc_feature 1..4761: note = Description of Artificial Sequence: Synthetic coding sequence
  source 1..4761: mol_type = other DNA
atggagacttccgcaagtgccaccgcctccgaaaaacaggaggccaaatctggcatcttggaggccgcagggtttccagatcctggaaaaaaggcttccccactggtggtagcggctgccgcagcagcggctgtggccgctcaaggagtgccacagcatttgctccccccatttcacgctcctctccctatagacatgcgccaccaggaggggcgatatcactacgaacctcacagtgtgcacggcgtgcacggcccaccggctctttccggcagcccagtaattagtgatatatcactcattagactttcaccgcacccagcagggccaggggaatctccttttaacgctccccacccgtacgtaaacccacacatggagcattatctgcgctcagtccatagttcgcccactctgtctatgatcagcgctgcacggggtctgtcacctgccgatgttgcacaggagcatttgaaagagcggggtctcttcgggctgcccgcacctgggaccaccccaagtgattattatcaccagatgactcttgtcgcgggtcacccagccccttacggtgacctgttgatgcagtcaggtggagccgctagcgcaccccatctacacgactacctgaacccagtggacgtgagtagattcagctctccccgagttacgcctcgcctgtcgcgcaaaagagcgttgtcaatatccccgctgagcgacgctagcctggatcttcaacgaatgatacgaaccagccccaactccttggtggcttacattaacaattcaaggagctcttccgctgccagtggctcctacggtcacctgagcgctggagcactctcccctgccttcaccttccctcatccaataaaccccgttgcttatcagcagattctgtcccagcagcgcggactcggcagtgcctttggccatactccacccctaatacagcctagccccacattcctagcccagcaaccaatggccctcacttcaatcaacgcgactcctacccagctctcatcctcttccaactgtcttagcgacacaaatcaaaacaaacagagtagcgagtcagccgtgagctctacagttaatccagtcgccatccataagcgctcaaaggtgaaaacagaacctgaagggctaagacccgcaagtcccctggccctcacacagggccaagtgtctggccacgggagctgtgggtgtgcactgccactctctcaggagcaattggcggatctgaaggaggacttagaccgtgatgactgtaagcaggaggcagaagtggtgatctacgagaccaactgccattgggaggactgtaccaaggagtatgacacccaggaacagctggtgcaccatataaataacgagcacatccatggagaaaagaaagaattcgtgtgccgctggcaggcctgcactcgcgagcagaaaccttttaaagcacagtatatgttggtggtgcacatgcggcgtcacacaggcgaaaaacctcataagtgcacttttgagggatgttccaaggcttatagccgcctcgagaacctcaagactcatctccggtcccacaccggcgagaagccgtatgtgtgcgagcacgaaggctgcaataaggctttttccaacgcatcggatcgggctaagcatcaaaacagaacccattctaatgaaaagccatacatatgcaaaatacccggttgcacgaagcgctatacagacccatcttccctgcgtaaacacgttaaaacagtacacggcccagacgctcacgtgactaaaaaacagaggaacgatgtacacctgaggaccccgctgctgaaggagaatggtgactctgaagctggtaccgaaccagggggaccagaaagcactgaagctagcagcacaagccaggcagtcgaagactgtctccatgttcgggctatcaaaacagagagctcaggactgtgtcagagcagcccgggtgcccaatcatcttgcagcagtgagccctctccactgggcagcgcaccgaataatgacagcggagtggagatgcctggtacaggccctggcagcttgggcgatttgaccgccttggacgacacaccacccggtgctgacacatctgccttggcagctccaagtgctggtggactccagctgagaaaacatatgacaaccatgcacaggttcgaacagcttaaaaaagagaagttaaagtctctaaaagattcctgttcttgggccggaccaaccccacacactagaaacacaaagctgccgccactcccagggagtggaagcatcttagaaaattttagcggttccggaggcggaggacctgcgggactccttcctaatccaagactatccgagttgagtgcctctgaggtgacaatgttgtcgcagttacaagagcgcagggacagcagtacttccaccgtctcctctgcctacactgttagtcggagatcctctggaattagtccatacttttcatctcggagatcctcggaggcttcccccctgggagcagggaggccccataatgccagctctgcggactcttacgatccgattagtacagacgccagtaggcgttcgtctgaggcgagccagtgcagtggtggaagcgggctgctgaacctgactcctgcccagcaatattctctccgcgcaaaatacgctgcggcaacgggcggtcctccaccaactcccttacccggactggagaggatgtctcttaggaccaggctggccctgctggatgccccagagaggaccctgccagctgggtgtcctaggccccttggccctcgacggggttccgacggcccaacctacgggcacgggcatgctggcgcagctcccgcttttccccatgaggcccctggaggcggtgccaggagggcctccgaccccgtccgtaggcctgatgctttatccctgccccgagtgcaacgctttcactctacgcacaatgttaatcccggtccactgcctccctgtgccgatagacgcggactgcggcttcagtcacatccgtcaactgatggagggcttgcgcgtggtgcttactcaccccgaccccctagcatctcagagaacgtggctatggaggccgttgctgctggcgtcgacggcgcaggaccagaggcagacttgggtctccccgaggacgacttggttcttcctgacgatgtggtgcagtacataaaggcgcatgcgagtggcgcactcgatgaaggaacagggcaggtgtaccctacggaaagcactggattcagcgataaccccagactgccttctccaggcctccacggacagagacggatggtagctgctgactctaatgtaggcccaagcgcccctatgctggggggatgtcagctcggattcggagcgcctagctcactcaataagaataacatgcccgtccagtggaacgaggtctcttcaggtaccgtggatgccttagcctctcaggtcaagcctccgccttttcctcagggcaacctggcagttgtgcagcagaagcccgctttcggacagtaccctggctactccccacaggggctgcaggcctctccaggcggtttggattccacacagccccacctacaaccaaggtcaggggcaccttctcagggcattcccagggtcaactacatgcagcagctgagacagccagtggcgggttcacagtgccctggcatgactaccactatgtccccacacgcctgctacggccaagtgcacccccagttgagtccatccacaatttccggggctctgaaccaatttccccagagttgctccaatatgccagcgaagcccggacatcttggccacccacagcagacggaggtggctccagatcccactaccatgggaaaccggcaccgggaactgggtgttccagactccgctctcgctggggtgccgcctcctcaccctgtacaatcatacccccagcagtcacatcacctagctgctagcatgagccaggagggatatcaccaggtacctagcctcttgccggcacgtcaaccagggtttatggagccacagaccggaccaatgggcgtcgcaactgccggatttgggctggtccagccaagaccgccactggaaccatccccaaccggacgacacaggggagtccgtgccgtgcagcaacaattagcttacgctcgggcaacaggccatgccatggctgcaatgcccagctctcaagagacggctgaggcggtgcctaaaggggcaatgggaaatatggggagcgtgccgcctcagccacctcctcaagacgctggtggggctccagatcacagtatgctgtattactacgggcagatccacatgtacgaacaggatggaggtctcgaaaatttaggatcgtgccaggttatgaggtcacagccacctcaaccccaggcttgtcaggacagcatccaacctcagcccctgcctagcccaggtgtgaaccaagtgagttctactgtggactctcaactgctggaggctccccaaatcgatttcgatgcgattatggacgatggcgaccactccagcctgttttctggagcgctcagcccctctttgctgcattctctgtctcaaaacagctctaggctcacaaccccccgaaactcgcttacattgcctagtataccggctggcatcagcaacatggccgtgggggatatgtccagtatgctgacttcactggcagaagagtctaagttcctgaatatgatgacctag

SEQ ID NO: 224560 - DNA, 4742 bp, synthetic construct
  misc_feature 1..4742: note = Description of Artificial Sequence: Synthetic coding sequence
  source 1..4742: mol_type = other DNA
atggaggctcagtcgcatagctcaaccacaactgaaaagaagaaggtggagaactctattgtgaaatgctctactcggactgacgtctccgaaaaagcagtcgcatcatccactacaagtaacgaggacgagtccccaggtcagacttatcaccgcgaaagacggaacgctatcaccatgcagccacagaatgtgcagggactgtccaaagtgtctgaggaaccgtccacatcctctgacgagagagcttctctgatcaagaaggagattcatggaagcctgccccacgttgcggagccctcagtgccttaccgtggcacggtattcgccatggatcctagaaacgggtatatggagccacattaccatcccccacatctattccccgcattccatccacctgtgccgattgacgctagacatcatgaggggagataccattacgatccaagtccgatcccaccgttgcatatgacctctgcactgtccagctctccaacctaccctgatttaccttttattaggatttctccacataggaatccaacggccgcatccgagtcgccttttagccctccccacccctatattaacccctacatggactatatcaggtcattgcatagcagtccgtccttaagtatgatcagcgctaccagagggttgtctcccacggacgctccgcatgccggtgttagtcccgcagagtactaccaccagatggcgctgttaacaggccagcggtcaccatacgctgatatcataccatctgcagccaccgctgggaccggtgctatccatatggaatatctgcatgccatggattctacccggttctcttcacctcggctatcagcacggccttccagaaagcgaacacttagtatctctcctttgagcgaccactcttttgaccttcaaaccatgatacggacctcccctaacagtctggtgacaatcctcaacaactcccgatcatctagctctgctagcggttcctacggtcatctctcagctagcgctatctcccctgctctcagctttacatattccagcgcacctgtgagtctccacatgcatcagcagatactatcccgccagcagagcctagggagcgccttcgggcactctccccctctgatccatcccgctcctaccttcccaacccaaagaccaattccaggtatacccactgtgctcaatcccgtgcaggtgtccagcggtccctcggagagttctcagaacaaaccaacttccgaatcagcagtgtcatcaactggagatccaatgcacaataagcggtcaaagatcaaacccgacgaggacctgccctcccccggtgcccgtggccagcaggagcagcccgaaggcactacccttgtgaaagaggagggggacaaggacgagagcaagcaggaacccgaagtaatttacgagactaattgtcactgggagggttgtgcccgagaatttgatacacaggaacaactggtgcaccacatcaataatgaccacattcacggggagaaaaaggagttcgtctgccggtggttggactgtagcagagagcaaaagcctttcaaggcacagtacatgctggttgtccacatgcgccgtcacacgggcgagaagccgcataagtgcaccttcgaagggtgtacgaaggcatactccagacttgaaaatctgaaaacccacctcagaagtcacaccggcgagaagccatacgtgtgcgagcatgagggatgcaacaaagcattctccaacgcctctgatcgcgctaaacatcagaaccggactcattccaacgagaaaccatacgtttgcaaaatcccaggatgcaccaagagatatactgatcccagtagcctcaggaagcacgttaaaaccgtccacggccctgaggcacacgtgacgaagaaacagcgcggagatattcatccacggccaccccctcctagagactctggatcacatagtcagagccgttcgcctggcagacctacccagggggctctaggcgaacagcaggatctgtcaaataccacctctaagcgagaggaatgcttgcaggtgaagaccgtaaaagctgagaagccaatgacttctcaaccgtcacctggaggccagtccagttgttcgagtcaacaatccccaattagcaactactcaaacagcggcctggaactcccgttgaccgatggcggatccattggcgacctctccgcaatcgatgaaacaccaattatggattctaccatctcaaccgctacgaccgcactggctctccaggcaaggcgaaatcccgctgggacaaagtggatggaacacgtgaaacttgaacgactgaaacaggttaacgggatgttcccaagattgaaccccatattgcccccaaaggcaccagcagtgtccccgctgattggcaacggcacgcagagtaacaatacatgctcactgggcggaccgatgaccctcctacctgggaggtctgacctgtccggcgtcgatgtgacaatgctgaacatgctgaatcggcgtgacagtagtgcgagcactatttcaagcgcctacctgtcatcacggagaagtagtggaatcagcccatgttttagtagtagaaggtccagcgaggcatctcaggctgaagggcgaccacagaacgttagcgtggctgattcatatgatcccatctccactgatgcctctagacgcagctcggaggcctctcagagtgacggactcccctccctactgagcttaactccagcccagcagtacagactgaaagctaaatacgccgcagccacagggggtccgccaccaacccctctgcctaacatggaacggatgtccctgaagactagattggctttgttgggggatgcgctggagccaggcgtggcgctcccaccagtccacgcccctcgcagatgctcagacggcggtgcccatggttatggcaggcgccatttgcaaccacatgatgcccctggccacggcgtccggagggcctccgatcccgtacgcacggggtctgaagggctagccttgccacgcgtgcctagattcagttcattatctagttgcaacccacctgcaatggccacctcggctgagaagcggagtctggtcttgcagaattatactaggccagagggtggacagtctagaaatttccattccagtccatgtccgccaagtatcacagagaacgtaacccttgaatctcttactatggatgccgacgcaaacctgaatgacgaagattttttgcccgatgacgtggtgcagtacctaaatagtcagaaccaagccggatacgagcagcactttccaagtgctctgcctgatgattcaaaagtgccccatgggccaggtgactttgacgctccagggctgcctgatagccacgctggccaacagttccacgcacttgaacagccttgtcctgaagggagtaaaacggacctaccgatccagtggaatgaggtgagctcaggatctgccgatttgtccagctccaagctgaagtgtggcccacgaccagccgtccctcagacacgcgcttttggcttctgtaatggcatggtggtgcacccgcagaacccgctccgcagtggccctgctggcggataccagactctgggggagaattctaatccctacgggggaccagagcatctcatgcttcataactcacctggaagcggcaccagtggaaacgcattccatgagcaaccctgcaaggctccgcagtatggcaactgtcttaaccggcagccggttgccccaggagcactggacggcgcttgcggcgcaggcattcaggcttccaagctgaagtccacccctatgcagggtagcggtggtcagctgaatttcgggctacctgtcgctcccaacgaatccgccggaagtatggtgaacgggatgcaaaaccaggaccccgtaggtcaggggtacctggcacatcagttgctgggagattccatgcagcatcccggagctgggagaccaggacagcaaatgctgggccagatcagtgccacctcacacatcaacatctaccaaggacctgaaagctgcctgccaggtgcacatggaatgggaagccagccttctagtctcgcggtggtgcgcggatatcagccgtgtgcctcattcggcggatccaggagacaggctatgccaagagactcattggccctgcagagcgggcagctgtccgatacctctcaaacgtgtagagtcaatggcatcaagatggagatgaagggacagccacatccgctgtgcagcaatctccagaactactcaggacagttctacgaccagaccgtcgggttttcgcagcaggacactaaagccggaagtttctcaattagcgatgcctcctgcctgcttcagggcaccagtgccaaaaatagtgagctgctttctccaggagccaatcaggtaactagcactgtggattctctcgattcacacgatttggaaggggtccagatcgatttcgatgccattatcgacgatggagatcattcctccctcatgagtggcgcactcagcccttccattattcagaatctctcacactcaagttcccgattaacaacgcccagggcctctctgcctttccccgcactgtcaatgtcaaccactaacatggcaattggagacatgagtagcctactcactagtctcgcagaagaatccaaatttctggcagtcatgcagta

SEQ ID NO: 224561 - DNA, 543 bp, synthetic construct
  misc_feature 1..543: note = Description of Artificial Sequence: Synthetic coding sequence
  source 1..543: mol_type = other DNA
atggaagctcaatctcactcatctaccacaacagagaaaaagaaggtggagaattccatcgtcaaatgcagtacaagaacagatgtaagtgagaaggccgtcgcatcttctaccacgtctaacgaggacgagtcccccggtcagacttaccacagggagagacgaaacgctattacgatgcaaccccaaaatgtccagggtctgtccaaggtgtcggaagagccatctacatcatcagacgaacgtgcgtctcttatcaagaaagagattcatggcagtttgcctcatgttgcggaaccttcggtcccatacaggggcacagtattcgcgatggacccaaggaacggctacatggagccccattatcatccacctcacctgttccctgctttccatccccctgtgcccatcgatgctagacatcatgagggtaggtaccattacgacccttcaccaattcctccactacacatgacgagtgcattaagctctagtccaacatatccagacctccccttcattcggattagtcctcataggtag

SEQ ID NO: 224562 - DNA, 1131 bp, synthetic construct
  misc_feature 1..1131: note = Description of Artificial Sequence: Synthetic coding sequence
  source 1..1131: mol_type = other DNA
atggcggctttgggtgacattcaggagtcaccaagcgtgccttcccctgtgtcactgtcaagcccgggtactccagggacccagcatcacgaacctcagctccacctccacggccaccagcacggctcccccggtagctcaccaaaggttctttctcagccaagtgacttagacctccaagatgttgaggaggtggagattggcagagatacgttctggccagactccgaacccaagccagaacaggcccctcgcagtcccggaagccaggctcctgatgaaggtgcaggaggggctctgagaagtctcctaagaagccttccgcgaagagctagatgttcagcaggctttggacccgagtcttctgccgaaagaccggctggacagccacctggagccgttccttgtgctcaaccgaggggcgcttggcgggtcactcttgtacagcaggctgccgctggtccggaaggagctccagagagggccgctgaacttggggtcaatttcgggaggtcaagacagggatcggccagaggagcaaagccccaccgctgcgaggcctgcgggaagtcgtttaagtacaacagtttactgctcaaacaccagcgaatccacactggcgagaagccgtacgcttgtcacgaatgcggcaagagatttcgcggttggtctggtttcatccagcaccataggatccacactggcgaaaagccctatgagtgcggccagtgtggccgtgcattctcgcatagctcccatttcacccagcacctgcgcatccacaatggggagaaaccttataagtgtggggagtgtgggcaagccttctctcagtcttccaacctcgttaggcaccagagactgcataccggcgaaaagccctacgcgtgctcacagtgcggcaaggcctttatttggtctagtgtcctaattgagcatcagaggattcataccggcgagaagccctacgagtgctccgattgcggaaaggccttccggggtagaagccacttctttcgacacttacggacccacaccggtgaaaaaccttttgcatgcggagcttgtggcaaggcattcggccagtcgagccagctgatacagcaccagcgggtgcactatagggagtag

SEQ ID NO: 224563 - DNA, 1131 bp, synthetic construct
  misc_feature 1..1131: note = Description of Artificial Sequence: Synthetic coding sequence
  source 1..1131: mol_type = other DNA
atggccgcacttggggatatccaagagtcaccaagcgtaccttcacccgtttccctgagttccccaggcacacctggaacacagcaccatgagccacaacttcatctgcacggccatcaacatgggtctcctgggagttcaccaaaggtcctgagccagcctagcgacttggacctgcaggatgttgaagaggtggagatcggcagggatacattctggcctgactccgagcctaagcctgagcaggccccacggagtccgggaagccaggctcctgacgaaggagctggcggtgcactgagatcgttgctcagatctctgcctcgcagggcccgatgtagcgctggcttcggcccagaatctagtgcagaacgacctgctgggcagcctcccggtgctgtgccctgcgcccagcctaggggtgcatggcgggtcaccttggttcagcaggccgcagctgggccagaaggggcacctgaacgggcagctgaactgggcgttaatttcgggaggtctcggcagggctcggctagaggcgctaagccacacaggtgcgaagcttgcggtaagtctttcaagtataacagtctgctcctcaagcaccaaagaattcacactggagagaagccttatgcttgtcatgagtgtggaaaaaggtttagaggatggagtggattcatacaacaccaccgaatccacacaggagagaaaccatacgagtgcggccagtgcggacgcgctttttctcatagttctcactttacccaacacctgaggatccacaatggggagaaaccctataaatgcggcgagtgcgggcaagcgttcagtcagagtagtaatttggtgcgccaccagcgactgcatacgggtgaaaagccttacgcatgctcacaatgcggcaaggccttcatttggtcctccgtgcttatcgagcatcagcggattcatacaggggaaaagccctatgagtgctccgattgcggaaaagctttccggggaagaagccacttcttccgacacttgcggacacatacgggagagaaaccatttgcatgcggcgcttgcggcaaggcatttggtcagtcctcacaactcatacagcatcagcgggtccattaccgcgagtag

SEQ ID NO: 224564 - DNA, 801 bp, synthetic construct
  misc_feature 1..801: note = Description of Artificial Sequence: Synthetic coding sequence
  source 1..801: mol_type = other DNA
atgcgagtgactttagctactatcgcctggatggtgtccttcgtgtcaaattattcccacactgccaatattttaccagacatcgaaaatgaggactttatcaaagactgcgtccgaatccacaataaattcagatctgaggtcaagcccacagcctcagacatgctgtatatgacatgggatcccgcactagctcagatcgctaaggcctgggctagcaactgtcaattctcacataacacccgcttaaaacctccccacaaactgcaccctaacttcacaagtttgggagaaaacatctggacgggctccgtgcctatcttcagcgtgtcttctgccattacaaattggtacgacgaaatccaggactacgattttaagacccgaatttgcaaaaaggtgtgtgggcactatacacaggtggtatgggctgactcttacaaagtcggttgtgccgtccagttctgccccaaggtttctgggttcgacgcattgagcaatggtgcccatttcatatgcaactacggaccaggcggtaactacccaacgtggccctacaaacgaggagctacctgttccgcctgccccaacaatgataaatgcctagacaatctgtgtgtgaataggcagagggaccaagttaaaaggtactactcagtggtgtatccgggttggcctatttatccaaggaatagatacacctcactctttttgatcgttaactcggttattctgatactgtccgtcatcatcacaattctcgtgcaacacaaataccccaacttggtattgctggactag

SEQ ID NO: 224565 - DNA, 429 bp, synthetic construct
  misc_feature 1..429: note = Description of Artificial Sequence: Synthetic coding sequence
  source 1..429: mol_type = other DNA
atgtcagacagcctcgtggtgtgcgaagtcgaccccgagctcacagagaaactaaggaagttccgtttccggaaagagaccgataatgccgcaattatcatgaaagtggacaaagaccgtcagatggtggtgttagaagaagagttccagaacatttctccggaagagcttaagatggagttgcccgaaagacagcccagattcgtggtttactcttacaaatacgtccatgacgacggaagagtgtcatatcctctctgttttatcttcagctcacctgttgggtgcaaaccagaacagcagatgatgtacgcaggatcaaagaaccgcttggtgcagaccgctgaacttacaaaggttttcgagattagaaccacggatgacctgaccgaggcttggctgcaggaaaagctgtcgtttttcagatag

SEQ ID NO: 224566 - DNA, 429 bp, synthetic construct
  misc_feature 1..429: note = Description of Artificial Sequence: Synthetic coding sequence
  source 1..429: mol_type = other DNA
atgtcagacagcctggtcgtgtgtgaggtggaccccgagttgaccgagaaactgcggaaatttcggtttcgaaaagagaccgataatgctgccatcattatgaaggtcgacaaagaccggcaaatggtagtccttgaagaagagtttcagaatatttccccagaggagctaaagatggaactgcctgagcgccagccgagattcgtggtctatagttacaagtatgtgcatgatgacgggagggtatcatatcctctgtgtttcattttctcatctcccgtgggatgcaagcccgagcagcagatgatgtatgctggctccaaaaatcgcctggtgcaaacggcagaactgactaaggtgtttgaaatcaggacaactgatgatctgacagaggcttggctgcaggagaagctgtccttctttcgttag

SEQ ID NO: 224567 - DNA, 1299 bp, synthetic construct
  misc_feature 1..1299: note = Description of Artificial Sequence: Synthetic coding sequence
  source 1..1299: mol_type = other DNA
atggaacggaggcggatcacatccgcagcgagaaggtcttacgtgtcctcgggggaaatgatggtaggaggattggctcctggaagacgcttgggccctggaaccaggctgagcctggcacggatgcctccgccattaccgactcgggttgatttttcactggcgggagctttgaacgccggtttcaaagaaaccagggctagtgagcgggcagaaatgatggaacttaacgacagatttgcgagttatatcgaaaaagtccgcttcctggagcagcagaataaggccctggctgctgagctgaaccagcttagggccaaggagccaacgaaactcgccgatgtgtatcaggcagagttacgcgaactgcgactccggttggatcaactgacggcgaatagcgcaaggctcgaggttgagagggacaatctcgctcaggacctcgcaaccgtgagacagaaactccaggacgagacaaacctgcgtctggaagctgaaaacaatctggccgcttacagacaggaagctgacgaagccacactggctcgcctggaccttgagaggaaaatagaatctctggaggaagagattcggttcctgagaaagatacacgaggaggaagtccgggaactccaggaacagcttgcacgccagcaggtccacgtcgagttggatgtggccaagcctgacctgacggccgctctgaaggaaatcagaactcagtacgaagccatggcttctagcaatatgcatgaggccgaggaatggtacagaagtaagtttgccgatctgacagacgccgcagccaggaatgccgaattgctgaggcaggccaagcatgaggccaatgattataggcgacagctccagtcactgacgtgcgatctggagagcctgcgcggaaccaatgagtctctcgagcgccaaatgcgcgaacaggaagagcgccacgtccgtgaagctgccagctatcaagaggccttggcacgtctggaagaggaaggacaatcactcaaagatgaaatggctcgccacctgcaggagtatcaggatttacttaatgttaaattggccttggatatcgaaatagccacgtatcggaagttgctcgaaggcgaggagaacaggatcactatacccgtgcaaacttttagcaatctacagattcgcgagacttctcttgacaccaagtccgtgtctgagggacaccttaaacggaacatcgtcgtgaagactgtcgagatgagagacggcgaagtcataaaggagtccaagcaggagcacaaagacgtgatgtag

SEQ ID NO: 224568 - DNA, 540 bp, synthetic construct
  misc_feature 1..540: note = Description of Artificial Sequence: Synthetic coding sequence
  source 1..540: mol_type = other DNA
atggaacgcagaagaattactagcgccgctagaaggtcttacgtgtccagtggcgagatgatggtggggggtctcgcccctggtagacgattgggccctggtactagactgtcacttgccagaatgccaccccctctgcccacgcgcgtcgacttctccttggccggagcgctgaatgccggattcaaagaaacgagagcatctgagcgggctgaaatgatggaactgaatgataggtttgccagttacattgaaaaggtgcggttcttggagcagcaaaataaagccctcgctgctgagctcaaccagttgcgggcaaaagagcccactaaactggctgacgtgtatcaggcagaactgagagaactgcggttaagactcgatcagctgactgccaactccgctcggcttgaggtggagcgcgacaacctggcgcaggacctcgccacggtcaggcaaaaaaagcagatgaagcctccatggcctgtgtggatatggagaggtagactgagcaggtggcgtcggagaagtggcagctag

SEQ ID NO: 224569 - DNA, 1224 bp, synthetic construct
  misc_feature 1..1224: note = Description of Artificial Sequence: Synthetic coding sequence
  source 1..1224: mol_type = other DNA
atggaacgccgtagaataacctccgcgacccgcctgtcactggctcggatgccacctcctttgcctacaagggtggacttttctttggcgggtgctctaaacgccggattcaaagagaccagggcgagcgagcgtgctgaaatgatggaattgaacgaccgtttcgcttcctacatcgagaaagtgcgattcctggaacaacagaacaaagcgctggccgctgagcttaaccagttgcgggctaaggagcccacaaaactcgccgatgtgtatcaggctgagctgagagagttgaggttaaggttggaccagctgacagccaattccgctaggcttgaagtggagagggataacttggcccaagatttagccaccgtccggcagaaattacaagacgaaaccaaccttcgtctggaggctgagaataacttagcagcctatcgtcaggaggctgacgaggcaacgctggctaggctggacttggaaaggaaaatcgagagtctcgaggaggaaatcagatttctgagaaagatccatgaggaggaggtgagagaactccaggaacagcttgccagacagcaggtacacgtcgaactggatgtggcaaagcccgatttgaccgcagcactgaaggagatcagaacgcagtacgaagcaatggcctcaagtaatatgcacgaggccgaggagtggtaccgcagcaagtttgccgatcttaccgacgccgctgctcggaacgccgagctcctgcgccaggcaaagcacgaggcgaacgactataggagacagctgcagtctctgacatgcgatcttgaatcccttagggggacgaacgagtccctggagaggcaaatgcgcgagcaggaggagaggcatgtgcgggaggcagccagttaccaagaggctttggccagactcgaggaggaaggacagtccctgaaggatgagatggcacgacaccttcaggaatatcaagatcttttgaacgttaagctggccctggacatagaaatcgcaacgtataggaagcttctggaaggtgaggagaaccgcatcactatcccagttcagaccttctcaaatctgcagatccgggagacttcactggacaccaaatcagtgagtgagggtcatttgaaaaggaacattgtggtaaagacggtggagatgcgggacggagaggttatcaaagagtcaaaacaggagcataaagacgttatgtag

SEQ ID NO: 224570 - DNA, 1296 bp, synthetic construct
  misc_feature 1..1296: note = Description of Artificial Sequence: Synthetic coding sequence
  source 1..1296: mol_type = other DNA
atggaacggagacgcatcaccagtgccgctagacggtcttatgtgtcctctggggagatgatggtcggaggcctcgcaccaggccgtagactgggcccaggcacaagattgtccctcgcacgcatgccccctcctctccccactcgggtggatttttccctagccggagcactaaacgcagggtttaaggagaccagagcctcagaacgcgcagaaatgatggagctgaatgacagattcgcaagctatattgagaaggtgcgtttcttggagcaacagaataaggctttagctgctgagttgaaccaactgcgcgctaaggaaccgacaaagctcgccgatgtttatcaagccgagctcagagaattgcggctccgacttgatcaactgaccgcaaattctgccaggttggaggtagagcgggataaccttgctcaggatctggcaactgtgcgtcaaaaactccaggacgagaccaacctgaggttggaggccgagaacaatctggctgcctatagacaggaagccgacgaagccactctagcccgacttgacttagagaggaagatcgaatccctggaggaggaaatacgattcctacgcaaaattcacgaggaggaggtgcgggaactccaggaacagcttgccagacagcaggtgcatgttgagctcgacgtggctaagcccgatctgaccgccgcactaaaagaaatccgcactcagtatgaagctatggctagcagcaatatgcacgaggccgaagagtggtaccgctccaagttcgccgatctgactgatgccgcagcgaggaacgctgaactgctgagacaggcgaagcacgaagcaaacgattatagaaggcagctgcagtcgctaacatgtgacttggagagcctccgaggcaccaatgaatcgctggaaaggcaaatgcgggaacaggaggaacggcatgttcgagaggccgcttcctaccaggaggcgctggccagactggaggaagagggtcagtccctaaaggacgagatggcccgacatctgcaggagtaccaggatctgctgaacgtcaaattagccttggacatagaaattgccacttatcgcaagttactggaaggggaggagaatcggatcactatcccggtacagactttctcaaacctgcagatccgagggggtaagtctaccaaagatggagaaaaccacaaagtgacgcggtacctcaagtcactgaccatcagagtcattccaattcaagcacaccaaattgtgaatggaacacctcccgcacgcggatag

SEQ ID NO: 224571 - DNA, 1317 bp, synthetic construct
  misc_feature 1..1317: note = Description of Artificial Sequence: Synthetic coding sequence
  source 1..1317: mol_type = other DNA
atggagcgcagacgcataacaagtgcggctaggagatcttacgtgtcatctggagaaatgatggttggtggcctggctccaggaaggagactagggcctggaactaggttatcactcgcaaggatgccgcctcccctccctactcgagtggacttttccctggcaggagcattgaatgccggattcaaggaaaccagagcatcagaacgggcagagatgatggaattgaacgataggtttgccagctacatcgaaaaagttagatttcttgagcagcagaataaggccctcgctgctgagctgaaccaactgagagcaaaggagcctactaaactggcggacgtgtatcaggcggagctgagagaactgcgcctacggttggaccagttaacagctaattctgcgcgtctcgaggtcgagagggataatctcgcacaggatttagctacagtgcgacagaagctccaggacgagactaatctccgcctggaggccgaaaacaatttagctgcatacagacaggaagctgacgaagccacattagcccgtcttgaccttgagcggaagatagagtctctcgaagaagagattaggtttctgaggaaaattcacgaagaagaggttcgggagcttcaggagcagctggccaggcagcaggtccacgttgaactggacgtggccaagccagatctcacagccgcactaaaggaaatccgcacacagtatgaggctatggcctcctccaacatgcacgaagcagaagaatggtacagatctaagtttgccgacctgactgatgctgccgctcgcaacgctgagctactgagacaggcaaagcatgaggccaatgattaccggcgacagctccaatcgttaacctgtgatctggaatcccttagaggcacaaatgaatccttggagcgccagatgcgcgaacaggaggagcgtcacgtaagagaggctgccagctaccaggaagcgttggcccgtctggaagaagaagggcaatccctgaaagacgagatggccagacacctgcaagaatatcaggacctgctgaacgttaaactggcactggatatcgagatcgctacttataggaagttactggagggcgaagaaaatagaattacaattcctgtgcagactttctcaaatcttcagatcagggggcaatactcaagagcatcctgggaaggccattggagtccagccccatccagccgagcttgcaggttgctccaaaccggtactgaagaccagggcaagggaattcagctcagcctaggtgcgtttgtgaccctgcagcggagctag

SEQ ID NO: 224572 - DNA, 861 bp, synthetic construct
  misc_feature 1..861: note = Description of Artificial Sequence: Synthetic coding sequence
  source 1..861: mol_type = other DNA
atggctgctagggtgctgagggcgcgtggcgctgcgtgggctgggggactcctgcagagggcagcaccttgctcgctgctccccagattgaggacatggacaagcagtagcaacagatcaagggaagacagctggcttaaatctttgtttgttcgcaaagtcgaccccagaaaagacgctcattcaaatcttctggctaaaaaggaaacctctaacctttacaagttgcaattccataacgtgaagcccgaatgtttagaagcatacaataagatctgccaggaggtcctgcccaagatccacgaggataaacactatccctgtacactcgttgggacttggaatacctggtatggtgagcaggaccaagccgtgcacctgtggcgatacgaagggggttaccctgcgctcactgaggtgatgaacaagctgagagagaacaaggaattcctcgaattcaggaaggcccgttccgacatgctgctctcccgcaagaaccagctccttctagagttcagcttttggaacgagcctgtgcctcgttctggccctaatatctacgagctgagaagttatcagcttagaccagggaccatgattgagtggggcaattattgggcgagggcaataaggttccggcaggacggaaacgaggccgtcggagggttcttctcacagataggccaactatatatggtccaccacttatgggcctatagagacttacaaacaagagaagacatccgaaatgctgcatggcataaacacggatgggaggaattagtgtactacacggtcccattgatccaagagatggaaagtagaataatgattcccctgaagacctccccactccagtag

SEQ ID NO: 224573 - DNA, 744 bp, synthetic construct
  misc_feature 1..744: note = Description of Artificial Sequence: Synthetic coding sequence
  source 1..744: mol_type = other DNA
atggccgctagggtcttgagagctagaggagcagcatgggctggcggtttgctgcaaagagcagccccttgtagccttctccccagactccgaacctggacctcaagctctaatcgcagcagagaggacagctggttgaagtctctgttcgtgcgcaaagtggaccctcgaaaggatgcccacagcaacttactcgcaaagaaggagacttcaaacttgtacaagctccagttcaagcgttgttgtcagcgatttaccaagataaacaccactctcgtgctatggtggggtctgggcacccgcggaatggcaagcaggacaaaactggaattccttgagttccgaaaggcacggagcgatatgctgctctcccggaagaaccagcttctcctggaattctccttttggaacgagcccgtcccaagatcaggaccaaatatatatgaactgagaagctatcagttgagacccggtactatgatcgagtggggcaactactgggctagggccatcaggttccgtcaggatgggaatgaggccgttggcggatttttctcacagatcgggcaactttatatggtccatcatttatgggcctatcgagacttgcaaaccagggaggatattcggaatgcggcttggcataaacacggttgggaagagttggtatactacacagtgcccctcattcaagagatggagtccagaataatgatacctctcaagacttccccactgcagtag

SEQ ID NO: 224574 - DNA, 4683 bp, synthetic construct
  misc_feature 1..4683: note = Description of Artificial Sequence: Synthetic coding sequence
  source 1..4683: mol_type = other DNA
atggatgatgaggatggcagatgtttgctcgacgtgatctgcgatccacaggcgctgaacgactttcttcacggttccgagaagctggattctgatgatctactcgacaacccaggggaggcacagtctgctttttacgagggacctggcttgcacgtccaagaggcatccgggaatcacctcaatcccgagcccaaccagcctgccccttcagtggatcttgatttcctggaggacgacattcttggttctcccgctaccggcggaggcggagggggttcaggtggagccgaccagccctgcgatatcctgcagcaaagtcttcaagaggccaatataactgagcagactttggaagctgaggcagagctggacctgggacctttccagcttcccacactccagcccgctgacggcggagcaggtccaactggggctggcggagctgctgcggtggcagctgggcctcaggccctgtttcctgggtcaacggatctcctgggtctccaagggccaccaaccgtactcactcaccaggccctcgttccaccccaggacgtagtcaataaggccttgtcagtccagccctttcttcagccagttgggctggggaacgtaaccctgcaaccaatcccaggactacaagggctaccaaatggatcgccagggggagcaacagctgccacattagggctcgcacctattcaagtggtgggtcaacccgttatggctttaaacacccccacatctcaactactcgcaaagcaagtgcctgtgagtgggtatctggcctccgctgccggacccagcgagcctgtgactcttgcatcggccggagtgtcccctcagggggctgggctggttatccagaagaatctctccgctgccgtggccacgaccctcaatggtaactcagtgttcggaggagctggggctgccagcgcacccacaggaactccctccggacagcctctcgccgtagctcctggattagggagctcccctctcgtaccggcacccaatgttattcttcaccggacccctacccctatccagcctaagcccgctggcgttctacctcctaagctgtaccagttgaccccaaaaccattcgcgccagctggcgctactctgaccatacagggcgaaccgggtgcgttaccccagcaacctaaggcaccacagaatcttacatttatggccgctgggaaggcgggacagaatgtagtgctgagcggcttccctgcaccggcactgcaagccaacgtcttcaaacagccccctgctacaaccacgggcgctgccccacctcaaccaccaggagccctgtccaagcctatgagtgtgcatcttctaaatcagggtagcagtattgtgattcctgcacagcatatgttacccggacagaaccagtttctgttgcctggtgcccctgcggtgcaacttccgcagcagctaagcgctcttcctgcgaacgtaggcggacaaattctggccgctgccgctccccacacggggggtcagctgattgcaaatcctatcttgaccaatcagaacctcgccggaccgctctctctgggtcccgtgttggctccacactccggtgcacatagcgcccacatcctgtcggccgctcccattcaagtaggacagccagcactgttccagatgccggtaagccttgccgctggaagcctgcccacacagtctcaacccgcacccgctggccctgccgctactaccgtactgcagggcgtgaccctcccaccatctgcggtagccatgctcaataccccagacggcctggtgcagcccgctacccccgctgctgccaccggagaagccgcaccagtactcaccgttcagcccgctccacaggccccaccagcagtgagcacaccattaccactagggctccagcagccccaggcccaacagccccctcaggctcccacccctcaggctgccgctcctccccaggcaaccacaccccagcctagtcccggtctggcgtcttcgcccgagaaaatcgtgctggggcagcctccttctgcaactcccacagcaatcctgacacaggactctttacaaatgttcctgccacaggaacgctctcagcagccactatctgcggagggaccacatcttagcgtcccagccagcgtcatcgtatccgccccacccccagctcaggaccccgctccagcaaccccagtggctaaaggggctgggctgggtccccaggctccagacagccaagcttctccagcccctgcgcctcagattccagccgctgccccactgaagggccctggtccctcaagcagcccaagtctcccccatcaggcacccctaggggactcccctcacctgccttctccacaccccacacgcccaccaagtaggcctccctcgaggccacagagcgttagccggcctccaagcgaacctcccttgcatccatgcccgccaccacaggctccccctacactgcccggaatcttcgtgatccagaatcagctcggggtgcctcctccagcgagtaatcccgcacccacagctccagggcctccccagccgccattgcgcccacagagccaaccccctgaaggacccttaccccctgcaccccacctacccccatccagcacaagctcagcagtagctagctcttcggaaacgtcaagccgcctgcctgccccaacacctagcgatttccagctgcagttcccgccatcccaaggccctcacaaatctcccactccaccacccacattacacctggtccccgagccagctgcccctccccctcccccacctcggacctttcagatggttacaacaccgttcccagccctgccacagcctaaggcactgctcgaacgattccaccaggtaccttccggcattatacttcagaataaagccggtggcgctcccgctgctcctcagaccagcacttccttaggaccccttaccagccccgctgcatctgttctcgtttcaggacaggccccatcagggacacccactgcgccaagtcatgcgccagcacctgcaccaatggcggctaccggtctgcctcctctgctgccagccgagaataaggcttttgctagcaatctgcccactctcaatgtggccaaggcagctagcagtggaccaggcaagcctagtggcctgcaatacgaaagcaagttgagcggcctcaaaaagcctcccactctgcagccatctaaggaggcgtgctttttggaacatttacataaacatcaaggcagtgtgcttcatcccgactacaaaacagccttcccatcattcgaagatgccctacaccgactgctgccctaccatgtctatcaaggcgctttgccctcccctagcgattatcataaagtggacgaggaatttgagactgtgagtacccagttgctcaaacggactcaggctatgttaaacaaatataggctcctgctcctcgaggaaagccgaagagtgagcccttccgcagaaatggttatgattgatcgcatgttcattcaggaggaaaagaccacactcgccctggataaacagctcgccaaggagaaaccagatgagtatgtgagttcatctcgtagtctgggtttacccatcgcggcttcatccgagggccataggctgcctgggcacggccctctctcctcatccgcacctggcgcttcaacccagcctccgcctcacttaccgacgaagctggtaatcagacatggtggagcaggaggcagcccttctgtgacgtgggcacgcgctagcagttcgctctcgtcgagtagcagctcatcctcagctgcctccagccttgatgctgatgaggacgggccaatgccgagccggaaccggcctcctatcaaaacatatgaagctcgatctcgaattgggctaaagctcaaaatcaagcaagaagccggactttctaaagtggtacataacacggcattagacccggtgcatcaaccccctccccctccggctaccctcaaggtggcagagccccctcccaggccccctccccctccaccccctacggggcagatgaacggaacggttgaccacccacccccagccgcaccagagaggaaacccctgggtaccgcaccccattgccccaggcttcctcttagaaagacttaccgggagaatgtgggaggtcctggtgcacccgaaggcacaccagccggaagggcaagggggggttcccccgctcccttgccagcaaaggtggatgaagctacttccggtcttattagggaactggccgcagtggaggacgagctgtaccagaggatgttaaagggccctcctcctgaacccgcagctagcgccgctcagggtacaggagatcccgattgggaggcccctggcctgccgcctgcgaagcggaggaaatcagagagtccagatgtggaccaggcgtctttctccagcgatagcccgcaggacgacacactgacagaacacctccaaagtgcaatcgactctatattgaacctccagcaagcgccagggaggacaccagccccttcttaccctcatgctgcatcagccggtacccccgcttctccaccccctctgcacagaccagaggcttatcccccatcctctcacaacggcggactgggtgccagaacactcacaaggtag

SEQ ID NO: 224575 - DNA, 1437 bp, synthetic construct
  misc_feature 1..1437: note = Description of Artificial Sequence: Synthetic coding sequence
  source 1..1437: mol_type = other DNA
atggccgctggcggtagcggtgtcggtggaaagagatcttcaaagtctgacgcagatagtggatttttaggccttagaccgacctcagtggaccctgccctgaggcggaggcgcagaggacccaggaataagaaacggggatggagacggctagcccaggagcctcttgggttagaggtggatcaattcctggaagacgtgagactgcaagagcgcaccagcggaggcctgctgagcgaggccccaaatgagaaactgtttttcgtggatacaggtagcaaggagaaaggactgacaaagaagcggaccaaagttcagaaaaaaagcttgctcctgaaaaagccactgagagtggacttgattctcgagaacacaagcaaagtgccagctccgaaagatgtccttgcccatcaggtcccaaacgcaaaaaagctgaggaggaaggagcagttgtgggagaaactggcaaaacagggggagctccccagggaagtacgcagggcacaggccagactactgaacccatccgccacccgcgctaaaccaggccctcaagataccgtagaaagacctttttacgatctgtgggcaagcgacaaccctctggaccggccactggttggtcaggacgaatttttcctggagcaaaccaagaaaaaaggggtgaaaagacctgcacggctacatacaaagccaagccaggcaccggcagtcgaggtcgctcctgctggtgcgtcttataatcctagcttcgaggatcatcagactctgctgtccgcagctcacgaagtggagttgcagcgccagaaggaagcagaaaaactcgagcggcaactggcattgccagctaccgaacaagctgcaacccaggaaagcacctttcaggaactatgtgaggggctccttgaggagtctgatggcgaaggcgagccgggacagggtgaaggcccagaggctggggacgctgaggtctgtcccacccccgctcgattagccacaaccgaaaagaaaactgaacaacaacgccgtagagagaaggcagtccataggctccgcgtgcagcaggcggcattgcgcgctgcgagactgcgccatcaggagctttttcgactcaggggcatcaaagctcaagtagccctgcgcctcgctgaactggctagacgccagagacgacgccaggcacgtagggaggcggaagccgataaacctcgcaggcttggacggctcaaataccaggctccagacattgatgttcagctgagctctgagcttaccgactctttgcgaaccctgaagccagagggtaacatcctgagggatcgcttcaaatcatttcagcgccgtaatatgattgagcctcgagaacgggctaaattcaaacgtaaatacaaggtcaaactggtggagaagagggccttccgggaaattcagctctag

SEQ ID NO: 224576 - DNA, 1419 bp, synthetic construct
  misc_feature 1..1419: note = Description of Artificial Sequence: Synthetic coding sequence
  source 1..1419: mol_type = other DNA
atggcggctggaggcagtggggttggaggtaagaggtcgagcaaatctgacgccgattcgggcttcctcggcctccgcccaacctcggtagaccccgctcttcgcagacgcaggcggggtcctcgtaacaaaaagcggggatggcgcaggctggcacaggagccactggggctggaagttgatcaatttctggaagatgttcggctgcaggagagaaccagcggcggactcctcagcgaagccccaaatgagaagctgttcttcgtggacactgggtccaaagagaagggactgacaaaaaagcggaccaaagtgcagaaaaagtcccttctcttgaagaaaccattgagagtggacttgatcctcgagaacaccagtaaagtgcccgctccaaaggacgtgctggcccatcaagttccaaacgctaaaaagttgaggaggaaggaacagctgtgggagaagcttgccaaacagggcgaactacctcgtgaggtgcgtagggctcaagccaggctcctcaacccctccgctacgagggcgaaacctggaccacaagacactgtggaaaggcccttttatgacctgtgggcgagtgataaccccctggaccgtcctctcgtggggcaggacgagttctttctggagcaaaccaagaagaaaggagtcaaaaggcccgcaagactgcacaccaagccctctcaggcacctgccgttgaggttgccccagcaggtgcgagctacaatccctcatttgaggatcatcagaccttgttaagcgccgctcatgaagtggaactccagcgccagaaagaagccgaaaagcttgagcgacaactggcattgccagcaactgaacaggctgccacacaggagagtacatttcaggagctgtgtgaggggttgcttgaggagagtgacggagaaggggagccgggacagggagaagggccagaagcaggtgatgccgaagtgtgtccaacacccgctcggcaccacagggaagaggatggcgcagcagcagccaggcgtctgtgtaccggatgtggctatagccgacctaggtgtggaccaccgggaagcggtactagatcttgtagtggatgcgccggatcgcctggcggacccgaggcaggaggagcccgtagacagcggagacgccaggctcgtcgcgaggccgaggccgataagcccaggaggttgggaagactcaaatatcaggcccctgacatcgacgtacagctgagtagcgagctgaccgattcgctgcgcacattaaagcctgaaggcaatattctaagggatcggtttaagtcatttcaaaggagaaacatgatcgaaccacgggaacgagcaaaattcaaaagaaagtacaaggtcaagcttgttgagaaacgagccttcagagagattcaactgtag

SEQ ID NO: 224577 - DNA, 792 bp, synthetic construct
  misc_feature 1..792: note = Description of Artificial Sequence: Synthetic coding sequence
  source 1..792: mol_type = other DNA
atggctgctgggggatccggagtagggggaaagcgtagcagtaagtcggatgccgactccgggtttctgggcctccggccaacaagcgttgatcctgccctaagacgcagaagaaggggtccacgtaataagaaacggggatggcggaggctcgcacaggagcccctgggtctggaagtggaccagttcctagaggatgtgaggctgcaggagcgcacatcgggaggtctccttagcgaagcacctaatgaaaaactgttttttgtcgatactggctccaaggagaagggcctcaccaaaaagcgcacgaaggtgcagaagaagtcactactgctaaagaagccccttagggtcgatttaattctcgaaaacacctcgaaagtgcctgcaccaaaagatgtgttggcccaccaggtgcccaatgcaaagaaactgcgacgcaaggaacaactatgggcaagcgacaatccccttgatcgtcccttagtgggacaggatgagttctttttggaacagaccaaaaaaaaaggcgtgaaaagaagggaagccgaggcagataagccaaggcgcctgggccgattgaagtatcaagctccagatattgacgtgcaactatcttctgagctgacggacagtttacgcacactgaagccggaggggaacatcctgcgcgacagatttaaaagttttcagagacgcaacatgatcgagcctcgggaaagagccaagttcaaacggaagtacaaagtcaagctcgtggagaagcgcgcatttagagagatccagctgtag

SEQ ID NO: 224578 - DNA, 1656 bp, synthetic construct
  misc_feature 1..1656: note = Description of Artificial Sequence: Synthetic coding sequence
  source 1..1656: mol_type = other DNA
atggcacgcggtgcggagggcggtaggggtgatgccggatggggactgcgcggagcactggctgccgttgctttgctcagcgccttaaatgcagctggcaccgtattcgccctgtgccaatggcgtgggttatcatcagctttgagagccctagaagctcaaaggggtagggagcaacgggaggattcggcgctgaggagtttcctcgccgaactgtctcgggctcctcgcggagcctccgcccctccccaggaccctgcgtcctcggcaagaaacaaaagatcgcattctggagagccagcgccacacataagagcggaatcccatgacatgttgatgatgatgacttattccatggtcccaataagagtcatggtggacctctgcaactcaaccaaagggatctgcctaactggtccctcgggaccaccgggtcctcccggtgccggaggtctgcctggccacaacggcctggacgggcagccgggtccacagggtcctaaaggggagaaaggagctaacggtaaacgtgggaagatgggtattccaggcgcagcgggtaatccaggtgagagaggagaaaagggagaccatggggagctggggctgcagggcaacgagggcccacctggacaaaaaggcgagaagggtgacaaaggtgatgtctccaacgacgttctcctggctggagccaagggtgaccagggaccccctggccctccagggcctccgggaccccctggtcccccaggacccccaggttcaagacgggcaaaaggaccaagacagccatctatgtttaatggacagtgtccgggagagacatgcgcaatacccaacgatgacaccttagtcggaaaagccgacgagaaggctagtgaacaccactcccctcaggctgagagcatgatcaccagcatcggtaatcctgtgcaggtgctgaaggttactgaaacattcggcacttggattcgggaaagcgctaacaaatctgatgacaggatctgggtcactgaacatttttcaggcattatggtgaaggaattcaaggaccagccatctctgcttaacggcagttacacgtttatccaccttccttattactttcatggctgcggtcatgtggtttacaacaactcactatattaccacaaggggggatctaacacgctggttcgatttgagtttggccaggaaacatctcagaccctgaaactcgaaaatgccctctatttcgatcggaagtatctgttcgcaaactctaaaacttacttcaacctggctgtggacgaaaaggggctatggataatctatgcctcgtctgtggacggcagctccattcttgttgctcaattggatgagcgtaccttcagtgtggtgcagcacgttaacacgacatatcctaaaagcaaggccggtaacgccttcattgcacgtgggattctgtatgtgaccgatacgaaggatatgcgcgtgactttcgccttcgacctgctcggaggcaagcagattaacgctaacttcgacctacggacttcccaaagcgtccttgcgatgctcgcctacaatatgagagatcagcatctatattcgtgggaagatggccatctgatgttgtaccccgtccagtttctcagtacaaccctgaatcaatag

SEQ ID NO: 224579 - DNA, 1284 bp, synthetic construct
  misc_feature 1..1284: note = Description of Artificial Sequence: Synthetic coding sequence
  source 1..1284: mol_type = other DNA
atggtcgacctgtgtaactccacaaaggggatttgtctcactggacccagtggtccaccaggccctccgggagcgggtgggttgccaggccacaacgggttggacggtcagcctgggccacaaggacctaaaggagagaaaggcgcaaatggcaagagagggaagatgggcattcccggagcagctgggaaccccggtgaacgcggagagaagggagaccatggagagctgggcctgcagggtaacgaaggccctcctggacaaaaaggggagaagggtgataagggggacgtgtctaacgacgtgttactagcaggggcaaagggcgaccaggggcctcccggaccgccaggcccaccaggtccgccaggaccgcctggccctcccggatctaggcgagctaagggccctagacagccatccatgttcaacggtcagtgccccggagaaacatgtgcaatccccaacgacgataccctggtggggaaagcagatgagaaagccagcgagcaccactctcctcaggcagagtcaatgattactagtatagggaatcctgtgcaggtcttgaaagttacagagacatttgggacttggattagggagtctgctaataaatccgacgaccgcatctgggtcacggaacatttttcagggataatggtgaaagagtttaaagatcagccgtcgctacttaacggtagctatacgtttatccacctgccttactactttcacggatgtgggcacgtggtgtacaataactctctgtattaccataagggtggctcgaacactctggtgagatttgagttcggccaggaaactagccagacactgaagctggaaaacgcactttacttcgataggaaatatttattcgccaactctaagacttacttcaatctggccgtcgacgagaaaggactgtggatcatctatgccagcagcgtcgacggatcatctatactggtggcccagctcgacgaaaggaccttctctgtggtccagcatgttaacacaacctacccaaagtccaaagccggtaacgcctttatcgccaggggtatcctgtacgttaccgatacgaaagacatgagggtgactttcgcatttgacctgcttggtgggaagcaaattaacgctaactttgacttgcgcacatcccagtcagtgctcgctatgttggcatataacatgagagaccagcacttatacagttgggaagatggtcaccttatgttatatcccgtccagtttctgagcaccaccctgaatcaatag

SEQ ID NO: 224580 - DNA, 1284 bp, synthetic construct
  misc_feature 1..1284: note = Description of Artificial Sequence: Synthetic coding sequence
  source 1..1284: mol_type = other DNA
atggtcgatctgtgcaattccaccaagggaatttgcctgactggccctagcgggccaccaggtccccctggcgcaggtggcctgccaggccataacgggctggatggccagccgggaccccagggtcccaaaggagaaaaaggagccaacggcaaaagaggaaagatgggtatacctggagcagcaggcaatcctggggagcgcggagaaaagggagaccacggggagctgggactccaaggcaatgaagggccaccagggcagaagggcgagaagggcgacaagggagatgtcagtaatgacgtgttgctggccggtgccaagggcgaccagggcccaccgggaccccctgggcctccaggtccaccaggccctccagggccacccggttcacgtagggcaaaaggacctcggcagccttctatgttcaacggtcagtgtccaggggagacatgtgccattccgaacgatgacactctggtggggaaggcagacgaaaaggcttccgagcaccatagcccccaggctgaatctatgattacctccatcggtaaccctgtgcaggtgctgaaggtgaccgagacatttggtacttggattagagagtctgccaacaagagtgatgataggatctgggtgacagagcacttctctggaatcatggttaaagagtttaaggatcagccaagcctcctcaacgggtcttatactttcattcaccttccctactacttccacggttgtggacacgtcgtgtacaataactccctgtattatcataagggaggcagcaatacactggtgcggtttgaattcggacaggagacatcacaaacactaaagctcgagaacgcactgtatttcgatcggaagtatctgttcgccaattccaaaacctactttaatctggcagtggatgagaagggcctgtggattatatacgctagcagcgtggatggatccagcattcttgtggctcagttagatgaacgaacctttagtgttgtgcagcatgtcaacacaacatacccaaaaagtaaggccggtaatgcctttattgccagaggcatcctctacgtgacagataccaaagatatgagggtaacttttgcctttgacctcctcggcggaaagcagattaacgctaattttgatcttaggacatctcagtctgttcttgccatgctcgcttacaacatgcgagaccagcacctgtactcctgggaagatggtcacttgatgctctaccccgtgcagttcctgagcacgacattgaaccaatag

SEQ ID NO: 224581 - DNA, 1575 bp, synthetic construct
  misc_feature 1..1575: note = Description of Artificial Sequence: Synthetic coding sequence
  source 1..1575: mol_type = other DNA
atgcactccctcgacgaacctctggatctcaagttaagtataaccaaacttagagccgctcgggagaaaagagagagaacccttggcgtcgttaggcctcgggctctccaccgggagcttgggctggtggacgattcacctaccccgggtagcccgggttctccacctagcgggtttctgctgaattcgaagtttcccgagaaggtcgaaggaagattcagcgcggcaccgcttgtggatctgagcctgtcacctcctagcggactggactccccaaatggttcgtcaagtctgagtcccgaaaggcagggcaacggagatcttcctcccgtgcctagcgcaagtgattttcaaccgctgagatatctagatggtgtgccatcgtcatttcaattcttccttcctctgggcagtggcggtgccctgcatctgcctgcctcttcattcctgactccacccaaagataagtgtttatcccctgacttaccgctccctaagcagctggtgtgccggtgggcgaagtgcaatcagctgttcgagttgctgcaagacctcgtggaccacgtgaacgactatcatgtcaagcccgagaaggacgcgggatattgctgccattgggaagggtgtgcccgtcatggacggggatttaatgcgagatacaagatgctgatacatattcggacacacacaaatgaaaaacctcaccgctgcccaacttgttcaaaaagttttagtcggcttgagaacctcaagatacacaatagaagccataccggagaaaaaccttacgtttgtccatatgaaggatgcaataagagatactctaactccagcgatcgcttcaagcacaccaggacacattacgtcgataaaccatattactgcaagatgccaggatgccataagaggtacactgatccttcatcgctgcggaagcacattaaggcccacggacacttcgtgagccacgagcagcaagagctgctgcaattgaggccaccccctaaaccccctttacccgctcccgatggcggtccttacgtgagcggggcacagataataattcccaaccccgctgcgcttttcgggggtccaggattacccggtctccctttacccttggctcctggcccactggacctgtctgcattagcatgtggaaatggaggtggttctgggggtggcggaggcatgggcccaggacttcccggtccagtgctccctcttaatctagccaaaaatcccctgctaccttctccttttggagccggaggcctgggacttcctgtggtatcattgctcgccggtgccgctggtggaaaggccgaaggcgagaaaggacgaggatcagtccctactcgggctcttgggatggaaggccacaagacccctctggaacgaaccgagtctagttgttcaaggccctcccccgacggactgcctctgctgccaggcactgtgctggacctgtccacaggtgtgaattctgcggctagcagccccgaagctctggccccaggatgggtggtaattcccccagggtccgtgctgctgaaacctgcggttgtgaactag

SEQ ID NO: 224582 - DNA, 1575 bp, synthetic construct
  misc_feature 1..1575: note = Description of Artificial Sequence: Synthetic coding sequence
  source 1..1575: mol_type = other DNA
atgcacagcctggacgagcccttagacttgaagctgagcataaccaaactgcgggctgcacgagagaaacgggagcgcactctcggggtggtccgcccacgtgcactacatagagagttgggcctcgtggacgactccccaaccccaggctctcccggttctccaccatccggattcctgctcaacagcaaatttccggaaaaggtcgagggcagattctcggcagccccactggtagatctgagtttatctccgccatccggcctggattctcctaatggctcctcatctttaagtcccgagcgtcaaggcaacggggatctacctcccgtgccatctgcctccgacttccagcctctacgctacctggatggcgtcccaagttcgtttcaattcttcctaccgctaggctccggtggcgctctacatcttcccgcttcaagcttcctgacccctccaaaggacaagtgcctgtccccagacttacccctccctaagcaactcgtttgccgctgggctaagtgcaatcaattattcgagctgctgcaggatctggtcgaccatgtcaacgactaccacgtcaaaccggaaaaggacgctgggtactgctgccactgggagggatgcgccagacatgggagaggcttcaacgctcggtataagatgcttattcatatacgtacacacacgaatgagaagccccaccgctgccctacatgcagcaagagcttctctaggctcgagaatctgaagatccacaacaggtcacacactggagagaaaccctacgtctgcccctacgaagggtgcaataaacggtactcaaactcctctgatcgtttcaagcacactagaacacactatgtcgacaaaccatattactgcaagatgcctggttgtcacaaacggtacacggacccctcctccctccggaagcacataaaggcccacggccattttgtgtcccatgaacagcaggaactgttgcaactccggccacctccaaaaccccctctgcctgctccggatggcggaccatacgtgtccggagcacaaattatcatccccaatccagctgctctatttggaggtcccggactgcccggactgcccctcccactggcaccgggaccactagatctgtccgccctagcctgcgggaacggtggaggctctggtggtggaggcggtatggggcctggcctcccaggcccagtactgcctcttaatctggccaaaaatccacttctcccaagcccattcggcgctgggggtctgggtctgccagtcgtgagcctgctggcaggggctgctgggggaaaggccgagggagaaaagggtcgaggatcagtgcctacccgcgctttgggtatggaaggacataaaacacccctcgagcggactgagtcttcctgcagcaggccaagtccagatggccttcctctcctgcccggtacagtcctcgatctgagcactggtgtgaatagtgcagcttcctcccccgaagcgctggcgccaggttgggtggtgatacccccaggaagtgtactgttaaagcctgcggtggtgaattag

SEQ ID NO: 224583 - DNA, 2328 bp, synthetic construct
  misc_feature 1..2328: note = Description of Artificial Sequence: Synthetic coding sequence
  source 1..2328: mol_type = other DNA
atgatggttcaacgcctgggtttgattagccccccagctagccaggtgtcaacggcatgcaatcagatctcaccctcactgcaacgtgcgatgaatgcggcaaacctgaatatcccacccagcgatacaagatcactcatctctcgcgagtccctggcaagcaccacgctgtctctgactgaaagccagagtgcatcgtccatgaagcaggaatggagccagggatatagggctctgccatcactctcaaaccatggctcccagaatggactggacctaggggatctactcagcctgcctccgggaacgagtatgtcttctaatagcgtatccaatagcttgccgtcttatctgtttggaacagagagctcccactcaccgtatccttcccctcgtcactcctcaacgcgttcacactctgctagatctaagaagagggccctcagcttgagtccactcagtgacggaatcggtatcgacttcaatactattattagaacctctcccacgagtctggtggcctatattaatggcagtcgggcatcccctgcaaacttatcaccacaaccagaggtctatgggcacttcctcggggtgaggggaagctgtatccctcagcccaggccagtccccggaagtcagaaaggagtgctggttgctccgggaggtcttgctctgccagcttatggagaagatggagccttggaacacgagcgcatgcaacagctcgaacacggtggattgcagccaggactagtgaaccatatggtggtgcaacacggacttccgggacccgactcccagagcgcaggcctcttcaaaacggagcggttggaagagtttccaggaagtactgtggatcttccccctgcaccccctcttccacccctgcctcccccaccaggccctcccccaccctaccatgctcacgcccacctccatcaccctgagctcggccctcacgctcagcagctggccttgccacaggctactctcgatgacgatggagagatggatggtatagggggtaagcactgttgcagatggatcgattgtagtgccctatacgatcagcaggaggagctcgtcagacatatcgaaaaggttcacatcgaccaaaggaaaggggaagactttacttgtttttgggcgggatgtcccagacgctacaagcccttcaatgccagatataaacttctcatccatatgagagtgcattccggcgaaaagccaaataagtgcactttcgagggatgcgaaaaggctttcagtcggctcgaaaacctgaagatccacctgaggtctcacaccggggagaagccatatctgtgccagcaccctgggtgtcagaaagctttttctaattcatcagatcgagccaaacatcaacgtactcacctggacaccaagccctacgcctgtcagataccaggctgtacaaagcgctatactgaccccagctcgctgcgtaagcacgttaaggcacattcgtctaaagagcagcaggctcgcaagaagctgagatctagcactgagcttcacccggacttgctgaccgactgcctgactgtacaatctctccagccagctaccagtccgagagacgcagctgccgagggaaccgttggcaggtccccgggtcccggtcccgacctctattctgccccaatcttcagcagcaactattcgtctagatcaggaaccgctgctggcgctgtcccgccaccccatcctgtctcgcacccgtcccccggtcacaacgtgcagggatctccccacaatccctcatcacagctgccaccacttacagccgtcgacgccggagctgagcgcttcgcgccaagtgcaccgtccccacatcatatcagccccagacgggtgccggcaccttcctcaattctgcagcggacacagcctccttatacgcaacaaccctcgggctcacacctgaaaagctaccaacctgaaactaactcctctttccaaccaaatgggattcacgtgcatggattctacggccagctccaaaaattctgcccaccccactatcccgattctcagagaattgtgcccccagtgagcagctgcagtgtcgtgcccagctttgaggattgtcttgtgcctaccagtatgggccaggcctctttcgacgtgttccatcgggctttttcaacacactctggcatcacagtctacgacctcccttcttcctccagctccctcttcggagagtcacttcgctctggcgcagaggacgccacctttctgcagatctctactgtcgacaggtgtccatctcaactttcttctgtttataccgaaggttag

SEQ ID NO: 224584 - DNA, 2793 bp, synthetic construct
  misc_feature 1..2793: note = Description of Artificial Sequence: Synthetic coding sequence
  source 1..2793: mol_type = other DNA
atgaatgggaggagctgctccatgtcacttcatagaacctctggaaccccacagggtccaagaatggtctctgggcatcacatcccagccattcgtgcccattctggtactcccggtccttctccctgtggctctacaagttcacccacaatggcctccctggctaataatctgcatctaaagatgccgtcgggaggcggaatggcaccacaaaacaacgttgcagaatcaaggatacatctgcccgctctgtcacccagaaggcagatgctgacaaatggcaaaccgagattccaggtcacacaggccggaggaatgtccggaagtcataccctcaagccaaaacaacaggagttcggcagcccgtttccccctaatccaggaaagggtgctttgggcttcggcccacagtgcaaatctatcggcaagggctcctgcaacaatctggttgttacttcttcccctatgatggtacaacgcctgggccttatctccccaccagcttcccaggtgtccacggcctgcaaccagatcagcccctccttgcagagagcaatgaacgccgctaacctgaatatacccccttccgatacccgctcactgatcagccgcgaaagtctggcatccaccacgctcagcttaaccgagtcccagtctgcgagttccatgaagcaagaatggagtcaagggtacagggccctgccgagtctgtctaatcatggcagccaaaatggtcttgacctgggcgacctgctgtccctgccccctggaacgtcaatgagttccaattctgtgagtaactccttgccaagctacctctttggcaccgagtcctctcattcaccatacccctcccctcgccattccagtacccggtcccatagcgccagatcgaagaagagagcgctgtcccttagtccactctctgatggcatcggcattgacttcaacacgattatcaggacctcccccacttctttggttgcatacatcaatggtagtcgggcaagtccagctaacctgtcaccccagcccgaagtctatggccacttcttgggagtccggggatcttgcattccacaacccaggcctgtgcccggatctcagaaaggagttctggtcgcccctgggggtctcgcactgccagcttatggggaagacggagctctagagcatgaacgcatgcagcagctggagcacgggggtctccagcccggacttgtgaaccacatggtggtccagcacggactgcccggaccggactcccagagtgccggactgtttaagacagaaagacttgaagagttccccggttcgacagtcgacctgccaccagcccctcccttgcctcccttaccaccaccacccggacctccaccaccataccatgcccacgctcacttgcaccatccagagttgggcccacatgcccagcaattggcactgccacaggccacattggacgatgacggcgaaatggacggtattggtggcaagcattgctgccgttggatcgactgctcagcactgtacgaccagcaggaggagctagtaagacacatcgaaaaggtacacatcgaccagcgaaaaggggaggactttacgtgtttctgggccggttgcccaagacggtacaagcccttcaacgcaaggtacaagctgctgattcacatgagggtgcacagtggagaaaaacccaacaagtgcacctttgaagggtgcgaaaaagcattctcccgactggagaatctgaaaatccatcttagatcccacacaggggagaaaccttacctttgccaacacccagggtgccagaaggccttctctaactcttccgaccgagcaaagcaccagcgtacccacttggatacaaagccttacgcttgtcaaatccctggctgcactaagagatacacggatccttccagtctccgaaagcacgttaaagcgcatagttctaaagaacagcaagcaaggaaaaagctcagatcctccacagaactccatcccgacctgctgaccgactgcctgacagtgcaatctctgcaaccggcaaccagcccgagagacgctgcggcagagggcactgtcggacgcagtcctggtccgggacccgacctgtactccgccccaatcttctcgagtaattacagttcgcggagtggaacagccgctggggcagtcccccctccccacccagtgtctcacccttcacctggtcacaatgtgcaggggtccccacataaccctagctcccagttgccgcctttgaccgccgtcgacgcaggggcagaaaggttcgccccaagcgctccttcccctcaccacatctcaccgcgacgcgtcccagccccaagtagtatactccagcgcacccagccgccatatactcagcagccaagcggctcacacttgaaatcttaccagccagagactaatagctcctttcaaccaaatggaatacacgtgcatggattttatggccagctgcagaaattctgtcctccccattaccctgattcgcagagaatagtgcccccagtctcttcatgctctgtggtgccctcctttgaagactgcctggtgccaacgtctatgggccaggccagtttcgacgtatttcatcgtgctttctctacacacagcggtattacagtctatgacctgccatcaagcagctcatctctgtttggggaatcactcagaagtggcgctgaggatgccacttttcttcagatctcgactgttgatcgatgcccgtctcagttgtcatctgtatataccgagggttag

SEQ ID NO: 224585 - DNA, 270 bp, synthetic construct
  misc_feature 1..270: note = Description of Artificial Sequence: Synthetic coding sequence
  source 1..270: mol_type = other DNA
atgatggtccagcgacttgggctcataagtcctcccgcatcccaggtgagcacggcgtgcaaccagatttctcctagcctgcagcgggctatgaacgccgctaacctgaacatccctccttcagatacgagatccctgatttctcgagagagtctggcctccaccaccctttcactcaccgagtcacagtctgccagctcaatgaagcaggaatggtcacaaggctatagagcgctgccatctctctctaatcatggtagtcagaactag

SEQ ID NO: 224586 - DNA, 735 bp, synthetic construct
  misc_feature 1..735: note = Description of Artificial Sequence: Synthetic coding sequence
  source 1..735: mol_type = other DNA
atgaatgggcgatcttgctctatgagccttcatcgcaccagtgggactccacaggggcctcgcatggtgagcggacaccacattcccgctatccgagcccattctggcaccccgggtcccagcccatgcggctccacctctagcccaactatggcctccctcgccaataatctgcacctaaagatgccatcagggggaggtatggcccctcagaacaacgtggcggaaagccgcatacaccttccagcactgagtcctcgcaggcagatgctaacaaacggcaaacccagatttcaggttacgcaggccggtggcatgagtgggagccacacccttaagcccaagcagcaggagtttggatctccatttcccccaaaccctggaaagggcgcactggggtttggccctcagtgcaaatctatcggcaaaggatcttgcaacaatctggtcgtgacttcatcacctatgatggttcaaagactcgggctcattagtcccccagcctcccaggtgagcactgcgtgcaaccagatatcgccttctcttcagcgggcaatgaacgcggcaaacctcaacatccctccctccgacacgagatcactgatctccagggaatcactcgcttccacaacccttagcctaactgagtcccagagcgcttcctctatgaagcaggaatggagccaagggtatcgggctctgccatccctgtcgaatcatggcagccagaactag

SEQ ID NO: 224587 - DNA, 270 bp, synthetic construct
  misc_feature 1..270: note = Description of Artificial Sequence: Synthetic coding sequence
  source 1..270: mol_type = other DNA
atgatggtgcagcgcttggggctgatcagtccccctgcctctcaggtgtctactgcttgcaatcagatctctccatcactgcaaagagccatgaatgcggcaaacctaaacatcccccctagcgataccagatcactgataagcagggagagcctggcgagtaccaccctctcgctgacagagtcacagtcagcctcctcaatgaaacaagagtggtcccagggctatagggccctaccctcgctgagcaatcacgggtctcagaattag

SEQ ID NO: 224588 - DNA, 270 bp, synthetic construct
  misc_feature 1..270: note = Description of Artificial Sequence: Synthetic coding sequence
  source 1..270: mol_type = other DNA
atgatggtgcagcgattgggtttgatttccccaccagcatcacaggtgagcacagcctgcaaccagatatctccctctcttcagagggcgatgaatgcggcaaatctcaacatacctcccagcgatactcgcagcttgatttcccgtgagagcctggcctccacgactctcagcctgacagagtctcagtcagcctcaagtatgaaacaggagtggagtcaggggtacagagcgctccctagcctctccaaccacggtagtcagaattag

SEQ ID NO: 224589 - DNA, 735 bp, synthetic construct
  misc_feature 1..735: note = Description of Artificial Sequence: Synthetic coding sequence
  source 1..735: mol_type = other DNA
atgaacggccgaagttgcagcatgtcccttcaccgcacttctggtacacctcaggggcctagaatggtatctgggcaccatataccagccatcagggcccactccgggactccaggacctagtccctgtggcagcactagcagtcctaccatggcgagcctggctaacaacctacacctgaagatgccctcaggtgggggtatggccccacaaaacaacgtggcagagtctcgtatccatctccctgcattgagcccgagacggcagatgcttactaacggaaagccgaggttccaagtgacacaagctggaggtatgtcaggtagtcatacactgaagccgaagcagcaggagtttggcagtccgtttccacctaatccagggaagggtgcactagggttcggaccccagtgtaaatccataggtaagggctcctgcaataatctggtcgtcactagttccccaatgatggtccagcgactgggtttaatctctcccccagcatcccaggtaagtaccgcttgcaaccagatttcccctagcctgcaacgcgcaatgaatgccgctaacctgaatatccccccttctgacaccagaagcctaatctctagggagagcctcgcatccacaacgctttcccttacagaatctcagagcgcgagcagtatgaagcaggaatggtctcaggggtaccgcgcactgccgagtctgtcaaaccatggctcccaaaactag

SEQ ID NO: 224590 - DNA, 219 bp, synthetic construct
  misc_feature 1..219: note = Description of Artificial Sequence: Synthetic coding sequence
  source 1..219: mol_type = other DNA
atgcaccgccgtagactggctctgggacttggcttttgtctgcttgcaggcacgagcctcagcgtcttgtgggtgtacctcgagaactggctgccggtgagttacgtgccctactatctcccatgtccagagatccttcttgagtaccgcggtgtcatatccgcacactgtaacctgcatctgcccggttcttcgaattgtcacgcttctgccacgtag

SEQ ID NO: 224591 - DNA, 483 bp, synthetic construct
  misc_feature 1..483: note = Description of Artificial Sequence: Synthetic coding sequence
  source 1..483: mol_type = other DNA
atgcacagacgccgactggccctcggactcggcttctgtctattggctggcaccagcctgagcgtcttgtgggtatatttagagaattggctgcccgtaagctatgtgccttactacctgccttgtcccgaaatcctaccaatgatgatggcattgtcatgcctgtgccatcagcaacacgaggcagcacttcaggagggcgaagctacacctgctcgtggcatggtcacggtgcccagcgcgcaggctgccggtgcccaagcccacactgcagcagatacacacacactggtgggcgctcacagactaaggggcaatctgcagcccagagccagtgccgctcacctgccagctacagagccagaccattggggacacggggtgtgccgcggagaggttcatagtttccatcctgttttgccgggtgtgtctaggggagtcctgcatgcatgggtgcccggtgccctgctacacctgcactag

SEQ ID NO: 224592 - DNA, 1044 bp, synthetic construct
  misc_feature 1..1044: note = Description of Artificial Sequence: Synthetic coding sequence
  source 1..1044: mol_type = other DNA
atgcacagaagacgattggccctaggtctcggattctgcctgctggccggtacctcacttagcgttttgtgggtttatctggagaattggcttccagtgtcatacgtgccatactatttgccatgtcctgagatcttcaatatgaagcttcattataaacgcgaaaagcccctgcaaccggtcgtctggtcccagtatccccagcccaaattgttggagcaccggcctacccagcttctgaccttgacaccctggctggcgcctatcgtatcggaggggacatttaatcctgagctcctccagcacatctaccagccactgaacctcaccatcggagtcacagtgtttgccgttggaaaatatactcacttcattcaaagttttctggagtcagccgaggagttcttcatgcgtggttacagggtgcactattacatctttactgataaccctgccgcagttccaggagtcccgctgggccctcaccggctgctttcatccatccctatccaggggcactctcactgggaagagacctcaatgcgtagaatggaaactatcagccagcacattgccaagcgagcgcacagggaggtggattaccttttctgtctggacgtggacatggtatttaggaacccctggggcccagaaactctgggcgacctggttgccgcaattcatccatcttactacgcagtgcccaggcagcagtttccttatgagcgcagaagggtttctaccgcttttgtcgctgactcagaaggcgatttctattatggaggagccgttttcggaggccaggtcgccagagtgtacgagtttacacggggatgtcacatggctattttggccgacaaagctaacggaattatggcagcttggcgagaagagtcccacctgaatcgtcattttatctcgaataagccttctaaggtcctgtctcctgaatatctgtgggacgaccgcaagccacagccaccttccctgaaactgatccggttttcgacccttgataaagatatttcctgcctgaggtcctag

SEQ ID NO: 224593 - DNA, 885 bp, synthetic construct
  misc_feature 1..885: note = Description of Artificial Sequence: Synthetic coding sequence
  source 1..885: mol_type = other DNA
atgcacaggcggaggctggccctcggcctgggcttctgtcttctggccggtacatccctgtctgtgctttgggtctacctggaaaactggctacccgtgtcttatgtaccttattacctgccctgtcccgaaatattcaacatgaaactccactacaaaagggagaagcccctgcagcctgtggtgtggagccagtatccccagccaaaactactggaacacaggcccacacaactgttgactctgaccccgtggcttgcacccatcgtgagcgagggcactttcaatcccgaactgctgcagcacatatatcagcctctgaacctgacgattggcgttactgtcttcgcagtgggtaatccctcgtggagccaaccacggagtagttcatgtgtggggactgggtgcactactacttcgtctctgacaaccctccaacctttccctggcagcagatgggtgccgactggctttagcgctccctcgccctctcgggtgacccctactggtagaaggcatccttgcgctgggtggagacccagtgcatcaaccctgcttagggggctcacagggaggtggaccacttcttccgctctgatgtggacctggtgcttcggcacacgtggcgcactccgcccatgggaaacctggtggctgcccttcactcaagccaccacaccttttcctgcgagcagcagtccaatgtcagccggagttttcccgcttccgctctggcagacagcaaaaggaacttctataatggtgggccagtccagcggtggaaggtggcctgggtacatgtcgctgctgggagcagcaacatggccctcttggcgaactaggcctatggcgagttggttgcccggaggtcgtaaggccacttag

SEQ ID NO: 224594 - DNA, 993 bp, synthetic construct
  misc_feature 1..993: note = Description of Artificial Sequence: Synthetic coding sequence
  source 1..993: mol_type = other DNA
atgcatcgaagacggttagctttggggctgggattctgtttactcgccggtacctcattgtctgtcctgtgggtttatctggaaaattggctacccgtcagttacgtgccgtattacctgccttgtccggagattctgtcccagtacccacaacccaagctgctggaacacaggcccacccaacttctgactcttaccccatggcttgcacctatcgtatctgaaggcacatttaaccctgagctgctgcagcacatttatcagccacttaatctgacaattggtgtcactgtatttgcagtgggtaaatatacccatttcattcagtctttcttagagagcgcggaggagttcttcatgagaggctaccgcgtgcactattatattttcacggacaatcccgctgctgtccccggagtgccactgggacctcaccggctcctttccagcatacctattcaggggcatagccactgggaggagacttctatgagaaggatggaaacgatttcgcaacatattgcaaaaagggctcatcgcgaagtggattacctgttttgtctggacgtagacatggtgttccggaacccgtgggggccagaaacactcggcgatctcgtggccgcaatacacccctcatattatgctgtcccccgacagcagttcccctatgaacggagaagagtttccacagcatttgtggcagattccgagggcgacttttattatggcggagccgtcttcggagggcaggttgcgagagtctacgaattcaccaggggttgtcacatggcgatcctggctgataaggctaatggcatcatggctgcttggagagaggaatcacacttgaaccggcactttatctctaacaagccttccaaggtgttgtcgcctgagtacttgtgggatgatcgcaagcctcagcccccatccctgaaactgattcggtttagcacattagacaaagacattagctgtcttcgttcttag

SEQ ID NO: 224595 - DNA, 1434 bp, synthetic construct
  misc_feature 1..1434: note = Description of Artificial Sequence: Synthetic coding sequence
  source 1..1434: mol_type = other DNA
atgcctccctgccagccacagcggccactgctattactcctccttctcctagcatgtcagccccaggtgcctagcgcgcaggtgatggatttcctctttgagaaatggaaactgtacggggatcagtgtcatcacaaccttagcctgctgcctcctccaactgagctcgtttgtaacagaacgtttgacaaatacagctgctggcccgacacccccgcaaatacaactgccaatatttcttgtccttggtacctgccttggcaccataaggtccagcaccgattcgtatttaagagatgcgggccagacggacaatgggtgagaggccctagggggcagccctggagggatgcctcacagtgtcaaatggatggggaggagatcgaagtccagaaagaggttgcgaagatgtatagctccttccaggtgatgtataccgttggctacagcctgtctttaggagccctgctgctggcactggccattctgggaggcctgagcaagctgcattgtactcgcaacgcgattcatgccaatctgtttgctagttttgtcttgaaggccagctctgtcctagtaatcgacggactccttaggacccggtacagtcagaaaatcggcgatgatctatcagtctctacatggctgtccgatggcgctgttgcagggtgccgggtagctgctgtattcatgcaatacggcatagtcgccaactactgttggcttctggtggagggtttatatttgcacaatctgcttggactggccacgctcccggaaaggagttttttttccctgtatctcggcatcggctggggcgctcccatgctgtttgtggtcccctgggcagtagtaaagtgtctgtttgaaaacgtgcagtgctggacgtccaatgataacatgggattttggtggattctccgcttccccgtcttcctagccatcttgataaatttcttcatcttcgtgcggattgtccagttattggtagccaaactcagagcacggcaaatgcatcacaccgattacaagtttcggttggctaagtctactctgactctgatccctctgctaggcgtacacgaggttgttttcgcgttcgttaccgacgagcacgcacaaggaaccctcaggtccgctaaactgtttttcgacctcttcctgagcagttttcagggattgctggtcgccgtcttatactgtttcctcaacaaagaggttcagtcggagctgcggaggaggtggcacagatggcgtctggggaaagtactttgggaagaacgcaacacatctaatcatcgcgctagttcttcacctggtcacggacccccttctaaggaactccagttcggacggggtggagggagtcaggattccagtgccgagacacctcttgcgggtggcctcccacgcctggccgagagccctttttag

SEQ ID NO: 224596 - DNA, 1392 bp, synthetic construct
  misc_feature 1..1392: note = Description of Artificial Sequence: Synthetic coding sequence
  source 1..1392: mol_type = other DNA
atggcgggtgcccctggcccactaagactggctctactactccttggcatggtcggcagggccggacccaggcctcagggcgctacagttagtctttgggagaccgtacagaagtggagagaatatcgcaggcaatgccaaagaagcctcacggaggatcctcctcccgctacagacctcttttgtaaccgaactttcgatgaatatgcgtgctggccagacggggagcccggttccttcgtgaacgtgagctgtccgtggtatttgccctgggctagcagtgtcccccagggacatgtgtatagattttgtaccgccgaaggactttggctacagaaggataattcctcccttccttggcgtgacctctccgagtgtgaggagtctaagcgcggagagcgctcatcaccagaagagcaactcctgttcctatacatcatttacactgttggctatgccttgtcattttctgcactcgtcatagcttcagctattctgcttggatttcgtcacttgcattgtactcgcaactacatccatctgaacctgtttgcaagcttcatcctgagagccctctctgtgttcattaaagacgctgctctgaaatggatgtattctacagccgctcagcagcaccaatgggacggcctcttatcctaccaggattcactgtcttgccgcctggtatttttactcatgcagtattgtgtggccgctaattattattggctcttagtggagggcgtctatctgtatacactgttggccttctcagtgctgagtgagcagtggatcttcagactttatgtgtcaatcggttggggggtaccactgctattcgtggtaccatgggggattgtgaaatatctctatgaggacgaaggctgttggacccgcaatagtaatatgaactactggctgatcattcgcttaccgatactcttcgccattggagtgaatttcctgatcttcgtgcgagtgatttgtatagtggttagcaaactgaaagccaatctgatgtgtaagaccgacataaagtgtagactggctaagtccaccctgaccctgattccgttgttgggtactcacgaggtcatatttgctttcgtaatggacgagcacgcacgcggaaccctcaggtttattaaactgttcaccgagttgagctttacatcgttccagggtctcatggttgcaatcctttattgtttcgtcaacaacgaggtgcagctggagtttcggaagtcttgggagcggtggaggctggagcacctgcacatccaacgtgatagtagtatgaagcctctgaagtgtccaacgtcttctctctccagcggcgctacagccggtagcagtatgtacactgctacatgccaggcgtcctgttcatag

SEQ ID NO: 224597 - DNA, 1662 bp, synthetic construct
  misc_feature 1..1662: note = Description of Artificial Sequence: Synthetic coding sequence
  source 1..1662: mol_type = other DNA
atgaaactcgggagttccagggctggccctggtcgcggaagtgccggattattgccgggagttcacgaactaccaatgggaattccagccccatggggtacctcacctctatcattccacaggaagtgcagcctttgggcacccggacgtccttttctcactcttgtgctgctcgtctccatcaagcaggttacaggttcactgctggaggaaacaaccagaaaatgggcacagtacaaacaagcgtgcctgagggacttgctgaaagaaccctctggcatcttctgcaatgggacttttgaccagtacgtgtgctggccacacagcagccctggcaatgtctcagttccctgcccttcctacctaccctggtggtcagaagaaagctccgggcgagcatatcgtcattgcttggcccaaggaacttggcagacaatcgagaacgccaccgacatttggcaggatgactcagagtgttctgaaaaccatagttttaagcagaatgttgaccgttatgccttgctctcgactttgcagctaatgtatactgttggatacagcttttccctaatatcgctgttcctcgctttgaccctgctgctgttcctgcgcaaactgcactgcactcggaattatatccatatgaatttgtttgctagtttcattctgagaaccctggctgtgttggtaaaggacgtggttttttataactcctattcaaagcggcctgacaatgaaaacggctggatgtcgtatttgtcggaaatgtcaacgtcctgcaggagcgtgcaggtgctgctgcattattttgtgggcgctaactacctctggctgctcgtagaagggctttatctccacacgttgttggaaccaaccgttcttccggagaggaggctctggccgcgttacttactgctgggatgggccttccctgtgcttttcgttgtgccatggggatttgcccgagcgcaccttgagaacaccggctgctggactaccaacgggaataaaaagatctggtggataatcagaggcccaatgatgctgtgtgtgaccgtcaacttcttcatattcttgaagattctgaagctcctgatctctaagctcaaggcgcaccagatgtgcttccgcgattacaagtatcgtctcgcaaagagtactcttgttttaatacccctactgggcgtccacgagatcctcttcagtttcattaccgacgaccaggtggagggctttgccaagctgatccgcctttttatccagctaaccctatcctccttccacggctttttagtggcactgcaatacgggtttgccaacggggaagttaaagctgagctgagaaagtactgggtgagattcttgctagcacggcactccggatgccgcgcatgtgtcctgggcaaggacttccgctttttaggtaagtgtccaaagaagttatccgaaggtgacggagctgagaagctgcgcaagctccagccaagtttgaactcaggccgattgctccacctggccatgcgagggctgggggaactcggagcccagccccagcaagaccacgcaagatggcctcggggtagcagtcttagcgaatgcagtgagggcgatgtgactatggcgaacacaatggaggaaatcctcgaggagtcagaaatctag

SEQ ID NO: 224598 - DNA, 1053 bp, synthetic construct
  misc_feature 1..1053: note = Description of Artificial Sequence: Synthetic coding sequence
  source 1..1053: mol_type = other DNA
atgggcattcccgctccgtggggcacctctcctctatcctttcatagaaagtgtagtctatgggcgcctggtcgcccatttctgacgctcgtactactagtttcaataaagcaagtgacagggtctctgctggaggaaaccacccgcaagtgggcccagtataaacaggcttgcctgagggacttactcaaagagccaagtgggatcttctgcaacggcacctttgaccagtacgtctgttggccacactccagtccaggaaatgtgtcagtgccatgtccgtcatatctgccatggtggtctgaagaaagttcgggacgggcttaccggcattgcttagcccagggaacttggcagactatcgagaatgcgacggatatttggcaagacgactcagaatgcagtgagaatcacagctttaaacagaatgtggacagatacgcgctcctttctacactacagctgatgtatactgttggttactctttctctctgatttctctattcttagcactaacactactgctgttcttgcgcaagctgcactgcacaagaaattacattcacatgaatcttttcgcctcatttatccttcgaaccttagccgtcctggtgaaggacgtagttttctataacagttattctaagaggcccgataatgaaaacggctggatgtcttatctgagcgagatgtctacgagttgcagatcagtccaggtgctgctccattattttgtcggtgctaactacctttggcttctggtcgagggcctgtacctccatactctcctcgaacccaccgtgctgcccgagcggcgtctgtggccacggtatctcctcctgggatgggcgttccccgtgttgtttgtggtgccttggggatttgccagggcccaccttgagaatacagggtgttggacgaccaacggtaacaaaaagatttggtggatcatccgcggacctatgatgttgtgcgtgaccgctctcggtctggaggagacaggccttaagcggaatgggagcatcccatttgggcataaggaagacatctag

SEQ ID NO: 224599 - DNA, 1665 bp, synthetic construct
  misc_feature 1..1665: note = Description of Artificial Sequence: Synthetic coding sequence
  source 1..1665: mol_type = other DNA
atgaaactcggctcatcaagagctggtccaggtcgcggaagtgccggtttgttacccggagtccacgaactacctatggggatcccagctccgtggggtacgtcccccctcagcttccaccggaaatgctcactgtgggcgcctggcagaccctttctcaccctggtgctacttgtgagcattaagcaggttactggttcactgctggaggagacgactcgtaagtgggctcaatataaacaagcctgcctgagagacctcttaaaagaaccatcaggcatcttttgtaacggaaccttcgaccagtacgtgtgctggccacactcaagccccggtaatgtgtctgtcccctgtccctcttacctgccctggtggtccgaagagtcttccgggcgagcttaccggcattgtctggctcagggaacttggcaaacaattgagaatgccacggacatatggcaggacgattcagaatgtagtgagaaccacagcttcaagcagaacgtggatcgctacgcgctcctgagtacgctccagttaatgtacaccgttggatactccttttcacttatctcccttttcctggcgctgactctgttactgttcctccggaaactgcactgtaccagaaattatatccacatgaatctgtttgcgagtttcattctccgtacactcgccgttctggtcaaagatgtggtcttctataacagctattctaaacgtcccgacaacgagaatggctggatgagttatctctctgaaatgagcacgtcatgccggtctgttcaggtgttgctgcattacttcgttggagcaaattatctgtggctgcttgtggagggactgtaccttcacacattgctggagcctacggttcttcccgaacgacgcttgtggccccgttacttgcttttgggatgggcctttcccgtcttgtttgtagtgccttgggggtttgcgagggcccacctcgagaataccgggtgctggacaaccaacggaaacaagaagatctggtggatcatacggggacctatgatgttgtgcgtaactgtgaatttttttatctttctcaagattcttaagctgcttatatccaagcttaaggcccaccagatgtgtttccgggactacaaatatcggctggcaaaatctacccttgtgcttatcccattgttgggcgtgcatgagatccttttcagcttcataactgacgatcaggtggagggcttcgccaaactcatcagactgtttatccaactcaccctttcatcttttcatggcttcctggtcgcactccagtatggattcgctaatggcgaagtcaaagctgagctccgtaaatactgggtgaggtttttgttggcccgacacagtgggtgccgagcgtgcgtgcttggaaaagacttcaggttcctaggaaagtgccccaaaaagctgtccgagggcgatggagcagaaaagctacggaagctccaaccgagcctaaatagcggacgcctgctgcatttggccatgagagggctgggcgagctgggagcacagccacaacaggaccacgcccgatggcctcgtggatcttcccttagtgaatgttctgaaggggacgtgaccatggctaacaccatggaggaaattctggaggaaaaacgtagtcaatag

SEQ ID NO: 224600 - DNA, 687 bp, synthetic construct
  misc_feature 1..687: note = Description of Artificial Sequence: Synthetic coding sequence
  source 1..687: mol_type = other DNA
taagccaccgacatctggcaggacgactccgagtgtagtgagaatcacagttttaaacagaacgtcgaccgctatgccttactcagcaccctacaacttatgtataccgtgggctattctttttccctgatttccttgtttttggcactaacacttttgttgttccttcgcaaactccattgtaccaggaattatatccacatgaatctgttcgcctctttcatcctgcggactctggcagttttagtcaaagacgttgtgttctacaattcttattctaaacgcccagataacgaaaacgggtggatgagttatctgtctgaaatgagtacgagctgtcgctctgtgcaggtgctcctccactactttgtgggtgcaaactatctgtggctgttggtggaaggcctctatttgcacactctgcttgagcctaccgtgttgcctgagcgccgtttgtggccccgttatctgcttctgggctgggcgtttccggtactgtttgtcgtgccatggggatttgccagagcgcacctcgagaacacaggctgttggaccacaaacggtaacaaaaagatctggtggataattagaggccctatgatgttatgtgtcacagccctgggactggaggaaacaggattgaagaggaacggaagtattccatttgggcacaaggaagacatttag

SEQ ID NO: 224601 - DNA, 1725 bp, synthetic construct
  misc_feature 1..1725: note = Description of Artificial Sequence: Synthetic coding sequence
  source 1..1725: mol_type = other DNA
atggagccaaccgaaaatccctgccagggcccattggggcagaaggctggagagaagcccttagcagctggacctggtgaagaagaactgctccgcggatcggcgcctcacgctcaagacactcagagcgaggaactgcccccttcttgcaccattagtggtgaaaaaaaacctcccgcagtgagtggtgaagccaccggagcagatgctggaagactgtgccccccaccaagatccagggctccgcataaggataggacactggccagatcacgaccccaaacccagggggaagactgcagtttaccagttggcgaggtgaagattggtaagaggtcttactccccagccccaggcaagcagaaaaaacccaatgcaatggggctggccccaactagcagtccaggtgcccctaacagcgcaagggctacacacaaccccgtcccttgtggctctgggcgaggcccttgccacctggccaacttactgtcgactctggcccaatccaaccagaatagagaccataaacaggggcctcctgaggtgacgtgtcagatccgaaagaaaactcgcaccttgtatcgatccgaccagctggaggagctggagaagatatttcaagaggaccactaccccgattcagacaagcgaagggaaatagcacaaactgtgggcgttacgccccaaagaattatggtgtggtttcagaatcgcagggcaaagtggcggaagatggagaaacttaatggcaaggagtccaaggacaacccagccgcacctggacctgctagttcccagtgcagcagcgccgctgaaattctgccggcagtccccatggaaccaaagcccgatccattcccccaggagtccccactggatacatttcctgaacctccaatgctgctgacttcagatcagaccttggcacccacccagccgtctgagggtgctcagcgtgtggttactcctccccttttttcccctccgccagtcagacgagcagatctgccctttcctctggggccagtccatactccccaactcatgcctctgctgatggacgtggccggatctgatagcagccataaggatggaccctgtggatcatggggtacctccattactctcccaccgccatgctcgtatctggaagaacttgaaccccaggattaccagcagagtaaccagcctggaccctttcagtttagtcaggcacctcagccccctctcttccagtcaccacagccaaagctgccgtacctccctaccttccccttcagcatgcctagttcactgaccttgcctcccccagaagatagcctgttcatgttcccatgtgggccatctggaggcacatctcagggctactgcccaggtgcatcttccggacagatactgatgcaaccaccagcagggaatatcggcacagcctcctggagtgacccttgcctgccagagctcccattcccgggtcccttctgtcctcaggctctgggccacccccctgggggagatggctattttcccgaccttttcccaactccgtgccctcaggcccttggccgacagccatcaagtgcattatcttggatgcctgaaggcgcaaggcccggtaccggccctttactgtctaaagctaaggaagaacccccagccgcttcacttgaccagccatctgcgttggaggaagccagaggggatgataagaatagccatgtaccgtag

SEQ ID NO: 224602 - DNA, 1722 bp, synthetic construct
  misc_feature 1..1722: note = Description of Artificial Sequence: Synthetic coding sequence
  source 1..1722: mol_type = other DNA
atggctaacgccgaagtgtctgttcccgtgggcgatgtggttgttgtcccgaccgaggggaacgaaggcgagaaccccgaagacacaaaaacgcaggtgatactgcagcttcagccagtgcagcagggattgttcattgatgggcacttctataaccggatctacgaagccggtagtgagaataatactgcagtggttgcagtcgagactcacacaatccacaaaatcgaagaaggtatcgataccggcaccattgaggctaatgaggatatggagatagcctaccccataacatgtggggaaagtaaggccatccttctttggaagaagtttgtctgtcccggaataaacgtcaaatgcgttaaattcaacgaccagttgataagccctaagcacttcgtacatctagctgggaaatcgactctgaaggattggaagagagccatccgattgggaggaatcatgttacgaaagatgatggacagcgggcagattgacttctatcagcatgataaagtttgttcgaatacctgtagatccactaagtttgacctcctgatcagctcagcacgggcacccgtgcctggtcagcagaccagtgtcgtccagacccccactagcgccgacgggagtatcactcagattgctatcagtgaagaatccatggaggaagctggactcgaatggaattccgctctgaccgcggcagtgacgatggctaccgaggagggcgtgaagaaagactctgaggagatcagcgaggacacattgatgttctggaaaggaattgctgatgtcggccttatggaagaagtggtctgtaacattcagaaagagatcgaggaactgttacgtggcgtacagcagcggctcatccaggcaccgttccaggtgacagacgcagccgtattaaataatgtggcgcacacattcggattgatggatacagtgaagaaagtcctcgacaaccgtcgaaatcaggtggagcaaggggaagagcagttcctgtacactctgactgatctcgagcgccaactggaggaacagaaaaagcagggacaggatcatcgcctaaaatcccaaacagtacaaaatgtggtgctgatgcccgtgtctactcccaaaccccctaaaaggccacgactccagcggcctgcatccacaacagtgctttcaccttctcccccagtgcagcagccacagtttacggtgatatctcctatcacaataacccccgtcggacagagtttctctatggggaacattccagtggcaactctgagtcaggggagctcacctgtgaccgtgcatacactgccttctggaccacagctattcaggtacgccactgttgtttcatccgcaaagtcatcaagcccggacactgtcaccattcacccgagctcctctctggcactactcagctcaactgctatgcaggatggatcgacgctggggaacatgaccaccatggtctctccggtggagctggttgcaatggaatcagggctgacttctgcaatccaggccgtcgagtcaacctccgaagacggccagacaatcattgagattgatcctgccccagacccagaggctgaagatacagagggcaaggcggtgatattagagacagaactgcgcaccgaggaaaaagtggtcgcagagatggaggaacaccaacaccaggtccacaatgtggagatagtggtcctggaggactag

SEQ ID NO: 224603 - DNA, 1692 bp, synthetic construct
  misc_feature 1..1692: note = Description of Artificial Sequence: Synthetic coding sequence
  source 1..1692: mol_type = other DNA
atggcgaatgctgaggtatcggtccccgtgggtgatgtggtggttgtgccaactgagggcaatgagggcgagaatccagaggacaccaaaactcaagtcatcctacaactccagccggtgcagcaaggcatctatgaggcaggctcagaaaacaatacagctgtcgtggcagttgagacccacacgatccacaagattgaggagggcattgatacaggaacaatcgaagcgaacgaagatatggagatcgcctaccccatcacatgtggcgagagcaaggctattcttttatggaagaagtttgtttgtccaggaatcaacgtgaaatgcgttaagttcaacgaccagcttatcagtcccaaacacttcgtgcatctggctggaaagtctactctcaaagactggaaaagggctattagactcggaggcattatgctacgtaagatgatggactccggccaaatagatttttatcagcacgataaggtgtgttccaatacttgcaggagcacaaagtttgacctgcttatcagtagcgctagggcgcctgtccctgggcagcagacttcggtcgtgcagacccccaccagtgcagatggcagcattacgcaaattgcaatcagtgaggaaagtatggaagaggcagggctcgaatggaacagcgctttaacagcagctgtgactatggcgacagaagagggggtcaagaaagatagcgaggaaattagcgaggacaccttaatgttttggaagggcatcgctgacgtcggtctcatggaagaggtggtgtgtaatatacagaaagaaattgaggagctgctgcgcggtgtacagcagcggctcattcaggcaccatttcaggtcaccgatgcagcggtactgaacaatgtggcccatacattcggcttgatggatacagttaaaaaggtactggataatcgaagaaatcaggtggaacagggggaagaacagttcctgtacaccctgacagacctggaacgccaactggaagagcagaaaaaacaaggccaggatcaccggctgaagagccagacagtccagaatgtggtgctgatgcccgtttcgacccctaagcccccaaagaggcccagacttcaacgccctgcaagcactaccgtcctcagcccgagccctccagttcagcagccccagttcacagtgatctcacccatcactatcacccctgtgggccaatccttttcaatgggaaacattcctgtggctacgctgtcccagggctccagcccagtaacagtgcatacgcttccgtccggcccacagttgttccgctatgcaacagttgtaagcagtgctaagtccagcagccccgacactgtgaccatccaccctagttcatctctcgctctgctgtcgtccacggcaatgcaggacggctccactctcgggaacatgacaaccatggtgagtccagtggaactcgttgcaatggagtcaggattgacgagtgccattcaggctgtggagtctacaagcgaagacggccagacaattattgagattgatcccgcacccgatcctgaggccgaagacaccgaggggaaagcagtgattttagaaactgagctccgaactgaagaaaaagtcgtagcggaaatggaagaacatcagcaccaggttcacaacgtcgaaatcgtcgtgctggaggactag

SEQ ID NO: 224604 - DNA, 1692 bp, synthetic construct
  misc_feature 1..1692: note = Description of Artificial Sequence: Synthetic coding sequence
  source 1..1692: mol_type = other DNA
atggcaaatgccgaagtctccgtgcctgtcggcgacgttgtggtggtacctacagaggggaacgaaggtgaaaatcctgaggatacgaagactcaagtaatccttcagctgcagccggtgcagcaagggatatatgaggctggctcagagaacaataccgccgtagtggcagttgaaacgcacaccatccacaagatcgaggaaggaatcgacactggaactattgaagccaatgaggatatggagatcgcgtacccgattacctgcggagagtccaaagctatattgctatggaagaaatttgtttgccccggaattaacgtgaaatgcgtgaaatttaatgatcagctcattagccctaagcatttcgtccacctggccggtaagtcaaccctcaaggactggaagcgggctatccggctcgggggaattatgctaagaaagatgatggatagcggccagatcgatttctatcagcatgataaggtctgttccaacacctgtcgttctacaaaatttgatctcctgatttctagtgcacgtgcaccggtccctggccagcagacctccgtggttcaaacacctaccagcgcagacggctctattacacagatagccatctcagaggaaagtatggaggaagcaggcttagaatggaattctgccctcactgctgctgttacaatggccacagaggaaggcgtgaagaaagactccgaagaaatatccgaagacaccctgatgttttggaaaggcatcgccgacgtcggcctcatggaggaggtcgtctgtaatatccagaaggagatagaagagctgctgcgaggcgttcaacagcgcctgattcaggcaccatttcaggttaccgatgccgctgtgcttaacaacgtcgcccataccttcggcctcatggacaccgtgaagaaagtattagacaatcgcagaaaccaggttgagcagggagaggagcagttcttgtacaccctgacagatcttgagaggcagctggaggagcagaagaagcaaggtcaggaccatcgtctaaaaagccagacagtacagaatgtagttctcatgcctgtaagcaccccaaagcccccaaaaaggcctcgactgcagaggccagcaagcactacagtcctctctccttccccgccagtgcagcaaccccagttcaccgtgatctcaccaatcacaataacacccgtcggacaaagttttagtatgggcaatattcccgttgctaccttatcccagggatcaagcccagttaccgtacacaccctgccaagtggccctcagctgttcaggtatgcaactgtggtgtccagtgctaaatcatcttcacctgacaccgtaactatccacccatcttcaagcctggccctcttgtcttcaaccgccatgcaggatggctcaacattgggaaacatgactacaatggtgtctccagtggagttagtggcaatggagtcgggacttacgagcgccattcaggccgtcgaatctaccagcgaggatggtcagaccattatcgaaattgacccagcccctgatcccgaggccgaagataccgaagggaaagccgtgatcttggagacggagcttagaaccgaggaaaaggtggtcgccgagatggaagagcaccagcatcaggtgcacaacgttgagattgttgtgttggaagattag

SEQ ID NO: 224605 - DNA, 1083 bp, synthetic construct
  misc_feature 1..1083: note = Description of Artificial Sequence: Synthetic coding sequence
  source 1..1083: mol_type = other DNA
atgttacgcagactgccagctctggcagcaagaagacctccagccagaaggagaaggatttacgaggctggatccgaaaataacaccgctgtggtcgccgtagaaactcatacaatccacaagattgaagagggaatcgatacggggaccattgaagccaatgaagatatggagatcgcctatcctattacttgcggtgagagcaaggccatacttctctggaagaagttcgtttgccccggaatcaatgtgaaatgcgtgaaatttaacgatcaactgataagccccaaacatttcgtgcacctcgccggaaagtctaccctcaaagactggaaaagggccattagattggggggtatcatgctgaggaagatgatggacagtggtcaaattgatttctaccaacatgacaaagtttgttccaatacgtgcaggtccactaagtttgaccttctgatctcttctgcgagagctcctgtgccaggccaacaaacatccgtggtccagacccctacctccgcagacgggagcatcacacagatcgcgataagcgaggaatcaatggaggaggcgggactggagtggaattccgcgttaacagctgctgtaaccatggccaccgaagagggtgttaagaaggattctgaggaaatcagtgaggatacgctgatgttctggaaggggatcgccgacgtcggccttatggaggaagtggtctgtaatatccagaaagagattgaagaactgcttaggggcgttcaacagaggctgatccaggccccttttcaagtgacagacgcagcagtattaaataatgtggcgcatacctttgggttaatggacactgtgaaaaaggtactcgacaaccggcgaaatcaagtcgagcagggagaagaacagtttctgtatactctgacagatcttgaaaggcagctggaagaacagaaaaagcagggccaggaccataggctcaaaagtcaaacagttcaaaatgttgttctcatgcctgtcagcacccccaaaccgcctaagcgtccccgactgcagaggcctgcaagtacgactgtgttgtcgccgagctag

SEQ ID NO: 224606 - DNA, 1593 bp, synthetic construct
  misc_feature 1..1593: note = Description of Artificial Sequence: Synthetic coding sequence
  source 1..1593: mol_type = other DNA
atggcaacacctgacgtgagcgtacacatggaggaggtggtagtggttaccacaccagacacagccgttgacggttctggggtggagggcgtgaagacagttctcgtgactaccaatttagccccacacgggggtgaccttactgaggacaatatggagacagagaatgcagctgcggctgcagctgctgccttcaccgctagcagccagctgaaggaggccgtgctggtgaagatggcggaggaaggagagaatctggaggctgaaatcgtttacccgatcacttgtggagactctcgagcaaatctgatctggcgcaagttcgtctgtccaggtatcaacgtgaaatgcgtgcagtacgatgagcatgttatctccccgaaggaattcgtgcacttggcagggaagtccaccctcaaagattggaaaagagcaatccgcatgaatggaataatgctacggaaaattatggactcaggggagcttgacttctatcagcacgataaggtgtgctccaacacatgtagatccacaaaaatcgatctctccggggcacgagtttctctctcttcccctacatcagctgagtatattcctctcacccctgccgcagccgatgttaatggtagcccagccacaatcaccatcgagacatgcgaagacccgggagattggactgccgcaattggcgacgacacctttactttctggagggggctcaaagatgctgggctcttggatgaggtgattcaggaatttcatcaggagttggtcgaaacaatgcggggtctgcagcaacgggtgcaggaccctcctctgcagctccgggacgcggttcttctgaacaatatcgtgcagaatttcggaatgctggacctggttaaaaaagtgctcgcctctcacaaatgtcagatggacaggtcacgcgaacaatacgccagggatctggctgcactcgagcaacagtgcgatgagcatagacgtagggccaaagagttgaaacacaaaagtcagcacttatcaaatgtcctgatgacgctcacccctgtgagcttgcctccccctgtcaagcgaccacgtctggcacgcgctacatccggcccagctgcaatggcgtcccaggtgctcacacagagcgcgcagcttgcactcggtccaggcgtgccggttccccagcttactagtgtgcctctgggtaaggtcgtatctacactgccaagcactgtactgggtaaggggagcctccaagcccctcctgcctcctctcctgcctctcccttgctgggtggatacaccgtccttgcttccagcggctccacctatccaagcactgtcgagatccatccggacgcttcatcactaactgtcctttcaacagcagctgtgcaggatgggtctaccgtcttcaaggtggtgagcccactgcagctgttgacccttccaggacttggccctaccctgcagaacgtggcccaggctagcccgggatcatcaacgattgttacagtccctgctggtgccgctcccggacctgaggagcacacggccaccatcgaggtcgccgcaatggcggaggatcatgagagaaagtag

SEQ ID NO: 224607 - DNA, 1440 bp, synthetic construct
  misc_feature 1..1440: note = Description of Artificial Sequence: Synthetic coding sequence
  source 1..1440: mol_type = other DNA
atggaaactgaaaatgccgcagcagccgctgctgccgcttttaccgcttcatcacagctgaaggaagcggtactcgttaagatggccgaagagggcgagaacctggaagcagagatagtgtatccgatcacttgcggcgattcccgagctaacctgatctggcgtaagtttgtgtgtccaggtatcaacgtgaagtgcgtgcaatatgacgagcatgtgatatcccctaaggaattcgtgcacttggctggaaagagcacattaaaagattggaagcgcgctattagaatgaatgggatcatgcttcggaagatcatggactccggtgaacttgatttttaccagcatgacaaggtctgttctaatacttgccgcagtacaaaaatcgatctctccggtgcccgtgtgtccctatcgtcaccaacttctgccgagtatatccccctcactcccgcagctgccgatgtcaatggctctcctgccacgatcacgatagaaacctgtgaggacccaggggactggacggccgcaataggcgacgacaccttcactttctggcgcggactgaaagacgccggtttattagacgaagtgatccaggaattccaccaagaactcgttgagactatgagggggctgcagcagagggttcaggaccccccactccaacttcgggacgctgtgcttctcaataatatcgtccagaattttggaatgctggatctggtgaaaaaagtgttggctagtcataagtgccagatggacagatccagagagcaatacgccagagatctggcagcccttgaacagcagtgtgatgaacaccggaggagggcgaaagagctgaagcacaagagtcagcacctctctaatgtgctcatgactctaacgcccgtgtcactgccaccacctgttaagcgtccacgcctcgccagggcaacctcaggtcccgctgctatggcttcccaggtgctgacacagtccgcccagttggccttaggaccaggggtgcccgtaccgcaactgacctccgttccgctgggcaaagttgttagtaccctgccaagcaccgttcttgggaagggaagccttcaggctccccctgccagctcccctgcttcaccactgctcggcggttatacagttcttgcatcatctgggtccacttacccgagcaccgtagaaatccaccccgatgcgtcttcccttacagtgctgagcacggctgccgtgcaagatggtagcacggtctttaaagtagtgtctcccctgcagctgttaacattacccggtctaggtcccactttgcagaatgtggcgcaggcatcccctggatcaagcactatcgtgacggttcctgccggagcagccccaggccctgaggaacataccgcgaccattgaggtcgcagcgatggccgaggatcatgagcgcaagtag

SEQ ID NO: 224608 - DNA, 1593 bp, synthetic construct
  misc_feature 1..1593: note = Description of Artificial Sequence: Synthetic coding sequence
  source 1..1593: mol_type = other DNA
atggccacacctgatgtgtcggtccacatggaggaggtcgtcgttgtgactacccctgataccgccgtcgatggctccggagtagagggagtgaagacggttctggtgacaacgaatctggcgcctcacgggggtgacttaacagaagataatatggaaactgagaatgcagcagcagcagcggcagccgcattcaccgctagctctcagctgaaggaagccgtgctggtcaagatggcagaggaaggggaaaacctggaggctgaaatcgtctaccctatcacctgcggcgattctcgtgccaatttaatctggagaaagttcgtgtgccccggtatcaacgtgaaatgtgtgcaatatgatgaacacgtcattagtccgaaagaattcgttcatctggcagggaagtcgacactgaaagactggaagagggcaatcaggatgaacggaattatgctgagaaaaattatggacagcggcgaactggatttttaccagcacgacaaggtttgctctaacacctgcagaagcaccaaaattgatctgagcggcgcacgcgtgtcactgtccagcccaacatctgccgaatacatccctctaacccctgcggctgctgacgtcaacggctcccccgcaacgattaccattgaaacgtgcgaagacccaggggattggactgcggcaattggggatgacacatttacattctggcgaggtctcaaggatgctggtctgctagacgaggtcattcaggagtttcaccaggaattagtcgagacaatgaggggcctgcagcagcgtgtccaggatccacccctgcagcttcgggatgcagtcctgctaaataacatcgtgcagaatttcggcatgctggacttagttaagaaggtcctcgcaagccataagtgccagatggacagaagccgagaacagtatgcgagagacctggcagcactagagcagcaatgcgacgagcatagacgccgtgccaaggaattgaagcacaagagccagcacctgagtaatgttcttatgacattaacacctgttagcttacctcccccagtgaagcgccctaggctagcccgagctactagcggacctgcagctatggcctctcaagtgctaacccagagcgcccagttagctctagggcctggcgtgcctgtgcctcagctcaccagcgtccctttaggcaaagtcgtgtccacacttccgtccacggtgctagggaagggctcactgcaggctcccccagcaagttccccggcatctcctcttttgggcggttacaccgtgctggcgagctccggctcgacatatccgagtactgtggagatacatcccgacgcgagcagcttgaccgtgctgagcactgcggctgtccaggacggctcaaccgtgttcaaagtagtgagccctctgcagcttcttacactgccaggcctgggtcctactcttcaaaacgtggctcaggcaagtcccggtagcagtacaatcgtcacggtccctgccggtgccgctcctggccctgaggaacacacagcaaccatcgaggtcgccgcaatggccgaggaccatgagcggaagtag

SEQ ID NO: 224609 - DNA, 1401 bp, synthetic construct
  misc_feature 1..1401: note = Description of Artificial Sequence: Synthetic coding sequence
  source 1..1401: mol_type = other DNA
atggctatggatgtaactagaagccaggcacagaccgccctcacgctcgtagaacagatcctggctgaatttcagctgcaggaggaggaccttaaaaaggtcatgaggaggatgcagaaagaaatggaccgaggcctccgactggaaacccatgaagaggcaagcgtaaagatgctaccgacctacgtcagatccacccccgagggttccgaggtaggcgactttctttcccttgacctgggcggtactaactttcgggtgatgctagtgaaggtgggagaaggggaggaaggtcagtggtcagtgaagaccaagcaccaaatgtactccatccccgaggatgcaatgaccgggaccgctgagatgctctttgactacataagcgaatgtatttccgattttttagacaagcaccagatgaaacataaaaagctgccgctggggtttaccttttccttccctgttcgccatgaagacattgacaagggtatcctgctgaactggacaaaaggctttaaggccagcggcgcagagggcaataacgttgtcggactcctgcgggacgccatcaaacgtcgcggtgacttcgaaatggatgtcgtcgcgatggttaacgacacggtggcaaccatgatttcatgctattatgaagaccatcagtgcgaggttggcatgattgtcggtacaggttgcaacgcctgttatatggaggaaatgcaaaacgttgagctcgtggagggggacgaaggcagaatgtgcgtgaacactgaatggggcgcattcggggacagcggagagctcgatgagtttttgttggaatacgacaggctcgtggacgaatcctccgccaatccaggacaacagctgtacgagaagctaatcggcggaaagtacatgggcgagttggtgaggctcgtcctgttacgcttggtcgacgaaaatctcctgtttcatggcgaggctagtgagcagttacgcacaaggggggctttcgagacccgctttgtctcacaggtggagtctgacaccggtgaccggaaacaaatttacaacatactgtctactttaggtttgcgcccatctaccacagattgcgatatcgtaaggcgagcgtgtgaaagtgtcagcacacgggcagcccacatgtgcagtgctgggctcgctggcgtgatcaacaggatgcgggagtcccgttcggaggacgtgatgagaatcacggtcggtgttgacggtagtgtgtataagctgcaccccagtttcaaggaacgattccacgccagtgtcagaagacttactccctcctgcgagatcacctttatcgaatcagaagaggggagcggcagaggagctgccctggtgagtgccgtggcttgcaaaaaggcatgcatgttaggccagtag

SEQ ID NO: 224610 - DNA, 1395 bp, synthetic construct
  misc_feature 1..1395: note = Description of Artificial Sequence: Synthetic coding sequence
  source 1..1395: mol_type = other DNA
atgccacgaccaagaagtcagctgccccaaccaaacagccaagtggaacagatcctggctgagtttcagctgcaggaggaggatttaaagaaagtcatgaggagaatgcaaaaagaaatggaccggggactgcggctcgaaacacatgaagaggccagtgtaaaaatgctcccaacctacgtaaggagtaccccggaggggagtgaggtgggagactttctcagcctggatctgggcggaacaaattttagagttatgctggtcaaagtcggcgagggtgaagagggccagtggtccgttaaaaccaagcatcaaatgtactctatacctgaggatgctatgactggaaccgctgagatgctgttcgactatattagcgagtgtataagtgattttctggacaagcaccagatgaagcacaagaagcttcccctcggattcaccttttccttcccagtacgccacgaggacattgacaaagggatcttgctcaactggaccaagggatttaaagcgtccggtgcagaaggaaataacgtggtaggcctgttacgcgacgcgattaaacgacgaggggatttcgaaatggacgtagtggcaatggtgaatgacactgtggcgacgatgatatcttgctattacgaggatcatcagtgtgaagttgggatgatcgttggcactggctgcaatgcttgctacatggaagaaatgcaaaacgtggaactggttgaaggtgatgaaggaagaatgtgtgtgaacaccgaatggggggcttttggtgacagtggggagttagacgagttccttcttgaatatgataggcttgtggacgagtcctccgcaaatcccggtcagcaactctacgagaaactgattggagggaaatacatgggagagctcgtgaggctggttctcttgcggttggtggatgaaaacttgctctttcatggagaggcctcggagcagctgcggaccaggggggcatttgaaacccgcttcgtgagtcaggttgagagtgatacgggtgacaggaaacagatctacaatatcctgtccaccctgggactgagaccgagcacaactgactgcgacattgtgaggagagcctgcgaatccgtgagcacccgtgcagcccatatgtgcagcgctggcctcgctggcgtgataaatagaatgcgtgagtctagatccgaggacgtgatgaggatcacagtgggggtcgacggctctgtgtacaaacttcacccatccttcaaagaacggtttcatgcctccgtccgaagactgacccccagttgtgaaataacgttcatagagtcagaggaaggatctggcagaggggcagccctggtttcggctgtcgcctgcaagaaagcttgtatgctgggccaatag

SEQ ID NO: 224611 - DNA, 1398 bp, synthetic construct
  misc_feature 1..1398: note = Description of Artificial Sequence: Synthetic coding sequence
  source 1..1398: mol_type = other DNA
atgctggatgatcgagcacgcatggaggcggctaagaaggagaaagttgagcagatcttagccgagttccagctccaggaggaggatctgaagaaagtgatgagacgcatgcagaaagagatggacagggggctgcgcctggagacacatgaagaggcgtccgtgaaaatgctgcctacatatgtgagaagtacccctgagggttccgaggtgggggattttctgtcgctcgacttagggggtacaaattttagggttatgctggtcaaggtcggggagggtgaagaagggcaatggtctgttaagacaaagcatcagatgtactccatccccgaggacgcgatgactgggaccgccgagatgttgttcgactacatttccgagtgtatcagcgactttctagataagcatcagatgaagcacaagaagttgcctctcggctttactttttccttccctgtgcggcacgaggatatcgacaagggtatcttgttaaattggaccaagggcttcaaagctagcggggcagaagggaacaacgtggtcggcttgttgcgggatgccatcaagaggagaggagactttgagatggatgtggtcgctatggttaatgataccgtggcgacgatgatctcttgttactatgaggaccaccagtgtgaagtcggcatgatagtgggcaccggctgcaacgcttgttacatggaggaaatgcagaacgtagagctcgtggaaggggacgaagggcgaatgtgtgtgaacacagagtggggcgcttttggcgacagcggggaattagacgaattcctcctggaatacgacagactggttgatgagtcatcagcaaatccaggccagcagctctacgagaaactaattgggggaaagtatatgggagagctcgtccggcttgtactgttgcgcctggtcgatgagaacctccttttccatggcgaagccagcgaacaactgagaacccggggagccttcgaaacacgattcgtatctcaggtggaatcagatacaggggatcgcaagcagatctataacattctcagcaccctgggcctcaggccctcaaccacagattgcgatatcgtgcgtagggcctgcgaatctgtgtctacacgggctgcccacatgtgctccgccggactggctggggtgattaatagaatgagggaatcacggtcagaagacgttatgagaattaccgtgggagtcgacgggagtgtgtacaagctccatccatccttcaaggagcggttccatgcatcagtacgccgactgactccttcctgtgagattacatttattgagtcggaagagggaagtgggaggggagccgctttagttagtgctgtcgcttgcaagaaagcttgtatgttgggccagtag

SEQ ID NO: 224612 - DNA, 1878 bp, synthetic construct
  misc_feature 1..1878: note = Description of Artificial Sequence: Synthetic coding sequence
  source 1..1878: mol_type = other DNA
atgcctggcacaaagcgattccagcatgtgatcgaaacccccgagcctggaaaatgggagcttagtggctacgaagctgccgtgccaattaccgagaaatcaaacccactcactcaagacctggacaaagcagacgccgagaacatcgtcaggctcctgggccagtgtgacgctgaaatcttccaagaggagggacaagctctttctacatatcagcgcctgtatagcgaatcgatactgacaaccatggttcaagtcgcaggtaaagttcaagaggtcttaaaagagccagacgggggtttggtcgtgctgagtggaggtggcacttcgggacgaatggcatttctgatgagcgtgagtttcaaccaattaatgaaaggtctcggccagaagccattgtatacatatctgattgctggaggggacagatctgtcgtggccagccgcgagggcacagaggactcagccctgcacggcatcgaggaactgaagaaggtggctgcagggaaaaagcgcgttatcgtcattgggatctcagtcggactgtcggcacccttcgtagcaggacagatggattgttgtatgaacaatacggctgtgtttctgcctgtcctggtcgggttcaaccccgtgtccatggcgagaaatgatcccatcgaagactggagttccacgtttagacaagtcgcagagcggatgcagaagatgcaagaaaaacaaaaagccttcgtgctgaatcccgcaatcggaccagaaggactgtctggaagctctagaatgaaggggggtagcgccaccaaaatcttgctagagacgttgctcctggccgcacacaagacggtggatcagggcatagccgctagccagagatgcttgctggagatcctgcgcacctttgaaagagcccatcaggtaacatacagccaaagccctaagatcgccaccttaatgaagagcgtcagcacctctctggaaaaaaaaggccatgtttacttggttggctggcaaacgctggggatcatagccatcatggatggggtcgagtgcattcacaccttcggcgcagacttcagggacgtgagggggttccttataggcgaccacagcgacatgttcaaccaaaaagccgaacttactaatcagggtccccagttcacattttcccaagaggatttcctgacgagcatcctgccttcactgacagaaatcgacaccgtcgtatttatctttacgctggacgacaatctgacagaggtgcagacaatagtcgagcaggtcaaagaaaaaacgaatcacattcaggctttggcccatagcacggtgggacagaccctgctcatacccctgaagaaacttttcccaagtataatttctatcacctggccgctccttttcttcgagtatgagggtaatttcattcagaaattccaacgagagctttctaccaagtgggtgctcaatactgtcagtaccggcgctcacgtgctcctgggaaagatcctgcagaatcacatgctggacctccgtatctctaattccaagctattttggagggcactggcaatgctccagcgtttttccggccagtccaaagcaaggtgcatagaaagcctgctccgcgctatccattttcctcagcccctgagcgatgacatccgcgctgcaccaatctcttgccacgtccaggtggcacatgagaaagagcaagttatccccattgcacttctgagtctcctgttcaggtgttccatcacggaagctcaggcacacttagctgcggctccgtccgtttgtgaagctgtgcggtcggccctcgcaggtccgggtcagaagcgcacagctgacccactggagatcctcgagcccgatgtccagtag

SEQ ID NO: 224613 - DNA, 1308 bp, synthetic construct
  misc_feature 1..1308: note = Description of Artificial Sequence: Synthetic coding sequence
  source 1..1308: mol_type = other DNA
atggattgctgtatgaataataccgcggtttttctccccgtgttggtaggtttcaatcccgtgagcatggccagaaatgatcctatcgaagattggtcatccacgttcaggcaggtcgcagagcgcatgcagaaaatgcaggagaagcagaaggccttcgtgctaaaccctgcaatcggacctgagggtttgtctgggagtagcaggatgaagggtggatctgccacaaagattttattggagaccttgctgttggccgcacacaagactgtcgaccaaggcattgcggcaagccagagatgcctcctggaaatcctacgcaccttcgaaagagcgcatcaggtgacctattcacaatcaccaaaaatcgcgacgctaatgaagagtgtgtccacttccctggagaaaaaaggtcatgtttatctggtcggatggcaaaccctggggattattgcaatcatggacggggtcgaatgtattcacactttcggcgcagattttagagacgtccggggtttcctgattggagatcattccgatatgtttaatcagaaggccgagctgactaaccagggccctcagttcacgttctcgcaggaggattttctcacttcaattcttccaagcctcaccgagattgatactgtggtcttcatctttacactcgatgataacctgaccgaagtgcaaaccatcgtggaacaggtgaaagaaaagacgaaccacattcaggccctagcacattccactgtagggcagaccttgctgatccctctgaagaaactgtttcctagtatcatcagcattacatggccgctgctgttctttgagtatgagggtaacttcattcagaaattccagcgcgagttgtccactaaatgggtcctaaacacagtatcgacgggggcacacgtgctgctcggaaaaattctgcagaatcatatgctcgatctcaggataagcaacagcaagttattctggagggccctggccatgcttcagaggttttctggtcagtctaaggccaggtgtatagagtccctgctgcgcgctattcactttccccaacccctgagtgatgacattcgcgcagcccctatctcatgtcacgtgcaggtggcccacgagaaggaacaggttattcccatagcccttctctccctcctctttcgctgcagcatcaccgaggcccaggcccaccttgcggctgctcccagtgtatgcgaggccgtgagatccgccttggcaggcccagggcagaaacgcaccgccgatccactggagatcctagaaccggacgtccagtag

SEQ ID NO: 224614 - DNA, 1659 bp, synthetic construct
  misc_feature 1..1659: note = Description of Artificial Sequence: Synthetic coding sequence
  source 1..1659: mol_type = other DNA
atgaggctgctgccgcttgcaccgggacgcctcaggcggggttctcctcgacatctcccatcttgctctccagcactccttctgttggttctcggtgggtgcctgggcgtgtttggagtcgcggcaggaactcggaggccaaacgtagtgctcctgctgacagacgatcaggacgaggttctgggcggaatgactccactcaagaagacaaaggccttaataggagaaatgggcatgactttttcctccgcctatgttccaagtgctctttgctgcccatctcgggcttcaatattgacaggtaagtatcctcacaatcatcatgtggttaacaacacattagaaggaaactgttcatccaagtcctggcaaaaaattcaggagccgaatacatttcctgcaatcttgcgctctatgtgtggctaccagacatttttcgcgggaaagtacctcaacgaatatggggcacctgacgctggaggattggagcatgtgccccttgggtggtcgtactggtatgctttagagaagaattctaaatactacaactacacactgtcaatcaatggcaaagccaggaaacatggggagaactactctgtggactacttgaccgatgtgctggccaacgtatctttagatttcctcgattacaagagtaattttgaaccattttttatgatgatcgcaacgcccgcacctcatagcccatggaccgctgctccccagtatcagaaagcttttcagaacgtgttcgctcctcgtaataagaattttaacattcatggaacaaataagcattggttgataagacaggctaagaccccaatgactaattcctcgatccaattcctggacaatgcttttcggaagaggtggcagacactgttgtcagtggatgacttagtagagaaactcgttaaaagactcgagtttaccggagagcttaacaacacctatatcttctatacctcggataacgggtatcacactggccagttttccctcccaatcgacaaacgacagctatatgaattcgatatcaaggtcccactcctggtgcgtgggccaggtattaagcccaatcagacatccaaaatgctagtagcaaatatcgatctgggcccaaccatcctcgatatagctgggtacgacctcaacaaaacacaaatggacggaatgtcccttctgccaattctgcgtggtgcatctaatctgacttggcgatctgatgttctggtcgagtaccagggcgaaggacggaacgtgacagacccaacctgcccaagcctctcacccggagtctctcagtgcttccctgattgcgtgtgtgaagacgcctacaataacacttacgcgtgcgtaagaactatgtccgctctgtggaacctgcagtactgcgagttcgatgatcaggaggtgttcgtggaggtttacaaccttactgccgatccggatcaaatcacaaacatcgccaagacaatcgaccccgagctcctcggcaagatgaactatcgtctgatgatgcttcagtcttgcagcggccctacttgtagaacccctggggttttcgacccaggctaccgcttcgacccaagattgatgttcagcaacaggggcagcgttcgcactcgacgcttttccaagcacctgctatag

SEQ ID NO: 224615 - DNA, 1410 bp, synthetic construct
  misc_feature 1..1410: note = Description of Artificial Sequence: Synthetic coding sequence
  source 1..1410: mol_type = other DNA
atgtacgtgccttcagccctctgctgtcccagtcgcgcaagcatcctcaccgggaagtatcctcacaaccaccacgttgtgaataatactcttgagggcaactgctcctctaaatcatggcagaaaattcaggagcctaatacatttcccgctattcttaggtcaatgtgtgggtaccagacgttttttgccggtaagtacctgaatgagtacggagcacccgatgcagggggactggagcacgtgccactggggtggagctactggtatgctctcgagaaaaatagtaaatattacaattatacattgtccatcaatggcaaggcacgcaagcacggcgaaaactatagcgtggactatttaacagatgtactggctaatgtgtccctggactttctggactacaagagcaattttgagcccttttttatgatgattgccacccccgcacctcacagcccctggacggccgcacctcaatatcagaaggcgttccaaaacgtgtttgctcctcgcaataaaaattttaatatccatggcactaataaacactggctgatccgtcaggccaagacaccaatgacgaatagttccattcagttcctggacaatgcctttagaaaacgctggcagacactcctgagcgtagatgacctggtcgagaaattggtgaaaaggctagaattcacaggggaattgaacaatacctacattttttacacttctgacaacggttaccatactggacagtttagtctgcccattgataaacggcagctgtatgagtttgacatcaaagtccccttgctagtcaggggcccaggtatcaaacccaaccaaacttccaaaatgctggtggcaaatatcgatctggggcctacaatactggatatagcgggttatgacctaaacaagacccaaatggatggtatgtctttgctcccaatccttcgcggagccagtaacctgacgtggaggtctgatgtcctggtggagtaccaaggcgaaggccgtaatgtcacagaccccacctgccccagcttatctccaggggtttctcaatgttttcctgactgtgtgtgcgaggatgcttataataacacatacgcctgcgtgaggacaatgagcgccctctggaacctgcaatactgcgaattcgatgaccaggaagttttcgttgaggtgtacaacctcactgccgatcctgaccaaatcacaaacatcgccaagaccatcgaccccgaacttctgggaaagatgaactaccggctgatgatgttgcagtcctgctctgggcctacctgccggacaccgggagtgtttgatcccggataccggttcgaccccagactaatgttctcgaatagaggcagcgttcgaacccgtcggttttcgaagcacttactatag

SEQ ID NO: 224616 - DNA, 1599 bp, synthetic construct
  misc_feature 1..1599: note = Description of Artificial Sequence: Synthetic coding sequence
  source 1..1599: mol_type = other DNA
atgcggttactcccgctagcccctggcagactccgtcgcggatcacctcgccacttaccgtcatgtagcccagcattattactgttggtgctgggtgggtgcttaggggtatttggcgttgccgcaggcactaggaggcccaacgtcgtgctgctgctcaccgacgatcaggacgaagtcctgggtgggatgtacgtaccatcagcattatgttgccctagccgagcgagcattcttaccggcaaatacccccataatcaccatgtggtgaataatactcttgagggcaattgttcttcgaagagttggcagaagatacaggaacccaatacgtttccagccattttgcgatcaatgtgtgggtatcagacttttttcgcagggaagtatctcaacgagtatggtgctcctgacgcaggtgggctagaacatgtgccccttggctggtcttactggtacgccctggagaagaattctaaatactacaattacacgctcagcatcaatggcaaagcaagaaagcatggcgaaaattatagcgtcgattacctcactgatgttctggccaacgtctctctggatttcctggactacaagagcaacttcgagcccttcttcatgatgatcgcaacccccgctccccacagcccatggactgcggcacctcagtaccagaaagcgtttcaaaacgtgttcgcgcctagaaataagaacttcaatatccatggtaccaacaagcactggctcattagacaagctaagacacccatgaccaattcatccatacagtttttggacaatgcttttcggaagcggtggcagaccttgctatccgttgatgacctggttgaaaaattggtgaagcgactggaattcaccggcgaacttaataacacatatatattctatacttccgataacggatatcacactggccaattcagcttgccaattgataagcggcagctctacgaatttgacatcaaggtccccctcctggtacggggaccaggaatcaagccaaaccagacttccaagatgctagtggcaaatatcgacttggggcctaccatcctcgatattgctggatacgatctgaataaaactcaaatggacgggatgtccttgctcccgatccttcgtggagcctcaaatctaacttggcgttccgacgtgctggtcgaataccagggcgagggacggaatgtgacagatcctacctgtccgtccctttcaccaggcgtctcacaatgtttcccagactgtgtgtgcgaggatgcatacaacaacacctatgcttgcgtcaggacaatgtcggccctgtggaacctgcagtactgtgagttcgatgatcaagaggttttcgtggaagtgtacaacctcacagcagaccccgatcagattaccaacatcgctaaaacgatcgacccagagttgctggggaagatgaattataggctgatgatgttgcagagctgtagcggcccaacttgccgcacccctggggtcttcgatccaggataccgctttgacccccgactgatgttcagtaatcgcggatccgtcaggaccagacgcttttctaagcatttgctgtag

SEQ ID NO: 224617 - DNA, 2154 bp, synthetic construct
  misc_feature 1..2154: note = Description of Artificial Sequence: Synthetic coding sequence
  source 1..2154: mol_type = other DNA
atgcccatcggcgactgctcagtcgcagctaaacccagaaaacagctgctttgcagccttttccagaccacactggggtacagggctcgagcctccggatggaagccaatggtaatttgtcggggatcacatgcctttaaagatttgatcaacacatacaggatgatcgagcaggacgacttcgacatcaatacccgtctccataccatagtgcgcggtgaggatgaagcagcaatggttgagtccgtgggactggccttagttaagctaccggacgtattgaatcgcctgaaaccagacataatgatcgtgcacggggataggttcgatgccctggctttagccacttccgctgccctcatgaatattaggatcctccacatcgaggggggtgaagtatccggcaccatagatgactctatacgacatgctataactaagttggcacattaccacgtctgttgcacacgctcagctgaacaacacttaatcagcatgtgcgaagatcatgataggatcctcctggccggttgtccaagttatgacaaactgctatctgccaaaaataaagattatatgtctataatccgtatgtggctgggtgatgacgttaagtccaaagattacatcgtcgcacttcagcaccccgtgacaaccgacatcaagcattctattaagatgttcgagctcacactggacgccctgatttctttcaataaacgcacccttgtgcttttcccaaacatcgacgccggtagcaaagagatggtccgagttatgaggaagaagggaattgagcaccatcccaacttcagagctgtgaagcacgtcccttttgatcagtttatccagttagtggcccacgctgggtgtatgattggtaattcctcgtgtggtgtccgcgaggtaggtgccttcgggacccccgttatcaacctgggcacacggcagattggcagggaaactggggaaaatgtgctgcatgtacgtgacgctgatacccaggacaaaatcctccaggctctccatctccagtttggcaaacagtatccgtgcagcaagatttacggcgatggcaatgccgtgcccaggatactcaagtttctgaagagtatcgatctgcaggagccgctccaaaagaagttttgtttccccccagtgaaggagaatattagtcaggatatagatcacatactcgagaccctatctgcactcgcggtggacctcggagggaccaacctgcgggtggctatcgttagtatgaaaggggaaattgtgaagaaatacacccagtttaatcctaagacttacgaggagcgtataaatctgattctgcagatgtgtgtggaagccgcagcagaagccgtcaaactaaattgtcggatcctcggggtgggcatcagtacggggggaagggtcaatccgagagaaggaattgtgctgcacagcacaaaattgattcaggagtggaatagtgtcgaccttcgcacccccctgtctgataccctacacctcccagtctgggtggataatgacggaaattgtgccgctctggctgagcgtaagttcgggcagggcaaaggactggagaatttcgtaacactgattacagggacaggaattggtgggggtataattcaccaacatgaactgattcacggaagcagcttttgtgcggcagagcttggacatctggtggtgagtttagacggcccagactgctcttgtgggagtcatgggtgcatcgaagcctacgccagtgggatggctctgcagcgggaggctaagaagttgcatgacgaggacttattactggttgagggcatgtccgttcccaaggacgaagccgttggcgctcttcaccttatccaagcagcaaaactggggaatgcaaaagcacagtccatcttgcgaaccgcagggactgctctaggcctcggggtcgtgaacatactccacactatgaacccgagtctggtgatcctgagtggcgtgttggcaagccattatatccacatagtgaaggatgtgatccgtcagcaagcgctgagctctgtgcaggacgtggatgtggtggtgtccgatctagtggaccctgcactccttggcgcagccagcatggtcctggactacaccacgcggaggatatactag

SEQ ID NO: 224618 - DNA, 2169 bp, synthetic construct
  misc_feature 1..2169: note = Description of Artificial Sequence: Synthetic coding sequence
  source 1..2169: mol_type = other DNA
atggagaagaatgggaataataggaagctgcgtgtttgtgtggcaacatgcaatagggcggattactccaagctggccccaattatgttcggaatcaagactgagcccgaattcttcgaattggacgtcgtggtccttggcagccacctgatcgatgattacgggaacacttatcgtatgatcgaacaggatgattttgacatcaacactagactgcacacgatcgttaggggggaggacgaagcagctatggtggagtctgtcggtttagccttagtcaaacttcccgatgtcctgaaccgcctgaaacccgatattatgatcgtgcacggtgaccgatttgacgcacttgcgttggctacatccgcagctctgatgaatatcaggattctgcatatcgaaggcggagaagtctccggaaccatcgatgactccatacggcatgccatcaccaagctcgctcattatcacgtatgttgcacccgcagtgccgaacagcatctgatttccatgtgtgaagatcacgaccggatcttgctcgcaggctgtccttcttatgataaattgctttcagccaagaacaaggactatatgtccatcatacgtatgtggctcggagacgatgtcaagtccaaagattacatagttgcgctgcagcaccctgtgaccactgacattaagcactccattaagatgtttgagctgaccttagacgccctcatatcatttaataagagaaccctcgtgttattccctaatatcgacgcagggtctaaggaaatggttagagttatgagaaaaaaggggatcgaacaccatccaaattttagagctgtgaaacacgtcccatttgaccagtttattcagcttgtggctcatgccggttgtatgatcggtaactcctcctgtggggtcagggaggtgggagcattcgggaccccggtgattaacttggggacgcggcaaattggacgtgaaactggggaaaacgtgctgcacgtgcgggatgctgacacccaggacaagatccttcaggctctccacctacagttcggtaaacagtatccctgcagtaagatttatggcgacggaaacgcagttccacggattttgaagtttttaaagtctattgaccttcaggagcccctccagaagaaattctgcttcccgccagttaaggagaacatctcacaggatatcgatcacattttagaaacactctccgccctggcagttgacctgggaggaacaaacctgagagtggctattgtgagcatgaagggtgaaattgtgaagaagtatactcagttcaacccaaaaacatacgaggagagaatcaacctaatactacagatgtgcgtggaagcggctgccgaagcagtgaaactgaattgcaggatcctgggggtgggaatcagcacgggaggcagagtgaatccacgagagggcatcgtgctgcatagtacaaaactgatccaggagtggaattctgtcgatcttagaaccccactctccgacactttacacctcccagtctgggtggataacgatggcaactgcgccgcactagccgaaaggaagttcggccagggtaaaggtctggagaattttgttactcttatcactgggacaggcatcggcggagggattattcatcagcacgagctgatccatggctcgagcttctgtgctgctgaattaggccacttggtggtttcactggatggacctgactgttcttgcggctcacatggctgtattgaagcttacgcctctgggatggctctccaacgcgaggctaagaaactgcacgatgaggaccttctcctggttgagggaatgtccgtccctaaggacgaggcagtaggcgctctgcatctgattcaggccgcaaaactgggaaatgcaaaagcccaatccatactccggacagccggaacagccctgggacttggcgtggtgaatattctgcacaccatgaatccatcactcgttatactttcaggagtgttggcctcacactacatccacattgtgaaggacgttatcaggcaacaagccctatcgtcggttcaggacgtagacgtcgtggtgtctgatctggtggatcctgccctgctgggcgcagcatctatggtgcttgattacactacccgccgaatctactag

SEQ ID NO: 224619 - DNA, 2262 bp, synthetic construct
  misc_feature 1..2262: note = Description of Artificial Sequence: Synthetic coding sequence
  source 1..2262: mol_type = other DNA
atggagacctatggctacctgcagagggaatcatgtttccagggaccccacgagctgtacttcaagaatcttagcaagcgcaacaaacagattatggaaaagaatggaaacaaccgcaaactgcgagtttgcgttgcaacctgtaaccgtgctgattatagtaagctagcgcctatcatgtttgggatcaagactgagccagagttctttgagttggatgtagtcgtattggggtctcacctcatcgacgattatgggaacacttatcggatgatagagcaagacgatttcgacatcaataccagattacatactatcgtgagaggagaggacgaggcggctatggtagagtctgttggccttgcgctggtcaagcttcctgatgtgctgaataggttgaagccggacattatgatagtccatggggacaggttcgatgctctcgctcttgctacctctgcagcacttatgaacatccgtatactgcatatcgagggaggggaagtctctggaactatcgacgattccatacggcatgcaatcacaaagctggcccactatcacgtttgttgcactcgaagcgctgaacagcatttgatctcaatgtgcgaggatcatgatcgcatactccttgcaggctgcccttcgtatgataagctcctcagcgctaaaaacaaggattacatgtccatcatcagaatgtggctcggggacgatgtaaaatcaaaggactatatcgtagccctgcaacaccccgtgactactgatataaagcattccatcaaaatgtttgagctaactctggatgccctcatttccttcaacaagcgcaccctggtgttattcccgaacatcgatgccggatccaaggaaatggtccgcgtaatgagaaaaaaagggatagaacaccatcccaattttcgcgcagtgaagcacgtccctttcgatcagttcattcagttggttgctcatgcaggatgcatgataggcaattcctcctgtggagtgcgagaggttggggcttttggcacgccagtcataaacctcggaactagacaaattggcagggagacaggtgagaatgtactccatgtaagagatgccgatacacaggataagatcctgcaggccctccacctacagtttgggaagcaatacccctgctctaagatctatggtgatggaaacgctgtcccacgtattcttaagtttttgaaatctatcgatctccaggagcccttacagaaaaagttttgtttccccccagttaaggaaaacatctctcaggacattgaccacatcctcgagacactgtccgccctcgccgtggacctgggtggaacaaatctgagggttgcgatagtatctatgaaaggagagatcgtgaagaaatacacacagtttaaccccaaaacctatgaggagaggatcaatctcatcctgcagatgtgcgtggaggcagccgcagaagctgtgaagctgaactgcagaatcctaggggtggggatttctactggtggacgtgtcaacccgagagagggaatagtgttacacagcactaaactgatccaggagtggaattcggtggacctcagaactccattaagtgataccctgcatctgccagtgtgggtggataacgatggcaactgcgccgctctggccgagcgcaagtttggacaggggaaaggattagaaaactttgtgacactgatcacagggacagggataggaggcggtatcatacaccagcatgagctgatacatggctcttccttctgtgccgcagaacttgggcacctggttgtgtcccttgatggtcctgactgttcttgtggctcgcatggttgcattgaggcctacgcatccggcatggccctccagcgggaagctaagaaattgcacgacgaagatctgctgttggttgaaggtatgagcgtaccaaaagacgaggctgtcggagcgctgcatttgattcaggccgcaaagttggggaacgctaaggcgcagtctatactgagaaccgccggaacagccctgggactgggcgttgtcaacatcctacacaccatgaatccatccctggtcatactgtctggggtactagcatcacactacatacacatcgtgaaggacgtaatccgacagcaggccctgtcgtctgtgcaggacgtcgacgtcgtggtgtcggaccttgtggatcctgccctgttaggagctgcttccatggttcttgattacactacacgtaggatctattag

SEQ ID NO: 224620 - DNA, 399 bp, synthetic construct
  misc_feature 1..399: note = Description of Artificial Sequence: Synthetic coding sequence
  source 1..399: mol_type = other DNA
atgttcgagttgactctcgacgctcttatcagcttcaataagaggacccttgtgcttttccccaacatagacgccggttcgaaggagatggtgcgtgtgatgagaaagaaaggcatcgaacaccaccctaacttcagagctgtgaagcatgtgcccttcgaccagttcatccagctcgtggcccacgcaggatgcatgatcggaaactcaagctgtggtgtgcgagaggtcggggctctgacgaggctgtacacatacgtgagttgctataaacacacacatacacacacccacacccatccttcttcctctaatcccaaacttcgcagtcagaaagtgatccaatccgaaaaccgcggtaaatcttatcaagagggtctgaaatacaccttcttctag

SEQ ID NO: 224621 - DNA, 2169 bp, synthetic construct
  misc_feature 1..2169: note = Description of Artificial Sequence: Synthetic coding sequence
  source 1..2169: mol_type = other DNA
atggaaaagaatgggaataatcggaagctacgtgtttgtgttgccacctgcaaccgtgcagactacagcaaactggcccctatcatgtttggcatcaagactgagcctgaattttttgagctggacgtcgtcgtgctcggctcccacctcattgatgattacgggaacacataccgaatgattgaacaggatgactttgacatcaacacacgcttgcacactattgtccggggagaagatgaggctgcaatggtggaatctgtggggctcgcactggtgaagcttccagacgtgcttaacaggctgaagccagatatcatgatcgtgcacggcgacaggttcgatgcactcgctctggctacatcagcagctttgatgaacattagaatactccatatcgaaggcggtgaagtgagcggtaccattgacgatagtattagacatgccataacaaaactggcacactatcatgtgtgctgtactcggtcagccgaacaacacctcatttcaatgtgtgaagaccatgatagaatacttttggccggatgcccaagttatgacaagctgctgagcgcaaagaataaggattacatgtccatcattcgtatgtggctgggcgacgatgtgaagtctaaggactacatcgtcgccctgcagcaccccgtgaccactgacatcaagcacagtataaaaatgttcgaactcacgctcgacgccctgatctcatttaataagcgcactttggtccttttccctaacatcgacgccggttcaaaggagatggtgagagtgatgcggaaaaagggaatcgagcatcaccccaacttccgagcggtgaaacacgtgccattcgatcagttcatccagctagtagcccatgccggatgtatgatcggcaactcttcttgtggggtgcgggaagtgggagctttcgggacgccggtgattaatctgggaactcggcaaattggtagggaaacaggagagaatgtcctccacgtccgtgatgccgacacacaggacaaaatattgcaagcgctacatctgcagtttggaaaacaatacccgtgtagtaagatctatggagacggaaacgcagttccacggatacttaagttccttaagtctatagatctccaggaacctctgcagaagaagttctgcttcccccctgtaaaggagaacatctcacaagatatagaccacattttggagacactgtcagcactcgccgtcgacttgggcggaacaaatcttcgtgtcgccattgttagtatgaaaggggaaatcgtgaagaagtatacccagttcaaccctaaaacgtatgaggagcgaattaaccttatcctgcagatgtgcgtggaagccgcagctgaggctgtcaagctgaattgcagaattctaggcgtcgggatatcaactggcggacgggtaaacccccgtgagggtattgtactgcattcaacaaagttgattcaggaatggaattctgtcgacctgcgcactcctctgtccgacacattgcacctcccagtctgggtggacaatgacggcaactgtgccgcactggccgagaggaaattcgggcaaggaaagggcctggaaaactttgtgaccctcattacaggcacaggtataggcggaggtattattcatcagcatgaactcatacatggatcatccttttgtgccgcagagctgggccacttagtcgtcagcttggacggaccagattgcagctgtggatcgcacggatgcattgaagcttacgcctctgggatggcactacagcgggaagcaaagaagctgcacgatgaggacctccttttagtggagggtatgtcagtccctaaagatgaagcagtgggcgctctgcacctcatccaggcagccaaactcggtaacgccaaggcacaaagcatcctgaggacagccggaaccgccttgggcctcggggtagtcaacatattgcacacgatgaacccttcattagtgatcctctctggggtgttggcgtcccattacatccacattgtaaaagacgtgatccgacaacaagctctttcctctgtgcaagacgtcgacgtcgtcgtcagcgacctggtcgatcctgccctgctcggagcagcctctatggtgctggattatactacacgcagaatctattag

SEQ ID NO: 224622 - DNA, 1947 bp, synthetic construct
  misc_feature 1..1947: note = Description of Artificial Sequence: Synthetic coding sequence
  source 1..1947: mol_type = other DNA
atggaaaagaatggaaataatagaaagctccgcgtctgcgtggccacctgtaaccgagccgattacagcaaactcgctccaataatgttcggaattaaaactgaacccgaattcttcgagctcgacgtggtggtcctgggctctcatcttattgatgattatggcaacacctaccgcatgatcgaacaggatgacttcgatatcaacacacggttacacaccatcgtgcgtggggaggacgaggcagctatggtggaaagcgtcgggctggctctggttaagctgcccgacgtgctaaaccgtcttaaaccagatataatgattgtgcatggtgaccgctttgacgccctcgcactcgcaacaagcgctgctctgatgaacattcggattctgcatatcgagggcggagaggtgtccggtactatcgacgactccatccgtcacgccatcaccaagctcgcacactatcatgtttgctgcacccggagcgccgaacagcatctgatctcaatgtgcgaggatcatgaccggatcctgctcgccggatgcccctcttatgataagctcctgagtgctaagaataaggactacatgagtatcatccgcatgtggctcggtgatgacgtgaagtccaaagattatatcgttgcactgcagcatcctgtcactaccgacataaagcatagtatcaagatgttcgaactgaccctcgatgcattgatttcgtttaacaagcgaacgctggtgctctttccaaatattgacgcgggatcgaaggagatggtgagggttatgcgaaagaaaggaatagagcatcaccccaactttcgtgctgttaagcatgtgccattcgaccaattcatccagttggtggcccacgccggatgcatgattggcaacagctcatgtggagtgcgggaggtcggcgctttcggaactcccgtgattaatctgggaacgcgacagataggaagagagaccggggagaatgtcttgcacgtaagggacgcggacacccaggacaagatcctacaggccctgcatttgcagttcggaaagcagtacccttgctctaagatctatggagacggcaatgctgttccaaggattctcaagtttctcaagagtattgatctgcaggagccattacagaaaaagttctgcttcccacccgtgaaagagaacatttcccaagatatcgaccacatcctcgaaaccttaagcgcactggccgtcgaccttggtggcactaacctacgagttgccatagtttccatgaagggcgagatcgtcaagaaatacacccagttcaaccctaaaacatatgaagaaaggattaacctcatattacagatgtgcgttgaagccgctgctgaggccgttaagctcaactgcagaattttaggcgtcggtattggcggagggatcattcatcagcatgaattgatacacggctctagtttctgcgcggctgaacttgggcatttagtagtgagcctggatgggcctgactgctcttgtggtagccacggctgcattgaggcctatgcttccggtatggccctacagcgggaagctaagaaactgcacgatgaggatcttttgctggtggagggcatgagcgtgccgaaagacgaggcagtaggcgcactgcacctgatccaggccgctaaattggggaatgctaaggcacagagtattcttagaaccgccggaacagccctaggcctgggggtagtgaacatcctccacactatgaacccctccctagtgattttgagtggggtgttggcttcacattatatccatattgtgaaagacgtcatcaggcagcaagccttgtccagcgttcaggacgtcgacgtcgtcgtgagtgacctagttgatcctgcattgttaggcgctgcctccatggtcctcgactacaccactagacggatttactag

SEQ ID NO: 224623 - DNA, 1839 bp, synthetic construct
  misc_feature 1..1839: note = Description of Artificial Sequence: Synthetic coding sequence
  source 1..1839: mol_type = other DNA
atgattgagcaagacgactttgacatcaacacccgcctgcataccatcgtccgaggagaggacgaggctgccatggtagaatcagtggggctggccctggtgaaactcccggatgtcttgaataggctgaaacccgatatcatgatcgtgcatggggaccgcttcgacgccctggctctggcaacatcagctgcccttatgaatattagaattctgcacatcgagggaggcgaggtgtccggcactatcgatgacagcatcaggcacgccatcacaaaactagctcactaccacgtctgctgtaccagatctgccgaacaacatctgatctcaatgtgtgaggatcatgaccggattctactcgcgggatgccccagttacgacaaactgttaagtgcgaaaaataaggattacatgtcaattatcagaatgtggctgggttctaaggagatggtgagagtcatgcgcaagaagggcatcgaacatcatccgaatttccgggctgttaagcacgtccccttcgatcaatttatccagctcgtggcccatgccggatgcatgatagggaactctagctgtggcgtgagagaggtgggcgcatttggtacgcccgtaataaacctcggaacaaggcagatcgggagggagaccggcgaaaacgtgctccacgtcagggatgccgatacacaggacaaaatcctccaggcacttcacctacaatttggcaaacagtacccctgcagcaaaatttacggagatggtaatgccgttccgcgtatactaaagtttctgaaaagcatagatcttcaagaacctcttcagaaaaagttctgtttcccccctgtgaaggaaaacattagtcaggacatcgaccacatcctggaaacactgagcgccttagcagttgatcttggcggtactaacctaagggtggcaatcgtgagcatgaaaggtgagatcgttaaaaaatatactcaattcaaccctaaaacatatgaagagaggataaacctgatccttcagatgtgcgtggaggccgcagctgaggctgttaagctcaattgtcgcatactcggggtgggcatttccaccggcggaagagtgaatccgagggaaggtatagttctgcactccactaagctgatacaggagtggaatagtgtcgacttaagaacgccattgagcgacactctccacctaccggtgtgggtggacaatgacggaaactgcgccgcactggcggagcggaagttcggacaagggaaaggcctggaaaatttcgtcactctcatcacggggacgggcattgggggagggatcatacatcagcatgagttaatacacggaagctctttctgtgccgctgaactgggtcatctcgtggtatcactggacgggccagactgctcttgcgggagccatgggtgcatcgaagcttatgccagtggcatggccctgcagagggaggccaagaagttgcatgacgaggacctcctgctagtggaagggatgagcgtgcctaaagacgaagccgttggcgctctccatttaattcaagctgccaagctgggaaatgccaaggctcaatccatcctgcgcaccgctggcactgctctgggattgggtgtggtaaacattctgcacaccatgaacccttccctggtgatactctcaggtgtgctggccagccattacattcatattgtgaaagacgtgatacgccagcaagccctgtcctccgtgcaagatgtcgatgtcgtcgtctccgatcttgtggaccccgcattactgggggctgccagcatggtgcttgattacactactcgtaggatctactag

SEQ ID NO: 224624 - DNA, 870 bp, synthetic construct
  misc_feature 1..870: note = Description of Artificial Sequence: Synthetic coding sequence
  source 1..870: mol_type = other DNA
atgaagctgataattcttgagcattactcccaggccagtgaatgggcggcaaagtacatccggaacaggattatccagttcaaccctggccctgaaaaatattttacgctcgggctgcccactggctctacgccacttggctgttacaaaaagctgatcgagtactacaagaatggcgacttaagtttcaagtatgtgaagacatttaacatggacgaatacgttggtctccccagggaccaccccgagagctatcactctttcatgtggaacaactttttcaagcatatcgacatacacccggaaaacacccatatactggacggcaacgcggtcgacttgcaagctgagtgtgatgcattcgaggagaagattaaagcggcaggcggaatcgaactcttcgttgggggtatcggcccagatggccacattgccttcaacgagccaggctcttcactggtgtcgaggacccgagttaaaaccctggccatggacactattctcgccaatgcgaggttcttcgacggagagctcacgaaagttccaacaatggcattgacagtgggcgttggcaccgtgatggacgccagggaggtaatgattctgattactggcgcacataaagcttttgccctgtacaaggcaatcgaggagggagtgaaccatatgtggaccgtctcagcctttcagcagcatcctaggactgtgttcgtttgcgacgaggatgccactttagagttgaaggttaagactgttaaatattttaaaggattgatgctggtgcacaacaaactagtggatccactgtactcgatcaaagaaaaagagacagagaaaagccagtctagcaaaaaaccttattccgactag

SEQ ID NO: 224625 - DNA, 768 bp, synthetic construct
  misc_feature 1..768: note = Description of Artificial Sequence: Synthetic coding sequence
  source 1..768: mol_type = other DNA
atgaaacttattatcctggaacattacagtcaggcgtccgaatgggctgcaaagtatattcgcaaccggatcattcagttcaacccaggtccagaaaaatattttaccctgggcttgcctacaggtctgccgagggaccaccctgagtcctaccatagcttcatgtggaacaactttttcaagcacattgacatccaccccgaaaatacccacattttggatgggaacgccgtagacctgcaagcggaatgtgacgccttcgaagaaaagatcaaagccgcagggggaatcgagttgtttgtgggaggtatcggccctgacggccatattgcctttaacgagccaggttcttcacttgtgagcaggactagggtcaagacattggccatggatacaatccttgccaatgccagattctttgatggggaattgaccaaggtaccaacaatggctctgacagtgggcgtgggcaccgtcatggacgctcgcgaggttatgattctaatcaccggagctcacaaagcgttcgccctgtataaagccattgaggagggagtgaaccacatgtggaccgtctctgctttccagcagcatccaagaactgtctttgtgtgtgatgaagacgcaactctcgagctgaaagtcaagacagttaagtactttaagggtctgatgctggtgcacaataagcttgttgatccactgtactccatcaaagagaaagaaacggagaagtcacaatctagcaagaaaccgtattccgactag

SEQ ID NO: 224626 - DNA, 870 bp, synthetic construct
  misc_feature 1..870: note = Description of Artificial Sequence: Synthetic coding sequence
  source 1..870: mol_type = other DNA
atgaagctcatcattctcgaacactattcacaggcttcagagtgggccgcaaagtacatcagaaataggataattcagtttaatcctggccctgagaaatatttcactctcggtctgccgactggatctacccctctgggttgctacaagaaactgatagagtactataagaatggagatctttctttcaagtatgtgaaaaccttcaatatggatgaatatgttggactcccacgagaccatcccgagtcctatcactcatttatgtggaataattttttcaagcacattgatattcatcccgagaatacccacatactcgacgggaatgcggtagacctacaagcggagtgtgatgcgtttgaagaaaaaattaaggcagcgggagggatcgaactctttgttggaggaatcggtcctgacggccatatcgcctttaatgaacctgggtccagtcttgtgtctcggactcgggtgaaaacacttgccatggacaccatcctggccaacgcgaggttcttcgacggagagctaaccaaagtgcctactatggccctgaccgtcggtgttggtaccgtgatggacgctagagaagtgatgatactgatcacgggcgcacacaaggccttcgctctttacaaagccatcgaggagggcgtcaatcacatgtggaccgtatcagcattccagcagcacccacgcacagtgtttgtatgcgatgaggacgcaacacttgagctcaaggttaagaccgttaagtatttcaagggcctaatgctggtgcacaacaaattagtggatccgctctacagcattaaggaaaaggaaacggagaaatctcagagtagcaagaaaccatactcagattag

SEQ ID NO: 224627 - DNA, 417 bp, synthetic construct
  misc_feature 1..417: note = Description of Artificial Sequence: Synthetic coding sequence
  source 1..417: mol_type = other DNA
atgaaattaattatcttggagcactactctcaagcaagtgaatgggctgcaaagtatattcgcaatcgtattatccagttcaaccccggacccgaaaagtacttcactctgggcttgcctactggctccactcctctgggatgctacaaaaagctgattgaatactacaaaaatggcgacctgagcttcaagtacgtcaaaaccttcaatatggatgaatacgtgggcctgcccagggaccatcccgagtcctaccattcattcatgtggaataactttttcaaacacatcgacattcaccctgagaacacacatatcctggatgggaacgctgtggatctgcaagccgagtgtgacgccttcgaggagaagattaaagccgctggagggattgaactcttcgtgggtgggatctag

SEQ ID NO: 224628 - DNA, 870 bp, synthetic construct
  misc_feature 1..870: note = Description of Artificial Sequence: Synthetic coding sequence
  source 1..870: mol_type = other DNA
atgaagctcattatcttggagcattactcccaagccagcgagtgggccgctaagtacattagaaaccgcattattcaattcaatcctggcccagagaaatacttcactttgggactccccacgggctctacccctctgggctgctataaaaaactgatcgagtactataagaatggagatctctccttcaagtacgtcaaaaccttcaatatggatgaatatgtggggctccctagagatcacccagagtcctaccatagtttcatgtggaataatttctttaaacacattgacatccatcccgagaatacccatatcctggatggtaacgcagtggatctgcaggctgagtgtgacgccttcgaggaaaaaataaaggctgcaggcggaatcgagctgtttgttggcggaattggacctgatggccatatagcctttaacgagcccggttcttctcttgtatccagaacacgggtcaagaccctcgctatggataccatcctcgcgaacgccaggtttttcgatggcgaattaactaaggtccctacgatggccttgactgtgggtgtgggcactgttatggatgctagagaggtgatgatcctcataacaggcgcacataaagccttcgcactgtataaggcaatagaggaaggtgtcaatcatatgtggactgtgtccgcatttcagcagcacccccgtactgtgtttgtgtgcgacgaggacgccaccttagaactgaaggtcaaaacggtcaaatatttcaagggcctgatgttggttcacaacaagctcgtggaccctctgtattccatcaaagaaaaagagactgaaaagtcacagtcaagcaagaagccttacagcgactag

SEQ ID NO: 224629 - DNA, 90 bp, synthetic construct
  misc_feature 1..90: note = Description of Artificial Sequence: Synthetic coding sequence
  source 1..90: mol_type = other DNA
atgaagctaatcatcctcgagcattatagtcaggccagcgagtgggctgccaaatatatccggaatcgcataatccagttcaacccatag

SEQ ID NO: 224630 - DNA, 870 bp, synthetic construct
  misc_feature 1..870: note = Description of Artificial Sequence: Synthetic coding sequence
  source 1..870: mol_type = other DNA
atgaagttgatcatcctggagcactattcccaggcctccgagtgggctgcaaaatacatcaggaatcgaattattcaattcaatccagggccagagaagtacttcaccctagggctgcccacaggaagcacacctctcggctgttacaaaaaattgatcgagtactataaaaacggtgatctctccttcaaatatgttaaaaccttcaatatggacgagtatgtcggcctacccagggatcaccctgagtcttatcactccttcatgtggaataatttctttaagcatattgacatccatccagaaaacacgcacatattagacgggaacgcggtcgacctgcaggccgagtgcgacgcctttgaggaaaaaataaaggcagctggtggcatcgaacttttcgtggggggtattggaccagatggccatatcgccttcaatgaaccaggttcttcgctggtctcaagaaccagggtcaaaactctcgctatggacaccatcctggccaacgccaggttcttcgacggagagctgacgaaagtccctactatggcactcactgtaggagtggggacagtgatggatgcacgagaggtgatgattctgatcaccggagcgcataaggccttcgctctctacaaggctattgaggaaggggtgaatcacatgtggaccgtcagtgcgttccagcaacacccacgcaccgtatttgtttgcgacgaagacgccacactggagctcaaggtaaagacggttaagtacttcaaaggcttgatgttggttcacaacaagttagttgaccctctttatagcatcaaagagaaggaaaccgagaagtcccagtcctccaagaagccatacagtgactag

SEQ ID NO: 224631 - DNA, 486 bp, synthetic construct
  misc_feature 1..486: note = Description of Artificial Sequence: Synthetic coding sequence
  source 1..486: mol_type = other DNA
atgaagctgattatcctggagcactactctcaagctagcgagtgggctgccaaatatattcgaaataggataatccagtttaatcccggtccagagaaatatttcacactcgggttacccaccggctccacgcccctgggctgctataaaaagcttattgaatattataaaaacggcgatctgtccttcaagtatgtcaaaacctttaatatggacgaatacgtaggtcttcccagagatcatccagagagctaccacagctttatgtggaataacttcttcaaacatatcgacattcatcctgagaatacccacatcctcgacggcaatgccgtggatctgcaggcagaatgcgacgctttcgaggaaaagatcaaggccgcaggaggtattgagctgttcgtgggaggaattggtcccgatgggcacatcgcatttaatgagcctggtagcagccttgtgtcccgcaccagggtcaagacctag

SEQ ID NO: 224632 - DNA, 639 bp, synthetic construct
  misc_feature 1..639: note = Description of Artificial Sequence: Synthetic coding sequence
  source 1..639: mol_type = other DNA
atgaagctcattatcctggaacactattctcaggccagcgaatgggcagcaaagtacattcgcaacagaataatacagtttaaccctggccctgagaaatacttcacgctggggctcccgaccggatcaaccccactcggatgctataagaaattgattgaatactacaagaacggagacctcagctttaaatacgtaaaaacgtttaacgaacccggaagctctctcgtatctcgcacacgcgtgaagacattggcgatggacaccatcctggcaaatgcgcgtttcttcgacggagagttaaccaaggtgccaacaatggccctaactgtaggggtgggcaccgttatggatgcaagagaggttatgatactgattactggcgcacataaggcttttgcactatataaggctatcgaagaaggcgtgaatcacatgtggaccgtgagcgcgtttcagcagcaccctcggaccgtcttcgtctgcgatgaagacgccactttagaacttaaagtcaagacagttaagtatttcaaaggactgatgcttgtacataacaaactcgtcgatcctctgtattctattaaagagaaagagacggaaaagtctcagagcagcaagaagccttactctgactag

SEQ ID NO: 224633 - DNA, 831 bp, synthetic construct
  misc_feature 1..831: note = Description of Artificial Sequence: Synthetic coding sequence
  source 1..831: mol_type = other DNA
atgagactcgtgatcctggacaattacgatctggccagcgaatgggctgctaaatacatttgcaatcggataatccaattcaagcctgggcaggaccggtactttactcttgggctgcctacaggcagtaccccgctcgggtgttataagaagttgattgaataccacaaaaatgggcacctctcatttaaatatgtcaagacttttaatatggatgagtacgtgggcctgcctaggaaccaccctgagagctaccattcatatatgtggaacaacttttttaaacatattgacatagatcctaacaatgcacacattctggatgggaacgcggcagatttacaggctgagtgtgacgctttcgagaataaaattaaggaagctggcggtatcgacctgttcgtgggaggtatcgggccagacggacatattgcattcaacgagcccggttcctcactggtcagccggaccagattgaaaaccctcgctatggatacaatccttgcgaatgctaagtactttgatggcgacctgtcgaaggtgcccacgatggcccttacagtgggcgtgggcacggtgatggatgctcgcgaggtaatgattctgattaccggagcacacaaagcgttcgctctgtataaggccattgaggaaggcgtgaaccatatgtggaccgtctccgcttttcagcagcacccgagaaccatcttcgtctgtgacgaggatgcaacactggaactacgggttaaaaccgttaaatactttaagggccttatgcacgtacataataagctggtcgatccactcttttcaatgaaagacggaaactag

SEQ ID NO: 224634 - DNA, 780 bp, synthetic construct
  misc_feature 1..780: note = Description of Artificial Sequence: Synthetic coding sequence
  source 1..780: mol_type = other DNA
atgcggctcgtgatccttgataactacgacctcgcttctgagtgggccgcaaagtatatctgtaatcggatcatccaatttaagcccggacaggaccggtactttacgctgggcttaccaactgggtccacaccgctgggatgttataagaagctcatcgaataccacaagaatggccacctgtccttcaagtacgtcaagaccttcaatatggatgagtacgttgggttgcccagaaatcacccagagagctaccacagttacatgtggaataattttttcaagcatatcgacattgacccaaataacgcccacatactggacggcaatgctgcagatctacaagcagagtgtgacgctttcgaaaataagatcaaagaagctggcggtatagatttgttcgttggcggtattgggccagacgggcacattgcatttaatgaaccgggatcgagtctggtttctcggaccaggctgaagactttggctatggacaccatcctggccaacgccaagtacttcgatggtgatctgtcaaaggtgccaactatggctctaaccgtcggagtgggaacagtgatggatgccagggaggtgatgattttgataactggagcgcataaggcctttgccttatacaaggccatagaagaaggcgtcaaccatatgtggacagtgtcagcttttcagcagcatccaagaaccatattcgtatgcgacgaggacgctaccttggagctgagggtgaaaactgtgaagtatttcaaaggcgaacactag

SEQ ID NO: 224635 - DNA, 729 bp, synthetic construct
  misc_feature 1..729: note = Description of Artificial Sequence: Synthetic coding sequence
  source 1..729: mol_type = other DNA
atgcgactggtaatccttgataactatgatcttgcaagcgagtgggctgcgaagtacatatgcaataggataatccagtttaaaccaggccaggataggtactttactttgggcctaccaacaggactccctcggaaccaccccgaaagctaccacagctacatgtggaataatttttttaagcatattgacattgatccaaataatgctcatattttggatgggaatgctgccgatctacaggcagagtgtgatgccttcgaaaacaagatcaaggaggctggtggtatcgacctgtttgtggggggtattggccctgacgggcacatagcgttcaatgaacctggttcaagcctcgtatctcgaacccggctgaagaccctggcgatggatacaattcttgccaacgccaaatatttcgatggagacctgtccaaggtccccacaatggcacttaccgtgggcgtcggcacagtgatggacgcacgggaagtcatgattctgataaccggggcacataaggcttttgcactgtataaggccattgaggagggcgtaaaccacatgtggactgtgtccgccttccagcagcaccctcgaaccatatttgtctgtgatgaggacgctacgcttgaactgcgcgtaaaaacagtaaagtatttcaaagggttaatgcacgtgcacaataagctggtcgatcccctgtttagtatgaaagacggtaattag

SEQ ID NO: 224636 - DNA, 1287 bp, synthetic construct
  misc_feature 1..1287: note = Description of Artificial Sequence: Synthetic coding sequence
  source 1..1287: mol_type = other DNA
atgctgagaacactcctccgacgaaggcttttctcctacccaaccaagtactatttcatggtactcgtgctttccctcattacgttctctgtattgcggatccatcagaagccagagtttgtgtctgttagacatctggagctggcaggcgaaaatccatccagtgatataaattgcactaaggtgttgcagggggatgttaatgaaatccagaaggttaagctggagatactcacggtgaagttcaagaaacgccctcgatggaccccggacgactacatcaatatgacctccgactgctcatccttcatcaagaggaggaagtacattgtggaacctctgtcaaaagaagaagcggagtttcccatcgcttatagtattgtggtccaccataaaatcgagatgctggatcggcttctgagagccatctacatgccccagaatttttattgcatccatgttgataccaaatctgaggacagctacctagctgctgtgatgggtatcgccagttgtttttcgaacgtatttgtcgcctcgagattagaatccgtagtgtatgcaagctggagtagagtccaggctgacttaaactgcatgaaagacctgtacgccatgtccgctaattggaagtatctgatcaacctttgtggtatggatttccccattaagacaaacctggaaatagtgaggaagctcaagcttcttatgggcgagaataatctcgaaactgagagaatgccctctcacaaagaggagcgatggaagaagcgttacgaggtcgtgaatgggaagctaaccaatacgggaacagtgaagatgctgcccccactggagacccccctattctctggaagcgcatacttcgtggtctcccgggagtatgtgggatacgttttacaaaatgagaagatccagaaactaatggagtgggctcaggacacgtattcacctgatgaatatttgtgggccacaattcagcgcatcccagaggtccctggaagcttgcccgcttcacataaatacgacctctccgatatgcaggcggttgccagattcgttaagtggcaatactttgaaggggatgtatccaagggcgctccgtaccctccctgcgatggggtgcatgttagaagtgtctgcatctttggggctggagacctaaattggatgctcaggaaacaccacctgtttgctaacaagttcgatgtcgacgtggacctcttcgcgattcagtgcctggacgagcacctaagacacaaagcccttgagactctaaagcattag

SEQ ID NO: 224637 - DNA, 1287 bp, synthetic construct
  misc_feature 1..1287: note = Description of Artificial Sequence: Synthetic coding sequence
  source 1..1287: mol_type = other DNA
atgttgcggactttgctcaggcgaagactgttcagttaccctacaaaatattacttcatggtgctggtgctgtcgctgattaccttttctgtgctccgaatccatcagaagccagagttcgtctccgtccggcacttagagttggccggagagaatccaagcagtgatataaattgcactaaagtcttgcaaggtgatgtcaacgagatccagaaggttaagctcgaaatcttgaccgtgaaatttaaaaagagacctaggtggactcccgatgactacatcaatatgaccagcgattgctccagttttattaaaagacgcaagtacatcgtggagccacttagcaaagaagaggcagagttcccaatagcctattccatcgtggtccatcacaagatcgaaatgctcgatcgtttgcttcgcgctatatatatgccacagaatttttattgtatccatgttgacaccaaatctgaagactcctacctggcagcagttatgggcatagcctcctgtttctctaacgtgtttgtagccagcagactcgaatcagtcgtatatgcgtcatggagtcgggttcaggcagacctgaattgcatgaaggacctttatgcaatgagcgccaactggaaatatctgatcaatttatgcggcatggacttcccaataaaaacgaatttggaaatcgtccggaaactcaagctcttgatgggcgaaaacaacctcgaaactgagaggatgccatcccacaaggaggagaggtggaaaaaaagatatgaggtggtcaatgggaaactcaccaacaccggcactgttaaaatgctgcctccgctcgagaccccgctattctccggatccgcctattttgtggtttccagagagtacgtggggtacgttctgcagaacgagaaaatccaaaagctcatggagtgggcacaagacacctactcccctgacgagtacctctgggctaccatccaaaggatcccggaggtccctgggtcactccccgcatcgcacaagtatgacctgagcgacatgcaggcagttgcgaggttcgtgaagtggcagtattttgagggggatgtgtcgaagggcgcaccatacccaccgtgtgacggcgtgcacgtgcggtcagtgtgcatatttggtgcaggcgatttgaattggatgcttaggaagcatcatctgtttgcaaacaaattcgatgttgacgtcgatttgttcgcgattcagtgcctggatgaacatctgcgtcacaaggccctcgaaacactgaaacactag

SEQ ID NO: 224638 - DNA, 1287 bp, synthetic construct
  misc_feature 1..1287: note = Description of Artificial Sequence: Synthetic coding sequence
  source 1..1287: mol_type = other DNA
atgctgcgaacgctgctcaggcggaggcttttctcgtatcctaccaagtactattttatggtcctggtcctgtccctgatcactttcagcgtattgcgcatccaccagaaacccgagtttgtatccgtgcgtcatttagaactagccggtgagaatcccagcagcgatataaattgtaccaaggttctgcagggggacgtcaatgaaatccagaaggttaagctggaaatacttaccgtgaagttcaagaagcgaccacggtggaccccagacgactatattaatatgacgtccgattgttccagctttataaaacgcagaaaatacatagtcgagcccctaagtaaggaggaagccgaatttcctatcgcctatagcatcgtggtccaccacaaaatcgagatgctcgacaggctgctgcgtgcgatctacatgccccagaacttctattgtatacacgtcgatacaaaaagtgaggatagctacctggccgcagtgatgggtatcgcctcctgtttctctaatgttttcgtggcctcccgattagagtctgttgtctacgccagttggagtcgcgtccaggctgacttgaattgtatgaaggatctgtatgcaatgagcgcaaactggaaatacctcatcaacctgtgcggaatggatttcccaattaaaacaaatttggagatcgtaagaaagctgaagttgctgatgggtgagaacaatttggagactgaaaggatgccatctcacaaggaggaaagatggaagaaacgctatgaggtggttaacggaaaactcactaatacgggcactgtaaaaatgctcccccctttggaaactcccctgttcagcgggtcagcgtatttcgtggtatctcgggagtatgttggatacgtactgcagaacgagaagatacagaagctgatggagtgggcccaggatacctactctccagacgagtatttatgggccaccattcaaaggattcccgaggtaccagggtcactgccagctagccacaagtatgatctgtcagacatgcaagccgttgcaaggttcgtaaagtggcagtattttgaaggagacgtctccaagggggcaccctaccccccatgcgatggcgtgcatgttcgttcagtgtgtatctttggcgcaggcgaccttaactggatgctcaggaaacaccacttgtttgcgaacaaatttgatgttgatgtggatctatttgctattcagtgtctggatgagcatctcaggcataaggcccttgaaaccttgaagcactag

SEQ ID NO: 224639 - DNA, 1287 bp, synthetic construct
  misc_feature 1..1287: note = Description of Artificial Sequence: Synthetic coding sequence
  source 1..1287: mol_type = other DNA
atgctgcgcacactattacgcagacgactcttctcgtaccctacaaagtattatttcatggtcctggtcctgtccctgatcaccttctccgtcttgcgcatccatcagaagcccgaattcgtgtctgtgagacatttagagttggctggcgagaacccctcctcagatatcaattgtaccaaggtgctacagggggatgttaatgagatccaaaaagtaaaattagaaatcttaaccgtgaagttcaagaagcgtccgaggtggacccctgacgactacattaatatgacgagcgactgcagtagttttatcaagcgacggaagtacatcgtggagcctttatctaaggaagaggccgaatttcctatcgcctacagcatagtggtgcatcataagatcgagatgctagatcgcctactgcgagctatttacatgcctcagaacttttactgcatccatgttgataccaaaagcgaagacagctacctcgctgcagtgatgggcatcgcctcctgcttttccaatgtctttgttgcctcccgcctcgagagtgtcgtgtacgcttcctggagcagggttcaagctgacttgaattgcatgaaggatctgtacgcaatgtccgccaattggaaatatttgatcaatctctgtgggatggacttcccgattaaaactaacctggaaatcgtgaggaagctaaaactgctcatgggtgagaataaccttgagacagaacgcatgcccagccataaggaggaaaggtggaaaaagcggtatgaagtcgtgaacgggaagttgacaaacacagggaccgtgaagatgctccctcctttagaaacgcccctgttctcaggtagtgcctactttgtagttagccgggaatacgtgggttatgtgttacagaatgaaaagattcagaaactcatggagtgggcacaggatacatactctcctgacgagtacttgtgggctacgattcagcgcatacccgaggtgcctgggtctctgccagccagccataagtatgatctctcagatatgcaggcggtagcccgattcgttaaatggcagtatttcgagggagatgtatctaagggagctccttatcccccatgtgatggtgtgcacgtgcgtagcgtgtgcatctttggagccggagacctgaattggatgctccgaaaacatcatctgttcgctaataaatttgacgtggacgtggatctctttgctattcagtgcctcgatgaacacctaaggcacaaggctttagagaccctaaaacactag

SEQ ID NO: 224640 - DNA, 1209 bp, synthetic construct
  misc_feature 1..1209: note = Description of Artificial Sequence: Synthetic coding sequence
  source 1..1209: mol_type = other DNA
atgaacttctggaggtactgcttttttgctttcacgctgctgagcgtggttatctttgtgagattttatagctcccagcttagcccaccgaaatcctacgagaagctgaactcttctagtgagcggtactttcggaagaccgcatgtaatcacgctctggagaaaatgcccgtttttttgtgggagaatattttaccaagcccacttagatcggtgccttgtaaggattaccttacccagaatcattatatcacctccccactgagcgaggaggaggctgcattccccctagcctacgtcatggttatccacaaggattttgatacatttgaacggcttttccgcgctatttatatgccacaaaatgtctactgtgtgcacgtagatgagaaggctcctgcagagtacaaagagtccgtacgacagctgctcagctgttttcagaacgcgtttatcgcaagtaaaacagagagtgttgtgtacgcaggcattagccgactccaggctgacttaaattgtttaaaggatttagtcgcgtcggaagtcccttggaaatacgtgattaacacatgcggacaagatttccctttaaagacaaaccgtgaaatagtccagcacctgaaaggctttaaagggaagaacattacccctggtgtactgccgcctgatcacgccattaaaagaactaaatacgtccaccaggaacacaccgacaaaggaggtttctttgtgaagaatacaaatatccttaagacatctccacctcaccaattgaccatttattttgggacggcctacgtggcccttactagggatttcgttgatttcgtcttaagagaccagcgtgcgattgatctcctgcagtggtccaaagatacgtattcccctgacgagcacttctgggtgacgctcaaccgcgtgagcggcgtccctggaagcatgcctaacgctagttggaccggtaatttgcgcgcaatcaagtggagcgacatggaggacagacatgggggttgccacggccactacgtgcacggtatatgcatctacggtaacggcgatttaaagtggctcgtaaattcaccaagcctctttgcgaataagtttgagctcaatacatatccactcacagtggaatgcctagagctcagacatagggagcgaacccttaatcaaagcgagaccgctatccagccaagctggtacttttag

SEQ ID NO: 224641 - DNA, 1203 bp, synthetic construct
  misc_feature 1..1203: note = Description of Artificial Sequence: Synthetic coding sequence
  source 1..1203: mol_type = other DNA
atgcctttatctatgcgatatttgttcataatcagtgtgtcatccgtcattatctttatcgtcttctctgtttttaattttgggggagacccgagctttcaacgcttaaatatttctgatccactgaggctgactcaggtttgtacctcattcattaatggcaagacacgtttcctctggaagaataagctaatgatacacgaaaaaagcagctgcaaagagtacctgacccaaagccactacatcacagcgcctctgtccaaggaagaggccgacttccctcttgcctacataatggtgatccatcaccattttgatacattcgccaggttatttcgagccatctacatgccacagaatatatattgcgtgcacgtggacgaaaaagccaccactgagttcaaggacgcagtggaacagctgctgtcctgttttccaaatgccttcctggcctccaagatggagccagtggtttacggcggaatctctcgcttgcaggcagacctgaactgtatccgagatctcagcgcttttgaagtcagctggaagtacgtaattaacacgtgcggacaggatttccctctgaagacaaataaggagattgtgcaatacctaaaaggctttaaaggtaaaaatatcaccccaggcgttctcccgcctgcccacgctataggcagaaccaagtacgtacaccaggagcaccttggcaaggagttaagctacgttatccgcaccaccgctctgaaaccgcctccaccacacaacctcaccatttacttcggatcagcttacgtcgccctgtctcgcgaatttgcaaatttcgtcctgcacgatccccgtgctgtggatttgctgcagtggtctaaggacacctttagcccggatgagcatttttgggtcaccctcaataggataccgggagtcccgggaagcatgccaaacgcgagctggaccggtaacctgcgcgcaattaaatggtcagatatggaagaccgccacggaggctgccacggccactacgtgcatggtatttgtatttatggcaatggcgacttgaaatggcttgtgaattcgccgtccctctttgctaacaagtttgagctgaacacttacccccttacggtggagtgtttggagctgaggcatcgagaacggactctgaaccagagcgaaactgctattcaaccctcttggtacttctag

SEQ ID NO: 224642 - DNA, 1209 bp, synthetic construct
  misc_feature 1..1209: note = Description of Artificial Sequence: Synthetic coding sequence
  source 1..1209: mol_type = other DNA
atgatgggatcctggaagcattgtttatttagcgcgtcattgatcagtgccctcatatttgtgttcgtgtacaatactgagctgtgggaaaataaaagatttttgagagctgctctgagcaacgcttccttgctggctgaggcctgccaccaaattttcgaaggcaaggtcttttacccaacggagaacgcactcaagacgaccttagatgaagccacgtgctatgaatatatggtccgcagccactatgtcacggaaaccctgtctgaagaagaggccggattccctctggcttatactgtgacaatccacaaagactttggtacatttgagaggctgtttagagcaatctacatgccacagaacgtctactgcgttcatctagatcaaaaggctaccgatgccttcaagggcgctgtgaagcagctcttgtcttgttttcctaatgcgtttctggcctctaaaaaagagagcgtggtttacggagggattagtcgccttcaagccgatctgaattgtttagaggaccttgtggccagtgaggtgccttggaagtacgtaatcaatacttgcggtcaagatttccctttaaaaactaaccgcgaaatagtccagtacctcaaggggttcaaagggaagaatatcacaccgggagtgttgcccccagaccacgccgtgggtagaactaagtacgtccatcaagaactgctgaaccataaaaactcatacgttatcaaaaccacgaaactgaaaaccccccctccccacgacatggtcatttatttcggaaccgcatatgtcgcgttgacacgagacttcgccaactttgtgctgcaagaccaacttgcattagatctgctgtcttggagtaaagacacatactctcccgacgaacatttctgggtcaccctgaataggattccaggtgtgccagggtctatgccaaacgcctcctggaccgggaacttacgggctatcaaatggagcgacatggaggataggcatggaggctgtcatggtcactacgttcatggcatctgtatttacgggaacggagacctgaaatggctggtgaactctccctcactgttcgctaacaagttcgagttgaatacatacccccttacagtagagtgtctggagttaaggcatcgggagcgaaccttaaatcaatcagaaactgcaatccagccgtcgtggtatttctag

SEQ ID NO: 224643 - DNA, 1209 bp, synthetic construct
  misc_feature 1..1209: note = Description of Artificial Sequence: Synthetic coding sequence
  source 1..1209: mol_type = other DNA
atgatgggctcatggaaacactgcctctttagtgcatccttaatctccgcccttatatttgtgttcgtgtataataccgaattgtgggaaaacaaaaggtttttacgcgctgctcttagcaatgccagtctacttgctgaagcctgccatcagatatttgagggtaaggtgttttatccaacagagaacgctctcaaaactaccctggacgaggccacctgctatgaatacatggtcaggtcccactacgtgacagagacgcttagcgaagaggaggcaggcttcccactggcctacaccgtgacaatccacaaagacttcgggactttcgaacgactcttccgagccatttacatgccccagaatgtttattgcgtgcatctggatcagaaagccaccgacgcattcaagggagccgtcaaacagcttctgagttgttttcccaatgcctttctggccagcaaaaaggagtctgtagtgtacggaggcatctccagattgcaggcagatctgaattgtctagaagatctcgtggcgtcggaggtgccttggaaatacgtgattaatacatgtggacaggactttccgctgaagacaaacagagagatcgtgcaatatctcaaaggattcaagggaaaaaacatcactcccggagtcctgccccctgatcacgccgtcggtagaaccaagtacgtgcaccaggaacttctaaatcacaaaaactcatacgtgattaagactactaagttgaaaacacctcccccacacgatatggtgatctacttcggcacagcatacgtggcgcttactcgggattttgctaacttcgtgctccaggaccagctggcgttagatctcctgagctggtcaaaggatacgtactctcctgatgagcatttttgggtaactttgaatagaattcctggagttcctggctcgatgcccaacgcctcttggacggggaatcttcgggctatcaagtggtcagatatggaagatcgtcacgggggatgccacggacattacgttcacggtatttgtatctacggaaacggagatcttaagtggctggtgaatagcccctctctgttcgcaaataaattcgaattgaatacctacccactgaccgtagagtgcctggagcttcggcatagggagcggactctaaaccagtccgaaacagcaatacaaccatcctggtatttctag

SEQ ID NO: 224644 - DNA, 1317 bp, synthetic construct
  misc_feature 1..1317: note = Description of Artificial Sequence: Synthetic coding sequence
  source 1..1317: mol_type = other DNA
atggtccagtggaagcgcctatgtcaattgcactacctctgggccctcggatgctacatgctcctcgcaaccgtcgcgcttaagctgtcatttcgcctgaagtgtgattcggaccacctcgggctcgaaagccgggagtcccagagccagtattgtcgcaatatcttatataattttctcaagttgcctgccaagaggtccattaattgcagcggcgtaacacgaggggatcaggaagctgtccttcaagcgatcctgaataatctggaggtcaagaaaaagagggaaccattcaccgatacacactatctctctttgacacgagactgcgaacatttcaaagcagagagaaaattcattcagttccctttgtctaaggaggaggtagagttccctatcgcctattcaatggtgatccacgagaaaatcgagaattttgaaaggctactcagagccgtctacgcaccccagaacatctactgcgtccacgtagacgagaaatcaccagagacttttaaggaagccgtgaaagctatcatctcctgctttccaaatgtgtttatcgcaagtaagctcgtgcgcgtggtgtacgcaagttggagcagggtgcaggccgacctgaattgtatggaggacctgctccaaagcagcgtgccttggaagtacttcttgaacacctgtgggactgatttccctattaaaagtaacgcggagatggtgcaggccctcaaaatgctgaacggccgaaactccatggagtctgaggtgcccccaaagcataaggagacaaggtggaagtatcactttgaggtcgtgagggatacactgcacctgacaaataagaagaaagacccaccaccttacaatttgaccatgttcaccggcaatgcatacattgttgccagtagagacttcgtacagcacgtgctgaaaaacccaaagagtcagcagcttatagaatgggtgaaggatacctactcccccgatgaacacctttgggctaccctccagcgggctaggtggatgcccggatctgttccaaaccacccgaaatatgacatttccgatatgacgagtatcgctcgattagttaaatggcaggggcacgagggagatatcgacaaaggtgccccttacgctccgtgttccggcatccatcagagagcaatctgtgtctatggagcaggtgacttaaattggatgctccagaatcatcacctgctggcaaataagttcgaccccaaggtcgacgacaatgctttgcaatgtctggaagagtatttgcggtacaaagccatctacgggacagagttatag

SEQ ID NO: 224645 - DNA, 264 bp, synthetic construct
  misc_feature 1..264: note = Description of Artificial Sequence: Synthetic coding sequence
  source 1..264: mol_type = other DNA
atggtgcagtggaaaagactctgtcagcttcactacctgtgggctctcggctgctatatgctactcgctactgtagcattaaagctgagttttcggctcaagtgcgattccgatcatttaggtcttgagtcacgcgagtctcagagccagtactgtagaaacatcctgtacaattttttaaagctccccgctaagaggtctattaactgctctggggtaacccgcggtgatcaggaagccgttcttcaggccatcctcaattag

SEQ ID NO: 224646 - DNA, 462 bp, synthetic construct
  misc_feature 1..462: note = Description of Artificial Sequence: Synthetic coding sequence
  source 1..462: mol_type = other DNA
atggtgcagtggaagagactctgtcagttgcattacctatgggctttgggttgttatatgctgctggcaacggtggctttaaaacttagcttccgtctcaagtgcgattctgatcacctgggattagagagtcgggagtctcaatcgcagtactgtcggaatattctatacaactttctcaagctccctgcaaagcgtagtattaactgctccggggttacaaggggagatcaggaggcagtccttcaggccatactgaataacctggaggtgaaaaagaagcgggagccatttactgatacacattatctcagcttaacacgagactgtgagcattttaaggcagagcggaagttcatccagttccctctttccaaggaggaggtggaatttcctatcgcatattcaatggtcatccatgaaaagattgaaaacttcgagcgcttactgagagccgtttag

SEQ ID NO: 224647 - DNA, 162 bp, synthetic construct
  misc_feature 1..162: note = Description of Artificial Sequence: Synthetic coding sequence
  source 1..162: mol_type = other DNA
atggtgcagtggaagaggctgtgccaactccactatctgtgggcccttggatgttatatgctcctcgcaaccgtggccctgaagctgagttttcgcctaaaatgcgactccgatcatttaggccttgagagtagggagtcccagtcacagtactgccgttag

SEQ ID NO: 224648 - DNA, 1317 bp, synthetic construct
  misc_feature 1..1317: note = Description of Artificial Sequence: Synthetic coding sequence
  source 1..1317: mol_type = other DNA
atggttcaatggaagcggttgtgccagcttcattacctctgggctctgggctgctatatgctcctcgccaccgtggcgttgaaactgagctttagactgaagtgtgacagtgaccacctcggcctggaaagcagggagagccaaagccagtattgtaggaatatattatacaattttctgaagttacccgcaaagaggagcattaactgttctggcgtcacccggggtgaccaggaagcagttctccaggcgatcctgaacaatcttgaggtgaaaaaaaagcgcgaacccttcacagatactcactacttgagcctgacacgcgactgcgaacatttcaaggctgaaaggaagtttatacaattcccgctcagtaaagaggaggtggagtttcctatcgcctactctatggtaatccatgagaagatcgagaattttgagagattgctgcgcgcagtctatgccccacagaatatatactgtgtgcatgtcgatgagaagtcccctgagactttcaaagaagcagtaaaggctatcatctcatgctttccaaacgtcttcatcgctagcaaactggttcgcgtggtctatgcatcttggtcccgggttcaagcagatctaaattgtatggaagatctgctgcagagttctgtgccctggaagtattttctgaacacatgcgggaccgatttccccataaagtcaaacgccgaaatggttcaggccttgaagatgttgaatggcaggaattccatggagtcagaagtgccgcctaagcataaggaaacacggtggaagtatcacttcgaagtcgtccgcgatactttgcatctcactaacaagaagaaggacccacccccttacaacctgacaatgtttaccgggaatgcctatattgtggccagtagagacttcgttcaacatgtcctcaagaatccaaaatctcagcagctgattgaatgggtcaaagacacgtactctccggacgaacacctatgggccacactgcagcgtgcacggtggatgccgggttctgttcctaaccacccaaagtacgatatctctgatatgacctctatagcaagactcgtaaagtggcaaggacacgaaggcgacatagataagggagctccatatgcaccttgtagcggcatccaccagcgagctatttgtgtttatggagcgggagatctaaactggatgctgcaaaatcatcacctgctagctaataagtttgatccaaaggtcgacgataatgccctccagtgtctagaggagtatctaaggtacaaggccatttatggaaccgagctatag

SEQ ID NO: 224649 - DNA, 1041 bp, synthetic construct
  misc_feature 1..1041: note = Description of Artificial Sequence: Synthetic coding sequence
  source 1..1041: mol_type = other DNA
atggagtcgaccctaggggcaggcatcgtaattgctgaggctctgcagaaccagctggcctggcttgagaacgtgtggctgtggataacctttctcggagaccccaagattctgtttctcttctacttccccgcagcctactatgcctccaggagggtgggtattgccgtgctgtggattagcctgatcacagaatggctgaacctgatctttaaatggtttctgttcggagacagacccttttggtgggtccatgaatccggctactatagccaggcacctgcgcaagtccaccagttcccatcctcttgtgaaactggacccggatccccaagcggccattgcatgatcaccggggcagcgctctggcccataatgacagccctgagttcccaggtcgccaccagagcaaggtctcgatgggtgagagtgatgccctctctagcctactgtacttttctgctggccgtgggactgtcccggatttttatccttgcccattttccccaccaagtcctggccggtctgataaccggagccgttctcggttggctcatgacgccgagggttccaatggagagggagctttccttctacggccttactgccctcgccttgatgcttgggacttccctcatttactggaccctcttcacattgggactcgacctatcctggagtataagtcttgcctttaagtggtgtgaaagaccggagtggattcacgtggattcacggcctttcgcgagcctttcgcgtgatagcggcgcagccctcggattaggtatcgctctccactctccatgctatgcccaagtcaggcgcgctcaacttgggaacggccagaaaatcgcatgtctggtattggccatgggcctgctgggccctctagactggctgggccacccacctcagatcagtctgttctatatttttaattttctaaaatacacactgtggccctgcctggtgttggctcttgtcccttgggcagtgcatatgttttccgcgcaggaagcaccacctatccattctagctag

SEQ ID NO: 224650 - DNA, 465 bp, synthetic construct
  misc_feature 1..465: note = Description of Artificial Sequence: Synthetic coding sequence
  source 1..465: mol_type = other DNA
atggatttcctgcataggaacggcgtgctgatcatccaacacctgcagaaagactatcgggcatattacacctttctgaactttatgtctaacgtcggggatccacgcaatatctttttcatttactttccactgtgctttcagttcaaccaaacagttggcaccaaaatgatttgggtggccgttatcggggattggctgaacctgattttcaagtggatactcttcggacatcgcccatattggtgggttcaggagacacagatatatccaaatcattccagcccgtgtttagaacagttccccactacctgtgagacgggtccgggtagccccagcggccacgcgatgggcgctagttgtgtctggtatgttatggtgacggccgctcttagccacactgtctgtggaatggataaatttagcatcactctgcaccgccacgcgggaggtcggggactctag

SEQ ID NO: 224651 - DNA, 1068 bp, synthetic construct
  misc_feature 1..1068: note = Description of Artificial Sequence: Synthetic coding sequence
  source 1..1068: mol_type = other DNA
atggactttcttcatcgcaatggtgttttgatcattcaacacctgcaaaaggattatagggcctactacacatttctgaacttcatgtctaacgttggagatcccagaaacatcttcttcatctacttccccttgtgctttcagtttaaccaaaccgtggggaccaagatgatttgggtggcagttataggagactggctgaacctgatctttaaatggatcctctttgggcatcgaccttattggtgggttcaagagacccagatctatccaaatcactcatccccttgtctggagcagttcccgacgacttgtgagactggacctggctctcctagcggacacgccatgggagctagctgtgtgtggtacgtcatggtgacggctgccctcagccacacagtgtgtggaatggataaattcagtatcacactccatagactgacttggagctttctgtggagtgtcttctggcttattcagatcagcgtctgtatttcccgagtgtttatcgcgacacactttccgcatcaagtaatcctcggtgtaataggtggcatgctggtggctgaggcattcgaacacactcccggtatccagaccgcctctttgggaacatacttgaagacaaacttgtttctgtttctgttcgccgtaggtttctaccttctcctgcgcgttctcaatattgacctgctctggagcgtgccaatcgcaaagaaatggtgcgccaaccccgactggatccatattgatacgacacccttcgcaggcttggttagaaacttaggagtgctctttgggcttggttttgcaatcaattctgaaatgttcctgctgtcatgtcggggtggcaataactatactctttcctttcggctcctgtgtgcgcttacaagccttactattctccagttgtaccacttcctgcagattcctacgcacgaggaacacctattctacgtattatcattttgtaagtcagcatcaatccctctgacagtcgtggcatttattccctactccgtacacatgttgatgaagcagtctgggaaaaagagccaatag

SEQ ID NO: 224652 - DNA, 1677 bp, synthetic construct
  misc_feature 1..1677: note = Description of Artificial Sequence: Synthetic coding sequence
  source 1..1677: mol_type = other DNA
atggctgccctgacccgagatccccaatttcaaaagctccagcagtggtacagagagcatagatccgaattgaatctccgcaggctctttgacgcaaataaggatcgctttaatcacttctctctaaccctcaatactaaccacggacacatcctagttgattactccaagaacctcgtgacagaggatgtgatgcggatgctcgtcgacctcgcaaagagccggggagttgaagctgcacgggagcgcatgttcaacggggagaagatcaactatacagagggcagggcagtattgcatgttgcattacgcaaccgcagcaacacgccaatacttgtggacggcaaggacgtgatgcccgaggttaacaaggtgctagataaaatgaagagcttctgccaacgggtgcgatctggcgattggaaagggtatactgggaagactatcaccgacgtcatcaacattggcataggcggatctgacttgggccctctgatggtcactgaggcgttgaagccatactcgtccggaggccctcgcgtatggtacgtttccaatatcgatggtacccatatcgccaagaccctagcacagctgaaccccgaaagttcgctgtttattatagcctctaaaacctttactacacaagagactatcaccaatgccgaaacagccaaagagtggtttttacaggcagccaaagatccatctgcggttgccaagcatttcgtcgccctttctaccaacactacaaaggtgaaagagtttggaatcgacccacagaatatgttcgagttttgggattgggtggggggacgctactccctctggagcgcgatcggtctgagtattgctctgcacgtgggcttcgacaacttcgagcaactcttgtctggcgctcattggatggatcagcatttcaggacaacaccccttgagaaaaatgctcccgtacttctcgcgctgctgggcatctggtacatcaattgcttcggctgcgagactcatgctatgttaccctatgaccagtatctccataggtttgctgcctatttccagcagggagatatggaaagcaatggcaaatacatcactaagtcgggaactcgggtagatcaccaaactggacccattgtgtggggggaaccaggcactaacggtcagcacgccttttaccagctcatacaccaaggcacgaagatgatcccatgcgactttctaatcccagtgcaaacccagcacccaattagaaaggggctccaccacaagattctactggctaatttcctcgcacaaaccgaagcactgatgcggggaaaaagcacagaagaggctcgcaaggagctgcaggccgcaggcaaaagccctgaggacctcgaacgccttctcccacacaaggtatttgaggggaatcgccctacaaactccattgtgtttactaagctgactccgtttatgctgggagccctcgtcgccatgtatgagcataaaattttcgtccagggaattatttgggatattaatagctttgatcagtggggtgtagaattgggaaagcagctggccaagaagattgagccagaactcgatggcagcgcacaggttacaagccacgatgcttccaccaacggcttgataaattttatcaagcagcaacgcgaagcaagagtccaatag

SEQ ID NO: 224653 - DNA, 1563 bp, synthetic construct
  misc_feature 1..1563: note = Description of Artificial Sequence: Synthetic coding sequence
  source 1..1563: mol_type = other DNA
tctaggcacggcaggtcacatccgggtccaccggtcccagaggctgccgctatggtgccacgcgcacccctccgcgctgagcctgcccctcctcttcgctgtcaacaaggacccctgcaaccgctgcaggttcgagccggtcggaggaggggcctgcctcgggcagcccctggcaccggacatgcaggacttggatctggcggtggtgggtccggggcaagaggccctcaatcccccacaagtcgccctcgcacgggggcacaagccgagtctgccctccgaccatggtccttgctgggcgttagaagttggggcctcgcagcttctcccggagtttctgctcccggattgttaagatacgaggaaaaacgggcacccccatggggacacttccccagttcctcaccatgtagcagtggacatcttagtaggggaagcttcaggtcttgtgaagaacggccttggctcactcagcaagccggaaagggctgcccttttccatccgcgcctggtcatatgtcgctcggcgctagcgccggtcgcgcagctagagctggcgtcttcgagggtgcaggatggaaggatggcgacgtgggccgtgattcatgtagacgccatctatgcactactggcaagtgggagggcgtgttcgaacagatcatgggcggttcagccgcaaaaggagctctcataaccgatacaggagggggaggagggggtgagagattgtggctccgcgctcgccgacctgatggccacccgtgtcatctggatggttgcctttccaacttgcgccaaaaggtcgaagctctcggtcgtggaggtccacccctccaatccgggttgctgatccagggtctgccagcttcgaccgtatgcgaggatggatttttcctatgggcagctgttgcggaccatcctgggggaccagcaggggataggcaccatcattgcgccggatggcctcggcctctttggggagtgggccagggaggttgcttcttctgggaacagcttctcctcagggcctggctgcccgctagagagactagggtgtggtccgctgcctccccgtccttctgttcactgacactgaacacaaaccatggacacatcttggtggattacagcaaaaatctggtcactgaagatgttatgaggatgctcgtggacctagcaaaatcgcgcggagtggaagctgctcgcgagcggatgtttaacggcgagaaaattaactatacagaagttagccgtccacacatcccatccggggcaagttttttaccgtttggcgtgtacttaacggtaagcagaataaccctgtgtctgcacccgttttcttgggcgatgctgctgttaaacgaagggcctgagggcctgttccccccagcatgctctcgggctctgggctgcgcgttccataagataggactggtgtcctcgcttgaatggttccccgtgtccgcttgggaggagcatatttcctatccacagggggaattcctgaaagccgatatttttttggaaaaattaacactcatctacccccagtgtaagttttag

SEQ ID NO: 224654 - DNA, 1710 bp, synthetic construct
  misc_feature 1..1710: note = Description of Artificial Sequence: Synthetic coding sequence
  source 1..1710: mol_type = other DNA
atggtggccttatgcagtctccaacacttaggcagctccgacccgagggctctgcccacgctaccaaccgcgacaagtggccagagacctgctaagaggcggagaaagagtccggcaatggccgcactgactcgcgacccgcagttccagaagctccaacagtggtatagagagcaccggagtgaattgaacctgcgcaggctcttcgacgctaacaaggacaggttcaaccatttttccctcactctgaataccaatcacggtcatatcctggtggactatagtaagaacctagttaccgaggacgttatgaggatgctggtcgacctggctaagtccaggggggtggaggctgcgagagagagaatgtttaacggagaaaaaattaattatactgagggtagggcggtgctgcacgtcgcattaaggaacagatccaacactcctatcttggtggacggcaaagacgtgatgcccgaggtgaacaaggtgttggacaagatgaaatccttttgccaaggtccgctgatggtaacagaagccttaaagccctactccagtggaggacctagagtttggtacgtttctaatatcgatgggacccatatcgctaagacgttggctcagctgaatcctgaatctagccttttcattatagcttccaagacctttaccacgcaggagaccatcacaaatgcagagactgcaaaggaatggttcctgcaggccgctaaggaccctagcgcagttgccaaacacttcgtggccctgtccacaaatacaaccaaagttaaggagttcgggattgaccctcagaacatgttcgagttctgggattgggtcgggggtaggtattctctctggtccgcaataggcctctctatcgctctccacgtgggattcgacaactttgagcagctactgtctggcgcacattggatggatcagcatttcaggaccaccccactcgagaagaatgccccagtgctcctggctctgctggggatctggtacataaattgcttcggttgcgaaacacacgccatgttgccatacgaccaataccttcaccgatttgccgcatatttccaacagggcgacatggagtctaacggcaagtacatcacaaagagcggaacaagagtcgaccatcagacgggccctatcgtttggggcgagcctgggaccaatggccaacacgctttctaccaactcatccaccaaggtacaaagatgattccctgcgatttccttattcctgtgcagactcagcaccccattcgcaagggcttacatcacaagatcctgttggccaacttcctcgcccaaacagaagccctgatgagggggaagagcaccgaggaggcacggaaggaattgcaggcagccggtaaaagcccggaggatctggagagactcttaccccacaaagtctttgaggggaatcgtcctactaattcaatcgtgttcaccaagctcaccccattcatgcttggggcactggtggctatgtatgaacacaagattttcgtgcagggaataatctgggacattaacagttttgatcagtggggcgtcgaattagggaaacaactggccaagaagatcgagcccgagttagacggttcggcacaggtcaccagccacgatgcgagcaccaatggccttatcaacttcattaagcagcagagggaagctagagttcagtag

SEQ ID NO: 224655 - DNA, 2901 bp, synthetic construct
  misc_feature 1..2901: note = Description of Artificial Sequence: Synthetic coding sequence
  source 1..2901: mol_type = other DNA
atggctgccgtggccgcagtggccgctagacggaggagatcatgggccagcctggtcctagctttcctaggagtctgcttagggatcaccctggcagttgataggagcaacttcaagacttgtgaagaatcatcattttgtaaaagacagaggagcattcggcctggtctgtctccataccgggctctcctagatagcttgcagttgggtcctgactctctgactgttcatctgattcacgaggtgaccaaagtattgctggtgctggaactccagggcctgcagaaaaacatgacgaggttccgaatcgatgagctggaacctaggcgcccaaggtatcgcgtgcccgacgtactggtggcagatccaccaatcgcaagacttagcgtgtcgggccgagatgaaaactcagtcgagctgacaatggcggagggaccttacaagatcatcctcaccgcacgcccttttcgcctggatcttttggaagatcggagtttactcctctctgtcaacgcccgtgggctgctggaatttgaacatcagcgtgcccctagggtctcattctctgacaaagtcaatcttacgctgggatccatttgggataagatcaagaatctcttttccaggcagggctcaaaggacccggcagagggagatggcgcacagcctgaagaaacgccccgagacggggacaaacctgaggagactcaaggcaaagcagagaaggatgagccaggagcctgggaggagaccttcaaaactcatagcgattcaaagccttatggaccgatgtcagtggggctggactttagcctgcctggaatggaacatgtgtacgggatccccgagcacgccgacaatcttcgcttgaaggtcacagagggcggagaaccttaccgcctgtacaaccttgacgttttccagtacgagctgtataaccccatggctctatatggctccgtgccagtgctcctggcccacaatccacatcgtgacctgggcatattttggctgaacgctgccgaaacctgggtggatatctcctccaacacagccggaaaaactctgtttggcaaaatgatggactacctgcaaggctcaggagaaacaccccagaccgacgtaaggtggatgtctgaaaccgggattatcgacgtattcctgctgcttggaccaagcatttctgatgtgttcaggcagtacgcctcacttaccggaactcaggccctgcctcccctgtttagcctcgggtaccatcagtcccgctggaattatcgggacgaagcagatgtgttggaggtggatcagggcttcgacgaccacaatctcccttgtgacgtcatctggttggacatcgagcacgccgacgggaaaaggtactttacatgggacccaagtagattcccccaaccgagaacgatgttagagaggcttgcttctaaacggcgaaaactggttgcaatcgtggatccacacattaaagtcgactctggttaccgcgtccacgaggagctgcgtaaccttggactttatgtgaagacgagggatggtagcgactatgagggatggtgctggccgggtagtgcaggctatcctgactttaccaatcctacaatgagggcctggtgggccaacatgttcagctatgacaactacgagggaagcgccccaaatctgttcgtgtggaatgatatgaatgagccatcagtcttcaacggtccagaagttacaatgcttaaagatgcccagcattatggaggatgggagcatcgagacgtgcataatatatacggcttgtatgtccatatggccacagccgacgggctcagacaaaggtctggcggtatggaaagacctttcgtgctggcgagggccttctttgcgggatcacagcgcttcggagccgtctggacgggggacaatactgctgagtgggaccatttgaaaatctccatccccatgtgtttaagcctgggtcttgtagggctgtcattctgcggcgctgacgtcggaggtttcttcaagaatcctgagcctgagcttttagttcgctggtatcagatgggcgcataccagccattcttccgggcacatgctcacctggacactggcagacgtgagccttggttattgccttcccaacacaatgatattatcagagatgccctcggccaacgatatagtctcctgcctttttggtatactctgctgtaccaggcacaccgtgaagggatccccgtgatgcgtcccttgtgggtacaataccctcaggatgtgacaaccttcaatattgacgaccagtacctgcttggagatgccctgttggtccaccctgtgagcgatagtggtgcacacggagtgcaggtctatctacctgggcaaggggaggtttggtacgacatccagtcttatcagaagcatcacggccctcaaacattgtatcttcctgtcacgctctccagtattccggtgtttcagagggggggaactatcgtgccgaggtggatgcgcgtgagaaggtccagtgaatgtatgaaagacgacccaatcaccttatttgtagctctctctccacagggcacagctcagggcgagctgtttctggatgatggacacacttttaattaccagacacggcaggagttcttactacgccgtttctcattctcaggtaataccctggtttcatccagtgcagaccctgaggggcattttgagacaccgatttggatcgaaagggtggtcattattggggcaggtaaaccagccgctgtggtccttcagacgaagggcagcccagaatcccgcctgtcatttcagcacgatccagaaactagtgtactcgtgctgcgaaagccgggaataaacgttgctagcgactggtctatacacttgagatag

SEQ ID NO: 224656 - DNA, 2835 bp, synthetic construct
  misc_feature 1..2835: note = Description of Artificial Sequence: Synthetic coding sequence
  source 1..2835: mol_type = other DNA
atggctgccgtcgcagcagtagccgcacgcaggagacgatcatgggcgagtctggtgctcgctttccttggagtgtgcttagggattactctcgcagtcgaccggtcaaatttcaagacctgtgaagaatcctccttctgtaagcggcagagatctattcgaccagggctgagtccctaccgggcactcctcgattccctgcaactgggtcctgattccttgactgtccatctgatccacgaggttaccaaagtgctgcttgtgcttgagcttcagggtttgcagaagaatatgacaagatttagaattgacgagctggagccgcgacgtcctcgatacagggtcccagatgtgcttgtcgcggacccaccaatagcgcgattaagcgttagcggaagagacgagaattcagtggaactcacaatggcagaaggaccctacaaaataatacttaccgcacgaccttttagactggatctgctggaagatcgttctctgctgctgagcgtgaatgccaggggtttgctggagttcgaacaccagcgagctccacgcgtttcacagggctccaaggatcccgctgagggggacggtgcccagccagaggagacccccagggacggagacaaacccgaagaaactcagggcaaggcggagaaggatgagcccggtgcctgggaggagacgttcaagacccactcagacagcaaaccctatggccctatgtctgtagggcttgattttagtctgcctgggatggaacatgtctacggaatcccagaacatgccgacaacctcagactgaaagtaacagaggggggagagccctaccggctgtataatctcgatgtgttccagtacgaactgtacaatcccatggcactctacggcagtgtgccggtgctgttggcacacaaccctcaccgggatcttggtatcttttggttgaacgccgctgagacatgggtcgatatttcttcaaacaccgcaggcaagaccctgttcggcaagatgatggattacctgcagggctcaggtgagaccccccagaccgatgtgcggtggatgagtgagacaggaataattgacgtatttttgctgctgggacctagcatcagcgacgtgttccgccagtacgcctccttgacgggcacacaagctctgccacccttgttctcgttaggataccatcaatctaggtggaattatcgcgatgaggcggatgtgctcgaagtggaccaaggattcgatgaccacaacctgccttgtgacgtaatatggcttgacatcgagcatgcagacggaaagcgctatttcacctgggacccttctcgattcccgcagcctagaaccatgctggaaagactcgcttccaaacggcgtaagcttgtggctatcgttgacccacatattaaagtggacagtggatacagagtacatgaggagttaagaaatctcggactttacgtcaagacgcgggacggaagcgattacgaaggatggtgctggcccggaagcgccggatatcctgattttaccaatcccacaatgagagcttggtgggccaatatgttttcatacgacaattatgagggtagcgcgccaaacctgtttgtgtggaatgacatgaacgagcctagtgtttttaatgggccagaggtcacaatgttgaaagatgcccagcactatggcggatgggaacaccgcgacgtgcacaatatctacgggctttacgtgcacatggccaccgccgacggcctccgtcaacgtagcggcggaatggaacgtccctttgtcctcgcacgggcttttttcgctggttcacagaggttcggcgctgtttggacaggcgacaatacagctgagtgggaccacctgaagatcagcatccccatgtgtctttcactggggttggtcggattgagcttctgtggagccgacgttggaggattttttaagaaccccgaaccagagctcttggtgaggtggtatcaaatgggggcttaccagccatttttcagagcacatgcccacctagataccggtcgcagggagccatggctgcttccatctcagcacaacgatatcatcagagacgctctgggtcaacggtattccctgttgcccttttggtataccctgctctaccaggcacaccgtgaaggaatcccagtcatgaggcctctgtgggtccaatatccacaagacgtgactacatttaacattgatgatcaatatcttctgggggacgctctgctggtgcatcccgtatcggactctggagctcacggcgttcaagtctatttgcctggtcagggcgaagtttggtatgatattcaatcatatcagaaacatcacggaccccagactctttacctgcccgtaacactgtctagcattcctgtctttcagcgaggcggtacaatagtccctcgttggatgagggtgcggagatctagcgagtgtatgaaagatgaccccattaccctgtttgtggctctgagcccgcagggcacggctcagggtgagctgtttctagatgacggccacacctttaattaccagaccaggcaggagttcctgctgcgacgatttagttttagcggcaataccttggtcagctcctctgctgacccagagggccactttgagacaccaatttggatcgagagagtggttattattggtgctggaaagcccgcagcagtggtgctccagaccaagggctcccccgagagtaggctgagcttccagcacgatccagaaaccagcgtgctggtccttcgtaagccgggtatcaatgtggccagcgattggtcgatccacctgcgctag

SEQ ID NO: 224657 - DNA, 2544 bp, synthetic construct
  misc_feature 1..2544: note = Description of Artificial Sequence: Synthetic coding sequence
  source 1..2544: mol_type = other DNA
atgacgaggtttcgcattgatgagctcgagcctcggagaccaagatatcgtgtaccagacgtgctcgtggccgacccacccatcgcgcgacttagtgtctccggacgcgatgagaatagtgtggaactcacgatggcagaaggtccgtacaaaattatcttaaccgctcggccattcagactggacctgctcgaggatagaagcctgctgctgtctgtgaacgcccgagggcttctggaattcgagcaccaaagggccccacgcgtctcacagggaagcaaggatccggctgaaggtgatggcgctcaaccagaagagaccccaagagacggcgataagcccgaagagacacaggggaaagctgaaaaagacgagcctggggcttgggaagagactttcaagacgcacagcgacagcaaaccatatggccctatgtcggtgggcttggacttctccctacccggtatggagcacgtgtatggcatccccgagcacgccgataacctgagacttaaggtgaccgaggggggtgagccatatcgactctataatttagacgtctttcagtacgaactgtataaccctatggccctctacggctcagttcccgtgttgcttgcacacaatccacacagagacctgggaatcttctggctgaatgctgctgaaacatgggttgacatctcctcgaataccgccggaaaaacactgttcggaaagatgatggattacttgcaagggtccggagagacaccacagacagatgttaggtggatgagtgagaccggtattattgatgtctttcttctgctagggcctagcatttctgacgttttccggcagtatgccagcctgaccggaacccaggcactgccccctctgttttccttggggtatcatcagagcaggtggaactacagggacgaagctgatgtgctcgaggtggatcaggggttcgacgaccacaacctgccttgcgacgtaatctggctggacatagaacatgcagatggcaagcgatactttacgtgggatccctcgagatttccgcagccgaggaccatgcttgagcgcctggcctccaagcgcaggaagctggtcgctatcgtcgatccgcacataaaggtggattccggttatcgggtacatgaggagctgaggaacttaggcctgtatgtcaagaccagggacggctcagactatgagggttggtgttggcccggatcagcgggatacccggactttactaatcctacaatgagagcctggtgggctaatatgttcagttatgataactatgaagggagtgcaccgaatctatttgtttggaacgatatgaacgaaccaagcgtcttcaatgggcctgaggtgactatgcttaaagatgcgcagcattacggtggctgggagcaccgcgacgttcacaatatttatggtctctatgtgcatatggcgacggcggatggactgcgccaaagatcaggcggtatggaacgacccttcgtgctggcaagagccttctttgctggctcacagcgctttggcgctgtgtggaccggggataataccgcagagtgggaccacctgaagatttccatacccatgtgcctgtctttagggctggtcggcctgtcattttgtggcgctgacgtcggaggtttttttaagaacccggagcccgaattgttagtgcgatggtaccagatgggagcatatcagccattttttagagctcacgcccacctagacaccggacggcgagagccttggctgctaccgtcgcaacacaacgacatcatacgagatgccctgggccaacggtacagtctgctcccattttggtacaccttgctgtatcaggcccaccgggaaggaattcccgtcatgagacccctgtgggtgcaatacccccaggacgtgaccacattcaacatcgatgatcagtaccttttaggcgatgctctgcttgtgcaccccgtgagcgatagcggggctcacggcgttcaagtgtatttacccggacagggggaggtttggtacgatattcagtcctatcagaaacatcacgggccacaaactttgtacctccccgtaaccctgagctcaatccctgtgttccaacgtggtggcaccatcgtgcccaggtggatgagggtcagaagaagtagcgagtgcatgaaagacgacccaatcacactgttcgtggcactgtcaccccagggcaccgcccaaggtgaactgtttctcgatgacggacatactttcaactatcagaccaggcaggagtttttgctgcgcaggtttagcttcagcgggaataccttagtgtccagttctgctgacccagaaggtcactttgagacgcccatctggatcgagcgtgttgtcattataggagccggaaagccggcagctgtggtactgcaaactaagggatcaccagagtcccgcttgtccttccaacacgatcctgaaacctctgtacttgtcttgcggaaacccggaataaacgtcgcatcagattggagtattcacctgagatag

SEQ ID NO: 224658 - DNA, 2745 bp, synthetic construct
  misc_feature 1..2745: note = Description of Artificial Sequence: Synthetic coding sequence
  source 1..2745: mol_type = other DNA
atggaggcggctgtgaaggaggagatatctctagaggacgaagccgttgacaagaacatctttagagattgtaacaaaattgccttctaccggaggcagaaacagtggctttcaaagaagagtacatatcaggctctgctggattccgtcacgacagatgaagatagtactagattccagatcatcaacgaggcctctaaggtaccgctgctggctgagatttacgggatcgaagggaacatcttcagactgaaaatcaacgaagagacccctttaaagcctaggtttgaagtacctgacgtgctgacaagcaagccttcaacagtccgcttgatctcatgcagtggagataccggtagcctgattttagcagatggtaagggtgaccttaaatgtcacattactgccaacccttttaaggtggacctcgtgtcagaagaagaagtggtaatctccatcaacagcctcggacagttgtacttcgagcacctgcagattctgcacaagcaacgcgctgccaaagagaacgaagaggaaacttcagtagatactagccaggaaaaccaagaagacttggggctgtgggaggagaaattcggtaagttcgtggacataaaagctaacggtccttcttccattggactggacttttcactgcacggctttgaacacctgtacggcatcccacagcatgcagaatctcaccaattgaaaaatacaggtgacggcgacgcttacaggctctacaacttagacgtctatggatatcagatctacgataagatgggaatttacgggtcagtaccatatttgcttgcgcataagctgggcaggaccataggaattttttggctgaatgcaagcgagaccttggtggagatcaacaccgagcccgctgtcgaatacaccctgactcagatggggcctgtggcagctaagcagaaagttagaagccgtacacacgtccactggatgagcgagagcggaataattgatgtgttcctgcttacagggccaacaccctccgatgtcttcaaacagtattcacatttgactggaactcaggccatgcctcctctgttctctctgggctaccaccagtgccggtggaactatgaagacgaacaagacgtcaaagcagtggacgccggatttgatgaacacgatattccttacgacgccatgtggctcgacatagaacacaccgaggggaaacgctacttcacatgggacaaaaacaggttcccaaatcctaaacggatgcaggagttgttaaggagtaagaaacgcaagcttgtggtgatttcagacccacatatcaaaatcgatccagattatagtgtgtatgtcaaagctaaggatcagggctttttcgtgaagaaccaggagggagaggactttgagggtgtctgctggcccggattgtccagctatctggattttacaaacccaaaagtccgagagtggtacagctcgctgtttgccttccctgtgtaccagggctccaccgatattctgttcttgtggaacgatatgaacgagccatccgtgtttagggggcctgagcagacaatgcaaaagaacgcgatccaccacggaaattgggagcatcgcgaactgcacaatatctacgggttctaccatcaaatggccaccgccgagggtctaataaagaggtccaaaggtaaagagcgacccttcgttctcacgcgctccttcttcgcaggctcgcagaaatacggggcagtgtggaccggggataacacggcagagtggagcaacctgaagatctctatccccatgttgctgaccctgtctattaccggcatttctttctgcggcgctgatatcgggggtttcattggtaatccggagaccgaactcctcgttaggtggtaccaagctggagcgtaccaacctttttttcgaggccacgctaccatgaatacgaagcgcagagagccgtggcttttcggcgaggagcacacccgcctaatccgcgaagccatccgggaaagatatgggctgttgccttactggtactccctcttctaccatgcgcacgtggcttcacaacctgtcatgcgtcctctttgggtggagtttcccgacgagctgaaaaccttcgatatggaagacgagtacatgctgggctctgcattattagtgcaccctgttactgagcctaaggcaaccactgtggatgtatttctgccaggcagtaacgaggtctggtacgactataaaacatttgcccattgggaagggggatgcacagttaagattcccgtggcgctggataccatccctgtcttccagagaggaggtagcgtcatccctataaaaactactgtcgggaagagtactgggtggatgaccgagagttcctacggcctcagagtcgccctgtccacgaaggggtcatcagtgggggagctctacttggacgacggccattctttccagtaccttcaccaaaagcagttcttacatcgcaagttctccttctgttccagcgttctgatcaattcgtttgcagaccagcggggacactacccgagcaaatgtgtggtcgagaagatactggtgcttggcttcaggaaggaaccatccagcgttactacccacagctcagacggtaaagaccagcctgtagcgtttacctactgcgctaaaacctctatcttgtctttggaaaaactcagcttgaacatcgcaaccgactgggaggtgcgtataatttag

SEQ ID NO: 224659 - DNA, 849 bp, synthetic construct
  misc_feature 1..849: note = Description of Artificial Sequence: Synthetic coding sequence
  source 1..849: mol_type = other DNA
atggaggcggctgtcaaggaggagatctccctcgaagatgaagccgtcgataaaaacatatttagagactgcaacaaaattgcgttctaccgacggcagaagcagtggctctccaagaaatccacctaccaggccctactggattccgttacaacagacgaagattcaactcgcttccagatcatcaacgaggcatctaaagtgcggtgtcaagaccaatccccgaccacgctggatgccttcaaaggtaaggagactactgtgcaggaggaaacgcaggacttgtccacgaggcagcacctcgcacagaaggaggccgaagaacccgataagcaaggccagattacgtgggacatcagcaacgtggcccctaagaccgagaatttcgaggacctgttggagcagacaccctgcagcgcttgcctccaggggtttaccagagataacacaagttcctcctttagtgaagacgctggcatttccttatccacttcagtgaagcttcctctcgcaagctcaagcaagcccaacgagaacgaggctctgcctaatcagccaccatcccaacagattcgccacaattatagactgcttgcctctaccgtctcggcagaaatggcacgaaatagacagctcatttgggagctggccagacagagcgaagcacaccttgatagaccagtggtcctgggagagcaggcgagcgcacagagggaggtggcctcaattctgtgccgaaagtcagtattagctatcaatcagcttgccgctaccgttgagggaacgatttctgttctgcagcaatttaacgagctgctggatcaccccttggacccagggaggagctag

SEQ ID NO: 224660 - DNA, 1230 bp, synthetic construct
  misc_feature 1..1230: note = Description of Artificial Sequence: Synthetic coding sequence
  source 1..1230: mol_type = other DNA
atgagacgatacctccgagtggtagtgctgtgtgtggcctgtggtttttgtagtctcctgtacgccttcagccaactggctgtttcccttgaggaagggacagggggtggtggaggaaagccacaggcagcagtggcctcatggctggctgggggagggcgtggtgctgtccgaggtgccggagtggccggaccggctgcccatcctggggttagtgatagatactcccttaaaatccagccagtcgaaaaaatgcatctggccgttgtggcctgtggcgaaagactggaggaaactatgactatgctgaaatctgccataatcttttccattaagccccttcaatttcacatcttcgcagaagatcagctgcaccattcctttaaaggacgcctcgataattggtccttcttacagacttttaattatactctttacccaatcaccttcccatcagagaatgccgcagagtggaagaagctgttcaagccttgcgcaagtcagcggttattcttgcctctgattctgaaggaagtcgatagcctgctttatgtcgatactgacatcctgttcctgaggcccgtggatgacatttggtcactgcttaagaagtttaactccacacagattgccgctatggcaccagagcacgaagaacctagaattggctggtacaaccgcttcgccagacatccgtactatggaaaaactggggtgaactccggcgtcatgctgatgaatatgacgcgcatgaggagaaagtactttaagaacgacatgaccaccgtgaggctacaatggggtgacatcctgatgcctctcctcaaaaagtataaactcaacatcacatggggagaccaggatctcctaaacatcgtgttctttcacaatccagagagcctattcgttttcccatgtcagtggaattataggcccgatcattgtatttacggatcaaattgtcaggaggctgaagaagggggaatcttcatcttacatggcaacaggggggtctatcacgacgacaaacagcccgcattccgagccgtctatgaagctctccgtaactgttctttcgaagacgataatatccgtagtttacttaagccacttgaactcgagctccagaagacagtgcatacgtactgcgggaaaatttacaagatattcattaagcagctcgccaagtccgtgagagataggtatgccaggtctcctaaagagaagtag

SEQ ID NO: 224661 - DNA, 1323 bp, synthetic construct
  misc_feature 1..1323: note = Description of Artificial Sequence: Synthetic coding sequence
  source 1..1323: mol_type = other DNA
atgagaagatacttacgcgtggtggtgttatgtgttgcctgtggtttctgctcactgctgtacgccttctctcagttagccgtttctctggaggagggcaccggcggtggcggtggaaagccgcaggcagccgtcgcctcctggctcgccggaggcggtcgtggagctgttaggggcgctggggttgccggaccagccgctcaccccggagtttcagatcgatgcaaggacttcagcctctgttattggaacccatactggatgctgccttctgacgtttgtggcatgaactgtttctgggaagctgcgttcaggtactcccttaaaattcagcccgtggaaaaaatgcaccttgctgtggtggcatgcggagagcgcctagaggagactatgactatgctcaaaagcgccattatcttctctatcaaaccacttcagttccatatcttcgctgaggatcaactccatcactcctttaaaggacgactggataactggagcttccttcaaacctttaattatacactctacccaatcacattccccagcgaaaatgctgccgaatggaagaagcttttcaaaccctgtgccagtcagcgactctttctgcccctgatcctgaaagaggtggactctctcttatacgttgacaccgatatcctcttcctcaggcctgttgacgacatctggtccctgctgaaaaaattcaatagtacccagattgcagctatggctcctgagcatgaggaacccagaatcgggtggtacaacagatttgctaggcacccttattatgggaaaacgggtgtgaactctggagtaatgctgatgaatatgacccgaatgcgaagaaagtactttaagaatgatatgaccacagtccgcctccagtggggggatatcttaatgccactgttgaagaaatacaaattaaatatcacctggggtgaccaagacctcctcaacatcgttttcttccataaccctgagtcactgtttgtctttccgtgccaatggaattaccgcccagatcattgtatttacggctcgaactgtcaggaagcggaagaaggaggcatttttatcctccacggtaacaggggcgtgtaccacgatgacaagcaaccagcttttagagccgtgtacgaggccctgaggaactgttcttttgaagatgacaatatccgctccctgctaaaacctctcgagctagagcttcagaaaaccgttcacacttactgcggcaaaatctataaaattttcatcaagcagctggcgaagagcgtgcgcgatcgatacgcaagatcccccaaggagaagtag

SEQ ID NO: 224662 - DNA, 1332 bp, synthetic construct
  misc_feature 1..1332: note = Description of Artificial Sequence: Synthetic coding sequence
  source 1..1332: mol_type = other DNA
atgaaattgcggtcaaaagcagcagctctgctcctattagctctggcagcccttctgcttgctcttctctcactacgggctggaagagccgagccaccggcactgcctgcgagaccagcaagcgcccctcagcgacaccccgcacccgtgccagcaaggtggcctggccctggcgcactgccgggagcctcccccggagtcaggcgaagacggccacctcgtcctaggcctcgcgctgggcgacggggtgccgctcgattggagaagctggcacgacgcccaggcgaacctcgaagctttcaagcagtgctgccacctgaactatggatccatctggccgtggtggcgtgcggcaataggctagaggagacactcgtcatgttgaaatccgctgtactgttttcccaccgcaagatccagtttcacatttttactgaagatagcctcaaaccagagttcgacaagcagttgcggcagtggccagattcttacactaagaagtttgagcaccgcatttatcctatcacctttagtgtagggaatcctcaagaatggaaaaaattattcaagccatgcgctgctcagcgcctttttcttcccgtgatcctaaaagacgtggatagtctgctgtatgtagatactgatgtgttgtttctgagaccagtagatgacatttggaagttactgcgcctgtttaactctactcaactagcagcgatggcccctgaacacgagatcccaaaaatcgggtggtatagccggttcgccagacaccccttctatgggtctgccggtgtaaactcaggggtaatgttgatgaatctgacacgcatccgatcaactcagttcaagaactccatgatcccaactggactggcatgggaggatatgctgtacccactctaccaaaaatataagaatgccataacctggggtgatcaagatctgctaaatataatcttttacttcaatcctgaatgtttgtacgtgttcccttgtcagtggaactatcgtcccgaccactgcatgtacggatccaactgtcgcgaggccgagcatgagggcgtaagtgtgctgcacgggaatcgtggcgtttaccatgacgacaagcagcccactttcagagcgctttacgaagctattagggattttccctttcaggacaatctcttccagtctatgtactatcctctccaactgaaattcctggaaaccgtgcacactttatgtggtagaatcccccaagtgttcttgaagcagatcgagaaaactatgaagcgggcttacgagaaacacgtaattattcatgtcggccctaaccaaatgcactag

SEQ ID NO: 224663 - DNA, 1854 bp, synthetic construct
  misc_feature 1..1854: note = Description of Artificial Sequence: Synthetic coding sequence
  source 1..1854: mol_type = other DNA
atgagatgcctggcagccagagtaaattataaaacgttgatcataatctgtgcattgtttacgctggttacagtgctactgtggaacaagtgctcaagcgacaaagccatacaatttccgagacggtcaagcagtggcttccgggtagacggcttcgagaaacgggcagctgcaagcgagagcaataactatatgaaccacgtagctaaacagcagtccgaggaggcttttcctcaggaacaacagaaagctccaccagtcgtgggcggttttaattccaatgttggttctaaggtgctggggcttaagtacgaggaaattgactgtctcattaatgatgagcacacaatcaaaggacggagggagggtaacgaggtttttctacctttcacatgggtggaaaaatacttcgatgtctacggaaaggtagtgcagtacgatgggtacgaccggttcgaattctcgcacagctactcaaaggtgtatgctcagagagctccataccatcccgacggggttttcatgtcattcgaagggtataatgtggaagttagggatagggtgaagtgtataagcggcgtagagggggtgcctctgtctacacagtggggccctcaggggtatttttacccaatacaaatcgcccaatatggattgtcgcactactctaaaaatctcaccgagaagcctcctcatatagaagtgtacgaaacagccgaggatcgcgacaaaaacaagcctaacgactggaccgtgcccaaaggatgcttcatggccaatgtcgcggacaaatcccgtttcacaaacgtcaaacagtttatcgcccctgaaactagcgaaggcgtgtcacttcagcttggtaacaccaaagactttatcatctctttcgacctgaagttccttacgaacggttccgtatctgttgttctcgagacgacggagaagaatcagctgtttactattcactatgtgagtaatgctcagctgattgctttcaaggaacgggatatttattatgggataggacccaggacgtcttggtctacagtgaccagggatcttgtaaccgatctgaggaaaggggttggcttgtccaacactaaagcggttaagcccacgaaaattatgcccaaaaaagtcgtcagactcatcgctaaggggaaaggctttttggataatattacaatctctaccaccgcccatatggccgcattctttgccgctagtgattggcttgttaggaatcaggacgaaaaaggtgggtggccaattatggtcacaaggaaactgggagaggggttcaaatccctggaacccggatggtattccgcaatggcccagggacaggccattagtactcttgtgcgggcttatttactgaccaaggaccatatctttctgaatagcgctctccgggctaccgcaccgtataagtttctttcggagcagcacggagtgaaggcagttttcatgaacaaacacgactggtacgaggagtaccctaccactcctagctcatttgtactaaatggattcatgtactcactgatcggtctctatgatctgaaggagaccgcaggggagaagctgggcaaggaagccaggtcactttacgagcgtggcatggaatcgttgaaggccatgctgcctttatacgacacagggtccggcactatttacgacctgcgacacttcatgcttgggatcgctcccaacctggcacgctgggactaccatactacccacatcaaccagctgcaacttttgtccaccattgatgagtctcctgtgttcaaagagtttgttaagcggtggaaaagttacctaaaaggctcccgagcaaagcacaactag

SEQ ID NO: 224664 - DNA, 1662 bp, synthetic construct
  misc_feature 1..1662: note = Description of Artificial Sequence: Synthetic coding sequence
  source 1..1662: mol_type = other DNA
atgaatcacgtcgccaagcaacaatccgaggaagccttcccacaagagcagcagaaagcccctcctgtggttgggggttttaacagtaacgtcggctctaaggtgttagggttgaagtacgaggagatcgattgccttattaatgatgagcataccattaaaggcagacgggaggggaatgaagtgttcctccccttcacctgggtagagaaatatttcgatgtgtacggaaaggtggtacaatacgatggctacgaccgtttcgagttctcacactcctacagcaaggtctatgctcagagggcaccgtaccacccggatggtgtgtttatgtcctttgaaggatataacgtggaggtgagagacagagtcaagtgcatctcgggtgtcgaaggtgtcccccttagtacgcaatggggccctcaaggatacttctacccgatacagattgcccaatacggtctctctcactattccaaaaatcttaccgagaagcccccacacattgaagtttacgagaccgctgaggaccgagataagaacaagcctaatgactggacagtgccaaagggatgtttcatggccaatgtggcagacaagagtcggtttacaaacgtgaaacaatttattgccccagaaacctcagaaggagtctccctacagctgggcaatacaaaagactttattatctctttcgaccttaagttcctcactaacggtagcgtctctgtggtgctcgaaaccacagagaagaaccaattgttcactatccactatgtttcaaacgctcagctcattgcctttaaggagagggatatctactacggcataggacctcgtaccagttggtcaactgtcactagagacctggttaccgacctccgaaagggggtggggttaagcaacaccaaggctgttaagccgactaagatcatgccaaaaaaagtggttcggctgatcgcaaaaggcaaggggttcctggacaatatcactataagcactacagctcacatggctgccttcttcgctgcgtcagactggctggtgaggaaccaggacgagaaagggggttggcctatcatggtgacgcggaagctcggagaggggtttaaaagcctcgagccgggatggtattcggcaatggcgcaaggacaggccatctctacattggtgagagcctatcttctgaccaaagaccatatttttctgaactctgcactgagggccacagcaccctataaatttctcagcgaacaacatggcgtgaaagcagtattcatgaataaacacgactggtacgaggagtacccgacaaccccctctagtttcgtactcaacgggtttatgtattccctgatcggactgtacgatctcaaggaaactgctggcgagaagctgggcaaggaggctcgttcattgtacgaaagggggatggagagcttaaaggcgatgctacccttatacgatactggcagcggaaccatttacgacctccggcacttcatgcttggcatcgcacccaacctggctaggtgggattatcacacaacccatatcaaccaactacagcttctaagtaccatagacgagagtcctgtgttcaaggaatttgtaaaacggtggaagtcttacctgaagggttcacgcgcaaagcacaactag

SEQ ID NO: 224665 - DNA, 1956 bp, synthetic construct
  misc_feature 1..1956: note = Description of Artificial Sequence: Synthetic coding sequence
  source 1..1956: mol_type = other DNA
atggccaggggctcagccgtcgcatgggctgctctgggacctctgctctgggggtgcgcgctgggcctccaggggggaatgctttatcctcaggagagcccctcaagggagtgtaaggagcttgacggcctctggtcattcagggccgacttttcagacaatagacgacggggattcgaagaacagtggtaccggcgtcctctgtgggaaagcggcccaacagtagatatgccagtgcctagtagctttaatgacattagtcaggattggcgccttcggcactttgtgggttgggtctggtatgagagggaagtgattctccctgagcgttggacccaggacctgcgcacacgagttgtcctgcggatcggctccgcacattcatatgctattgtctgggttaatggagttgatacactggaacatgagggcggatacctgcctttcgaagctgacatctccaatctcgtccaggttggcccacttcccagccgactgcgaatcactatcgctataaacaacacccttactcctaccactcttcctcccggaacgatacaatatttgacggatacatctaagtatcctaaaggatactttgtgcaaaatacttattttgacttcttcaactatgccggactccagcggagcgtgctcctgtataccacaccgaccacctacatcgacgacattaccgttaccaccagtgtggagcaggacagtgggcttgtcaactaccaaataagtgtgaagggttcgaacctgtttaagttggaggtgcgattgctggatgccgaaaataaggtagtggctaacggtactggaacccagggccaactcaaggtcccaggggtgagcctttggtggccctatctgatgcacgagagacctgcttacttgtactccctggaggttcagctgactgcacagacatccctggggccagttagcgacttttacacgctgccagtgggaattcgcaccgtcgcagtgacgaaaagtcaatttttgataaatgggaaaccattctacttccacggcgttaataaacatgaagacgctgacattagaggaaaggggttcgactggccactgctggttaaagactttaaccttttgaggtggttaggcgcaaatgctttccgaacatcacactatccctatgcagaggaggttatgcagatgtgtgaccggtacgggattgtagtaatagatgaatgtccaggtgttggacttgcgctgccacagttcttcaataatgtgagtctccaccatcatatgcaggtgatggaggaagtagtccgccgagacaaaaatcatcctgccgtcgtgatgtggtccgtcgccaacgagcccgcaagccacttagagtccgctgggtattacctcaaaatggtaatagcacatacaaaatcgctggaccccagtcggccagtaactttcgtgtcaaatagcaattatgctgccgacaaaggtgccccttatgtggatgtgatatgtctcaactcatactattcttggtaccatgactatgggcacttggagctgatccagctccagctcgccactcagtttgagaactggtacaaaaagtaccagaaaccgatcattcagagtgaatacggggcagaaacaatcgccggtttccaccaggatccccctctgatgtttacagaggaataccaaaagagtctgctggaacagtaccacctgggcctggatcagaagaggaggaaatacgttgtgggtgagctgatctggaacttcgcagatttcatgaccgaacagagtcccacccgggtccttgggaataagaagggcatattcactagacagcggcagccaaagagcgctgcgtttttactgagagagagatactggaaaatagcaaacgagacaagataccctcatagcgtggctaaatcccaatgtctagagaattctctgttcacatag

SEQ ID NO: 224666 - DNA, 1803 bp, synthetic construct
  misc_feature 1..1803: note = Description of Artificial Sequence: Synthetic coding sequence
  source 1..1803: mol_type = other DNA
atggctaggggatcagccgtcgcttgggcggctctgggacccctgttatggggctgtgcactgggcctccagggtggtatgctgtatcctcaagagtctcctagtcgcgagtgtaaagaactcgatgggctatggtctttccgagccgacttcagtgacaatcgccgacgcggatttgaagagcagtggtaccggcgacctctctgggaatctggtccaacagtggacatgccagtgccttctagtttcaacgatatttctcaggattggcgtctcagacacttcgtaggttgggtctggtacgagagggaggttattttgcccgagcggtggactcaggacttacgcacaagggtagtgttgcgcatcggatccgcgcatagctacgccattgtgtgggtgaacggagtggatactcttgaacacgaaggtggctatctgcctttcgaggctgatattagtaaccttgtgcaggtggggcctctgccaagtcgcttgagaatcaccattgctatcaacaacacactgactccgacgactctccccccaggtacgattcagtatctaaccgacaccagcaagtatccaaagggatactttgtccagaatacttacttcgatttcttcaactatgccggtctacagcggagtgtcctcctctacaccactccaacaacatacatcgacgacattacagtcactacctctgtggaacaggatagtggcctcgtcaattaccagatttccgtcaagggctcaaacctctttaaactggaggtgaggctcctggacgccgagaacaaggtggtcgcaaatgggacaggtacacagggacaactgaaggtgcctggtgtttccttgtggtggccctacctgatgcacgagcgcccagcctatctgtacagcctggaaattagagggaaaggctttgattggcccttactcgtcaaggactttaatctcctgaggtggctcggcgctaacgcctttcgtacgtctcactatccctatgctgaggaggtgatgcagatgtgcgatcggtacggtattgttgtaatagacgagtgtcccggagtcgggctagcactgccccagttctttaataacgtctctctgcatcatcatatgcaagttatggaagaggtggttagacgagataaaaatcatcccgctgttgtcatgtggagcgtggccaatgagcccgcatctcaccttgagtctgcaggatactacctcaaaatggtgatcgcccacacaaagagccttgacccctcacgccctgtcaccttcgtctctaatagcaattatgccgcagataagggtgcaccctatgtggacgtgatctgcctgaatagctactattcttggtatcacgattacggtcatttggaacttatacagttacagctggcaacgcagtttgagaactggtataaaaaatatcagaagccaatcatacaaagcgagtacggtgctgagaccattgcaggcttccaccaggatccaccattaatgtttaccgaagaataccaaaagtctctgttggagcaatatcaccttggattagaccagaaacgacgaaaatatgttgtcggcgaactgatatggaattttgctgactttatgacggagcagtcccccacacgggttctgggcaacaaaaaggggatctttacaaggcagagacagccaaagagcgcagcctttctgttgcgggagcggtactggaaaattgcaaacgagactagatacccacactcggtagcaaagagccaatgcctggagaactccctctttacttag

SEQ ID NO: 224667 - DNA, 675 bp, synthetic construct
  misc_feature 1..675: note = Description of Artificial Sequence: Synthetic coding sequence
  source 1..675: mol_type = other DNA
atggcatccagtactccatcgtcatctgctacttcttccaatgctggtgcggaccctaatacaacaaatttaaggccaacaacatacgacacttggtgtggagtggcacacggctgtacacgtaagctcggactgaagatttgtggtttcttgcagcgaacgaactccctggaggagaagagtcgcctggtctcagcctttaaagagcgtcaatcatcaaaaaatctgctgtcttgcgaaaactccgacagagatgcccgtttcagacggactgaaacagatttctctaatttattcgcgagggacctgcttcctgctaaaaatggagaggagcagacggtgcagtttctcctggaggtagtcgatatcctgctcaattatgtgcgcaaaacgtttgacaggagtacaaaagtccttgactttcatcatccccatcagctactggaaggaatggagggttttaaccttgaactgagtgaccatcctgagagcctggagcaaatcctcgtggactgccgtgacaccttgaaatatggagtacggacagggcacccccgattctttaaccagctctccaccggcctggacatcatcggcttagcaggcgaatggttgacgtccacagctaataccaacatgccttctgatatgcgcgagtgctggttgttgcggtag

SEQ ID NO: 224668 - DNA, 1785 bp, synthetic construct
  misc_feature 1..1785: note = Description of Artificial Sequence: Synthetic coding sequence
  source 1..1785: mol_type = other DNA
atggcgagctccaccccttcatcaagtgccacctccagcaacgcaggcgctgatccgaataccacaaacctacggccaacaacgtacgacacctggtgtggggtcgcccacgggtgtacccgaaaacttggactgaaaatatgtggcttcctccagaggaccaattcactggaagaaaaaagccgcctagtttccgcctttaaggagagacagtctagcaagaacctcttgtcatgtgagaatagtgacagagatgccagatttcgaaggacagagactgatttctctaatctgttcgctagagatcttcttcccgctaagaacggagaagagcaaactgtgcagtttctgctggaagtagttgacattctactgaactatgtgcgtaaaaccttcgaccgctctactaaagtgctcgacttccatcacccacatcagctcctggagggaatggaggggttcaacctggagctgtccgaccacccagagagtctggaacagatcctcgtggactgtagagataccctaaagtatggcgtcagaaccggccaccccagattttttaaccaactgtcgaccggactcgatatcattggcctggctggcgagtggcttacatccaccgcaaataccaatatgtttacgtacgagatcgcacctgtctttgtcctcatggagcagattacactgaaaaagatgcgggagatcgtgggttggtcatcgaaggacggcgatgggatatttagccctggaggggcaatcagtaacatgtatagtatcatggcagctcgctacaaatatttcccagaggtgaagactaagggcatggcagccgttccgaagctagtgctgttcacctctgaacagagccattatagcatcaagaaggccggtgcagcactaggctttggcaccgataacgtcatcttgatcaagtgtaacgagagagggaagatcataccagctgactttgaagccaaaattctggaagctaagcaaaaaggatatgttcccttctatgttaatgcgactgccggaacgacagtgtacggcgctttcgaccccattcaggaaatcgcagacatctgcgaaaagtataacctgtggttacatgtggacgcggcttggggagggggattattgatgagcagaaagcatcggcacaaactgaatggaattgaacgggctaactctgtcacatggaatcctcataagatgatgggggtcttgctgcaatgctctgccatcctggtcaaagaaaaggggatacttcagggttgcaaccagatgtgtgctggctacctctttcagccagacaagcagtacgatgtctcatatgatacaggtgacaaggctattcagtgtggcaggcatgtcgacatcttcaagttttggcttatgtggaaagctaagggcactgtgggattcgagaaccagatcaataagtgtctggaattggccgagtacctatatgccaagattaaaaatcgtgaagagtttgagatggtgttcaatggcgaacctgaacacactaacgtgtgcttttggtacatccctcagagcctgagaggagtgcccgatagcccacagcgtagagaaaaactccacaaggttgccccaaaaatcaaagctctaatgatggagtccggcaccactatggttggctatcaaccccagggcgacaaggccaacttttttcgtatggtcattagcaacccagccgcaactcagtccgatatcgacttcctgatcgaggagatcgagcgtctaggtcaggatctgtag

SEQ ID NO: 224669 - DNA, 675 bp, synthetic construct
  misc_feature 1..675: note = Description of Artificial Sequence: Synthetic coding sequence
  source 1..675: mol_type = other DNA
atggcatcgagcacgccctcctcttctgcaacttcttccaatgccggagctgaccctaatacaactaacctgagacctacaacgtatgatacgtggtgtggagtcgcccatgggtgtactcgtaagctgggcctgaagatttgcggcttcctccagaggaccaatagcctggaggagaagagtcgactggtttccgcctttaaggaaaggcagtcatcaaagaacctgctgagttgcgagaatagcgatagggatgccagattccgccgaactgagacggatttctcaaatctcttcgcgcgtgatctactcccagccaagaatggagaggagcagactgttcagtttttgctggaagtggtggatatccttttgaactacgtgaggaaaactttcgataggagcactaaggtgctcgatttccaccatccgcatcagctgttggagggtatggagggttttaacctagaacttagcgatcaccctgaaagcctggaacagattttggtggactgcagggatactctgaagtatggtgtaagaactggccatccacgctttttcaaccagctgtctaccgggctggacataattggccttgcaggggaatggttgacctccacggcgaataccaatatgccatctgatatgagagaatgttggctgctgcgctag

SEQ ID NO: 224670 - DNA, 114 bp, synthetic construct
  misc_feature 1..114: note = Description of Artificial Sequence: Synthetic coding sequence
  source 1..114: mol_type = other DNA
atggcctcgtcaaccccgtcgagtagtgccacctcctcaaacgctggagcggaccccaatacgactaaccttagaccgacaacttacgacacttggtgcggtgtcgcccattag

SEQ ID NO: 224671 - DNA, 258 bp, synthetic construct
  misc_feature 1..258: note = Description of Artificial Sequence: Synthetic coding sequence
  source 1..258: mol_type = other DNA
atggcaagctctacccctagctcatcagctacgtcgtccaacgctggggctgatcccaacacaacaaacctgaggcctactacctacgatacgtggtgcggcgtcgcacatggttgcacccggaagctcggccttaagatatgcggatttctgcagagaacaaactcgcttgaagagaagtcaagactcgtgtcagcatttaaggaacgacaaagctccaagaacttgctttcttgtgaaaacagcgacagagattag

SEQ ID NO: 224672 - DNA, 348 bp, synthetic construct
  misc_feature 1..348: note = Description of Artificial Sequence: Synthetic coding sequence
  source 1..348: mol_type = other DNA
atggcctcaagcaccccatccagcagcgctactagctccaatgccggagcagacccgaacacgaccaaccttcggccaactacatacgatacctggtgtggcgtggcccacggttgcacaagaaagctgggccttaaaatctgcggcttcctgcagagaactaacagcctggaggagaaatctagactggtatctgcttttaaggagagacagagcagcaaaaacctcctctcttgcgaaaatagtgaccgcgacgcccgattcaggaggacagagacggatttttctaacctatttgccagagacctgcttccggcaaagaatggggaggagcaaactgtgcaatag

SEQ ID NO: 224673 - DNA, 366 bp, synthetic construct
  misc_feature 1..366: note = Description of Artificial Sequence: Synthetic coding sequence
  source 1..366: mol_type = other DNA
atggcttcttccacgcccagtagctcagcgacaagtagtaatgccggagcagacccgaataccactaatttgcggcctaccacttatgacacgtggtgcggcgtggcacacggatgtacccgcaaactcgggctgaaaatttgtgggtttcttcagcgcacaaactccttggaggagaagtctaggctcgtttcggcgtttaaggaaaggcaaagtagcaagaacttgctgtcctgcgagaacagcgatcgagatgccaggtttcggaggactgaaactgattttagtaatctgtttgcccgtgatctgctgccagccaagaacggtgaagaacagaccgtgcagttcctgctggaagtggtctag

SEQ ID NO: 224674 - DNA, 1758 bp, synthetic construct
  misc_feature 1..1758: note = Description of Artificial Sequence: Synthetic coding sequence
  source 1..1758: mol_type = other DNA
atggccagccctggcagcgggttttggagttttggatcagaggatggttccggagacagtgagaaccccggaaccgctcgcgcatggtgtcaggtggcacagaagttcacaggagggattggaaacaagttatgcgcgctcttgtacggggacgctgaaaagcctgccgagtctgggggaagccagcctccaagagccgcagcaagaaaagccgcttgcgcttgcgaccagaaaccctgttcctgctctaaggtggacgtgaactacgccttcttgcacgcaaccgatctgttacccgcatgcgacggggaacggcctaccttagcattcttgcaggatgttatgaacatcttgctgcagtacgttgttaagagcttcgatagatccactaaggttatagactttcattacccaaacgaactgttgcaggagtataactgggagttagccgatcagccccaaaacctggaagaaattctgatgcattgtcagactacactgaaatatgcaattaaaaccgggcaccctcgatattttaatcaattgtccactggcctggacatggtcgggctggccgcagattggctgacttcgactgccaatacgaacatgtttacttacgagattgcaccagtctttgtgctgctcgaatacgtgacactgaagaagatgcgggagatcatcggctggccagggggatcaggggatggtatttttagcccagggggtgctatctccaacatgtatgccatgatgatagctaggtttaaaatgttccctgaggttaaagaaaaaggcatggccgctctccctcgacttatcgcttttacgtccgagcattcacactttagccttaagaagggagccgctgcactcggaattggcaccgacagtgtaatcctaataaaatgcgacgagcggggtaaaatgatcccctcagacctggaaagacgtatcctcgaagctaagcagaaggggttcgttcctttcctggtgagtgcaaccgcgggaactacagtgtacggcgcttttgatcctttgctggctgtagccgatatctgtaaaaagtacaaaatttggatgcatgtggatgccgcttgggggggtgggctactgatgtctaggaagcacaaatggaaactgtcaggtgtggaacgtgctaacagtgttacctggaacccacacaagatgatgggcgttccactgcagtgcagtgcccttctcgtgagggaggaaggcttaatgcaaaattgcaaccagatgcatgcatcatacctgtttcagcaagacaaacactatgatctgagctacgataccggagataaggcgctccagtgtggccgtcatgtggatgttttcaagctgtggttaatgtggagggccaagggcacaacgggatttgaagcccacgtggataaatgcttggagctcgccgagtacctgtacaacatcattaagaaccgcgaaggctacgaaatggtctttgacgggaagcctcagcacacaaacgtgtgcttttggtatattccaccatcccttagaacgttggaggacaacgaggagagaatgtcaagactgtccaaagttgcccctgtgataaaggcgcgaatgatggagtatggcactacaatggttagttaccagcccctgggagacaaagtaaacttcttcagaatggtgatttcaaacccagccgcaacccatcaggacatcgacttcttaattgaggagattgagcgtctcggacaagacttatag

SEQ ID NO: 224675 - DNA, 390 bp, synthetic construct
  misc_feature 1..390: note = Description of Artificial Sequence: Synthetic coding sequence
  source 1..390: mol_type = other DNA
atgaacatactgctacaatacgtggtgaaatctttcgatcgcagtaccaaagtcattgactttcactacccgaatgagctgctgcaggaatacaattgggaacttgctgatcagccacagaacctagaagaaattttgatgcactgccagacaacgctaaagtacgcaatcaaaactgggcatcctcgctacttcaatcagctctcaaccggactggacatggtcgggttagcggcagactggctgacatccactgccaacacaaatatgtttacttacgaaattgccccagtgtttgttctgctggaatacgtgactctaaagaaaatgcgggaaatcatcggctggcccggtggtagtggcgatggcattttcagccccggtacctag

SEQ ID NO: 224676 - DNA, 1758 bp, synthetic construct
  misc_feature 1..1758: note = Description of Artificial Sequence: Synthetic coding sequence
  source 1..1758: mol_type = other DNA
atggccagcccaggctccgggttctggtcgttcggctcggaggatggctcgggggactcagaaaatcccggaaccgcgagagcatggtgccaagtcgctcagaagttcactgggggaatagggaacaaattgtgtgccttgttgtatggggacgcagagaagccagccgagtcgggagggtcccaaccaccacgagctgcggctcggaaagcagcttgtgcatgcgatcagaagccctgtagctgctcgaaggtagacgtcaattatgcattccttcacgctactgacttattgccagcttgtgacggagagcgccctacattagcgttcttgcaagacgtgatgaacatcctgctgcagtacgtggtcaagtcttttgaccgctccactaaagtcatcgattttcactaccccaacgaactcctacaagaatataactgggaactggctgaccagccccaaaacctggaagaaatcttgatgcactgtcaaacaactctcaagtatgctattaaaacaggtcaccctagatacttcaaccagctgtccacaggattagatatggtcgggttggcagcagactggcttacttctaccgcgaacaccaacatgttcacttatgaaattgcccctgtatttgtcctgctggagtacgtgacgttaaagaaaatgcgagagatcatcggctggcccggagggtctggagacggaatctttagccccggaggcgctatcagtaacatgtatgcgatgatgattgccagatttaagatgttccccgaagtcaaggaaaaagggatggccgctttacccaggttaattgcttttaccagcgaacattcacacttctcgctcaaaaaaggggcagccgcactcggtattggcactgattctgtaattttaataaaatgcgacgagaggggtaagatgataccctccgatcttgaacgtaggatccttgaagcaaaacagaaaggctttgtaccttttctggtctctgccaccgccggaaccactgtgtacggagcctttgatccactgctggccgtggccgacatctgcaagaaatacaagatctggatgcatgtggatgctgcctggggcggaggcctcctgatgagtagaaaacacaaatggaagctgtcgggagttgagagagcgaatagtgtaacctggaatccccacaaaatgatgggtgtgcccctccaatgcagcgccttgctagtcagagaagagggacttatgcagaattgcaaccagatgcacgcatcgtatctctttcagcaggataaacactacgacctgtcctacgacaccggggacaaagccctgcagtgtggaagacacgtggatgtcttcaagctgtggttaatgtggcgggctaagggaactacaggatttgaggcccatgtagacaagtgcctggagttagctgagtatctctataatatcataaaaaatcgggagggctacgaaatggttttcgatgggaagccgcaacacacgaatgtttgtttctggtacatccctccttctctgcgcacacttgaagacaacgaggagcgcatgtctcgtctgtccaaggttgcccctgtgattaaagcccgtatgatggagtatggcactactatggtgtcctaccagcccctcggagacaaggtaaattttttccgtatggtgatcagcaaccctgcagccacacaccaagacatcgatttcctcattgaggagatagagcgcctgggacaagatctgtag

SEQ ID NO: 224677 - DNA, 567 bp, synthetic construct
  misc_feature 1..567: note = Description of Artificial Sequence: Synthetic coding sequence
  source 1..567: mol_type = other DNA
atggcctctcccggttctggtttctggagctttggttcagaagatggatccggtgattccgaaaacccaggtacagcccgtgcttggtgtcaggtcgctcagaaattcacagggggtattggaaacaagttgtgcgccctcctgtatggagacgccgagaagccagccgagagcgggggatcccagcccccaagggcagctgcaagaaaggccgcatgcgcctgtgaccagaagccctgctcgtgttctaaggtggacgtgaactacgcattccttcatgctaccgacctgttgccagcctgtgatggggaacggccaacactggcgttcttgcaggatgttatgaatattctgttgcagtacgtggttaaaagctttgataggagcacgaaagtcatcgatttccattaccctaatgaacttttacaggaatacaactgggagctggccgaccagccgcagaatcttgaggagatccttatgcattgccaaaccaccttgaagtacgcaattaagacagggatcgtctcctcgaagatcattaaattattcttcagactccagtag

SEQ ID NO: 224678 - DNA, 1677 bp, synthetic construct
  misc_feature 1..1677: note = Description of Artificial Sequence: Synthetic coding sequence
  source 1..1677: mol_type = other DNA
atgtaccgataccttggcgaagctcttctcttatcccgggctggcccagcggcattgggatctgcgtcagccgactccgctgccttactggggtgggccagggggcagccagctgctgcccctcaacccggactggcccttgccgcaaggaggcactactccgaggcggtggccgatagagaagacgatccgaacttctttaagatggtcgaagggttctttgataggggagcgtctattgtagaagataagctggttgaagacctgaggactagagaaagcgaagagcagaaacgaaacagggttagggggattcttcggatcatcaagccatgtaaccacgtgctgtcactgtcgttccctataaggagagacgatgggtcatgggaggttattgagggatacagggcacagcattcccagcaccgcaccccttgtaagggcggtattcgctattcaactgatgtttcagtagatgaagtcaaggccctggcatcattaatgacatataagtgtgccgttgtggatgtgccatttggtggagccaaggctggcgtcaaaatcaatcccaagaattacacggacaacgaattagagaagatcacaagaaggttcactatggaactggccaaaaaaggcttcatcggcccaggcatcgacgtacccgcaccagacatgtctacgggggagcgggaaatgagctggatcgccgacacatatgcatcaaccatcgggcactatgatatcaacgcccatgcctgtgtaactggtaaacccatcagccagggcggaattcatggtaggatctccgctactgggagaggagtgttccacgggatcgaaaacttcattaatgaggcatcatacatgagcattctcggcatgactcctggattcggcgacaagacttttgtcgtccagggtttcggcaatgtaggactccatagcatgagatacctgcacagatttggggcaaagtgcatagctgtcggagagtccgacggatccatttggaacccagacggaatcgaccctaaggagctggaggactttaaattgcagcatggatccattctagggttccccaaggccaagccgtacgaggggtccatcctcgaggcagactgtgacatcctaatccctgctgccagcgagaagcagcttacgaagagtaacgcccctagagtgaaagccaagatcatcgcggagggcgcaaatggacccacaaccccagaagccgataagatcttcttggagcgcaacatcatggtcatacctgatttatacctgaacgcgggaggcgttaccgtgtcatatttcgagtggctgaaaaacctgaatcatgtgagttacggccgactcaccttcaaatatgagagagacagcaactatcacctgctgatgtctgtgcaggaatccctggagcgtaagttcggtaagcacgggggaactattccgatagtgcctactgctgagtttcaggatcgaatcagcggcgctagtgagaaagacattgtccactccgggttggcgtacacgatggagagatccgctagacagatcatgagaacagcaatgaaatataatcttggccttgatctgaggactgccgcttacgtgaacgcaatcgagaaggtgtttaaggtttacaacgaggccggtgtgacttttacgtag

SEQ ID NO: 224679 - DNA, 1548 bp, synthetic construct
  misc_feature 1..1548: note = Description of Artificial Sequence: Synthetic coding sequence
  source 1..1548: mol_type = other DNA
atgtacaggtatctgggccctgggactgcaagacgcagacctgccgcaggggctggtattggaagaccggcacccctccagcggggaggtggaagacccagaggcagacctcaactgctccaggacggcggtggcctgctaaggagccggagacagcaccgtggtggacaggcaggaggaggccctgaggatcccggtgaaagaggcgctgaggcagaaccgggtgcacggcacccagcagatcaccaggctctgcaaccgtgtgcggagagcctccttcctcaacatagtcagcatcgaactccttgcaagggcggtattcgttattccaccgatgtctccgtcgacgaggttaaagcactggccagcctaatgacttataagtgtgcagttgtcgacgtcccatttgggggagcaaaagctggcgtaaaaatcaatcccaaaaactacaccgacaatgaactggaaaaaatcactagacggttcaccatggagctggcgaagaagggcttcatcggaccaggcattgacgtacccgcacctgacatgtctacgggggagcgggaaatgagttggatcgccgacacctacgcttctactatagggcattatgacatcaacgcgcacgcttgtgtgaccgggaagccaatatcacaaggcggaattcacgggaggatcagtgccaccggtaggggagtatttcatggcatcgagaatttcataaatgaggcctcctacatgtctattcttgggatgacaccaggttttggtgataaaacttttgtagtgcagggcttcggtaatgttggtctgcactccatgcgatatctgcacaggttcggagcaaagtgtatcgccgttggcgagtcagatggatctatctggaatcccgatggcattgacccaaaagagttagaagatttcaagttacagcacggcagcatccttggctttcctaaggccaaaccctatgaagggagtattttggaggccgattgcgacattctaatcccagccgctagcgaaaagcagcttaccaaaagcaacgcaccacgggtaaaagccaaaatcatagcggaaggagcaaatggcccaaccacacccgaggctgacaagatttttcttgaacgcaacatcatggtgataccggacttatacctgaatgccggaggcgtgacagtgtcatatttcgagtggctaaagaatttaaatcacgtttcctacggaagactgaccttcaagtacgaacgggacagcaattaccatctgctgatgtccgtccaggagagccttgagaggaagtttggaaagcacgggggtaccatacccattgtgcctacagccgaattccaggatagaatcagcggagccagtgaaaaggatattgttcattcaggactggcttacacaatggaacggtcggccaggcaaatcatgcggacggcaatgaaatataacctcggcctagatctgcgcacagccgcatatgtgaacgccatcgaaaaggtgttcaaagtctataacgaggctggtgtcacctttacctag

SEQ ID NO: 224680 - DNA, 1473 bp, synthetic construct
  misc_feature 1..1473: note = Description of Artificial Sequence: Synthetic coding sequence
  source 1..1473: mol_type = other DNA
atggttgagggattcttcgaccggggagcctccatcgtggaggacaagttagtggaagatttgagaacccgggagtctgaggaacagaaacgaaatcgtgtccgaggcattcttagaataattaagccttgcaaccacgtcctgtcgttatcttttcccattaggcgcgacgatgggtcctgggaagtcatcgaagggtaccgagcccagcacagtcagcatagaacgccctgtaaaggtggaatccggtacagtacagatgtgtccgtcgacgaggtaaaggcacttgcctccctcatgacttataaatgtgcagtcgtggacgtgccttttggcggagccaaggctggcgtcaagattaatccgaagaattatactgacaacgagttagagaaaatcaccagacgctttaccatggaactggccaaaaagggattcatcgggcctggaattgacgttcccgctccagacatgagtaccggcgagcgagaaatgtcatggatagccgacacctacgcgagcaccatcggccactatgatatcaacgctcacgcttgcgtaacaggtaagcccatatctcagggaggcattcatggcaggatcagcgccacaggcaggggtgtttttcacggaattgagaattttataaacgaagcgtcttacatgagcattctgggaatgactcctggattcggtgacaagacgtttgtggtccaggggttcgggaacgtgggcttacactctatgcgctatctccatagattcggagcaaagtgcatcgccgtcggagagagtgatggctccatctggaatccagatggcattgaccccaaggaattggaggattttaagctgcagcacgggtccatcctcggatttcccaaagccaaaccttatgagggttccattctggaggcggattgtgatatattgataccagcagcctctgagaaacagctaacgaagtctaatgctcctagggttaaagcaaaaattattgctgagggagccaatggcccaaccacccctgaggcagataaaatcttccttgaacgcaatattatggtgatccctgacttgtatcttaatgcagggggagtcaccgtgagctactttgaatggctcaagaaccttaaccatgtttcttacgggagactaacattcaagtacgagagggactctaactatcatctgctgatgtctgtgcaggagtcattggaacgcaagtttggaaagcatggagggacgattccaatcgttccaactgctgagtttcaagatcgcatttccggggcaagcgaaaaagacattgttcactcaggtctggcgtatacaatggaacgttcagctcggcagataatgcgaacagctatgaagtacaatctagggctcgacttgcgaactgccgcatacgtgaatgccattgaaaaggttttcaaggtgtataacgaggccggtgtgacttttacctag

SEQ ID NO: 224681 - DNA, 774 bp, synthetic construct
  misc_feature 1..774: note = Description of Artificial Sequence: Synthetic coding sequence
  source 1..774: mol_type = other DNA
gagaacttcattgtggagggattcgggaacgtggggctgcattcaatgaggtatctgcaccgcttcggagccaaatgtatcgccgttggcgagagcgacggaagcatttggaatcccgacggaattgacccgaaagagttagaggacttcaagctccagcatggttctatactgggttttccgaaggcgaaaccctatgagggaagcattttggaagctgattgcgacattctaatacccgctgccagcgaaaaacagttgacaaaaagtaatgcgcctagggtaaaagctaagatcatagcggaaggggcaaacgggcctacgacgccggaggccgacaaaattttcttggaacgaaacattatggtgatcccagacctttacctcaatgccggtggcgtgaccgtctcatattttgagtggctcaagaatctgaatcacgtcagctacgggcgtctgacctttaaatacgagagggactctaattatcatttgctgatgtctgtgcaagagtctcttgagcggaagttcggaaagcacggcggaactattcctatcgtcccaaccgcggaattccaggaccggatttccggggcaagtgaaaaagacattgtgcatagtggcctcgcctacactatggagcgctccgcgaggcagattatgagaaccgctatgaagtacaacttaggccttgacttaaggacagctgcttacgttaacgcgattgagaaagttttcaaggtctataacgaggctggcgtcacttttacttag

SEQ ID NO: 224682 - DNA, 1176 bp, synthetic construct
  misc_feature 1..1176: note = Description of Artificial Sequence: Synthetic coding sequence
  source 1..1176: mol_type = other DNA
atgacctacaagtgtgccgttgttgatgtccccttcggcggagctaaagctggcgtgaagattaacccgaagaattacaccgacaatgagcttgaaaaaataacccggaggtttacaatggaactggctaagaagggcttcatcgggcctggaatagacgtgccagcccctgacatgtcaacaggagagcgagagatgtcctggatcgcagatacctacgccagcaccatcgggcactatgacataaacgcccacgcttgtgtgacaggaaagcccattagccaaggagggatacatggcagaataagtgctacagggcgaggcgtgttccacggcatcgaaaattttatcaatgaggctagctacatgtcaatcctgggcatgacccctggtttcggagacaaaacttttgtggtgcaaggattcgggaatgtgggcttgcactcaatgagatacctccaccggttcggtgcaaaatgtatcgcagtgggggaaagtgacggatctatatggaatcccgatggtatcgatccgaaagaactggaagatttcaaactgcagcacggatctatcctgggctttcccaaggcaaaaccctacgaggggtctatcctggaagccgactgcgacatccttattccggctgcttctgagaagcagctaactaaatccaatgcccctagggtgaaggccaagatcatcgccgaaggagccaacggacctacaactccagaagccgacaagatcttcctggagcgcaacattatggtcattcccgacttatacctgaatgccggaggcgtgactgttagctacttcgaatggctcaagaatttaaatcatgtgtcatacgggcgtctaaccttcaaatatgagagagactcaaattatcacctcctgatgtccgtgcaggaaagcctagagcgaaagttcggaaagcatggaggaaccattcctatagtgcctaccgcagagttccaggaccgcatctcaggcgcatccgagaaggatattgtgcattcgggattagcttataccatggaaagatcagccagacaaataatgaggacagccatgaaatataacctcggactggacctaagaacagctgcctacgtgaacgccatcgaaaaggtgtttaaggtttacaacgaggctggagtgaccttcacttag

SEQ ID NO: 224683 - DNA, 1278 bp, synthetic construct
  misc_feature 1..1278: note = Description of Artificial Sequence: Synthetic coding sequence
  source 1..1278: mol_type = other DNA
atgacatgcccctgcgataacgcaagttccgtattccttggattctgcatcagatacagcacggatgtctctgtggacgaagttaaggctctggcatctctgatgacctataagtgcgccgtggtcgatgtcccctttggcggtgccaaggcaggagtgaagatcaaccctaaaaattatacagataatgagcttgagaagattacgcggaggttcactatggagcttgccaagaagggcttcatcggacccggtattgacgtgccggctcccgacatgtctactggggagcgagagatgtcctggatagctgacacctatgccagtactatcgggcattacgacataaacgcacacgcttgtgtgactggaaaacctatctcacagggtggcatccacgggaggatcagcgctacagggagaggcgtgttccatggcatcgagaattttattaatgaggcgtcctacatgtccatcctgggcatgacgccaggttttggtgacaaaacattcgtggtgcaaggctttggcaacgtggggcttcacagtatgagatacttacaccgttttggggctaagtgcatagcagttggcgaatctgacggcagcatttggaacccggatggcattgacccaaaggagctcgaggattttaagctacaacacggttccatactgggttttccaaaggcaaaaccctacgaagggtcgatactagaggcagactgtgacatcctgattcccgcagcctcggaaaagcagctgacaaaatccaatgctccccgagtaaaggccaaaattatcgctgagggggctaacggccctaccacccccgaggccgataagatctttctggaaaggaacattatggtcatccctgacctgtatctaaacgccggaggtgtcactgtcagttacttcgagtggctgaagaacctcaaccatgtaagctatggacggttgacctttaaatatgagcgagatagtaattatcacctgctgatgtctgtccaggagtcgctagagcgtaagttcggtaagcacggcggaaccattcctatcgtccccacggctgagtttcaagatcgtatcagcggggcttcggagaaagacatcgtgcactccggactggcgtacacaatggagaggtctgctagacaaatcatgaggaccgctatgaagtacaatctaggtctggatctcaggactgcggcttatgttaacgccattgaaaaagtgttcaaagtttataacgaagctggagtgacatttacctag

SEQ ID NO: 224684 - DNA, 1677 bp, synthetic construct
  misc_feature 1..1677: note = Description of Artificial Sequence: Synthetic coding sequence
  source 1..1677: mol_type = other DNA
atgtatagatatctcgccaaggccctgcttccttcccgcgcaggccctgccgcactgggcagtgcagctaatcattctgcggctttgctgggtcggggtcggggtcagcccgctgccgcatctcagcccggactggcactggctgcacgcagacattactctgagctagtggccgaccgggaagacgaccctaatttcttcaaaatggtggagggttttttcgaccgcggagcaagcatcgtggaggataaattggttaaggatcttagaacccaggaatccgaggagcagaaaagaaatagggttagaggcattcttcgcattatcaagccttgtaatcacgtgctgagcctttcttttccgatacggagagacgatgggtcttgggaggtaattgagggatatagggctcagcattcacaacatcgcaccccctgtaagggcggaattcgctattccaccgacgtgagtgtggatgaggttaaggccctagccagtctgatgacctacaaatgcgcggtggtggatgtgcctttcggcggagctaaggccggagtgaaaataaatcccaagaactatacagagaacgagttggaaaaaattactaggcgattcacaatggagctggcaaagaagggttttatagggccaggcgtggacgtacctgccccagatatgaacacaggcgagcgagagatgtcctggatcgccgatacatatgcatcaacaatcggccattatgacatcaacgcccacgcatgtgtgacgggaaaaccaatctctcagggcggaattcatggcagaattagcgccaccggcagaggggtctttcacgggatagaaaactttatcaatgaggcctcttacatgagtatccttgggatgaccccaggatttcgggacaagacattcgtggtgcagggttttgggaacgtgggccttcactcaatgagatacttgcaccgattcggggctaagtgcatagctgtgggcgagtctgacggctccatttggaatcccgatgggatcgaccctaaagagcttgaggactttaagttacagcacggtagcattctggggttccccaaggctaagccctatgaagggagtatactggaagttgactgcgacattcttatccctgcggctaccgagaagcaactgactaaatccaatgcgccacgcgtgaaagcaaaaatcattgccgagggtgctaatggccctactacacccgaagctgacaaaatttttctcgagaggaatatcctcgtaatacctgatctttacctgaacgcgggaggtgtgaccgtctcttattttgaatggctcaagaatttgaatcacgtgagttatggtcggcttacctttaaatacgaaagagattccaattaccatctacttttgagcgtgcaggaatcactggagcgaaaatttggaaaacatggagggaccatccccattgtgcccaccgcagagttccaagactcaatctctggcgcatctgaaaaagacatcgtgcattcagcattagcatatactatggagaggagcgccagacagataatgcacactgccatgaagtacaatctggggctggatctgcggacagctgcttatgtgaacgccatcgagaaggtgttcaaagtttacagcgaagccggagtaacattcacatag

SEQ ID NO: 224685 - DNA, 3342 bp, synthetic construct
  misc_feature 1..3342: note = Description of Artificial Sequence: Synthetic coding sequence
  source 1..3342: mol_type = other DNA
atgattgccgtatctttcaaatgtcggtgtcagattctgcggaggctgaccaaagacgagtcaccttatactaaaagcgcaagtcagacaaaacctcctgatggggcactcgcagtgcggcgtcaatctatccccgaagaatttaaagggtcgacagtggtcgaactcatgaagaaggagggtaccacattgggtctgaccgtgagcggtggaatagataaagacggaaagccaagggtgtcgaacttgcgtcaggggggaatagccgctcgctcagatcagctcgatgtgggagactatataaaagcagtgaacggcattaatctggcgaagttccgacatgacgagataattagcctcttaaaaaatgtaggagagagagtagtcttagaggtggagtacgaactccctccagtgagtgtacagggcagctctgtgatatttcgcacggtggaggtaaccttgcacaaggaagggaacacatttggttttgtgataagaggcggagcacacgacgacagaaacaagtccaggcctgttgttatcacctgtgtgcgaccaggtggtcccgctgaccgcgagggtaccatcaagccgggagaccgacttctgtcagtggacggcataaggctgctaggcactacacacgccgaggccatgtcgatcctcaagcaatgtggacaggaagcggctctcctgattgagtacgatgtttccgtgatggatagcgtagcaaccgcctccggaccgttgcttgtggaggttgccaagaccccgggtgctagtctgggcgtggcattgaccacttctatgtgctgtaacaagcaagtgattgttattgataagattaagtccgccagcatcgctgacagatgcggggctctgcatgtaggcgatcacatactgtcaatcgatggtacatctatggagtactgcaccctagctgaggctacgcagtttctggcaaatacaactgatcaagtaaagctggagatattgccccaccatcagacacgcctcgcactgaaaggacccgaccacgtgaaaattcagcgctcagacaggcaactaacttgggacagctgggccagcaatcatagttcgctccacacaaaccatcactacaatacctaccatcccgatcattgccgtgttcctgcccttacgttcccgaaggctcccccacctaattccccccctgccctggtgagctcgtcgttttcccccactagcatgagtgcttacagcttgtcttctctgaatatggggactttgcccaggagtctgtattcaaccagccccaggggtaccatgatgaggcgtaggctgaagaaaaaagactttaaatcctcccttagcttagcctcaagtacggtgggccttgcaggccaggtggtgcacaccgaaacgaccgaggtagtactcactgccgatcctgtaaccggattcgggattcagctccagggaagcgtgtttgccacagaaaccttatccagccccccattaattagctatatagaagcagacagtcccgctgaaagatgcggggtgttacagatcggcgacagggtgatggccatcaatggcattccaactgaagacagtacattcgaagaagcctcacagctgttgcgagactcctccataacaagcaaagtgactcttgaaattgagttcgacgtagctgagagtgtaattccaagttccggtacctttcacgtgaagcttccaaagaagcataacgtcgaactaggtatcaccatctcgagccccagctcaaggaaacctggggacccattagtaatctccgacattaagaagggttctgtggctcaccggaccggcacactggaactgggcgataagctgctcgccatcgacaacattcgcctggacaactgttccatggaagatgcagtacagattttacaacagtgtgaagatttagtgaaacttaagatacggaaggatgaagataactccgacgagcaggaaagtagcggggcaataatttacaccgtcgaactaaaacggtacggtggacccttaggcattaccatatctggaacggaggagcctttcgatcccatcataatcagcagcttaaccaaaggtgggttggcagaacgtaccggcgctatccacattggagaccgcattctggctatcaactcttcgagcttgaaaggtaaacccctgagcgaagccatacatcttttacaaatggccggtgagacggtcacacttaagattaagaaacagacggacgcccaatctgctagtagcccaaagaagttccccattagcagccacctatccgatctgggagatgttgaggaagactccagccccgcacagaaaccaggcaaactcagcgacatgtacccaagcaccgtgccttctgtcgattcagccgtagattcatgggatggctctgctattgacacaagttatgggactcagggcaccagcttccaagcctctggatataatttcaatacatatgattggaggagccctaaacagagagggtccctgtcccctgtaaccaagcctcggagccagacctaccccgacgtgggtctgtcttatgaggattgggaccggtccacggcatcaggcttcgccggagccgctgattccgcagaaacagaacaggaggagaacttctggagccaagccctcgaggatttagagacatgcggacagtcaggaatactacgggagcttgaggcgactataatgagtgggtccaccatgagcttaaatcatgaagctcctaccccccgtagccagctgggtcgccaggcatcgttccaggagcgcagctcctctcgcccacactattcacagacaactcggagcaatacccttccctcagacgtcgggcgaaaatctgtgaccctccgcaagatgaaacaggaaatcaaggaaataatgtctccgacccccgtcgagttgcacaaagtcacactgtacaaggacagcgacatggaggattttggtttttcggtggccgatggcctgttggaaaaaggtgtgtacgtgaagaatatccgacccgctgggcctggagaccttggaggtctcaaaccatacgatcgcctgctccaggttaatcatgtgaggactcgagattttgactgctgcctcgtcgttcctctcatagccgaatctggaaataagctcgacctcgtgatctctcgtaaccccctggcatcccaaaagagcattgaccaacagagtcttcctggcgactggtctgagcagaatagcgccttcttccagcaaccttctcacgggggaaacttggaaactagagagcccacaaacactctctag

SEQ ID NO: 224686 - DNA, 3387 bp, synthetic construct
  misc_feature 1..3387: note = Description of Artificial Sequence: Synthetic coding sequence
  source 1..3387: mol_type = other DNA
atgatcgccgttagcttcaaatgtcgatgtcagattctgcgcaggctgactaaggatgaatctccctacaccaagagcgcatcccagaccaagcccccagatggggctctggcagtgaggcgtcagtccatcccagaagaattcaagggctcaaccgtggtcgagctgatgaaaaaggaagggaccactctggggttgacagtgtccggcggaatcgacaaagacggcaaaccccgtgtatctaacttgcgccagggaggcatcgccgcacgaagtgatcagctcgacgtcggagactacatcaaggctgtaaatggtatcaacttggcaaagttccgccatgacgaaattatcagccttctgaaaaatgtcggagaaagagtggtgctcgaggtggagtacgagcttcctcctgtctcagttcaaggcagctccgtcatcttcagaacggtggaagtcacattgcataaggagggcaacaccttcggatttgtgatcaggggcggagcgcacgatgaccgaaataagtcacggccagtggtgatcacttgcgtgcgccctgggggacctgctgaccgggagggcacaattaagccaggtgatagactcctgagtgtcgacgggatcagactcctgggtactacccacgccgaagctatgtcaattctgaagcagtgtggacaggaggcggctctcttaatcgaatacgacgtctctgtgatggatagcgtggccaccgctagtggccctctgttagtcgaagttgcaaagaccccaggggcttcattgggcgtggcactcactacaagcatgtgctgcaacaagcaggtaatcgtcattgataagatcaagtctgctagcattgccgatcggtgcggtgctttgcatgtgggtgatcacatactcagtattgatggtacaagtatggaatattgcacactcgcagaagctactcagtttctggctaataccactgaccaggtcaagctcgaaattctgcctcatcaccagaccagactggctctgaaaggtccagatcatgtgaaaatacagcgctctgatcggcaattgacatgggacagttgggcctccaaccatagttccctgcataccaatcatcactataatacctaccatccagaccactgtagggttcctgccctgacctttccgaaggcacctccccctaatagccccccagccctcgtgagctcatccttctcgcctaccagcatgtcagcctatagtctctcatccctgaacatgggcacgctccccaggtctctgtatagcacctcacccaggggcacgatgatgaggcgacggcttaagaagaaagattttaaatcatctctctctctggcaagctcaactgttggcctcgccggtcaggtcgtccacaccgagactacggaggtcgtgctgaccgcggaccccgtcactggctttggcatccagctgcaggggagtgtgtttgcgaccgaaaccctctcatctccccctctcatctcttacatcgaggcggactcccccgctgagaggtgcggcgtcctgcagatcggagatcgggtaatggcaatcaacggaatccccaccgaggactccacgtttgaggaagcatcccagctgctgcgcgatagctccattacgagcaaggtcaccctggagatcgaattcgacgtcgctgagagcgtgatccccagtagcggcacattccacgtcaagctccctaaaaaacacaacgtggaactaggcatcacgatcagctcaccttccagtaggaaacccggtgaccctttggtgatcagtgacatcaagaagggcagcgtggctcaccggaccggcacactggagctgggcgacaagttgctggcgatcgacaacatccgcctggataactgttccatggaagacgccgtgcagatcttgcaacagtgcgaggaccttgtcaagctcaagatccgcaaagacgaggataatagcgatgaacaggagtcaagtggagccatcatttacaccgtggagctcaagagatatggcggtcccctcgggataacgatcagtggcaccgaagaaccctttgaccctatcatcatttcatcattaactaagggcggactcgccgagcggacgggggctattcatatcggcgataggatcctcgctattaacagtagctcccttaaaggcaaaccccttagcgaagccatccacctgttacagatggctggtgagactgtcacattaaagatcaaaaagcagacagacgctcaatcagcgagctctccaaaaaaattccccatatccagtcacctgtcagatcttggggacgtggaagaggactccagcccagctcagaagccaggaaaattaagcgatatgtacccttccaccgtgcccagcgtagattcagccgtcgatagctgggacggctctgccatcgacacatcctacggaacccagggaacctcctttcaagcctctggctataactttaacacctacgattggagatcgcccaaacagcggggatcactctcaccggtcacaaagccgagatctcagacttatcctgacgtggggctgtcatacgaggattgggatcgctcgacagcatcaggtttcgctggcgctgccgatagcgcagaaactgaacaagaggagaacttctggagccaggcactggaggatctggaaacctgtgggcaaagcggcatcctgagggagctcgaagagaaggctgacagaagagtatcactgaggaatatgacgttgttagctactatcatgtcaggcagcacgatgagcctcaatcatgaggctccaacacctcggtcacagctgggaagacaagcctcctttcaggaaagatcctcctcccggcctcactattcccagactacgcggtccaacactctgccatccgacgtcggaagaaagagcgttaccttgagaaagatgaagcaggagattaaagagataatgtccccaacccccgtggaactacataaggtaacattatacaaggactctgacatggaagacttcgggtttagcgtggcagacggcctgctcgagaagggcgtttacgttaaaaatattaggcctgcgggtcccggtgatctcggcggtctcaagccttatgacaggttgctgcaggtgaatcatgtccgcactagggactttgattgttgtttggtcgtcccgttgattgcagaaagcggaaataaactggatttagtcatcagccgcaatccgctggctagccagaaatccatagaccaacaaagtctgccgggagactggtctgagcagaatagcgccttttttcaacaaccatcacatggaggaaacttggaaactagagagcccaccaacacactgtag

SEQ ID NO: 224687 - DNA, 3231 bp, synthetic construct
  misc_feature 1..3231: note = Description of Artificial Sequence: Synthetic coding sequence
  source 1..3231: mol_type = other DNA
atgatagctgtgtcattcaaatgtagatgccagatcttgaggcgcctcaccaaggacgaatccccttatacaaaaagcgcatctcaaacgaagcctcctgacggcgctctggcagtccgaagacagtctatcccagaggagtttaaaggctccaccgtggttgagctgatgaagaaagaagggaccacacttgggctgacagtgagcggcggtatagataaggatgggaagccgagagtgtcaaatctccggcagggtgggattgccgcaaggagtgatcaactggacgtgggagattatattaaggctgtcaatggcataaatctggccaagtttcgacatgatgagatcatttcattgctgaagaacgtcggagagcgcgtggttttggaagttgaatacgaactcccacctgtgagcgtgcaggggtcttccgtaatttttcgtacagtagaagtgactctgcacaaggagggaaacacattcgggtttgtgattcggggtggggctcatgacgaccgaaacaagtcgcgtccagtcgtgattacttgcgtgagaccaggcggtcccgcagatcgggagggcaccataaaaccaggagacagactgctctcggtggacggaatccggctgttgggcaccacccatgcagaagccatgagcatcctgaaacagtgtggacaggaagcagccctactcatcgaatatgatgtgagtgtcatggacagcgtcgcgaccgcctcggggccactgttagtcgaggtcgccaagacccctggcgcatccctgggcgtcgcactgactacaagtatgtgctgcaataagcaggtgatagtgattgacaagattaagtcggcatccatcgccgataggtgtggcgctctgcacgtgggggaccatatcttgtctatcgatggaacctccatggagtattgtaccctcgctgaggccacccaattcctcgctaacaccacagatcaggtcaagctcgagatcctaccgcaccatcagacacgcctcgctttaaagggcccagatcacgcagccctcgtctcctcctccttttcccctaccagcatgagcgcctacagcctgagcagtttaaatatgggcacgttgcctagaagcttgtattcaacatctcccaggggcaccatgatgcgacggagacttaaaaaaaaagatttcaaatctagtctcagcctggcgtcctcaacggtgggtttggctggtcaggttgtgcatacagaaacgacagaggtcgtgctgactgctgacccagttaccggcttcggcattcagcttcaagggtccgtgtttgcaactgagacccttagcagcccaccgctaatcagctatatcgaagctgactcacctgcggaacgatgcggggtgctgcaaatcggcgatcgcgtgatggccataaacggcatccctactgaagactccactttcgaggaggcctcacagttactccgagacagtagcatcactagtaaagtaacccttgagatagagttcgacgtcgccgaatccgttatacccagttctggaacatttcacgtcaagctgcccaaaaagcacaacgtagaacttggtattactatatccagcccatctagtcgtaagccaggtgacccattagttatctccgatattaagaaggggagtgtcgcacatcggacaggcacccttgagctcggagacaaactcttagccatcgacaacatccgactggacaactgttcaatggaagacgccgtgcagattctgcagcaatgtgaggatttggtgaagctcaaaattaggaaggacgaagataactctgatgagcaggaatctagtggggcaatcatttatacggtcgagttgaagaggtatggcggacctctgggaatcaccatttctggaactgaggaaccctttgaccctatcatcatctctagtctaaccaaggggggtctggcagagaggacgggtgcgatacacatcggggacaggatcctcgccattaactcgagctcactgaagggcaagcccttgtccgaggccatccatctgctccaaatggctggcgaaaccgtgacattgaagatcaagaagcaaaccgacgctcaatcagcttccagccccaagaaatttcccatcagttcccatctgtcagacttgggtgacgtcgaggaggactcctccccagcacagaagcctgggaagctgagtgatatgtacccctccacagttccatccgtggatagtgcggttgacagctgggatggttcagccatagatacttcttatgggactcagggtacctcattccaggcgagcggctacaacttcaatacctacgattggagatctcctaagcagcggggaagtttgtctcctgtgaccaaacccaggtctcagacttatcctgacgtgggacttagttatgaggattgggaccgctctacggcctccggatttgcaggggctgctgattctgccgaaaccgaacaagaggagaacttctggagccaagccttggaggacctggagacttgtggacagtccgggattctacgagagcttgaggaaaaagctgatagacgggtcagtctccgaaatatgacactcctggccaccataatgtcgggatcgaccatgagtctcaaccacgaggcaccaaccccaaggtcacagttgggccgtcaggcttcctttcaggaaaggtcatcctcaagacctcactactctcaaaccactcgatccaataccttgccaagcgacgttggacgtaagtccgtgacgcttaggaagatgaagcaggaaataaaggagattatgtcccctacccccgtcgagttacataaagtgacgctgtataaggactctgacatggaggacttcggtttttctgtcgcagacggcctgctggagaaaggcgtctatgttaagaacatacggccagctggacctggtgacctggggggtcttaaaccatatgaccgattactgcaggtcaatcacgtgagaactcgagacttcgattgttgtcttgtggttccccttatcgctgagagtggtaataagcttgatttggtgattagtcggaacccactggcctcacagaagtctatcgaccaacagagtctacctggtgattggagcgaacaaaactcagctttcttccaacagcccagtcatggaggcaacctggaaacccgggaacctactaatacgctctag

SEQ ID NO: 224688 - DNA, 2511 bp, synthetic construct
  misc_feature 1..2511: note = Description of Artificial Sequence: Synthetic coding sequence
  source 1..2511: mol_type = other DNA
atggtccagttcagtacctcagaattccgattgactccccacattgacaatttggaggttgccaattccttcgcagtgacgaacgccttctgctcacagttcagccggggagtctatgccattttcggcttctatgacaagaagtccgtgaacactatcacttccttttgtggaacactccacgtgagtttcattacccctagttttcccaccgatgggacgcacccgttcgttatacagatgagacctgacctcaaaggtgccttgctgagcctgattgagtactaccagtgggacaagttcgcatacctgtatgattcagataggggtctgagtacactgcaagcagttctggatagtgctgccgaaaaaaagtggcaggtgacagcaataaatgtggggaatataaataatgataagaaggacgagatgtaccggagcttatttcaggaccttgagctgaagaaggagcgcagagtgattctggattgtgaacgggataaagtcaacgatatcgtcgaccaggtcataacaatcggaaagcacgttaagggttatcactatattatcgcgaacttggggtttaccgacggcgatctgttgaaaatccaatttggcggtgccaatgtgtccggcttccagattgtcgattacgacgacagtctggttagtaagttcattgagcgttggagcactctcgaggaaaaggagtatcctggtgcccataccacaacgatcaaatacacaagcgccctgacctacgatgccgtgcaggttatgaccgaggcgtttcgcaacctgcggaaacagaggatcgagatcagtcgtcgaggcaacgccggagattgtctggcgaaccctgcagtgccttggggccagggtgttgagattgagagagcactgaaacaagttcaggtggaggggctgtctggcaatatcaagtttgaccagaacgggaaaaggatcaactataccatcaatatcatggagctcaaaactaatggtcccagaaagatcgggtattggtctgaggtggacaagatggtggtaacgctgaccgagctgccatccggtaacgacacctctgggctggaaaacaagacagtggtggtgacaacaatactggaaagtccgtacgttatgatgaagaagaatcatgaaatgttagaaggtaatgagagatatgaaggttactgtgtggacttggctgcggagatcgcaaaacactgtggctttaagtacaaactgacaatagtcggagatgggaagtacggggcaagagatgccgataccaagatttggaatggtatggtaggtgaacttgtttacgggaaggccgacatagcgatcgctcctctgacaataacccttgtaagggaggaagttatcgacttctctaagcccttcatgagcctggggattagcatcatgatcaaaaaaccgcagaagagtaaacccggtgttttcagcttccttgatccgctagcttacgaaatttggatgtgcatagtgttcgcatatattggcgtctccgtcgtccttttccttgtgagcagattctccccctacgaatggcacaccgaggagttcgaagatggtagggagactcagagttccgagtctacgaacgagttcggcattttcaattccctatggttctcactgggagcctttatgcagcagggctgtgacattagtccgcgttcgctgtctggacgtattgttggaggcgtctggtggttctttacgctgatcatcatcagctcctacacggctaatctggctgcctttctcacagtcgagagaatggtgagcccaattgaatcagccgaggacctgtcaaagcagactgaaatcgcatatggcaccttagattctgggtcgactaaagaattcttccgcaggtcgaaaatcgccgttttcgacaaaatgtggacctatatgaggtccgctgaaccatccgtttttgtccgaaccaccgcagagggtgtggccagggtcagaaagagcaaggggaaatatgcatatttgctggagtctacgatgaatgagtacattgagcagcgcaagccgtgtgacacaatgaaagtgggtggtaatctcgacagtaagggatatgggatagcaacccccaaaggttcgtctctccgcacccccgtaaacttggccgtgctgaaactcagtgagcaaggcgtcctcgataaattgaaaaataagtggtggtatgacaagggggagtgcggtgccaaagacagtgggtccaaggagaagacatccgccttgagcctatctaacgtggcaggcgtgttctacatcctggtgggcggactgggtcttgccatgctcgtggctctcatcgagttctgttacaagagccgagccgaagcaaaacggatgaaagtggccaagaacgctcaaaacatcaacccaagctcgtcacagaactcccagaacttcgcaacttacaaagaaggttacaacgtctacggcatcgagtctgtgaaaatatag

SEQ ID NO: 224689 - DNA, 2706 bp, synthetic construct
  misc_feature 1..2706: note = Description of Artificial Sequence: Synthetic coding sequence
  source 1..2706: mol_type = other DNA
atgtctacaatgcggctgttgaccctggcacttctattttcatgcagcgttgcgagagctgcctgcgatcccaagattgtgaatatcggagctgtgctatctactaggaaacacgaacaaatgtttcgagaggcggtgaatcaggcgaacaaacgacacggatcctggaaaattcagttgaatgcaacgtccgtgacacataagcccaatgcgatccagatggctctgtctgtctgcgaagatctcataagtagtcaagtctatgcaattctggtgagccatccccctactcccaatgatcatttcactccaacacccgtgtcctacaccgcagggttttacagaatacctgttctcggactgaccacgcggatgtctatctattctgataaaagcatccacctgtcctttctccgaacagtcccgccatatagccatcaatctagcgtctggttcgagatgatgagggtgtactcttggaaccatatcatcctgcttgtttccgatgatcacgaagggcgagctgcccagaagcgtttagaaaccctgttagaggagcgcgagagcaaggctgaaaaggtcctccagttcgatcccggtactaagaatgtaaccgccctgctgatggaggccaaggaactggaggcccgagtgatcatattaagcgcgtctgaggatgacgcagccacagtgtaccgcgcagcggcaatgctgaatatgacagggagcggttacgtttggctggtgggagagcgcgaaattagtggaaacgccctccgctacgcccctgacggcatcctgggcctccagctaatcaatggcaagaatgaatccgctcacatcagcgacgctgtgggagtggtagcccaggcggtccacgagctactagagaaggagaatatcacagatccgcctaggggatgcgtcggtaatacaaatatttggaagactggcccactattcaaacgtgtcctgatgtcttccaagtatgctgacggagtgacaggccgagtggagttcaatgaggatggggacaggaagtttgccaactatagcattatgaacctccagaaccggaaattggtccaggtgggaatctacaatggtacacatgtaatccccaatgacagaaaaataatctggcccggtggcgaaactgagaagccacgcggataccagatgagtacacggttgaagattgtgacaatacatcaggaacctttcgtctatgtgaaaccaaccctttccgacggtacttgtaaggaggagtttacggtaaacggcgacccagtgaagaaagtgatctgtacaggacccaacgacactagtcccggtagtccacgtcacaccgtcccgcagtgctgttacggtttctgtatcgatctcctaattaagctggcacggacaatgaactttacctacgaggttcatctcgtggccgacggcaagtttgggactcaggaacgtgtcaataatagcaataagaaggagtggaacggcatgatgggggaactgctaagcggacaagctgatatgatagtggctcccctgaccatcaacaatgaaagggcacagtacattgaatttagcaaacccttcaaataccaaggactgactatcttggttaaaaaggaaatcccgaggagcacgctggactcttttatgcagcctttccagtccacactgtggctgctggtgggcctttccgttcatgtggtggcagtgatgctgtacctgctcgatcggttttccccttttgggcgattcaaagttaatagcgaggaggaagaggaggacgcacttaccctctcctccgcaatgtggttctcatggggcgtcctgctcaattcaggcataggagaaggggctccccgatctttttccgctcggatccttggaatggtgtgggccggattcgcgatgattattgtagcttcctacacagctaacttggccgcattcttggtgttagatcgaccagaagagaggattacaggaataaatgatcctaggctgaggaacccaagcgacaagtttatctacgctacagtgaaacagtcatccgtagatatttatttccggagacaggtggagttgtcaaccatgtatcgacatatggaaaagcacaactatgagtccgctgccgaggccattcaggcagtgagagacaacaagctacacgcctttatctgggattccgcggtcctggagttcgaagcaagccaaaaatgtgatctcgttaccaccggagagctgttctttcgctctggttttggcatagggatgaggaaggattccccttggaagcaaaacgtctccctaagtatcttaaagagccacgagaatgggtttatggaagatctggataagacatgggttaggtatcaggagtgcgattcacggtccaatgctcccgcaacattaacttttgagaatatggctggcgtgttcatgctcgtggcaggtggaatcgtggccggtatctttctgatcttcatagaaatagcttacaagcgccacaaagacgcgagaagaaagcagatgcaacttgcgttcgcagcagtgaacgtctggcggaaaaatctgcaaagtacagggggaggaaggggcgctttgcagaaccagaaagatacggtgttgcctcgccgagccatagagagagaggagggccagctccagctatgcagccggcatagggagtcttag

SEQ ID NO: 224690 - DNA, 2658 bp, synthetic construct
  misc_feature 1..2658: note = Description of Artificial Sequence: Synthetic coding sequence
  source 1..2658: mol_type = other DNA
atgtctacaatgcgtctgcttacccttgcactgttattcagctgctctgtggcacgagcggcttgcgatcccaaaattgtgaacatcggggctgtactttcaacacgcaagcacgagcagatgttcagagaggcggtgaaccaagctaacaaacgccatggaagttggaagatccagctgaatgcaacttccgtgacccacaagcccaacgctattcagatggcgctgtccgtgtgcgaggaccttattagttctcaagtttacgccattttagtgagtcatcctcccacccccaacgatcacttcacccctacccccgtaagctacaccgctgggttctatcgtatcccggtgctcggcctgaccacaaggatgagcatttattccgacaagtctatccacctgtccttcctaaggaccgtgccaccgtattcacaccagtcttctgtttggtttgagatgatgagggtatactcatggaaccatattattttgttggtgagtgacgatcacgaagggagagcagcgcagaaaagattggagaccctgctcgaagagcgagagagtaaggcagaaaaggtgctacagttcgatcctggtacaaagaatgtaactgcccttttaatggaagccaaggaactggaggcacgtgtgattatactcagcgctagcgaggacgacgctgcgaccgtgtaccgcgcagccgcaatgctcaacatgaccggcagcggatatgtatggctagtgggcgaacgagagatttcaggcaacgccctgaggtatgcccctgatgggattctcggcttacagttgatcaatgggaagaatgaatctgctcacatcagtgacgccgtcggcgttgtggcgcaggcagtccacgaactgttggaaaaggagaacataacggatccacccaggggatgtgtgggaaacacaaacatttggaagaccggtcctttattcaaaagggtgctgatgtccagtaaatatgctgatggcgtcacaggcagggtagagttcaacgaagacggggatcggaagttcgctaattactcaataatgaatctacagaatcggaaactagtgcaggtgggaatctacaacgggacccacgtaatccctaacgaccggaaaatcatttggcccggaggtgagacagaaaagccacgcggatatcaaatgtctacaaggctgaagattgttacgatccaccaggagccatttgtatatgttaagcccacgctttctgacggcacctgcaaagaggagttcacagtgaatggagatcctgtcaagaaggttatttgtaccggccctaatgacacttcgcccggaagcccgagacacaccgtgcctcagtgttgttatgggttctgcattgacctgctaattaaactggccagaacgatgaatttcacctacgaagtgcacctggtggctgacggcaaatttggcactcaggagagggtcaacaacagcaacaaaaaagagtggaacggcatgatgggtgagttattaagtgggcaggccgatatgattgtggcacctctaacgatcaacaacgagagggcacagtatatagagtttagcaagccattcaagtaccagggcctcacaatattggtcaagaaggaaattcctcgcagcactctcgatagcttcatgcagcctttccagagcaccctgtggcttttagtgggcctgagcgtccatgtggtggcagtgatgctgtacctcctggaccgtttctctccatttggaaggtttaaggtcaattcagaagaggaggaagaggatgctctgacactctcctccgccatgtggttctcatggggtgttcttctcaatagcgggattggcgaaggggctcccaggagcttcagtgcaagaatcctgggcatggtgtgggccggtttcgccatgataattgtggcaagttatacagccaatctggctgcgtttctggtcctggaccggccagaggaaaggattactggcattaacgatcccagacttaggaacccgagcgacaagttcatctacgcaacagtgaagcagtcttctgttgacatatacttccgaagacaggtggagctttcgaccatgtacagacacatggaaaaacacaattatgaaagcgctgctgaggccatacaagccgtcagagacaacaaacttcatgcgtttatttgggatagtgctgtcctggaattcgaggcctcacagaaatgtgacttggtgactacaggcgagttatttttccggagcggttttgggatcgggatgaggaaggacagcccctggaagcagaatgtaagtctgagcatcctgaaaagtcacgagaatggatttatggaagatctggacaagacttgggtgagataccaggagtgcgatagtcgaagtaacgctccggctaccctgacgttcgaaaacatggctggcgtctttatgcttgttgccggaggcatagtcgctgggatctttctcattttcatagagattgcctacaagcgtcacaaggacgcaagacgcaaacaaatgcaacttgcgttcgccgctgtgaatgtgtggcgcaagaacctgcagcagtaccatccaactgacatcacaggtcccttaaatttgtctgacccatccgttagtactgtggtttag

SEQ ID NO: 224691 - DNA, 2769 bp, synthetic construct
  misc_feature 1..2769: note = Description of Artificial Sequence: Synthetic coding sequence
  source 1..2769: mol_type = other DNA
atggttcagttgcgaaaacttcttagagtcttaacactcatgaaatttccgtgctgtgtactggaagtgctcttgtgcgcacttgcagccgctgctaggggtcaggagatgtacgctcctcactcaatacgcatcgaaggcgacgtcaccctgggaggactgttcccagtacatgctaaagggccatcaggcgtgccctgcggggacatcaaacgcgaaaacggcattcacaggctggaggccatgctttacgctttggatcagatcaactccgatcctaatctcttacctaacgtgaccttaggtgctaggatcctagacacgtgctctagagacacctacgcattggagcagtccctgactttcgttcaagccctcatccagaaggacacttcagatgtcaggtgtacaaacggagaacccccagtgttcgtcaaacccgaaaaggttgtgggagtgatcggggctagcggttcctcagtgtctattatggtcgccaatatcttacgcttgttccagatcccccagatttcttacgcatcaaccgcccctgagctctcagacgacaggaggtatgatttcttcagccgggtcgtccctcccgattcttttcaagcacaggccatggtcgacattgtgaaggccctcggctggaattacgtgtcgacactggccagtgaaggaagttacggggaaaaaggtgttgaatcattcacacagataagcaaagaggccggaggtctgtgcattgcccagtctgtgcgaatcccccaggaacggaaagacaggacgatcgacttcgacaggataatcaaacagctgctggacacccccaattctagagccgtggtcattttcgccaatgacgaagacatcaaacagattctggcggctgccaaaagggccgaccaggtaggtcattttctttgggtggggtcggattcttggggatctaagattaatcccctgcaccagcacgaggatattgcagaaggtgcgattactatccaacccaaacgagcaacagtggagggcttcgatgcttacttcacatccagaactctcgaaaataatagacggaacgtctggttcgccgagtattgggaagaaaatttcaactgcaaattgacaatatcaggatccaaaaaagaagacacagacaggaaatgcactggccaggagcggattggcaaggactctaactatgagcaggaaggtaaagtccagttcgtcatagacgcagtgtacgctatggcccacgccctccaccatatgaataaagacttgtgcgccgactacaggggagtgtgcccggaaatggagcaagcaggagggaaaaaactgctgaagtatattaggaacgtaaactttaatggctccgcgggtactcctgtgatgttcaacaaaaatggcgatgcccctggtcggtacgacatttttcagtatcagaccactaatactagtaaccccggatacaggctcatcggccagtggactgatgagctgcagctcaacatcgaggatatgcagtgggggaaaggtgtgagagaaatcccagcctccgtatgcacgctgccctgcaaaccaggacaacgaaaaaagactcaaaaggggacgccttgctgttggacatgtgagccctgtgatggctaccagtatcaatttgacgagatgacatgtcagcactgcccgtacgatcagcgtcctaatgagaacaggaccggatgccaggatattcctatcatcaaactcgagtggcacagtccttgggccgtcatcccagtattcctggcgatgcttgggatcatagctaccattttcgtgatggcaaccttcatccggtacaatgatacacccatcgttagagcttccggaagagagctgtcatacgtgctcttaaccggaatatttctgtgttacattattactttcctgatgatagcgaaaccagatgtggcggtttgcagcttccggagggtgtttcttggcctgggcatgtgcatttcctatgccgctctcttgacaaagacaaatcgaatctatagaattttcgagcagggaaaaaagtctgtaactgccccaaggcttatttcaccaacctcacaactcgccattacctctagcctcatctccgttcagcttctgggtgtgttcatatggtttggcgttgatccccctaatatcattatcgattacgatgaacacaaaacgatgaaccctgagcaggcgcgtggcgtcctcaagtgcgacatcacggacctgcaaatcatctgcagcctgggatatagtattctactcatggttacatgtacggtatatgctattaagacccgcggtgtaccagagaattttaatgaggccaagcccataggattcacgatgtatactacttgcattgtgtggctggctttcattcccatctttttcggtacagcacagagcgccgagaagctctacatccaaactacaacgctgaccatctcaatgaacctgagcgcttctgtcgcattaggtatgctgtacatgcctaaggtgtatatcatcattttccaccccgagctcaacgtgcagaagcgtaaaagatctttcaaggctgttgtgactgcagccacgatgagttccagactgtcccacaaaccatcagacaggcctaacggggaagctaagaccgagttgtgtgaaaatgtggaccctaacaattgtatcccgccagtaaggaagtccgttcagaaatccgttacatggtacacgatcccccctactgtgtag

SEQ ID NO: 224692 - DNA, 2685 bp, synthetic construct
  misc_feature 1..2685: note = Description of Artificial Sequence: Synthetic coding sequence
  source 1..2685: mol_type = other DNA
atggctaggcagaagaaaatgggccaatccgtactccgagccgttttttttctggtactggggctgctcggtcattctcacgggggttttccaaatactataagtattggaggtctgttcatgcggaacacggtgcaggaacatagtgcattccggtttgcagttcagctgtacaacactaaccagaacacgaccgaaaaacccttccacttgaattaccatgttgatcacttagacagctctaacagtttctcagtgacaaatgcgttctgcagtcagttctcacggggagtttacgccatttttgggttttatgatcaaatgtccatgaacaccttaaccagcttttgcggcgctctgcacacctcatttgtcacaccctcttttccgaccgacgccgacgtccagttcgtgatccagatgagacctgcactgaagggcgcaattttgtccctcctaggacattacaagtgggagaagttcgtctatctgtacgacacagagagaggattctccatcctgcaagctatcatggaagctgccgtacaaaataactggcaggtcacagcacgcagcgtgggcaatattaaggacgttcaggagttcaggcgcataatcgaggaaatggacaggcggcaggagaaacgctacctgatagactgtgaagttgagcgtattaatactattctcgagcaggttgtgatactcggtaaacacagccgagggtatcactacatgctagccaacctgggattcacggacatcctcctggaaagagtcatgcatgggggagcaaacatcacgggattccaaattgttaacaacgaaaaccctatggtgcagcagttcatccagcgatgggtgaggctggacgaaagagaatttccagaggctaaaaatgcccctttgaaatacactagtgccttgacacacgacgcaatcctggtcatcgcggaggccttcagatacttaaggcgccagcgggtggatgtttcacggaggggtagtgccggagactgcctggccaaccctgcagtgccttggagccagggaattgacatcgaaagagccttaaaaatggtacaagtccagggcatgaccgggaacatacagtttgatacctacggcagaagaacgaattatacaatagatgtctacgagatgaaagtgagcggaagtaggaaggccggatattggaatgagtacgagcgctttgttcccttttctgaccagcaaatctccaacgatagtgcttcctccgaaaacagaacaatcgttgtgactacaatcttagaaagtccatacgtaatgtacaagaagaatcacgagcaactggaggggaatgaaaggtatgagggctattgcgtcgaccttgcttacgagatcgctaagcatgtccgtatcaagtataagcttagtatcgtgggagacggaaagtacggagcacgcgatcctgagaccaagatttggaacgggatggtgggcgagctggtttacggcagagctgacatagctgtagctccactgaccataacattagtccgtgaggaggtcatcgactttagtaaaccattcatgagcctgggaatcagcattatgatcaaaaagcctcagaaatcgaaaccgggtgtgttttccttcctggaccctcttgcctacgagatttggatgtgtattgtgtttgcttacatcggagtgtcggtggtgctgttcctggtctcccggttctcaccatatgagtggcatctggaggacaataatgaggaacctcgagatccacagtcgccaccagaccccccaaacgaattcggtatttttaattcattatggttttccctgggcgcattcatgcagcagggttgcgatatctcacctcggagcctgtctggtcggatcgtcgggggagtctggtggttctttaccttaataattatcagctcctatacagctaatctggcagcattcctcaccgtggagaggatggtcagccctattgagtctgcggaagacctggctaagcaaaccgaaatcgcgtacgggacgctggatagcggcagtactaaagagttctttcgcagatctaaaattgccgtttacgagaagatgtggtcctatatgaagtcagctgaaccatccgtgttcactaagaccacggccgatggcgtggcgcgagttaggaaatctaaaggaaagttcgcattcttgctggaatctaccatgaatgagtatatagaacagagaaaaccatgcgatacaatgaaagtcggcggtaatctcgacagtaagggctacggggtggccacaccgaaagggtccgccctgagaaacgcggtgaatctagctgtcctgaagctgaatgagcagggcttgctggataaactgaaaaacaaatggtggtatgacaagggtgaatgcgggagcggaggaggagactctaaagataaaaccagtgcgctctcactcagtaacgtggctggcgtattttatattctggtgggagggcttggcttggccatgatggttgctttaatcgaattctgctacaagtcacgtgccgaatcaaagcggatgaaactgacgaaaaacacgcagaacttcaagcccgctcccgctactaacacacagaactacgccacttatcgagaggggtacaatgtgtatggcacagagtctgtgaagatctag

SEQ ID NO: 224693 - DNA, 432 bp, synthetic construct
  misc_feature 1..432: note = Description of Artificial Sequence: Synthetic coding sequence
  source 1..432: mol_type = other DNA
atggcccgacagaagaaaatggggcagagtgtgctgagagcggttttctttctggtcctgggattacttggccacagccatggcggatttcctaatacgatttccattgggggactgtttatgcgcaatacagttcaggagcattctgcctttcgcttcgccgtccagctttataataccaatcaaaacaccacagagaagccttttcacctcaactaccacgtggaccatctggactcatctaactctttttcagtgacaaatgcatgccccgcagagcgtgattatctaccttggccagggagcatccgcgaaaataactggacggcccttccatgttgcaaagaccacggcctgcttcacttgaagtgctcccctggtggacgccagaactgggcctactgtatatggggggttactggcgaattatag

SEQ ID NO: 224694 - DNA, 2685 bp, synthetic construct
  misc_feature 1..2685: note = Description of Artificial Sequence: Synthetic coding sequence
  source 1..2685: mol_type = other DNA
atggctcgccaaaagaagatggggcaatctgtgttgagggcagtcttctttttagtcctcgggctgctgggccactcgcatggtggcttccccaatacgatttccatcggaggcctgttcatgagaaataccgtgcaggaacactccgcgttcaggtttgctgtgcagttgtataacaccaatcagaatacaacagaaaagccttttcatctgaattatcacgtcgaccacctcgatagcagtaattccttctccgtcaccaacgccttctgtagtcagttctcaagaggggtttatgctatctttgggttctacgatcaaatgtcgatgaacactctcacctccttctgtggagctcttcatactagtttcgtgactccctcattccccacagacgccgacgtgcagttcgtgattcaaatgcgaccagccttaaagggagcaattctgagcctgctaggacattataagtgggagaagtttgtgtatctgtacgatacagaacgcggattttccatcctgcaggccatcatggaggctgccgtgcagaataattggcaggtgacggctcgatccgttggaaacatcaaggatgttcaggagttccggagaattatcgaagaaatggatagacgccaagagaagcgctatctcattgattgtgaggtggagcgcataaacacaattttggaacaggtggtgatcctcggcaagcacagtcgcggataccactatatgctagcaaatctgggctttacagacattctgctggaacgtgttatgcatggcggagccaatatcactggattccaaatagttaacaatgaaaaccctatggtgcagcagttcatccaacggtgggtgaggctggatgagagggaattccctgaggccaaaaatgcaccactgaaatatacttcggctttgactcatgacgcaattctcgtgattgctgaggcatttcggtacctccggcgacaacgggttgatgtatctaggcgcggaagcgcaggcgactgcttagccaatccagcggtgccatggtcccagggcattgacattgagagggccctaaagatggttcaggttcaagggatgacgggcaacattcagttcgatacctatggccgacggacaaactacacaattgatgtttacgaaatgaaggtctctggatctcgtaaagcaggatactggaatgagtatgagagatttgttccgttttcagatcagcagattagcaacgatagtgctagctccgagaaccggaccattgtggtgacaaccatcctcgaaagcccatacgtcatgtacaagaaaaatcatgagcagttagaggggaacgaaagatacgaaggttattgcgtagacctcgcttatgaaatagctaagcatgtgcgcattaaatacaagctctccatagttggcgatgggaaatacggagctcgcgatccggagacgaagatctggaacggcatggtcggcgagctggtctacggccgtgccgatatagccgtggctccactaactattactcttgtccgggaagaggtgatcgacttctctaagcctttcatgagtctcggcatcagtattatgataaagaagcctcagaagtctaaacctggcgtcttctccttcctcgacccactggcttatgagatctggatgtgcatagtgtttgcatatattggcgtcagtgtggtcctgttcctggtatctcggttctcaccatatgaatggcatttggaggataacaatgaagaaccaagagaccctcaaagtccaccggatcctcccaatgagtttggaattttcaattctctttggttttctctgggcgcttttatgcaacagggctgtgatatctccccacggagtttatccggacgaattgtaggtggggtttggtggttctttacgctgatcataatctcctcatataccgccaatctggccgcatttctgactgtggagcgtatggtgtcacccattgagagcgcagaggacctggccaagcagaccgagattgcctatgggacactggacagtggaagtaccaaggagttctttcgcaggagtaagatcgccgtgtacgagaaaatgtggtcatatatgaagagcgccgagcccagcgtgtttacaaaaacaactgcagatggagtggctagagtccgtaaaagcaaggggaagttcgccttcttactcgagtcgacaatgaatgagtacatcgaacagcgtaagccctgcgatactatgaaagttggcggaaacctggactccaagggatacggggtcgccactcccaaaggttcggcgctacggaatgcggtgaatctggccgtgttgaagctgaacgagcaaggattacttgataaattgaagaataagtggtggtacgacaagggggaatgcgggtctggtggtggggattctaaagacaagacaagtgcgctgtccttatccaatgtagcaggcgtgttctacatactggtagggggattggggctcgctatgatggtcgcccttattgagttttgttataagtcccgggcagaatccaagagaatgaaactgaccaaaaacacccagaactttaagcccgctcctgccactaatacacagaattacgcaacttaccgggagggatacaatgtctacggtacagagtccgtcaaaatatag

SEQ ID NO: 224695 - DNA, 2685 bp, synthetic construct
  misc_feature 1..2685: note = Description of Artificial Sequence: Synthetic coding sequence
  source 1..2685: mol_type = other DNA
atggccaggcagaaaaagatgggccagtcggtgctgcgcgcagtgttttttctcgtgttgggacttctaggccatagccacggcggattcccaaacaccattagtatcgggggtctgttcatgcgtaacaccgtccaggaacattccgcttttcggtttgctgtacagctgtacaacaccaatcagaataccaccgagaagccattccacttgaactatcacgtggaccatctcgactccagcaacagttttagcgtcacgaatgccttctgctcgcagttctctcgcggtgtgtatgccatatttgggttctatgatcagatgtctatgaacacacttacttcgttctgtggcgctttacataccagtttcgtaacaccaagttttccaacggatgctgatgtgcaattcgtcattcagatgaggccagctctcaagggagctatcctctcattgcttgggcattacaaatgggagaaattcgtctacttgtatgacacagaacggggattttcaatcctgcaagccattatggaggcagctgttcagaataattggcaggtgactgccagaagcgtcgggaacatcaaagacgtccaggaattccggagaatcattgaagagatggatcggagacaggagaaacgttatctgattgactgtgaggtcgagagaattaacaccatcctggaacaggtggtcatcttgggcaaacactcaaggggatatcactatatgctggctaacctcggctttacggatatcctgctggaaagggtgatgcacgggggagccaacattacagggttccagattgtgaacaatgaaaatcctatggtccagcagttcatacagcgctgggttcgcttggatgaacgagaatttcccgaagccaaaaatgcaccactgaagtacacgtctgcactcacacatgacgcaatacttgtcatcgccgaggcgttcaggtacctgcggaggcaacgcgtcgacgttagcaggcgcggaagcgcaggcgactgcctcgcaaatccagcggttccctggtcacagggcattgacatcgagagagccttgaagatggtccaagtacaggggatgactgggaatatacagttcgacacatacggacggagaaccaactacacaatcgacgtatatgaaatgaaagtctccggcagtagaaaagcaggatactggaatgaatacgagaggttcgtgccattcagcgaccagcaaatctcgaacgactctgcttccagcgagaacaggacaattgtggtgacaactattctggaatctccatacgtcatgtataaaaagaatcacgagcagctggagggaaatgaaaggtatgaaggatattgcgtggatttggcctacgaaattgctaagcacgtcaggataaaatataaattgagcattgtgggtgatggaaagtatggcgctcgcgatccagaaactaagatatggaacggaatggtcggcgagctggtctacggaagagcagacatcgccgtcgccccactcaccatcactctggtcagagaggaagtgatagacttttctaaaccattcatgtcgctcggaatctccatcatgattaagaagcctcagaagtccaaaccaggagtgttcagtttcctcgatccccttgcctacgaaatctggatgtgtattgtcttcgcctacattggagtttccgtcgtcctcttcctcgtctctagattctccccatacgaatggcatctggaggacaacaatgaagagccccgtgaccctcagagtccccctgaccccccaaacgagttcggtatcttcaattccctgtggttttccctgggagccttcatgcagcaggggtgtgacattagccccagaagcctgagcggtaggatcgtgggcggagtatggtggttcttcaccctgatcatcatctcctcctacaccgcaaatcttgccgcattcctgacagtggagaggatggtaagtccaatagaaagcgctgaggacctagccaagcaaacagagatcgcttacggaacattagactctggctccacaaaggagtttttccggagaagtaagatcgcagtttacgagaaaatgtggtcttatatgaaatcagcagaaccctctgtcttcaccaaaaccaccgcagatggggtagcccgagtgcgcaagtctaagggcaagtttgccttcttgctggaatcaactatgaatgaatacattgagcaacggaaaccgtgcgacacaatgaaagtggggggaaacttagattccaaggggtacggagtggccactcccaaggggtcggccttaagaacgcctgtaaacctggcagttcttaagctctccgaacagggaatattagataagctcaaaaacaagtggtggtatgacaagggcgagtgtggggctaaagattcagggtctaaagataagacatcggctttgagcctctccaacgtcgcaggtgtcttctacatactggtcggcggattgggcctcgccatgatggttgcactgatcgaattctgctacaagagtcgcgcagagagcaaacggatgaaactgaccaagaacactcaaaacttcaagccagccccagctaccaatactcagaattacgccacataccgggagggctacaatgtgtatgggacagaatcagtcaaaatctag

SEQ ID NO: 224696 - DNA, 495 bp, synthetic construct
  misc_feature 1..495: note = Description of Artificial Sequence: Synthetic coding sequence
  source 1..495: mol_type = other DNA
atggcacgtcaaaagaagatgggacagtctgttcttcgcgctgtcttttttttggtgctggggctgcttgggcacagccacggaggcttcccgaacaccatcagcatcggcggactttttatgaggaatactgtccaggagcacagcgcgttcagatttgccgtccagctgtacaacaccaaccaaaacactacagagaaaccattccacctaaattatcatgtcgatcacctcgactcttcgaactcattcagtgttactaacgcctgcccagccgaaagggactatttgccttggccgggttccatccgcgagaacaactggactgcgttgccttgttgtaaagaccatggtctgctgcacctgaaatgttctcccggaggacccgctaagacgggtcccattgtgagcggggctctgcaggtgaattgcaaaatgcgaactagatcacaggtgagcaccaccagtagcctgctcgagttttctactgaatag

SEQ ID NO: 224697 - DNA, 495 bp, synthetic construct
  misc_feature 1..495: note = Description of Artificial Sequence: Synthetic coding sequence
  source 1..495: mol_type = other DNA
atggctcggcagaaaaagatgggtcagtctgtcctgcgggcagtcttcttcctggtgttgggactgctgggccattctcatggcggtttccccaacactatatcgatcggaggcctgttcatgaggaataccgttcaagagcattcagccttcaggtttgccgtgcaactgtataacaccaatcaaaatactaccgaaaaacccttccacctgaattaccatgtggaccatctggatagctctaatagtttttctgtcacaaacgcatgtccagctgagcgggattatctgccgtggccgggaagcattcgcgagaataattggaccgctctcccttgctgtaaagaccatggactgctgcacctcaaatgctctccgggagggcctgctaaaaccggccctatcgtatctggggcactacaggtgaactgtaaaatgaggactcggagccaagtgagcacgaccagctccctcctggaatttagcacagagtag

SEQ ID NO: 224698 - DNA, 1989 bp, synthetic construct
  misc_feature 1..1989: note = Description of Artificial Sequence: Synthetic coding sequence
  source 1..1989: mol_type = other DNA
atgcttcagggaggggaagagagtcgactgtttgggtcactcttatggaccctcccatggcgtggtttattcatgcgcaataccgtacaggagcattctgcattcagatttgctgtccagctgtacaataccaatcagaatacaaccgagaagcctttccatttgaactatcacgtggatcacctggacagcagcaatagcttttccgtgacaaacgccttttgtagccagttctctagaggcgtgtacgcgatctttggattttatgatcagatgtctatgaatacacttacctcattctgtggtgccctccataccagtttcgtaacaccctctttccctaccgatgccgacgtgcagttcgtgatccagatgaggccagcgttgaagggcgctattttgtcgcttctgggccattacaaatgggagaagtttgtgtacctgtatgacaccgagcgaggcttttctatactgcaggctattatggaagccgctgtacagaataactggcaggttaccgctagatccgttggcaacataaaggatgtgcaggagtttcggaggataatcgaagaaatggatagaagacaggaaaagcggtacctaattgactgcgaggttgaaagaatcaatacaattcttgagcaggtggtcatcttaggaaagcacagccgtggataccactacatgctggcgaacttggggtttacagacatcctgctggagcgggtgatgcatggaggggctaatattactgggttccagatcgtcaataacgaaaacccgatggtgcagcagtttatccagaggtgggttaggctggacgaacgtgagttccccgaggcaaaaaacgcccctctcaagtacacgtctgctctaacccatgatgctatactggtgatcgccgaggcattccggtatttacgcagacaacgagtagatgtgtcacggaggggcagcgccggtgattgcttggcaaacccggcagtgccctggtcccagggcatcgacatcgaacgtgccctcaagatggttcaggtccaagggatgacaggaaatatacagttcgatacctatggacgacggaccaactatacgatcgacgtgtatgagatgaaggtatccggatcacgcaaggctggatactggaacgaatacgaaaggtttgtgcccttctccgaccagcagatctcaaacgatagcgcgagcagcgaaaacagaactattgtggttaccaccatcctggagtctccctatgttatgtataaaaagaaccatgagcagctggaagggaacgagaggtacgagggttactgtgtcgatctggcctacgagatagctaaacatgtacgcataaagtataagctctcaatcgttggcgatggaaagtatggtgctcgggatcccgagacaaaaatctggaatggcatggtcggcgaactggtctacggcagggccgatatcgcggtcgccccattaaccatcactcttgtccgcgaggaggtcattgacttcagtaagccttttatgagcctcgggatcagcatcatgatcaagaaacctcagaaatcaaagcctggcgttttctctttcctagaccctctcgcatacgagatatggatgtgcattgtgttcgcttatattggcgtctctgtggtgttgttcctggtatctaggttctcaccctacgaatggcacctggaggacaacaacgaagaacccagggacccccaatccccaccagatcctcctaacgaattcggtatttttaattcactttggttttcactcggagctttcatgcaacagggatgcgacatttctccccgtttcgtgttcgtcgcctactcaatgccgcattgcattctgtggtcatattctatacacgtgcatatggtgttcatacacctgaactcgcgatttttctcctttaacattccttcaaacgatcgcctgagcagtagccactgcgtctgcctgtgcccttag

SEQ ID NO: 224699 - DNA, 2475 bp, synthetic construct
  misc_feature 1..2475: note = Description of Artificial Sequence: Synthetic coding sequence
  source 1..2475: mol_type = other DNA
atggcacgacagaaaaagatggggcagagcgtactgagagcagtttttttccttgttctgggcctgctggggcactctcatggtggttttccaaacaccattagtatcgggggattattcatgaggaataccgtgcaggagcactcagcttttagatttgccgtgcaactatataacactaatcagaacactaccgaaaaaccttttcatctgaattatcatgtcgaccatctagacagttctaattctttcagcgttactaatgctttctgcagtcaattttcgagaggcgtctacgcgatatttgggttttacgaccagatgagtatgaacacactgacgtcattttgtggtgctctccacacatcattcgtcacgcctagttttccgacagacgctgacgtccagttcgtcattcaaatgaggcctgctctgaaaggggcaattctttcgcttctgggtcactataaatgggagaagttcgtgtatctatatgataccgaacggggattctctattttgcaggctataatggaagcagccgtgcaaaacaactggcaggtcactgcacgtagcgtgggtaatataaaagatgttcaagagtttcgcaggattatcgaagagatggaccggagacaggagaaacgctacctcatagactgtgaagtggagcgaattaacacgatcctcgaacaagtggtgatcctagggaaacactcccggggttaccattatatgctggctaatctcggatttaccgacattctgctggaacgagtcatgcacggcggagctaacatcactggctttcagatcgtaaacaatgagaaccctatggtgcagcagttcatccaaaggtgggtgcggctggacgagcgcgaatttcctgaggccaaaaatgctccactgaagtacaccagcgctctaacccatgacgccattctcgtcatcgctgaggcattcagatatcttcggagacagagagtggacgtatccaggcgagggtccgcaggtgactgtctggcaaaccccgcagtaccctggagtcagggcatcgacatcgaaagagcacttaaaatggtgcaggtgcaaggcatgaccggcaacatccaattcgacacctatggcaggcgaaccaactacaccatcgacgtgtatgaaatgaaggtgagcgggagcagaaaggcagggtactggaacgaatacgaacggtttgttccattttccgaccagcaaattagtaacgattcagcctcatccgagaatcgaacaatagtcgttaccacaatcctcgaatcgccttatgttatgtacaagaagaatcatgagcagcttgaaggaaacgagcgctatgagggctattgtgtggatctggcttatgagatagccaaacacgtcaggatcaagtacaaactcagcatagtgggcgacgggaaatacggcgctcgggatcctgaaaccaagatctggaacgggatggtgggcgaactggtctatggacgggctgatatcgctgtggcccctctgaccatcactttggtacgggaggaagttatcgatttttctaagccattcatgtctttgggaatttcaatcatgattaaaaaaccccaaaagtccaaaccaggcgtgtttagtttcctggaccctctcgcgtacgagatctggatgtgtatcgtcttcgcttatatcggtgtatctgtcgtcctttttctcgtatcccgattctccccctatgagtggcacctggaagacaataatgaggaacccagggacccccagtctccccctgaccctcccaacgaattcgggatctttaactccctgtggttttccttaggcgctttcatgcagcaggggtgcgatatctccccccgtagtctgagtggcagaattgtgggaggggtgtggtggttcttcaccctgataattatttcttcatacacagccaatctggcagcattccttacagtggaacgcatggtcagtcccatcgagtctgctgaggatctggccaagcagactgaaatagcctacggcacgctcgatagtgggagcaccaaggagttttttagacggagcaaaatcgccgtgtacgaaaagatgtggtcatacatgaaaagtgccgaaccttctgtattcacaaaaaccacagcagacggggtggcgcgagtaaggaaaagcaaaggcaaatttgcattcctccttgagtccacaatgaacgaatatatcgagcagagaaagccgtgcgacactatgaaagtggggggtaaccttgatagcaagggttacggagttgccacgcctaagggatctgctctcagaaacgcagtgaacctggcggtgctcaagttaaatgagcaaggccttcttgacaagcttaaaaataaatggtggtacgacaagggcgaatgcggatctgggggtggcgattctaaaaacgcgtgtaaaccttgttctattgagacccaatag

SEQ ID NO: 224700 - DNA, 2709 bp, synthetic construct
  misc_feature 1..2709: note = Description of Artificial Sequence: Synthetic coding sequence
  source 1..2709: mol_type = other DNA
atgcgcataatttcccgacagatcgtcctcctgttcagtggtttttggggcctcgccatgggggcattcccctccagtgtccagattggtggcctgttcatcaggaacactgaccaagaatacactgcatttaggttggctatttttctccataataccagtcctaacgccagcgaggccccatttaacttggtccctcacgtggacaacatcgagacagcaaacagcttcgccgtcaccaacgcgttttgttctcagtacagtcggggtgtgttcgcgatatttgggctgtacgataaacggagtgtgcatacactcacaagcttctgtagtgccttacacatttccctgattactccttcgttccccaccgagggcgagagccagttcgtgcttcagctgaggccctctttacgaggagctctgctttcacttctggaccactatgagtggaattgctttgtgtttctgtatgacacagacaggggttactctatcctccaggcaatcatggagaaggcaggccagaacggatggcatgtgtcagcaatctgcgtggaaaacttcaacgacgtgagttatcgacaattgctggaagagctcgaccggagacaggaaaaaaagttcgtgatcgactgtgagatcgagcggctgcagaatatcctggaacagattgtgtcagtgggcaaacatgtgaaaggataccattatatcatagctaacttaggatttaaggatatcagtctcgagagatttatccacggaggcgcaaacgtaactggctttcagttggtcgacttcaatacaccaatggttatcaaactgatggatcgctggaaaaaactggaccaacgcgagtatcctgggtcagagactcccccaaagtacacctccgctctgacctatgacggcgttctggtgatggcagagacctttcggagtctcaggagacagaaaatcgatatctctagacgcggaaacgcaggcgactgtttagcaaatccagccgctccctggggccagggtatagacatggagaggacgctcaagcaggtcaggatccaggggttgacagggaacgttcaatttgaccactacggacgcagagtgaattatactatggatgtgttcgagctgaaatccacaggaccaagaaaggtcggctattggaatgatatggacaagctggtcctcatccaggatgtgcccactttaggaaatgacacggccgcaattgaaaacagaacagtggtcgttactacaatcatggaatccccatacgtcatgtataaaaagaaccacgagatgtttgaaggcaacgacaagtatgaaggctactgcgttgatctggcaagtgagatcgccaagcatataggaatcaagtataagattgctatcgtgcctgatgggaaatatggagccagggatgcagatacaaagatatggaacgggatggtgggtgagctggtctacggaaaggctgagatagcaattgcgccacttaccatcaccctggttcgagaggaggtgattgacttttctaaacctttcatgtcactgggcatttcaatcatgatcaagaaacctcagaagagtaaacccggtgtgttctcctttctcgaccctctcgcttacgaaatctggatgtgcattgtcttcgcttacatcggggtgagtgtggtgttatttctcgtgtcgcgattctccccttacgagtggcatacggaggagcctgaggatggaaaggagggcccatcggatcagcccccaaacgaattcggaatattcaattctctgtggttttcactgggcgcatttatgcaacaagggtgcgacatttcaccgaggtctttgagtgggcgaattgttggcggagtctggtggtttttcactctcataattatctcatcctacactgcaaacttggctgcgttcttaacagttgaaaggatggtgagccccattgagtcagccgaggaccttgccaagcagactgagattgcatatggaactctggattctggaagtactaaagagttctttcggagatccaagatcgcagtttacgaaaagatgtggacttacatgaggtcagcagaaccctctgtgtttacacgcaccacagctgaaggcgttgcacgggtgcggaagtccaaggggaagttcgccttccttctggagtcaacaatgaacgaatatattgagcagcggaagccttgtgacacaatgaaagtgggaggtaacctggacagcaaaggctatggagttgccactcccaaaggctcgtctttacggactcccgtgaatctggcagtgctaaagctctctgaagctggcgtgctagataaacttaagaataagtggtggtacgacaaaggcgaatgcgggcctaaggattctggttccaaagacaaaaccagcgccctgtccctctccaacgtggctggcgtcttctacatcttagtgggcggactagggctggccatgcttgttgccctcatcgagttctgctataaatcacgcgctgaagcgaaaagaatgaaactgacctttagtgaggcgatcagaaacaaggccagacttagtatcacagggagcgtaggagagaatgggcgagtcctgacacctgactgcccaaaggccgtgcatacaggaacggctattcgccagagttctggcttagcggtcatagcatccgacctgccctag

SEQ ID NO: 224701 - DNA, 1302 bp, synthetic construct
  misc_feature 1..1302: note = Description of Artificial Sequence: Synthetic coding sequence
  source 1..1302: mol_type = other DNA
atgcggatcatttccagacagattgtgctgcttttctcaggattctggggtctcgctatgggggctttcccctcttccgttcagattggaggtctcttcatcagaaacacagatcaggagtatactgctttcaggctggctattttcttgcacaatacctcgcctaacgccagcgaagcccctttcaatttagtgcctcacgtggacaacatagagaccgccaactccttcgcagtgacaaatgccttctgcagccaatattccagaggtgtgttcgcgatattcggtctgtatgataagcgatccgtccataccctcacaagcttctgttctgcactccacatttctctgatcacaccaagcttccccacagaaggagagagccagttcgtgctgcagttacggccatcattgcgcggagcgttgctctctttgctggaccactatgaatggaattgcttcgttttcttgtatgacaccgatcggggatattctattctgcaggccataatggagaaggcaggccagaacggctggcatgtctcggcaatctgcgtagagaacttcaacgacgtcagttaccggcagctactcgaagaactggatagaaggcaggaaaaaaaatttgttatcgattgcgaaatcgagcgactgcagaatattctggagcagatagtttccgttggtaagcatgtgaagggatatcactacattatagccaacctgggattcaaggatatatcactggagcggttcatacacggcggagccaacgtgacaggatttcagctggtcgactttaacacccccatggttatcaagctgatggacaggtggaagaaactggaccagcgtgaataccccggatcagaaaccccacccaagtatacaagtgctctgacttacgacggggtcctcgtgatggccgagactttccgatccttgcgcaggcagaaaatagatatctccaggagaggcaatgccggagattgtctcgctaaccccgcagctccttggggacagggtatcgacatggagcggacactgaagcaggtcaggatccagggattaacagggaatgtgcagttcgaccattacggacgcagggtaaactatacaatggacgtgttcgagctcaagtctactggccctcgcaaggtaggctactggaacgatatggataagttagtgctcattcaagatgtcccaacgcttgggaatgacacagccgctatcgagaaccgcactgttgtggtaacaaccatcatgcccctgatgaagaaccccattctccggaattag

SEQ ID NO: 224702 - DNA, 2655 bp, synthetic construct
  misc_feature 1..2655: note = Description of Artificial Sequence: Synthetic coding sequence
  source 1..2655: mol_type = other DNA
atgcgcattatctcgcgtcagatcgtgctgttatttagcggcttctggggcctggctatgggagccttcccctcaagcgtgcagatcggaggattgtttattagaaacactgaccaggagtacacagcctttaggctcgcaatcttcttgcataacacatcgcccaacgcgagcgaagcacccttcaacctggtgcctcacgtagataatatagagaccgccaattcgttcgcggtgaccaatgcattctgttcccagtactctagaggagtgttcgccatctttggactctatgataagcgttcagtacacacactgaccagtttctgtagtgctttgcacatttccctcattactcctagcttccccacggagggagagagtcagttcgtcttgcagttgcgaccaagcttgcggggagccctgctgtccctgcttgaccattatgaatggaactgttttgtgttcctgtatgataccgacagaggatattccatactgcaagccatcatggagaaggccggtcagaatggatggcacgtgagtgccatttgcgttgaaaacttcaatgatgtttcttatcggcaactgctggaggagcttgacagacgacaagagaagaaattcgttatagactgtgagatagagagactgcagaacatcctcgagcagatcgtgtccgtcggaaagcatgttaagggctatcactatatcatagcaaacctgggctttaaagacatcagcctggaaaggtttatccacggcggtgccaatgtgacagggtttcagctagtggatttcaacacacctatggtcattaagctgatggaccggtggaagaagctcgatcagcgtgagtacccaggctccgaaacaccacccaaatacacttcggccttgacatacgacggcgttctggtgatggccgaaacctttcggtcactgaggagacagaaaatcgatatctcaagacgcggaaatgccggagactgtttggccaatcccgctgctccctggggccagggcatcgatatggagaggacactgaagcaggtgaggattcaggggctcactggaaatgtgcagttcgaccactatgggagaagggtaaattacactatggacgtattcgagttaaaatctaccggcccacgcaaagtggggtactggaacgacatggataagcttgtgctgatccaggatgtgccaacattgggaaatgacaccgcagccattgaaaatcggaccgtagtggtcaccactattatggaatcaccatacgtcatgtacaagaaaaatcacgaaatgttcgagggcaatgacaagtatgaaggttactgtgtagatttggcatccgagatcgcgaagcacattgggatcaaatataagattgctatcgttcccgatggaaaatacggcgctcgcgatgccgataccaagatttggaacgggatggtcggagaattggtctacggcaaagctgagattgcaatagcccctctgacgatcacattggtgcgtgaggaagtcattgactttagtaaaccgttcatgtctctggggatatctatcatgattaaaaagccacagaaaagtaagccaggtgtattctcatttttagaccctctagcttatgagatttggatgtgcatcgtcttcgcttacatcggagtgtcagtagttctgttcctggtcagcagatttagtccgtatgaatggcatacagaggagccagaggatggcaaagaaggcccatctgatcagccccctaacgaattcggcattttcaattccctgtggttctccctgggagcttttatgcagcagggatgcgatatttcccccagaagcctcagtggacggatcgtcggcggagtctggtggttcttcaccctcattattatcagttcatatacggcaaacctggccgctttcctaactgtggaacgtatggtgtcaccaattgagtccgcagaagatctcgcgaagcagaccgagatcgcatacggaaccctcgacagcggctctacaaaagagttttttcggagaagcaagatcgccgtatatgagaagatgtggacctatatgagatctgctgaaccatcggtgttcaccagaactactgcagaaggcgtggcgcgagtgcggaagtccaagggaaaatttgcatttctgttggaatccaccatgaacgagtatattgaacagagaaagccgtgcgataccatgaaggtcggcggtaatttggacagcaaagggtatggagtggccacacctaaaggaagcagcctccggaacgctgtgaacctagctgtgctcaagctcaatgaacaaggcttacttgataaacttaaaaacaaatggtggtatgataagggcgaatgtggaagtggaggtggtgattccaaagacaaaacatccgccctgtccctgagcaacgtggccggagtcttttacatcctggtaggcggactggggttggctatgctggtggccctgatcgaattctgctataaatctcgggctgaggccaaacgcatgaaagtcgcaaagtccgcccagacgttcaatccgactagctcacagaatacccagaacctggcgacctacagggaagggtacaacgtctacggaaccgagtccattaagatctag

SEQ ID NO: 224703 - DNA, 1302 bp, synthetic construct
  misc_feature 1..1302: note = Description of Artificial Sequence: Synthetic coding sequence
  source 1..1302: mol_type = other DNA
atgcggattatcagccgccagatcgtactgctgtttagcggattttggggcctcgccatgggcgcttttccctcctccgtgcagattggtggactgttcatacgcaacacagatcaggaatacaccgctttccgtttggcaatttttctgcataatacttcccccaatgcatccgaggctccatttaacctggttccccatgtggacaacatagagacagcaaatagcttcgcagtgacgaacgccttttgctctcaatactctaggggtgtgttcgccatctttggactgtacgacaagcggagtgtgcacacacttacctctttctgttccgcactacacatcagtctgatcactccaagcttccccacagagggcgagagtcagtttgtactgcagctgcgaccatccctcaggggagccctcctgtccctgttggaccactacgagtggaactgctttgtgtttctttatgataccgaccgcggatacagcatccttcaggcaatcatggagaaggctggtcagaatggctggcatgtaagcgcgatatgcgtcgaaaatttcaatgacgtgagctacaggcaactgctggaagagctggaccgcaggcaggaaaagaagttcgttatcgactgcgagatcgagagactacagaacatcctggagcagatcgtgtctgtcgggaaacacgtgaagggttatcattacataattgccaatctcgggttcaaagatattagcctggaacgatttatccatggcggagcaaacgtgacgggctttcagctggtggatttcaatacaccaatggtaatcaagctcatggaccgctggaagaaactggaccagcgcgaatatccaggatccgagacacctcctaagtacacatcagcactgacatacgacggtgtgctcgtcatggccgagacattcagatcccttcgccgtcagaaaattgatatatccagacgcggaaatgctggcgattgcttggccaaccctgccgctccctgggggcagggtatagacatggagcggaccctgaaacaggttagaattcagggcttaaccggtaacgtgcaatttgaccactacggcaggcgggtcaactacaccatggacgttttcgaacttaagtctaccggccctcggaaggtgggctactggaatgacatggataaactggttctgattcaggatgtgccgacgttgggaaacgacactgccgcaattgaaaatcgtaccgtagtcgttactacgataatgcccctaatgaagaaccctattcttcgcaactag

SEQ ID NO: 224704 - DNA, 2655 bp, synthetic construct
  misc_feature 1..2655: note = Description of Artificial Sequence: Synthetic coding sequence
  source 1..2655: mol_type = other DNA
atgaggattattagccgtcaaatagttttgttattttcagggttctggggtctggccatgggcgcatttccctcatcagtgcagattggcggtctttttatccgaaacaccgatcaggaatatacggcatttagactcgcaattttcttacataatacatcacccaacgcgagcgaggctccctttaatctcgtgccccacgtggacaacattgagacagcaaatagctttgcagttaccaatgctttttgtagccagtattcccgcggtgtgtttgcaatctttggattgtacgataaacgctccgtgcacacgctcacctctttctgctctgcactccacatctctcttattaccccttcgttcccgaccgagggggagtcccaattcgtgttgcagttaagaccctctctaaggggggcactcttatctctgctggaccattatgagtggaattgcttcgttttcctgtacgataccgatcggggatactctatccttcaagccatcatggaaaaagctggccagaatggatggcacgtcagcgccatttgcgtagagaattttaatgatgtcagttacagacagctgcttgaagaactggataggaggcaggaaaaaaaatttgtaattgattgcgagatagagagattgcagaacatcctggaacagatagtcagcgtgggaaagcacgtgaaaggctaccactatattatcgcaaaccttgggtttaaagacatctctctcgaaaggttcattcacggaggagcaaatgtgacaggattccagctcgtggatttcaacactccaatggtaattaaactgatggacagatggaagaagctcgatcagcgcgagtatccgggttcagaaacgccacctaagtatacctctgctctgacctacgatggcgtactcgtgatggctgagacttttcggagcttgagaaggcagaagattgacatcagcaggcgtgggaatgcaggagactgcctggctaatccagctgccccttggggccagggcattgatatggaacgcacactcaagcaagtgcggatccaggggcttaccggcaacgtccaatttgaccactatggaaggcgggttaactatacgatggatgtttttgagctgaagtccactggtcctcgcaaggtcggctactggaatgatatggacaagctagtgctcatacaggacgttcccacactggggaatgatactgcagcaatcgagaaccgaacagtggtagtgaccactatcatggaatctccttacgttatgtataaaaagaatcacgagatgttcgaagggaacgacaagtacgaggggtactgcgtggacctcgcgtcagaaattgccaagcatatcggaatcaagtataagatagcgattgtgccggatggaaagtacggcgcacgggacgccgataccaagatatggaatgggatggtgggcgagttagtctacggaaaagcagagattgcaatcgctcccctcacgatcaccctggtcagagaggaagtaatcgacttttcaaagccatttatgtccctcggtatttccattatgattaagaagccacaaaaaagtaaacccggagtgttcagcttccttgatccactggcttatgagatatggatgtgtatagtgttcgcatacattggggtgtcagtggtgctgtttctggtgtcccgattcagcccatacgagtggcacacagaagagccggaagacggaaaggaaggcccttctgaccagcctcccaacgagttcgggattttcaatagtttatggttctccctgggggcttttatgcaacaggggtgcgatatatcaccccgttctctgagcggcaggatcgttggcggagtgtggtggttttttacacttatcatcatctctagctatacagctaatctcgctgccttcttaaccgtggaacgaatggtgagtccaatcgagtccgcagaggatctggcgaagcagacagagatcgcttatggcaccttagattccggaagcaccaaggaattcttcaggcgaagtaagatagccgtgtacgaaaaaatgtggacttacatgagatctgctgagccctctgtctttacacgaacaaccgcagaaggcgtggcgagggtacggaaatcgaagggtaagttcgctttcttgcttgagagtaccatgaacgagtacattgaacagcgcaagccctgcgatactatgaaggtgggcggaaatctcgatagtaaaggttacggcgtcgcaactccaaaagggtcaagccttaggaacgcggtgaatctggccgtgttgaagctgaacgagcaaggcctgttggacaaactaaagaacaaatggtggtatgacaagggcgagtgtgggagcggaggcggtgattctaaggataagacttcagccctttctctgtctaatgtggccggagtcttttacatcctggtgggcggtctcggcctggcaatgctcgtggcgttgatagagttctgttacaagtcacgggctgaagccaaacggatgaaagttgcaaaaagcgctcagacctttaatcctactagctctcagaatacccagaacttggctacataccgcgagggctataatgtgtatgggacagagtcaattaagatttag

SEQ ID NO: 224705 - DNA, 249 bp, synthetic construct
  misc_feature 1..249: note = Description of Artificial Sequence: Synthetic coding sequence
  source 1..249: mol_type = other DNA
atgaggattatcagccgacagatcgtcttactgtttagtgggttctgggggctagccatgggcgctttccccagttccgtccaaatcgggggattgttcatccgcaacacagaccaggagtacactgcgttcaggcttgcaatcttcctgcacaacacaagccctaacgcttctgaagccccattcaatctcgtaccacatgtcgacaatatcgagactgctaactctttcgcagtgaccaacgcgtag

SEQ ID NO: 224706 - DNA, 249 bp, synthetic construct
  misc_feature 1..249: note = Description of Artificial Sequence: Synthetic coding sequence
  source 1..249: mol_type = other DNA
atgaggatcatctcacgtcagatagtccttcttttttcaggcttctggggtctcgcaatgggagcctttccaagcagcgttcagattgggggattatttatcagaaatacggaccaggagtacactgcatttcgacttgctatatttttgcataacaccagtccaaatgcgagcgaagctcctttcaacctcgttccacatgtggataatatcgaaacagccaactcttttgccgtgactaatgcctag

SEQ ID NO: 224707 - DNA, 2709 bp, synthetic construct
  misc_feature 1..2709: note = Description of Artificial Sequence: Synthetic coding sequence
  source 1..2709: mol_type = other DNA
atgcgtataatctcccgccagatcgtcctgttgttctctgggttttggggcctggctatgggagccttcccaagctcagtgcaaatcggcggtctctttattcggaatacggatcaagagtatacagcctttcgcctggctatctttttacacaacacaagccccaacgcttctgaagctccatttaacctggtgcctcatgtcgacaacatcgaaactgccaatagttttgccgtaaccaatgccttctgcagtcagtactcaagaggagtgttcgcgatcttcggactttacgacaaaaggtctgtccatacactgacctccttctgtagcgccctgcatattagtttgatcaccccctcatttcccaccgaaggcgaatctcagtttgttctgcagctcagacctagtctcagaggcgctttactgagcctcttggaccactatgagtggaactgcttcgtgttcctctacgatacagatagaggatacagcatccttcaggcaatcatggagaaagctggccagaacggctggcacgtgagcgcaatatgtgtggagaatttcaatgatgtgtcataccggcagcttctggaggagctcgacagaaggcaggagaagaagttcgtgattgactgcgaaatagaacgcctgcagaatattctagagcaaatagtcagcgttggaaaacatgtgaaaggataccattacatcatagcgaacctcgggttcaaagatatttctctggagcgcttcatacatggtggggctaatgtgaccgggtttcagcttgtggatttcaacactccgatggtcatcaagttaatggatcggtggaagaaactggaccagcgggagtaccctggtagtgagactccccctaagtataccagtgctctgacctacgacggggtgctggtcatggcggaaacctttcgcagcttgagaagacaaaagattgatatctctagacgaggtaatgcaggagactgtctggccaatcccgctgcaccctggggacagggaattgacatggaaagaaccctgaagcaggtccgcatccagggactgacaggaaacgtgcagttcgaccattacgggcgacgtgttaattatacaatggacgtgttcgaattaaaatcaacgggaccaaggaaagtggggtattggaatgatatggataagcttgtcctcatacaggatgtccccaccttaggcaatgatactgcggctatcgaaaaccgcaccgtggtggtgactaccattatggagtccccttacgtgatgtataagaaaaaccacgagatgttcgagggaaatgacaaatacgaaggatattgcgtggatctggcctccgaaatagcaaaacatatcggcattaagtacaaaatcgccattgtccccgatggtaagtatggggcaagggatgccgacacaaaaatctggaatggaatggtcggtgagctcgtgtacggtaaagctgaaattgcaatagccccactgactataactctcgtcagagaggaggtgatcgactttagcaagcccttcatgagcctcggaatttccatcatgatcaaaaaaccacagaaatctaagcctggagtcttttcttttttggaccctttagcttacgagatttggatgtgtatcgtgtttgcttatatcggtgtcagcgtcgttctgttcctagtgagtagattctccccttacgaatggcacaccgaggagcccgaggacggcaaggaaggccctagtgatcagcccccaaatgagttcggtatcttcaatagcctgtggttctctcttggcgctttcatgcagcagggctgtgatattagcccccgatcattgtccgggagaatcgtgggaggggtttggtggtttttcaccctgataatcatctcctcatacaccgccaacctcgcagccttcctgacagtggaaaggatggtttctccaatcgaatctgccgaagacctggcaaagcagacagagatagcctatggcacgctcgacagtggaagtacgaaggaatttttccggcgtagcaaaattgctgtctatgaaaagatgtggacctacatgagaagcgccgagccgagcgtttttacgaggacaactgccgagggggttgccagggtccgtaagagcaagggcaaattcgccttcttgttagagtcgaccatgaacgagtacatcgaacaaaggaaaccctgcgacaccatgaaagtagggggaaatctggattccaaaggctacggcgtagccacaccaaaaggctctagcctgcgaacccccgttaacctggcagtcctgaaattgtcggaggccggtgtgctggacaagttgaaaaataagtggtggtatgataagggagagtgcggccctaaggactccggcagtaaggataagaccagtgcgctatcactctctaacgtagccggagttttctacattctggtgggtggcctgggactggcgatgctggtcgccctcatcgaattttgttacaagtcacgcgctgaagccaagcgcatgaagctgacctttagcgaggctattcgcaacaaggccaggctctccatcacgggctcggtcggcgaaaacggaagagtgttgacgccagattgccccaaagccgtgcacaccggaacagctattcgccaatccagcggccttgccgtgattgcgtcagacctgccctag

SEQ ID NO: 224708 - DNA, 360 bp, synthetic construct
  misc_feature 1..360: note = Description of Artificial Sequence: Synthetic coding sequence
  source 1..360: mol_type = other DNA
atgcggagcgctgagccttcagtgtttacccggacaaccgctgagggggttgctcgggtgcgcaaaagtaaaggtaagttcgcctttctgttggagagtacgatgaatgagtacatcgaacaaaggaagccctgcgatacgatgaaagtcggcggtaacctggattctaaagggtacggcgtggctacacccaaggggagctccttacgaaatgcagttaacctggccgtactaaaactgaatgaacaggggcttttggataagctgaagaacaaatggtggtacgacaagggagagtgcggtagcggcggaggcgacagtaagaactcttgcaagccttgtcggttcgagacgcaatag

SEQ ID NO: 224709 - DNA, 2721 bp, synthetic construct
  misc_feature 1..2721: note = Description of Artificial Sequence: Synthetic coding sequence
  source 1..2721: mol_type = other DNA
atgcagcacattttcgcattcttttgcaccgggttcctgggtgccgtcgtgggggctaattttccaaataatattcagatcgggggtctcttccctaatcaacagtcccaggagcacgcagcttttaggttcgctctgagccaactaactgagcccccaaaacttctgcctcagattgacatcgtaaacatttctgattctttcgagatgacctaccgcttctgctcccagttctccaaaggggtgtacgctatctttggattctatgaaagaagaactgtgaatatgctcacctccttctgtggagccctgcacgtttgtttcataaccccttcctttccggtagacaccagcaatcagtttgtcctccagttgcgcccagagctgcaggatgcattaatttccattatcgatcattacaaatggcaaaaatttgtgtatatctacgatgctgatagaggtctgtcagtcctgcaaaaggtactggataccgcagctgagaagaactggcaagtcacagccgtgaacatcctgactacaacggaagagggataccggatgctatttcaggacttagagaaaaagaaggagaggctggtggtggttgactgcgaatcggaacgactgaatgcaatcctcgggcagataatcaaacttgagaagaacggaattggataccactatatcctggcaaatctggggtttatggatattgatctgaataaattcaaagaaagcggtgcaaacgtcaccggatttcaattggtgaactacactgataccatccccgctaaaatcatgcaacagtggaaaaattctgacgcaagggaccacaccagggtcgattggaagaggcccaaatacacaagcgcgcttacatatgacggagttaaagtgatggctgaggctttccagtctttacgcagacaaaggatagatatatcgaggcggggaaacgcaggcgattgcctggccaacccagcggtcccatgggggcagggtatcgatattcagagagcactgcaacaagtgagatttgaagggttgactggaaacgtccagtttaatgaaaagggcaggcggaccaactacaccctgcacgtgattgaaatgaaacatgacgggatccgtaagatagggtattggaacgaggatgacaagtttgtgccagctgccactgatgctcaggccggaggtgacaattcatccgtacagaatcggacatatatcgtgacgaccatcctcgaagatccttacgtgatgctcaagaagaacgccaaccagttcgaaggtaatgatcggtatgaaggatattgtgtggagctagctgccgagatagccaaacacgttgggtactcctatcggctcgagatcgtgtccgacggaaaatatggggctcgtgatcctgacacaaaggcttggaacggtatggttggggagctagtttacggtagggcagacgtggccgttgcacctctcacaatcaccttggtccgcgaggaggtgattgacttctctaaaccttttatgtctcttggcatttctatcatgattaaaaaacctcagaaatcaaaacctggagtcttctctttccttgatcctttggcgtatgagatttggatgtgtatcgtatttgcatatatcggggtatcagtggttctgtttcttgtttcacggtttagtccgtacgagtggcacagcgaagagtttgaggaaggaagggaccaaacaactagcgaccagtccaacgagttcggaatttttaactccctttggttctctctgggtgcattcatgcagcagggatgtgatatctcgcccaggagtctgagcggcagaatcgtcgggggagtgtggtggttctttaccctgatcattatctccagttatacagccaatctcgccgcattcctgaccgttgaacgaatggtatcaccaatcgagagcgccgaagacttggcaaaacagacggagatagcatacggaacattagaagcagggtctaccaaggaattctttcgcagatctaaaatcgccgtgtttgaaaaaatgtggacctacatgaagtccgctgagcccagtgtctttgtaaggacaactgaggaaggcatgatcagggttaggaaatctaagggtaaatacgcctatctccttgagtcaacaatgaacgaatacattgaacagcggaaaccatgcgatacaatgaaggtgggagggaacctagatagtaagggttatggtattgccacccccaaaggatccgctcttaggaatcctgtcaatcttgcggttctgaaattgaatgaacagggcttactcgacaagttgaaaaataagtggtggtacgacaagggagaatgtggatctggaggtggagactctaaggataagacctctgccttatctctgagtaacgtggcaggtgtcttctatatcctgatcggaggactcgggctggcaatgttggtcgcgctgatcgagttttgctacaaatcccgaagcgagtctaagaggatgaagggcttttgcctcatacctcagcagtcaatcaatgaggcgatcaggacaagcactctaccaagaaactctggagccggtgctagcagtggtggcagcggtgaaaatggccgtgttgtttcgcatgacttccctaagagtatgcaaagtattccgtgtatgtcccactccagtggcatgcccttgggggcaaccggtttgtag

SEQ ID NO: 224710 - DNA, 2721 bp, synthetic construct
  misc_feature 1..2721: note = Description of Artificial Sequence: Synthetic coding sequence
  source 1..2721: mol_type = other DNA
atgcaacatattttcgcattcttctgtaccggttttcttggggctgtggtaggcgctaatttcccaaataacatacagattggaggcctgttccctaatcaacagtcccaggaacatgcagcattcaggttcgctttatctcagctgacagagccccctaaactgctacctcagatcgacattgtgaatattagtgacagtttcgaaatgacctacaggttttgctctcagtttagcaagggggtgtacgccatatttggcttctacgaacggcgtacggttaatatgttaaccagtttctgtggagccctgcacgtatgttttattaccccatcttttcctgtagacacgtctaatcagttcgtgcttcagctgaggcctgagttgcaggacgcgctgataagcatcattgaccactataaatggcagaagtttgtgtatatctatgatgccgaccggggtctatcagttctgcaaaaagttctggacaccgccgctgagaagaactggcaggtaacagcagtaaatatcctcactactacagaagaaggttataggatgctcttccaggatctcgagaagaagaaagagcgtctggtcgtcgttgattgtgaatcggagaggctcaatgccattctggggcaaattatcaagctggagaagaatgggatcggttaccattatatactcgctaacctgggctttatggatatcgaccttaacaagttcaaggaaagcggcgcaaatgttacgggctttcagctggtgaattacacggatacaattcctgccaagatcatgcagcagtggaagaattctgacgccagggaccacaccagggtggactggaaaagaccaaagtacacttccgcccttacatacgatggggtgaaggtcatggccgaggcttttcagagcctacgcaggcaacgaattgacatctccaggcggggaaacgcaggggattgcttagcaaacccggcagtgccttggggccagggaatcgatattcagcgggcactacagcaggtgaggttcgaaggcctgactggcaacgttcagtttaacgaaaagggcaggaggactaactacaccctgcatgttatcgaaatgaagcatgacggaatccgcaagatcggatattggaatgaggatgataagtttgttcccgctgccactgacgctcaggctggaggagataattctagcgtgcaaaataggacctatatagttactacaatactggaggacccctacgtgatgctgaaaaaaaacgcaaatcagttcgaggggaacgatcgttacgagggctactgcgtggagctcgcagcggaaatcgctaaacacgtgggctatagctaccgcctagagattgtgtccgatggtaagtatggagcccgagaccccgacaccaaagcctggaatggcatggtgggtgaattagtatacggtagagccgatgtggccgttgctcctcttaccattaccctggttcgggaagaggtcatcgatttttcaaaaccattcatgtctctgggaattagcatcatgattaagaaacctcagaagtctaagccgggagtgttcagctttctggacccgctggcttatgaaatctggatgtgtatagtgtttgcatacatcggcgtgagcgtggtactattcttggtctctcggttcagcccttatgagtggcactccgaggagttcgaggagggcagggatcagactaccagcgatcagagcaatgagtttgggatttttaatagtctctggttctcgctgggggcttttatgcagcaagggtgtgacatttccccgcgatcattaagtgggaggattgttggcggagtgtggtggttcttcacgctgatcatcatatctagttacacagccaacctagccgcatttctgacagtggagaggatggtgtcgcccattgaaagtgctgaggatttagcaaagcagaccgaaatcgcgtacgggacgctggaggcaggaagcacgaaagaattcttccgtcggagtaagattgccgtatttgagaagatgtggacatatatgaagagcgctgaacccagtgttttcgtcagaactacagaggaggggatgatacgtgtgcgcaagagcaagggtaaatatgcctatctgcttgaaagcacaatgaacgagtacattgagcagcgcaaaccatgcgacaccatgaaagtgggcggaaacctcgacagcaaaggctacggcatcgcgacgcctaagggatcagcactcaggggccctgtgaatttggccgtgctgaagctgagtgaacagggggtgctggacaagctgaagtcaaagtggtggtacgacaaaggtgaatgtgggtctaaggactcagggagcaaggacaagacctcagctctctctctgtctaatgtggccggagtgttctatatccttattggcggactgggactggccatgcttgtggccctgatcgagttctgttacaagagcaggtctgaatccaagaggatgaagggcttttgccttatcccgcagcagtccatcaacgaggccataaggactagcactcttccgcgaaacagcggtgccggagcctcatcagggggaagtggggaaaatggtagagttgtgagccatgatttcccaaagtctatgcagtctatcccgtgcatgtcccactccagtgggatgcctcttggtgccaccggtctttag

SEQ ID NO: 224711 - DNA, 2751 bp, synthetic construct
  misc_feature 1..2751: note = Description of Artificial Sequence: Synthetic coding sequence
  source 1..2751: mol_type = other DNA
atgtgctgctctacccacctgttccaacctctccaactagctggagggttggaatggccctggagcaatctgctgtgcttcctcacccccgtgaaattgcaccccgaagtctggggcctttttcctaaccagcaatcccaagagcatgcggcattccgttttgctctgagccagctgaccgagccaccaaagttacttcctcagatcgacatcgtgaacatctccgatagttttgaaatgacctacaggttttgctctcagttttctaaaggtgtgtacgcaatcttcggtttttacgagcggaggactgtgaacatgctgacatctttctgcggggctctccatgtttgcttcataaccccctctttcccagtggatacctccaatcagtttgtgctgcagcttcgcccagagctgcaggacgccttgatctccatcattgaccactacaaatggcagaaatttgtgtatatatatgacgctgaccgtggcctgtctgtgcttcagaaggtgctcgacactgccgctgagaagaactggcaggttacagctgtcaacattttaacgaccacggaggaggggtatcgcatgttgtttcaggatctggaaaagaagaaagagaggctggtggtagtggattgtgagtcagagcggcttaatgctatactcggtcagattattaagttggagaagaatgggatcggttaccattacatcctggctaacctgggcttcatggacattgacttaaacaaatttaaggagagcggagctaatgtaacaggctttcagctggtgaactacactgatactattcccgctaagattatgcagcagtggaaaaactcagatgcacgcgaccacacgagggtagattggaaaagacccaaatacacgtctgctctgacctacgatggcgtgaaggtgatggcagaggcctttcagtctctgagaagacagcgcatcgatatttcacgtcgcggtaacgcgggtgactgtctcgccaatcctgcagtcccatgggggcaggggatagacattcagagggccctgcagcaggtgaggtttgagggtttaacaggcaatgtgcagtttaacgaaaaaggacgcagaacgaattacacgttgcacgtgatcgaaatgaaacacgacggaatccggaagatagggtattggaacgaagacgataagttcgtccctgccgcaacagacgcccaggccggaggcgataattcctcagtgcagaatcgtacatatatagtgacaaccatcctggaggatccatacgtgatgttgaagaaaaacgccaatcagtttgaaggcaatgatcgctatgaaggatattgcgtggaattagccgcagaaatcgccaaacacgtcgggtactcttacagactggaaattgtgtctgacggaaaatatggcgctcgggaccccgatactaaagcatggaacggaatggtcggggagctggtctatggtcgtgcggacgtggcagtcgctcctctcactatcactctggtgagggaagaagttatcgatttctcaaaaccgttcatgtccctgggaatctctatcatgataaaaaaaccacagaagagcaaaccgggtgtgttttcttttctggatccgttggcctacgagatctggatgtgtattgtttttgcctatatcggggtttccgtcgttctgtttttggtatcccggttctctccttacgagtggcacagcgaggagttcgaagaaggcagagaccagaccacctctgaccagtcgaatgagttcggcattttcaacagcctgtggttctcactcggagcatttatgcagcagggctgcgacataagtcccagaagcctgagcggacgcatagtgggaggggtgtggtggttcttcacccttatcatcatctcctcatataccgctaacctagcggctttcttgaccgtggaacgcatggtgtctccaatcgaatctgcagaagatttggccaaacagaccgaaatagcttatgggacgttagaggccggaagtacgaaggagttttttcgcaggagcaagattgccgtttttgaaaagatgtggacctacatgaagtctgctgaaccctcggtctttgttaggacgacagaggagggaatgattagagttagaaaaagtaaaggtaaatatgcctaccttctggagtccactatgaatgaatacattgagcagcggaaaccctgcgatactatgaaggtcggcggaaacctggacagcaaagggtacggcatcgctaccccaaaagggagtgccctgagagggcctgtgaatctggccgtgctcaaactgtccgagcaaggagtactggacaagctgaaatcaaagtggtggtatgacaagggcgaatgcggatctaaggactctggttcaaaggacaaaaccagtgccttgtccctgtccaatgtggcaggggtcttttatattctgatcggaggactgggcttagcgatgctggtagcacttattgagttctgctacaagagtagatccgaatcaaagcgaatgaagggattctgtctgatcccacagcagtctatcaacgaggccatccggacctcgaccttgcccaggaatagtggggctggcgcatccagtgggggaagcggggaaaacgggcgagtggtgtcacacgacttccccaagtcaatgcagagcataccctgtatgagccactctagcggaatgcccctgggggctacaggtctttag

SEQ ID NO: 224712 - DNA, 2481 bp, synthetic construct
  misc_feature 1..2481: note = Description of Artificial Sequence: Synthetic coding sequence
  source 1..2481: mol_type = other DNA
atgcagcacattttcgcttttttctgtacaggcttcctgggtgcagttgtaggggcaaactttcccaacaacattcagattggaggtctgttcccaaatcagcagagccaggaacacgctgcttttcggttcgccctctcacaactcacggagccccctaagttgctgccccagattgacatcgtcaatatctctgatagctttgagatgacataccgatgtctgtccgtacttcaaaaagtgctggacacagcggcagaaaaaaactggcaggtgacggccgtcaatattctgacaaccactgaggagggctatcgcatgctgttccaggacctggagaaaaagaaggagcgactggtggtggtagattgcgagagtgagcgactgaatgccatactagggcaaatcattaaattggagaagaatggcatcgggtatcactatattctggcaaatctggggtttatggacatagatctgaataagtttaaggaatccggagccaacgttaccggcttccagctggtgaattacacagacacgatccccgcaaagattatgcagcagtggaaaaacagtgatgccagggaccacacccgggtggactggaagcgcccaaagtatacttctgccctgacgtacgatggcgttaaggtgatggcagaagcgtttcagagtttgcggagacagcgtatcgatatctcaagacgcggtaatgctggcgattgcctggctaaccctgccgtgccgtggggacagggaatcgatattcagcgagccttgcagcaggtgcggtttgaaggcctgaccggtaacgtacagtttaatgaaaaggggagaaggactaactacaccctgcatgtcattgagatgaaacatgacggcatccgcaagattggctactggaatgaggacgataagttcgtaccggctgcgaccgacgctcaggccggaggtgacaattcatcagtgcagaataggacatatatcgttactacgattctcgaggatccttacgtgatgctgaagaaaaacgcaaaccagttcgagggcaacgatcgctacgagggatattgtgtggaattggcggctgaaatcgctaaacacgtaggttactcgtatcggctggagattgtgtccgacgggaaatacggggctagagaccccgacactaaagcctggaacgggatggttggcgaactggtgtatggcagggccgacgtggctgtggctccactaactatcaccctggtcagagaggaggtgatcgacttctccaaaccttttatgagcctgggcatctctatcatgataaagaagccacagaagtcaaaacccggagttttcagctttctggacccactggcatacgaaatttggatgtgtattgtgtttgcatacatcggcgtgtccgtcgtactcttcctggtgtctagattcagcccctacgagtggcattctgaagagtttgaggagggtagggatcaaacaacgagcgaccagtccaatgaatttggcatcttcaatagcctgtggtttagtttgggcgcattcatgcaacaggggtgtgatatctcccctagatcgctctctgggagaattgttggaggtgtctggtggttcttcaccctaattattatttcttcttatacagcaaatctcgccgcatttctcaccgtggagagaatggtgagcccaattgagtccgccgaggacctggccaaacagaccgagatcgcgtatgggactcttgaggctggttccaccaaagaattttttcgcagaagtaagatcgccgtgtttgagaagatgtggacatacatgaaatctgcagagccgtccgtattcgtgcgcaccacggaagaagggatgatccgggtgaggaagagtaagggaaaatatgcttacctgctggagagcaccatgaacgagtacatcgagcagagaaagccatgcgatacaatgaaagtgggcggtaatctggactcaaaaggatatggtatcgccactcccaagggttctgccctgaggaatccagtgaacttagccgtcctaaaactgaatgagcagggcctgttagacaaactcaagaataagtggtggtacgataagggagaatgtgggtcaggcggaggcgactccaaagataagacctcggccctgagtttaagtaatgtggccggtgtgttttacatactgatcggcggactggggctcgctatgttggttgcattgatcgaattttgctataaatcccgctctgagtccaaaaggatgaaaggcttctgcctgatcccgcaacagtcaattaacgaggccatcaggacaagcaccctccccagaaattccggtgcgggagctagttcaggtggatcaggagagaatggacgcgtggtttcgcacgactttccaaaaagcatgcaaagcatcccttgtatgtcgcatagttctggcatgccgctcggggctaccggtctgtag

SEQ ID NO: 224713 - DNA, 2751 bp, synthetic construct
  misc_feature 1..2751: note = Description of Artificial Sequence: Synthetic coding sequence
  source 1..2751: mol_type = other DNA
atgtgctgcagcacacacctctttcagccattgcagttggcagggggtctggaatggccgtggtctaatctgctgtgtttcttgacgcccgttaaattacatcccgaggtgtgggggctgttcccgaatcagcagtctcaagagcatgcagccttccggtttgctctgtcccagctgaccgagccacctaagttactgcctcagatcgacatcgtcaatatatcagactctttcgaaatgacttacagattttgctcccagttttccaagggtgtttatgccatatttggtttttatgagagaagaaccgtcaacatgctaactagtttctgcggtgccctccatgtttgttttatcacaccatctttcccggtagatactagtaatcagtttgtactgcaattgagacccgagctgcaagatgcactgatctctatcattgaccactataagtggcaaaagtttgtgtatatctatgatgctgaccgcggacttagcgtgctgcaaaaggttctggacacagccgcagaaaagaattggcaggtcacggcagtcaatatcctcacaaccaccgaggaggggtatcgaatgttattccaagatcttgaaaaaaaaaaagagagactggtcgtggttgactgcgagagcgagaggctaaacgccatcttgggccagatcataaaacttgagaagaatgggattggctaccattatatcctggctaacctgggattcatggacatcgacctgaataagttcaaagaatccggggcaaatgtgacaggattccagctcgttaattataccgacaccatcccagccaagataatgcaacaatggaaaaattcggatgccagggaccacacccgcgtggattggaagaggcctaagtacacaagtgcacttacatacgacggcgtgaaggtaatggctgaagccttccagagccttcgtcgtcaacgtatagacatctcccgacggggtaatgctggcgactgccttgccaatccagccgtgccatgggggcagggcatagatattcagcgggctctccaacaggttcgattcgagggcctgacaggaaatgtgcagttcaatgagaaaggacgtcgcaccaactacactttacacgtgattgaaatgaagcacgatggaatcagaaagatcggttattggaatgaggatgataaatttgtccctgccgctaccgatgctcaagcaggtggggacaacagttctgtgcagaacaggacatacattgttaccactatccttgaggacccttacgtgatgcttaagaagaatgcaaaccagtttgaaggtaatgatcggtacgaagggtactgtgtggaattagctgcggagatcgcaaagcacgtcggttatagctacagattagagatcgtctctgacgggaagtacggagctcgggaccccgacaccaaggcatggaatggaatggtgggcgagctagtgtacgggcgagcggatgtcgccgttgcacccttgacaatcacactggtccgcgaagaggtgatagacttttcaaagccctttatgtctttgggtatctcaatcatgattaaaaaaccacagaaaagtaaacccggtgtgttctctttccttgacccactggcctatgagatctggatgtgcattgtgtttgcttacataggggtgagcgtcgtgctgtttctggtctctagattctcaccctatgaatggcacagtgaggagtttgaagagggtagagaccagacaacctccgaccagagcaacgagttcggcatcttcaatagcctttggtttagcctaggagcatttatgcagcagggatgcgacatcagccccaggtcactgagcggccgtattgtgggaggagtctggtggttctttacactgatcattattagcagctacactgctaatcttgccgcatttctgaccgtcgaacgtatggtgagccctatcgagtccgctgaggatctggccaaacagacagagatcgcctatggcacactggaagctggtagcactaaagagtttttccgacgctcaaagatcgcagttttcgaaaaaatgtggacttatatgaaatctgcggagccatcagtcttcgtaagaactaccgaggagggcatgatccgggtcaggaagagtaaaggtaagtatgcctatcttttagagagcaccatgaatgagtacatcgagcagcgaaaaccatgcgacaccatgaaggtgggaggcaatctggactccaagggatatggcatcgcgactcctaagggcagtgctctccgtaaccctgtgaacttggccgtgctcaaactaaatgagcaggggctgctggataaactgaagaacaaatggtggtatgacaaaggagagtgtgggtccgggggtggcgattccaaggataagacttcagccctgtcgctgtcaaacgtggcgggtgtattctacattttgattggcggactgggtctcgcgatgctcgtagcactgatcgagttctgctacaagtctcgcagcgagtccaaacggatgaaggggttctgtctaattcctcagcaatccataaacgaggctattaggacctccactctgcctcgcaacagcggcgcaggtgccagttcaggtggtagcggtgagaacgggagagtcgtgagtcacgattttcccaagtctatgcaatccattccctgtatgtcccactcctccggtatgccgttaggcgctactggcctctag

SEQ ID NO: 224714 - DNA, 2151 bp, synthetic construct
  misc_feature 1..2151: note = Description of Artificial Sequence: Synthetic coding sequence
  source 1..2151: mol_type = other DNA
atgcagcacatcttcgcttttttctgcacagggtttcttggcgcagtggtgggcgcaaacttccctaacaacatacagatagtatgttctcaattcagtaagggtgtttacgccatcttcgggttttatgagaggaggaccgtcaatatgctgacttctttttgtggcgctctccatgtgtgtttcattacaccctcattccccgtggatacatccaaccagtttgtactgcagcttagacccgagcttcaggatgccctcattagtattattgaccattataaatggcagaagttcgtgtatatttatgatgctgacagggggctttcagtcctgcaaaaagtgcttgatacggcagcagagaaaaattggcaggttacggccgtcaatatactcacaaccacagaagaaggttacaggatgctgtttcaggatttggagaagaaaaaggagaggctggtcgtggtggattgtgaaagcgagcgcctgaatgccattctcggtcagatcattaagttggaaaagaatggaattggatatcactatattcttgccaacctgggatttatggatattgatttgaataaatttaaggagagcggtgctaatgtgacgggctttcagctggtcaattacaccgacacaataccagcgaagattatgcagcagtggaagaactcagacgccagggatcacaccagggtggactggaagagacccaagtacactagcgccctgacctatgatggggtaaaggtgatggccgaggccttccaaagtctgcggagacaacgcattgatatttcgcgaagggggaacgccggtgattgtcttgcaaacccggcagttccctggggccagggaattgacatccaacgggcactgcagcaggttagattcgagggtcttaccgggaatgtccagtttaatgagaagggtaggcgcactaactataccttgcatgtaatagagatgaagcatgacggtatacgaaaaattggatactggaacgaggacgataaatttgtgcccgcagccaccgatgcccaggccggaggtgacaatagcagcgtgcaaaacaggacgtacattgtgacgacaatcttggaggacccttatgttatgcttaagaagaacgcgaaccagtttgagggtaatgatcgctacgagggttactgtgttgaactggctgccgagatcgctaaacatgttggttattcatataggcttgagatcgtgtcagacggcaagtatggagcacgcgaccctgataccaaggcgtggaacggtatggtgggcgagctcgtttatggccgtgctgatgtggcagtcgccccactcacgattactttggtccgagaggaagtgatcgacttttcaaagccattcatgagcttaggcatcagcatcatgataaagaagccgcaaaagtcaaaaccaggcgtgttctccttcctggatcccctggcctacgaaatctggatgtgtatagtcttcgcttacatcggggtctctgtggttttattccttgtttccaggtttagtccctacgaatggcacagtgaggaattcgaggaggggagagaccagaccaccagtgaccaatctaacgagtttggtatattcaattccctgtggttttcacttggcgctttcatgcagcagggctgcgatattagccccaggtcactatcaggcagaatagttggcggagtttggtggttttttaccctaatcatcatatcgtcatacacagctaacctcgcagctttcctcactgtagagcggatggtttcaccaatcgaaagcgcagaggacctggccaaacagaccgagatcgcttacggtaccctggaggcaggctccacaaaggaattcttccgcaggtctaaaatcgctgtatttgagaagatgtggacatacatgaagtccgcagagccctctgtcttcgtgcgtacaacagaagagggcatgatacgggtgcgtaaatcaaagggcaaatatgcttatcttctcgaatccacaatgaatgaatacatcgagcaacgcaaaccttgcgataccatgaaggtggggggaaatctggattccaaggggtacgggatcgctacaccaaaaggttccgccctgcgtaccagacaggcgttgtag

SEQ ID NO: 224715 - DNA, 2721 bp, synthetic construct
  misc_feature 1..2721: note = Description of Artificial Sequence: Synthetic coding sequence
  source 1..2721: mol_type = other DNA
atgcaacatatattcgctttcttttgcaccggatttctgggcgcagtggtaggggctaattttcctaataatatccaaatagggggactgttcccgaaccagcagagccaagaacatgccgcattccggtttgcactgagccagttgacagaaccccctaagctacttccgcaaattgacattgttaatattagtgattccttcgaaatgacatatcgcttctgctctcagttctccaaaggggtttatgctattttcggcttctatgagagacgcaccgtcaatatgctaacctctttttgtggtgcactgcacgtgtgttttattaccccatccttccctgtggatacatctaatcagttcgtcctgcagctccgccctgaactgcaagacgccctgatttcgattattgaccattacaagtggcaaaagttcgtatacatctacgatgccgacagagggctgtccgtccttcagaaggttctcgacaccgctgccgaaaaaaactggcaggtgacagcagtcaatatcctgaccactactgaggaggggtatcggatgttgtttcaagatctggagaaaaagaaggagcgcctggtggtggttgactgcgagtccgaacgcttgaacgccatcctgggacaaataattaagctggaaaagaatggaatcgggtatcactacattctagcaaatttaggattcatggacatcgatctaaacaagtttaaggaaagtggcgctaatgtgacaggatttcaactcgttaattatactgacactattcctgccaaaattatgcaacaatggaagaattcggacgcccgagaccatactcgtgtcgactggaagcgtcctaagtacacatccgcccttacatacgacggggtcaaggtgatggccgaagccttccagtccctcagacggcaaagaatcgatatcagccgcagaggtaacgccggagattgcctcgccaatcccgcagtgccatgggggcaggggatcgatatccagcgtgccctgcagcaggtccgttttgaaggcctcactggcaacgtgcagttcaatgagaaaggccgacgcactaattacactctccacgttatcgagatgaagcacgacggaataaggaaaatagggtactggaacgaagacgataagtttgtaccggctgccactgatgctcaagctggcggagacaactcatccgtgcagaatagaacatacatcgtaacgaccatcctggaagatccttatgtaatgctgaagaaaaacgcaaaccagttcgagggaaatgacagatacgagggatactgtgtggagctagccgctgagattgccaagcacgtgggatactcatataggctggaaatcgtgagcgatggaaaatacggcgcacgcgaccccgacacaaaggcgtggaacgggatggtcggagagctcgtgtacgggagagcagatgtggccgttgcgccactcaccatcactcttgtcagagaggaggttatagacttctccaaaccctttatgtccctcggaattagtattatgattaaaaagccacagaaatcaaagccaggcgtgttttccttcttggatccactggcgtacgagatctggatgtgcattgtgttcgcatacattggcgtctccgtggttctttttctcgtgagcagattttctccatatgaatggcattcagaagaattcgaggaaggccgagaccagactacgagcgaccagtctaacgagtttgggatattcaattccctttggttttctctcggtgcctttatgcagcaaggatgtgatatcagcccccgatccctaagcggacgcattgtaggaggtgtttggtggttcttcaccctgattatcatctcctcatacactgccaatcttgccgctttcctcaccgtggagagaatggtttcccccattgaaagtgccgaagacctagctaagcagactgaaattgcctatggcaccctcgaggccggttcaaccaaagaattctttcgaaggagcaagatagccgtgtttgagaagatgtggacatacatgaagtctgccgagccatcagtgttcgtgcgtacaactgaggagggtatgattcgggtgaggaagagtaaaggcaaatatgcttacctgctggagtccactatgaatgaatatatcgagcagcgaaaaccttgcgataccatgaaggtgggcggtaacctcgattccaaaggctacgggatcgccacacctaaaggttcagctctcagagggccagtgaatctggcagtcctgaagctctccgagcagggtgtccttgacaaactcaagagtaagtggtggtacgacaaaggggaatgcggatccaaggacagcggtagcaaggataagaccagcgcactcagcttatcaaacgtggccggtgtgttctacattctaattggagggttgggcctggccatgctagtagccctcatagaattttgttacaagtcacgatccgagtcgaaaaggatgaagggcttctgcttaatcccccagcaatcaatcaacgaggccatccggacttcaacactccctcgaaactctggagccggtgccagctctggaggctcaggcgaaaatggcagggttgtttctcacgatttccccaagtcgatgcaaagcattccttgtatgtcacattcttccgggatgcccctgggcgcaacgggtctgtag

SEQ ID NO: 224716 - DNA, 2514 bp, synthetic construct
  misc_feature 1..2514: note = Description of Artificial Sequence: Synthetic coding sequence
  source 1..2514: mol_type = other DNA
atgacataccgattttgttcccagttctctaaaggcgtctacgcaatattcggattttatgagagacgaaccgttaacatgttgacctcattctgcggtgcgctgcatgtctgctttattacccccagctttcccgtggacacctccaaccaattcgtcctacagctgcgaccagagctgcaagatgcattgatttcaattatagaccattacaagtggcagaaatttgtctacatctacgacgccgatagaggactctccgtcctgcagaaagtcctggacaccgcagctgagaagaattggcaggttacagccgtcaacatacttactaccactgaggagggatacaggatgcttttccaggacctcgaaaaaaagaaggagagactggtagtggtagattgtgaaagtgagcgacttaacgctattctgggacagattattaagcttgagaagaacggcattggttaccattacattctcgcaaatctgggttttatggatattgacctcaacaagttcaaagagtctggcgctaacgtcaccggatttcaactcgtgaactataccgatactattccggctaagattatgcaacaatggaaaaacagtgatgccagggaccacacacgagtggattggaagaggccgaaatatacttccgccttaacctacgacggagttaaagtgatggccgaggcctttcagtccctgcgcagacagcggatcgacatcagccggaggggaaatgctggtgactgtctcgcgaaccctgcagtcccatggggacagggcatagacattcaaagagctttgcagcaagtgaggtttgaagggctcactggtaatgttcagttcaatgaaaagggcagacgaactaactacaccctgcacgtgattgagatgaaacatgacgggatcagaaagatagggtactggaatgaagacgataagttcgtacccgctgcgacggacgcacaggcagggggtgataactcgtcagtgcagaaccggacttacattgtaactaccattcttgaggatccctacgtcatgctgaaaaagaacgcgaaccagtttgaggggaatgatcgctatgagggttattgtgtcgagttggctgctgaaattgcaaagcacgtcggctattcgtaccgcctcgagatcgttagtgacgggaaatatggagcgagggacccagacaccaaggcctggaacgggatggtgggcgaactcgtctatggcagggccgacgtggccgtggcacctctcacaatcacactcgtgcgggaagaagtgattgacttcagtaaaccatttatgtctcttggcattagtattatgataaagaagcctcagaaatcaaagcctggtgtgttctcttttctcgatcccctagcttacgagatttggatgtgcattgtctttgcgtatatcggggtatcagtggtacttttcctggtaagcagatttagcccttatgagtggcattcagaagaatttgaagagggaagggatcagacaacaagcgatcaatctaacgagtttggaatcttcaatagcctgtggttcagcctgggtgcattcatgcagcaaggttgcgacatcagcccccgttcacttagcggcagaatagtcggaggggtgtggtggttttttaccctaataataatctccagctatactgctaacctggcggctttcctgactgtggagagaatggtgtcccctattgaaagcgccgaggatcttgctaagcagactgagatcgcatatggaactctggaagcaggttcgactaaggaatttttccggcgttctaagattgccgtgttcgagaagatgtggacctacatgaaaagtgctgagccctctgtcttcgtcagaacaaccgaagaaggtatgatacgggtcagaaagagcaagggaaaatacgcctacctgttggagtccaccatgaatgaatatatcgaacaaagaaagccctgcgatacaatgaaagtgggaggcaacctagacagcaagggatatggcatagccacacccaaaggcagtgcactccgtaatccggtcaatctggcagtgctcaaactgaatgaacaagggctgttggataagctcaagaacaaatggtggtacgataagggagaatgcggcagcgggggaggggacagcaaagacaaaacctctgccttatccctctctaatgtggccggagtattttacatcctgattgggggactgggactcgcaatgctagttgctctgatagagttctgctataagagtcgatctgaaagtaagaggatgaagggcttctgccttataccccagcaatctatcaacgaggcaattagaacctctaccctgcctcggaactctggggctggagcgtcatccggagggagcggggaaaacggcagagtggtgagtcatgacttcccgaagagtatgcagtcaatcccatgcatgtcccactcaagcggaatgcccctgggcgctacaggcctgtag

SEQ ID NO: 224717 - DNA, 2652 bp, synthetic construct
  misc_feature 1..2652: note = Description of Artificial Sequence: Synthetic coding sequence
  source 1..2652: mol_type = other DNA
atgcagaaaataatgcatatcagcgtactcctttcacctgtactctggggactcattttcggcgtttcctcaaattccattcaaattggaggcctcttccctcgcggtgccgatcaggaatatagcgcatttcgcgtcgggatggttcaattttcaacttcagagtttcgtctcacccctcatattgataacttagaggtggccaatagctttgctgtcaccaacgcgttctgctctcagttctccagaggggtgtacgcgatctttggcttttacgacaagaaatcagtgaatactatcacctcattctgcggtaccttgcacgtgagctttatcacaccgtcctttcccactgacggtacccatcccttcgtgatccagatgaggcccgacctgaagggcgcactgttgagcctcatagaatattaccagtgggacaaattcgcctacttgtacgacagcgatcgaggtctgtctaccttgcaggccgtcctggacagtgcagcagagaaaaaatggcaggtcacagcaatcaacgttgggaacatcaacaacgataaaaaggatgaaatgtacaggagcctgttccaggacttggagttgaaaaaggagagaagggttattctcgattgtgaacgggacaaggttaacgacattgtggaccaggttattaccatcggtaaacatgtcaaaggctaccattacataatcgccaatctcgggtttaccgacggcgatctgctgaaaatccaattcggcggtgccaatgtctccggattccagatcgtggactacgatgacagcctcgtgtccaagtttattgagaggtggtctaccctggaagaaaaggagtatccaggcgctcacactaccaccattaaatacacctctgcactgacctatgatgcggttcaggtcatgactgaggctttccgcaatttacgcaaacagcggatcgagatcagccgcaggggcaacgcgggtgactgcctagcaaacccagctgtaccctggggacagggcgtggagattgagcgtgccctgaagcaggtgcaggtggagggcctgtctggcaacatcaagttcgatcaaaatgggaagagaataaactatactattaacatcatggagcttaaaaccaatggacctcggaaaataggctattggtcagaggtggataagatggtggtcacattgaccgagttgccaagcggtaacgatacaagtgggctcgagaataaaactgttgttgtaaccacgatcctggagagcccttatgtgatgatgaagaagaatcatgagatgctcgagggcaatgaaaggtatgaaggctactgcgtagatctggccgcagagatagctaagcactgcggcttcaaatacaagctgacaatcgtaggcgacggcaagtatggtgctagggatgccgacaccaaaatctggaacggcatggtgggggagctggtgtacgggaaagccgatattgcaattgctccactcaccatcacgctcgtgagagaggaggtcattgacttctccaaaccctttatgagtctaggcatctctataatgattaaaaagccgcagaaatccaaacctggagtgtttagttttctcgaccccctagcttacgaaatttggatgtgtatcgtttttgcttacataggggtttcagtggttctatttttagtgtccagattcagcccatatgaatggcatactgaggagttcgaggacggtagagaaacacagtcatcagaaagtaccaatgagttcggtattttcaattctctatggttctctctcggggcattcatgcagcagggctgtgatatctctcctcggtcactctctgggagaatcgtgggcggtgtgtggtggttctttacgttaataatcatttcaagttacaccgccaatctggctgctttcctcaccgttgagagaatggtttcccccatcgagagtgccgaagatttgtcgaagcagaccgaaatcgcctacgggaccctggattctgggagcacaaaagaattcttccggaggagcaagatcgccgtgttcgacaaaatgtggacgtacatgcggtctgcggagcccagcgtgttcgtcaggacaacggctgagggtgtggctagagtgcgcaagagcaagggaaagtacgcttatctactagaatccacaatgaacgaatatatcgagcaacggaaaccctgtgacacgatgaaggtgggcggaaacctagactcaaagggttacggcatcgcaacacccaaaggaagctcccttagaaatgccgtcaatctggcagtgctgaagctcaacgaacagggattactggacaagttaaaaaacaaatggtggtacgataaaggggagtgcgggtctgggggaggggattctaaagagaagacgagcgccctatctctgtctaatgtggccggtgttttttacatcctcgtggggggactcggtctggccatgttagtggccctgatcgaattttgctataaatcccgcgctgaagctaagcggatgaaggtggctaagaacgcccagaacattaacccttcaagcagtcaaaattcacaaaatttcgccacgtacaaggaaggatacaatgtttacggcattgagtctgtaaaaatctag

SEQ ID NO: 224718 - DNA, 2652 bp, synthetic construct
  misc_feature 1..2652: note = Description of Artificial Sequence: Synthetic coding sequence
  source 1..2652: mol_type = other DNA
atgcagaagatcatgcacatatccgtgctgttgagtccggtattatgggggctcatcttcggcgtgtccagtaactccatacagattggcggactgttccccagaggtgctgaccaggaatactctgcgtttcgagtgggtatggtccaattcagtactagtgaattcagattaacgcctcatatcgacaatctggaggtagccaacagtttcgccgtgaccaacgcattttgtagccaattttcaagaggtgtctacgcaattttcggattttacgacaagaagtctgtgaacacaattacatccttttgcgggacgttgcacgtgagcttcattacaccctccttccctaccgacggtacacatcccttcgtaatccagatgcgtcctgatctcaagggagcgctcctgtccctgatcgagtactaccagtgggacaagtttgcttacttatatgactctgatcgagggctgtccaccctgcaggccgtgttggattccgctgccgaaaaaaagtggcaagtgaccgccataaacgtgggaaatatcaataatgataagaaagatgagatgtaccggagcttatttcaggatctagaactgaaaaaagagagaagagtgattctagactgcgaacgagacaaggtgaatgacattgtggaccaggtgattactattgggaagcatgtgaaggggtaccattacattatcgcaaatttgggattcacagatggggacctgctgaagattcagttcgggggagcaaacgtctccggattccagatcgtcgactatgacgatagtttggtgtctaagttcattgaacggtggtcgaccctggaggaaaaggaataccctggcgcacataccacaactatcaagtacaccagcgctctcacctatgatgccgtgcaggtgatgacagaagcttttcgcaaccttagaaagcaaaggatcgaaattagtaggagaggcaatgccggtgactgtctcgcgaatccggcagtcccctggggccaaggggtggagattgaacgagctctgaagcaagtgcaggtggaggggctgtcaggaaacattaaattcgaccaaaacggcaagcgcatcaactataccattaatatcatggagctcaagacaaatgggcctcgtaagataggttattggtccgaggttgataaaatggttgtgacgctgaccgaactgccatcaggtaacgacacatcaggtcttgagaataagaccgttgtggttactacaatcctggagtccccttatgtgatgatgaagaaaaaccacgagatgctggaaggcaacgaacgctacgagggttactgtgtcgacctcgctgctgagattgcaaaacactgcggcttcaagtacaagctgacaatcgtgggagatggaaagtatggggctcgtgatgctgacaccaaaatatggaacggtatggttggagagttggtatatggcaaggccgacatcgccattgctcccttgaccattacgttagtgagagaagaggttattgatttctctaagcctttcatgagtctgggcatctccattatgatcaagaaaccacaaaagtcgaagcccggtgttttcagttttctggatccgctcgcgtatgagatctggatgtgcatcgtattcgcatacataggtgtctccgtcgtcttatttctggtctctaggtttagtccatacgagtggcacaccgaggagtttgaggacgggagagaaactcaaagctcagagtccactaacgagttcggtatcttcaactcgttgtggtttagcttaggcgcattcatgcagcagggctgtgatatcagcccacgttctttgagcggccgaatcgttggcggtgtatggtggttcttcacattgatcatcatttcatcatatacggcgaatctcgcagctttcctcacagtagaacggatggtgagtccaattgaaagcgccgaggatcttagtaaacagacagagattgcctacggcaccctcgactcgggaagcactaaagagtttttccggagaagcaaaatagcagtgtttgacaaaatgtggacctacatgcgaagtgcagagccgagcgtatttgtgcggactacagctgaaggcgtggcacgagtgaggaagtccaagggaaagtatgcttatctgctggaaagtacaatgaatgaatatatcgagcagcgaaagccttgtgataccatgaaagtgggcggtaacttggatagtaagggttacggaatagccacaccaaaaggctccagtctgagaacacccgtcaacctcgctgtgctgaaactttccgaacagggtgtcctcgataagcttaagaacaagtggtggtacgataaaggcgagtgcggcgcaaaagactcgggaagcaaagaaaaaacatctgccttgagcctctccaatgtggccggagtgttctacatcctcgtggggggactgggcttagccatgctcgtggctctgatcgagttttgttataagagtagggcggaggctaaaagaatgaaagtggcaaagaatgctcaaaatatcaatccctcctctagccagaattctcaaaacttcgcaacctacaaagaaggatacaacgtatatggcatagagtcagtgaaaatatag

SEQ ID NO: 224719 - DNA, 2193 bp, synthetic construct
  misc_feature 1..2193: note = Description of Artificial Sequence: Synthetic coding sequence
  source 1..2193: mol_type = other DNA
atggtgcaattttcaaccagcgagtttcgactaaccccccacatcgataatctggaagtcgccaactccttcgccgtcactaatgctttttgctctcagttttcccgcggtgtgtacgctatcttcggtttctatgacaaaaagtccgtgaataccattacgagcttttgcggcacacttcacgtgagctttattactcccagtttccccacagacggtacacatccctttgttattcagatgagacccgatctgaagggcgctttgctgagcctgattgagtactaccagtgggacaaatttgcatatctctatgactccgataggggactcagtacccttcaggccgtcctggatagcgccgctgagaagaagtggcaggttaccgcgatcaatgtgggcaacattaacaacgataagaaagacgaaatgtataggagcctcttccaggatttggagttaaagaaagagcggagagtgatcctggattgtgaacgcgacaaggtcaatgacattgtagatcaggtgatcactatcgggaagcacgtaaaaggataccattacattatcgccaacctcgggtttactgacggtgacctgctcaagatacagtttggaggggcaaatgtgtctggcttccagattgtcgactatgacgattccttggtgagtaagttcatcgagaggtggtccacattggaagagaaagagtatccaggagctcacacgaccaccatcaagtacacatctgccctgacttacgacgcagtgcaggttatgaccgaggcatttagaaatctcagaaagcaaagaatcgagattagtcgccgaggcaacgctggggattgcctggctaacccagccgtaccctggggtcagggggtggaaatagagcgggctctcaaacaggtccaggtggaagggttgtccggcaacatcaaatttgaccaaaacggtaaaaggatcaattacactattaacatcatggaactgaaaacaaacggccctcggaaaatcgggtactggtcagaggtagacaagatggttgttacactgacagagttgccatctggtaatgatacaagcggccttgagaataaaacagtggtagttactaccattcttgaatccccttacgtaatgatgaaaaagaatcatgaaatgctcgagggcaacgaaaggtacgagggatactgtgttgacctggctgccgaaatcgccaagcactgcggatttaaatacaagctcaccatcgtgggggacggaaagtatggcgctcgcgatgcggacacaaagatttggaacgggatggtcggggaactcgtttatggaaaagcagatatcgcaatagcccctctgaccatcacactcgtcagggaagaagtcatcgatttcagtaaacccttcatgtccttagggatttcaattatgattaaaaagccgcagaagagcaagccgggagtgttctcctttctagaccctctggcctacgagatttggatgtgtattgtattcgcatatatcggcgtaagcgtagtgttgtttctcgtgagcaggtttagcccctacgagtggcatacagaagagtttgaggatggcagggaaacacagtcttccgaaagcacaaatgagttcgggattttcaatagcctgtggtttagcctgggagcgttcatgcaacagggctgcgatatatccccaaggtcactcagtggtcgaatcgttgggggagtctggtggttcttcaccttgatcattatttcttcatatacagctaatctggcagctttcctgactgtggagcgcatggtgtcaccaatcgaaagcgccgaagatctgtcaaagcagaccgaaatcgcttatggaacactggacagcggaagtacgaaagagttcttccggagatcaaagatcgcggtgttcgacaaaatgtggacatatatgcgcagcgctgagccatcagtgtttgtccggaccaccgccgagggtgtggcacgcgtgaggaagtcgaagggcaagtatgcttatctgctagaaagtaccatgaacgaatacattgagcagcggaagccttgtgacactatgaaagttggagggaatctagacagtaagggctatggaatcgcgacacctaagggctcctcgctgtcgggcgtgactttcaagaccctgctatttgtctgttgtggttag

SEQ ID NO: 224720 - DNA, 297 bp, synthetic construct
  misc_feature 1..297: note = Description of Artificial Sequence: Synthetic coding sequence
  source 1..297: mol_type = other DNA
atgaacgaatatatcgaacagaggaagccctgcgatacgatgaaagtgggcggtaatttggattccaaagggtacgggattgctacacccaaaggatccagcttgagtggcgtcacatttaagacactgatctgtctgctctggattaacgcagtgaatctcgctgtactgaaactgaatgagcagggtcttctggataagctgaaaaataaatggtggtacgataagggagaatgtggcagcgggggaggtgatagcaaaaaccccagtaaatcatgtagcatcgagacccagtag

SEQ ID NO: 224721 - DNA, 2511 bp, synthetic construct
  misc_feature 1..2511: note = Description of Artificial Sequence: Synthetic coding sequence
  source 1..2511: mol_type = other DNA
atggtacaatttagcactagtgaattcagactcacaccccatatcgacaacttagaagtggccaacagctttgccgtgacgaacgcattctgttcccaattcagtcgcggagtttatgccatctttggcttctacgataagaagtccgttaatacaatcacaagtttctgcggcaccctccatgtgtcttttatcactccatcgtttccaaccgacggcacgcatccttttgtgattcagatgagacctgacctgaaaggagccttgctgtccttgatcgaatactatcaatgggacaagtttgcctacctttacgacagcgacaggggcctcagtactctgcaggccgtcctggactcagccgcagagaaaaaatggcaggtcactgctatcaacgttgggaacatcaataatgataagaaagatgagatgtaccgttcactcttccaagaccttgagctgaaaaaggaaagaagagtgatcctggattgtgagcgtgataaagtaaacgatatcgttgaccaggtcatcaccatagggaagcacgtgaaaggctaccactacataatagcaaacttagggttcaccgacggggatctgctgaagatccagtttgggggtgctaacgtgtccggctttcagatcgtcgactacgatgacagtttggtgtcgaaattcatcgaacgttggtctactcttgaggagaaagagtacccgggagcacatactaccacaatcaagtacacctctgcgttgacctacgatgccgtgcaggtgatgaccgaggcgttcaggaaccttagaaaacagcgcatcgaaataagcaggaggggcaatgctggcgactgtctcgctaaccccgctgtgccatggggccagggggtcgagatcgagagggcacttaagcaggtacaggtcgagggactgagtggcaacatcaagtttgaccagaatggaaagcggataaactacaccattaatatcatggagttgaaaaccaacgggcctcgtaagattggttactggtctgaggtcgacaagatggttgtcacactcaccgaactgccctctgggaacgacactagcggactggagaacaaaacagtggtcgttacaactatactggagagcccttatgtgatgatgaaaaagaatcacgagatgttagagggaaacgaacgctatgaagggtattgtgtggacctcgctgctgagattgccaaacattgcggatttaagtataagttgacaattgtaggggacggcaagtacggcgctcgggacgccgatacaaaaatctggaatggtatggtcggtgaactggtctatggcaaggccgacatcgctatcgctcccctgacgatcactctggtgcgagaagaggtaattgatttctccaagcccttcatgagcctaggaatctccataatgattaaaaaaccgcaaaagagcaaacctggagttttctcattcctcgatccattggcttacgaaatttggatgtgcatcgtatttgcatatattggtgtatctgtggtactgtttctggtttctcggttttccccctacgagtggcatactgaagagtttgaggacgggcgagaaacccaaagctcagagtccactaacgaattcggcatttttaattccctctggttcagtcttggggctttcatgcagcagggctgcgatattagcccccgaagtctctcggggcgtatcgtgggaggagtttggtggttttttactctgatcattataagttcttataccgctaacttggcagcttttctgacagtcgaacgcatggtctcacccatcgagagtgcagaggacctgtcaaaacaaacagagattgcgtatggaacattggacagtggttctaccaaagaatttttccgccgaagtaaaatcgcagtgttcgacaagatgtggacctacatgaggagtgcggagccttctgtgttcgtgagaacgacagccgagggagttgcaagagtgagaaaaagcaaaggcaagtacgcctatctgctggaaagcaccatgaacgaatacatcgagcagcgcaaaccttgtgatacaatgaaagtgggcggaaatctcgatagtaaagggtatggaatcgcgacccctaaaggcagttcactgaggacgcctgtgaacctagcggttctgaagctctccgagcagggggtgctggacaagcttaagaacaagtggtggtatgataaaggcgagtgcggagcaaaagatagcggcagcaaagagaaaacgtccgccctctctctaagcaacgtggcaggcgtgttttacatcctggtaggcggtctgggattggctatgctggtggcgctcatcgagttttgttataaatctcgcgctgaggctaagcgtatgaaggtggcaaaaaatgcacagaacattaacccatcctcttcccagaacagccaaaacttcgcaacctataaagagggctacaatgtttacgggatcgaaagtgtgaagatatag

SEQ ID NO: 224722 - DNA, 438 bp, synthetic construct
  misc_feature 1..438: note = Description of Artificial Sequence: Synthetic coding sequence
  source 1..438: mol_type = other DNA
atggtccagtttagcacctcagagtttagactgacaccacacatcgacaatctggaagttgcgaactcatttgccgtgacaaatgccttctgtagtcaattctcgaggggagtgtacgctatcttcggtttctacgataagaagagcgtgaatacgattacaagtttctgtgggaccctccacgtctcatttatcacaccctcctttcctacagatggaacgcaccctttcgtgatccagatgaggcccgacttgaaaggagctctgctgtctttgatcgagtactatcaatgggacaagtttgcttatttatatgattccgaccgcggactcagcactctacaagctgtgctcgattccgccgcagagaaaaagtggcaggtgaccgctatcaatgtcggcaatattaataatgataaaaaagacgagatgtactag

SEQ ID NO: 224723 - DNA, 174 bp, synthetic construct
  misc_feature 1..174: note = Description of Artificial Sequence: Synthetic coding sequence
  source 1..174: mol_type = other DNA
atggtccaattttcaacatccgaatttaggttgaccccgcacatagataatctggaagtggccaatagctttgcagtcactaacgctttttgcagccaattttctagaggcgtctatgcgatcttcggcttctatgataaaaaatccgtgaacacaataacaagtttttgctag

SEQ ID NO: 224724 - DNA, 2511 bp, synthetic construct
  misc_feature 1..2511: note = Description of Artificial Sequence: Synthetic coding sequence
  source 1..2511: mol_type = other DNA
atggttcagttttccaccagtgaattcaggttgactccccacattgataatctggaggtcgctaactctttcgccgtcactaacgccttctgttctcagttttccaggggggtgtacgcaatttttgggttctacgataaaaagtctgtgaataccatcactagtttttgtggcactctgcacgtgagttttattactccgtcctttcccacagatggcacacaccccttcgtcattcagatgcggccagatctgaagggagcccttctgtcccttatcgagtactaccagtgggacaagttcgcatacttatacgactctgatcggggattgtccacccttcaggcagtgctggactctgctgccgaaaaaaaatggcaggtgactgctatcaatgtgggaaacattaataatgataagaaggacgagatgtatcgatcccttttccaggacttagaactaaagaaagagcgcagagttattctcgattgcgaaagagataaagtgaatgacatagtggaccaggtcataactattggcaagcatgtaaagggctaccattacattatagcgaatcttggcttcactgacggcgacctgcttaaaatacagtttggaggtgccaatgtgtcggggtttcagatcgtggactatgacgattcactggtatcaaaattcatagagcgctggtctactctggaggagaaagagtaccctggggcacacacaaccacaatcaagtataccagcgctctgacatatgacgctgtgcaggtgatgactgaggcctttaggaatcttaggaaacagcgcatcgagatttcaaggagaggaaacgccggtgactgcctggcaaatcctgccgttccttggggacagggtgtagagattgaaagagctctcaagcaggtccaggtggaaggcctgtctgggaacatcaagtttgaccagaatgggaagagaatcaattacactattaatataatggaactgaagactaatggccctcggaaaataggttactggtctgaggtggataagatggtagtaacactcacagagcttcccagcggtaacgacactagcggtctggagaataagacagttgtggtgactaccattctcgaatccccttacgtgatgatgaaaaaaaaccacgagatgcttgaaggtaacgagcgatacgagggatattgcgtcgacctcgctgcagagattgccaagcactgcgggttcaagtacaaactcactatcgtgggcgacggaaagtacggcgcaagggacgctgataccaaaatttggaacgggatggtcggcgagctggtttatggcaaagccgacatcgcaatagctcccctgaccatcactttagtgcgggaggaggtgattgacttttcgaaacccttcatgagcctgggaatttctattatgattaaaaaaccccagaaaagcaagcctggcgtattctccttcctagaccccctcgcgtacgagatttggatgtgtatagtgttcgcatacattggggtcagcgtcgtactcttcctggtctcccggtttagtccatatgaatggcacactgaggagttcgaggacggcagggaaactcaatcaagcgaatcgacaaatgagtttgggatcttcaactcattgtggtttagcctgggcgcttttatgcagcaaggctgtgacataagcccaaggagcctgagtggaaggatcgtgggaggcgtgtggtggtttttcactctcattattatctcatcgtacactgctaatctggccgcatttctcacagtcgaacgtatggtctcaccaattgagtcggccgaggacctaagtaaacagaccgagattgcatacgggaccctcgactccggttccacaaaggagttctttagacgttcaaagatagccgtgtttgataagatgtggacttacatgagatcagctgaaccctctgtgttcgtccggacgacagccgagggggtcgctcgcgtgaggaaatccaaaggaaagtacgcgtacctgctggaatccactatgaatgaatatatcgagcagaggaagccgtgtgatactatgaaggtgggtggaaatttagatagcaagggatacggaatcgcaacacccaagggctcctccctacgaacacccgttaacctcgcagtgcttaagctatccgagcagggagtactggataaactgaaaaataagtggtggtatgataagggcgaatgcggggcaaaagattcaggaagtaaagagaaaactagcgctctgagcctgtctaacgtcgccggagttttttacatcctggtcgggggtctgggactggctatgctggtcgctctcattgagttttgttacaaatctagagctgaggccaagagaatgaaggttgccaaaaacgctcagaatatcaatccctcatcatcccagaacagtcaaaactttgccacctataaggagggatacaacgtctacggcattgaatcagtcaagatttag

SEQ ID NO: 224725 - DNA, 378 bp, synthetic construct
  misc_feature 1..378: note = Description of Artificial Sequence: Synthetic coding sequence
  source 1..378: mol_type = other DNA
atgcagaagatcatgcatatatctgtgttgctgagtcctgtgctctggggccttatcttcggcgtaagctccaactctatccaaatcgggggtctgttccctcgcggagccgatcaagagtattcagcctttagggttggaatggtccaattcagtacctcagagtttcgcctcactcctcacattgacaatcttgaggtcgcaaactcattcgcagtcactaacgccttttgttcccagttcagcagaggtgtctatgccatctttggcttctacgataagaagtccgtaaacacaattacctcgttctgtggtacactccacgtgagttttatcaccccaagtttccccaccgatgggactcacccatttgtctag

SEQ ID NO: 224726 - DNA, 147 bp, synthetic construct
  misc_feature 1..147: note = Description of Artificial Sequence: Synthetic coding sequence
  source 1..147: mol_type = other DNA
atgcagaagatcatgcatatctcagtcctgctgagcccggtgctctggggcctaatttttggcgtttcttccaatagcatccagattggcggtctgtttcctaggggcgctgatcaggagtactccgccttccgcgtgggcatgtag

SEQ ID NO: 224727 - DNA, 3030 bp, synthetic construct
  misc_feature 1..3030: note = Description of Artificial Sequence: Synthetic coding sequence
  source 1..3030: mol_type = other DNA
atggaagcactcaccctttggctgctgccctggatttgtcagtgtgtgtctgtgagggccgactccatcattcacatcggggcaattttcgaggagaacgccgcaaaagacgaccgtgttttccaactggctgtgagcgatctttccttaaacgacgacatcctccaatctgaaaagatcacgtatagcatcaaggtcatcgaggctaataacccttttcaggccgtgcaggaagcatgtgatctgatgacacagggtattttggcactcgtcactagtacaggctgcgctagtgccaacgcgctgcagtcacttacagatgcaatgcatattccgcatttatttgttcagagaaacccaggcggatccccccgaactgcttgtcatcttaatccttctcctgacggggaagcatacactttagctagcagacctcccgtgagacttaacgatgtcatgctcaggttagtgactgaactgcggtggcagaaatttgtgatgttttacgactcagaatacgatattcgaggcctgcagtcattcctcgatcaagcgagccggctcggcctcgatgtcagtctgcagaaggtggacaaaaatatctctcacgtgttcacctccctcttcactactatgaagactgaggagctcaacagataccgcgatacattgcgtcgcgctatccttctcttgagtccccaaggtgcccattcattcataaacgaggccgttgaaactaatcttgcgagtaaagattctcactgggtgttcgttaacgaagagatcagcgatcccgagatcctggatctggtccacagcgctttgggacgtatgacagtggtgcgacaaatctttccttctgccaaggacaaccagaagtgcacgaggaataatcatcggatatcttccctgctgtgcgatccccaggaaggttatctccagatgttgcagattagtaacctgtacctgtatgatagcgtcctcatgttggccaacgccttccatcgaaagttggaagataggaagtggcactcaatggccagcctgaattgtatcagaaagtccactaagccgtggaatggcggacgcagcatgctggacacaattaagaaagggcatataacaggcctgaccggagttatggagtttcgtgaggattcgagtaacccatatgttcagttcgaaattctcgggacgacttactcagagactttcgggaaggacatgcgcaagctcgccacatgggacagcgagaagggtttaaatggatcccttcaggagcgccctatgggcagccgacttcaaggcctgacgcttaaagtggttacagtcctagaggaacccttcgtcatggtggcagagaacattctgggacagccgaagagatataaaggattcagcatcgacgtgctggacgcactcgccaaagcccttggattcaagtacgaaatctaccaagcaccagacggcaggtacgggcatcagctccataacacctcttggaacggcatgattggcgaacttatttccaagagggccgatctggccatctctgcaattacgatcactccagagcgcgaaagtgtcgtggacttctctaagcgctatatggattactccgtcgggatcctaattaaaaagcctgaggagaaaatctcaatcttttccctgtttgccccatttgacttcgccgtgtgggcatgtattgcagcagccatccccgtggtgggagtgctgatattcgtgcttaataggatccaggcggtgagagcccaaagcgcagcccagccacgacccagtgcttccgcaacattgcactctgccatctggatcgtgtacggagcattcgtacagcaagggggtgagtcttccgtaaactccatggctatgaggatagttatgggcagttggtggctatttaccctgatcgtgtgttcttcctacacagccaatctcgcggcttttctcacagtgtccaggatggataaccctatccgaaccttccaggacttaagtaaacaggtcgagatgtcctacggtaccgtgcgggactcggccgtctacgaatattttcgtgccaagggaaccaacccactggagcaagatagtacattcgccgagctgtggagaacaatatcaaagaatggaggggctgataattgcgtgagcagcccaagcgagggaataagaaaggctaagaaggggaactacgctttcttgtgggacgttgctgtcgtcgaatacgcagctttgaccgacgacgactgcagcgtgaccgtcattgggaactctattagctctaagggatatggcatcgcattacagcacggctctccatacagagacctcttctcccagagaattctcgagctccaagacactggtgatctcgacgtactgaagcagaagtggtggccgcacatggggcgatgtgacttgactagccatgcctcggctcaagccgatgggaagagcttgaagttgcacagctttgcaggtgtcttctgtattctggctattggcttattactggcttgtcttgtggccgcactggagctctggtggaactcgaatagatgccaccaggagacccccaaggaagacaaagaagtgaatcttgagcaggtgcatcgaagaatgaatagcctgatggacgaagatatcgcacataagcagatcagtcccgcatctatagagttatccgccttggagatggggggactcgcacccacacaaacactcgagccgacccgcgagtaccaaaatactcagttgtccgtaagtacattcctccctgagcaatctagccacggcacaagtaggactttgtctagtggaccttcctccaacttgcccctgcccctcagcagcagcgctactatgcccagtatgcagtgcaaacataggtcccccaacggcggtctgttccggcagagccccgtgaagactcctattccaatgtcattccagcccgtgcccggaggcgtgctgccggaggccttagacacatcccacggcacttctatttag

SEQ ID NO: 224728 - DNA, 1743 bp, synthetic construct
  misc_feature 1..1743: note = Description of Artificial Sequence: Synthetic coding sequence
  source 1..1743: mol_type = other DNA
atgggttctcggctgcaagggcttactctcaaggtggtgaccgttctagaagagccgtttgtgatggtggccgagaacattcttggacagccaaaacggtataagggattctcaatcgacgtcttagatgcactggcgaaagcattagggtttaagtacgaaatatatcaggccccagacgggagatacggacatcaactccataatacctcatggaacggaatgattggggaactgatttcaaaaagggccgatctcgccatatcggcgattactattacacctgagagggagtccgtagtagatttctcaaaacgctacatggattacagcgtaggaattctcattaaaaagccagaggagaaaatctctatcttctccctgttcgcccctttcgactttgccgtgtgggcctgtatcgcagccgctataccagtggttggcgtgctgatttttgtattaaatcgcatccaagctgtgcgcgctcagagcgctgcccagccaagaccgagtgcttctgccacccttcactccgccatttggattgtgtatggagcattcgtacaacaggggggagagtcttcggttaatagcatggccatgaggatcgtgatggggtcatggtggctatttaccttgattgtatgcagcagctacaccgcaaacttggccgcattcctgaccgtatcacggatggataacccaatacgcaccttccaggacctttcaaaacaggtggaaatgtcctacggaaccgtgagagattccgccgtctatgaatattttcgggcaaagggcacaaatcctttggagcaggacagcacgtttgcagagctctggcgcaccattagtaagaacggtggggctgataactgcgtcagcagtccaagcgaaggaatcaggaaggctaaaaagggaaactatgctttcttatgggacgtggctgtggtcgaatatgcagcattaaccgacgatgactgttccgtaacagtgattggaaatagcatctcttctaaagggtatggaatcgcactccaacacggcagtccttatcgcgacctcttttcacagaggatcttggagctccaggacaccggtgacttggacgttctgaaacaaaaatggtggccacacatggggaggtgcgaccttacaagccatgcttcagctcaggctgacggaaagagtcttaaactgcattcctttgcgggagtcttttgcatcttagccatcgggctcctgttagcatgcctggtcgcagccctcgaactgtggtggaatagcaaccgctgtcaccaggaaacacccaaagaggacaaggaggttaacttggaacaggtgcaccgcagaatgaactcactcatggatgaggatatcgcgcataaacagatctccccagcctccattgagttaagtgcacttgagatgggagggttagctcccacccagactcttgaaccgacacgggagtatcaaaatacccagttatccgtgtccacgttccttccagagcagtcatcccacgggacatccaggactctctctagcggcccatccagcaatctgccactgccactatctagtagcgctactatgcctagcatgcagtgcaaacacaggtccccgaatgggggattatttagacagagccccgtcaagacacctatccccatgagcttccagccggtacccggaggcgtactcccagaggcacttgacacatcacatggcactagcatctag

SEQ ID NO: 224729 - DNA, 3024 bp, synthetic construct
  misc_feature 1..3024: note = Description of Artificial Sequence: Synthetic coding sequence
  source 1..3024: mol_type = other DNA
atggaagtgttcccattcttgctagtacttagcgtatggtggtcccgaacgtgggattccgccaacgctgattccattattcatatcggagcaatcttcgacgaatcagccaaaaaagacgacgaggtgttccgaacagccgtgggggacctgaaccagaatgaggaaattctgcagaccgagaagatcaccttctccgtgacttttgtggatggaaacaatccctttcaggcagtacaagaggcttgtgaactgatgaatcaggggatcctggctttggtgagttctataggctgcacctccgcgggatcactgcagagtcttgcagatgctatgcacattcctcatttgttcatacaaagaagcacggccggaaccccaaggtccggctgtggacttactcggtcaaaccgcaatgacgactatacgctgagtgttagaccacccgtctatctccacgacgtgattctgcgagttgttacggaatacgcttggcagaaattcattatcttctacgacagtgagtacgatatccgaggcatacaagagtttctcgacaaagtaagtcaacaaggtatggatgtcgcgctgcagaaggttgagaacaacattaataaaatgataacaacactgtttgacacaatgcggatcgaggagctcaatagatatcgggacactttgagaagggcaatcctggtcatgaaccccgcaaccgcgaagtctttcatcaccgaggtagtcgaaacaaatctggtcgccttcgattgccactggattatcattaatgaggaaatcaacgatgtggacgttcaggagctagttcgtcgcagcatcggacggcttaccatcatcaggcaaacctttccggtgccacagaatattagccagagatgctttagaggtaatcacagaatcagtagtactctgtgcgaccccaaagatcctttcgcccagaacatggaaatcagtaacctctacatctacgatactgtcttgcttcttgccaatgcatttcacaagaaacttgaggaccgcaagtggcacagtatggccagcctctcctgtatcagaaagaacagcaagccatggcagggaggccgttccatgcttgagacgattaaaaaggggggagtgagcgggctcacaggcgaactcgagtttggcgagaacggtggaaatccgaatgttcattttgaaattcttggcacaaactacggggaggaactgggcaggggcgtgaggaagctcggctgctggaacccagtaacagggctaaatggctctctgactgacaagaaactggagaataacatgagaggcgtggtgctgcgagtcgttaccgtgcttgaggaacctttcgtgatggtgtctgaaaacgtcctcgggaagcccaaaaagtatcagggcttttccatcgacgtgctggacgccctctctaactacctcgggtttaactacgaaatttacgtagcacccgatcacaagtatggatcaccacaggaagatgggacctggaacggcttagtcggcgaattagtgtttaaaagagccgacattggtatctccgccctgaccattacccccgatcgcgaaaacgttgtggacttcaccactagatacatggattactctgtaggggtgctgctgaggagagcagagaagacagttgacatgttcgcctgcctggctccttttgacctctctctctgggcttgtattgcgggaactgtcctcttggtgggcctcctggtgtacctactgaactggcttaaccctcccagacttcagatgggatcgatgacatcaaccaccctctacaattccatgtggtttgtatacggtagttttgtccagcagggtggggaggttccctacactaccctagccactaggatgatgatgggtgcatggtggttgttcgccctgatcgtgatctcatcatatacagccaaccttgccgcttttctgactatcactcgaatcgaaagtagtatccagagtcttcaagatctttcgaagcagacagaaatcccttatgggaccgtactggactccgcagtctatgagcacgtgcgcatgaagggcctgaaccccttcgagcgggactccatgtactcccagatgtggcggatgatcaataggtcaaacggcagcgagaataacgtcttggaatctcaggcaggcatccagaaggtgaaatatggcaactacgcctttgtgtgggatgccgcagtattggaatacgtggctattaacgacccggattgctctttctatacaataggtaacacagtagccgatcggggttatggcattgcattacagcatgggtccccctatcgggatgttttttcccagaggatcctggagctgcagcagaatggcgatatggacatcctcaagcacaaatggtggccaaagaatgggcagtgcgacctctactcttccgtagacactaaacagaagggtggagcgctggatatcaagtccttcgctggcgtgttctgcatcctggccgctggcatcgtgctttcatgcttcatcgctatgctggagacgtggtggaataaacgcaagggctcacgagtgccttccaaagaggatgataaggagattgacctcgaacatttgcacaggcgtgtgaacagtctgtgtacagacgacgacagcccacataaacaattctctaccagctccattgacttgactcccctggatatagacaccctgccgactaggcaggccttggagcagatctctgacttccggaatacacatatcaccactaccacctttatcccagaacaaatccaaaccctgtcgcggactctcagcgctaaggcagcatcaggcttcaccttcggaaacgtacccgagcacagaacagggccatttcggcatagagcccctaacgggggtttcttccggtcaccaattaagacaatgtcgagtataccttaccagccaacacccaccttggggcttaatcttggtaatgatccggataggggcacatccatatag

SEQ ID NO: 224730 - DNA, 2739 bp, synthetic construct
  misc_feature 1..2739: note = Description of Artificial Sequence: Synthetic coding sequence
  source 1..2739: mol_type = other DNA
atggaagttttcccatttctgctcgtgttatcagtgtggtggtcccggacatgggattcggctaacgcagactccatcatccatataggggctattttcgacgagtctgctaagaaagacgacgaggtttttagaacagccgttggcgacctcaaccagaacgaagaaatcctgcagactgaaaagataactttcagcgtcacattcgtcgatggaaataatccattccaagcagtacaagaagacatcagagggattcaagagttcctcgataaggtatcccagcagggaatggatgttgcactccaaaaagttgagaacaacattaataaaatgatcacaactctcttcgacacaatgaggattgaggagctgaatcggtaccgagatacattgcggagagccatccttgtgatgaatcccgctactgcaaagtcttttatcactgaagtggtggaaaccaatctcgttgcctttgattgtcattggattattattaatgaagaaattaatgacgttgacgtgcaagaactggtgcgcagatcaataggcaggcttaccataatccggcagactttcccagtgcctcagaatatttcgcagcgctgcttcaggggcaatcaccgtatcagttcaactctgtgcgatcccaaagacccgttcgcccagaatatggaaatcagcaacctgtatatttatgacacagtcctgttactggccaacgctttccataagaagttagaagacagaaagtggcacagtatggcctccctctcatgcattaggaaaaatagcaagccctggcaagggggaagatctatgttggaaaccatcaagaaggggggtgtctccggtctaacgggagaactcgagtttggagaaaacggaggaaacccgaacgtccattttgaaattctaggtacaaactatggggaagaactcggacgcggtgtgagaaaattaggatgctggaatccagtgactgggctcaatggaagtctcaccgataagaaacttgaaaacaacatgcgcggagtggtcctcagagtcgtcacggtcttggaggaaccattcgtgatggtatccgagaatgtcctaggcaaacctaagaagtatcaaggattcagtatcgacgtgcttgatgccctctctaactacctgggcttcaactacgaaatctatgtggcacccgatcataaatacgggtctcctcaggaggatggtacttggaacgggcttgttggtgagttagttttcaagagggctgatatcggtatctccgcactcacaatcacacctgacagagagaatgtcgtggactttacgacccgatacatggattactccgttggggtgttgttacgcagggccgagaaaacagtggatatgtttgcctgcctcgcccctttcgatttgtctctttgggcgtgcatcgcaggcactgttctcctcgtcggacttctggtgtatttgctgaactggctgaatccccctaggctgcagatggggagtatgacatctacgacactgtacaattctatgtggttcgtttatgggtcatttgtccagcaaggcggtgaggtaccctatacaacactagctacccgtatgatgatgggagcgtggtggctcttcgctctgattgtcatttcatcctataccgccaatttggccgcatttcttacaatcactcgcatcgaatctagtattcagagcctccaggatctgtccaagcagacagaaatcccgtacggtactgtgcttgatagcgcggtgtatgaacacgtccgtatgaagggactgaatccctttgaacgcgactcaatgtactcacagatgtggaggatgatcaacagaagtaatggaagcgagaataatgttctggaaagccaggctgggatccagaaagtgaagtacgggaattacgcattcgtgtgggacgccgctgtgctggaatatgtggccattaatgaccccgattgttccttttacacaatcgggaatacagtagcggatcgcggatacggtattgccctgcagcatggctctccctacagggatgtgttttcccagcgaatcctcgagctgcagcagaatggtgatatggatattctgaaacataaatggtggcccaaaaatggacagtgcgatctctattcctctgtggacactaaacagaaggggggtgcgctagacattaagagtttcgccggtgttttctgcatcctcgcggcaggaatcgtcctaagctgctttatcgccatgcttgaaacctggtggaataagcggaaaggctcaagagtgcccagcaaggaggacgacaaggagatagatctggagcatttgcacagacgagtgaactctctgtgcacagacgacgacagcccgcacaagcagtttagtacatcatccattgatctgacccctctggatatcgataccctgcccaccagacaagctctagaacagatttcagattttaggaatacccatataactacaacaacgtttatccccgaacagatccagactcttagtagaacactttcagcgaaggccgcttctggcttcacctttgggaacgtgcctgagcaccgcacaggcccttttcggcatagggcacccaatggcggattttttcgctcccccatcaaaacaatgagctcaattccgtaccaacccacaccaacacttgggttgaacctgggtaatgaccctgatagagggacatccatttag

SEQ ID NO: 224731 - DNA, 2763 bp, synthetic construct
  misc_feature 1..2763: note = Description of Artificial Sequence: Synthetic coding sequence
  source 1..2763: mol_type = other DNA
atggagcatggaaccctgcttgcccagcccggattgtggaccagagacacttcatgggcgttgctttactttttgtgctacatcttgccccagactgccccacaagtgcttcggatcggcggaatctttgagaccgtggaaaacgaacctgtcaatgtggaagaactagcgttcaagttcgccgtgaccagcatcaacagaaatcggacgcttatgccaaacaccacactaacatacgacatccaaaggattaatctgtttgacagcttcgaggccagccgccgagcgtgcgaccagttagctttgggcgtagccgcactgtttggcccaagccactcttcctccgtgagcgccgttcagtcaatttgtaatgctttagaagtcccgcacattcagacacggtggaaacaccccagtgtcgacaacaaagacctgttttacattaacctgtacccagactatgctgcaatatctcgcgctatattggatctggtgttgtactacaactggaaaaccgtcactgtcgtttatgaagattcaacaggattgatacgcctgcaggaacttattaaggctcccagccgatataacatcaagatcaaaattcgccagctgccatccggcaacaaggacgcgaagcctttgttaaaggagatgaagaagggcaaagagttttacgtcatttttgactgtagtcacgagacagcagcagagatactcaagcagatactgtttatgggcatgatgacagagtattaccattatttcttcaccacccttgacctctttgctctggatctcgagctgtacagatactctggcgttaatatgaccggttttcggctacttaatatcgacaacccacacgtaagcagcattattgaaaagtggagcatggaacggctccaggcccctcctagacctgagactggcctgctggacgggatgatgacaacggaggctgccctgatgtatgacgctgtatatatggtagctattgcctctcatcgcgcatcccaattgacggtttcctcattgcaatgccaccggcacaaaccctggaggctgggtcctcgtttcatgaatttgatcaaagaggctaccgcccgatgggacggcctcactgggcacattacttttaataaaaccaatggcctgaggaaagacttcgacctggacatcataagtctgaaggaagaaggcacggaaaaggccgcaggcgaggtgtcgaagcacctctacaaggtctggaaaaagatcggcatttggaattctaactccggcctgaatatgactgacagcaacaaagacaaatcctcaaacatcaccgattccctggcaaaccggacactgatagtgaccactatccttgaggagccatatgtgatgtatcgcaagagtgacaaaccactgtacggcaacgatcgctttgaaggctattgtttggacctgcttaaggagctctcaaatatactgggatttatttacgatgtgaagctggtgccagatggaaagtacggtgctcagaacgataagggggagtggaacggcatggtaaaggaattgattgaccatcgagctgatctggctgtggcccctctgactattacatacgtccgcgagaaagtgatagacttcagcaagccttttatgacgttagggatttctatattgtatcgcaagcctaacggcactaatcccggtgtgtttagctttttaaaccccctgtcccccgatatctggatgtacgtcctgctggcttgcttgggcgtgagctgtgtgttatttgtcattgcccgattcacaccctatgagtggtacaatccacacccgtgtaacccggacagcgatgtcgtcgaaaacaatttcacactcctcaattcattctggttcggcgtgggagccctaatgcagcagggctccgagctgatgcccaaggctctgtcaactagaatagtggggggaatttggtggttttttactcttatcatcattagcagctatactgctaatctggctgcttttttgacagtggaaagaatggaatctccgattgacagtgcggatgatttggccaagcagaccaagattgagtacggtgctgtcagggacggaagtacaatgacattcttcaagaaatcaaagatctccacatacgaaaaaatgtgggccttcatgagttcccgacaacagactgcgttggtccgaaactccgatgaaggtattcagagagtgcttaccactgactatgccttactaatggaatcaacttccattgagtacgtgacacagcggaactgcaacttaacacagattggagggcttattgattccaagggctatggtgttggtacacctataggcagcccctatcgagacaaaatcactatagctatactgcagctgcaggaggagggcaagctgcacatgatgaaggagaagtggtggcggggtaatggatgtccggaagaagacaacaaggaagcgtctgccctgggggtggaaaacattggaggcatcttcatcgtgctcgcagccggtctggttttaagcgtatttgtcgctatcggcgaatttatttacaaaagcagaaaaaataatgacattgaacaagcattctgctttttctatggtctgcagtgcaaacagacacaccccactaatagtacttcaggtaccactctgagcacggacctcgaatgtgggaagctgattcgggaggagagagggattaggaagcagagttctgtgcacaccgtttag

SEQ ID NO: 224732 - DNA, 2850 bp, synthetic construct
  misc_feature 1..2850: note = Description of Artificial Sequence: Synthetic coding sequence
  source 1..2850: mol_type = other DNA
atggagcacggaacgctgcttgcccagcccggattatggactagggatactagttgggcactgctctatttcctttgctacatcctgccccaaacagctccacaggtgctgcggattggcggtatctttgaaactgtggagaatgaacctgtgaatgtcgaggagctggcattcaagtttgccgtgacaagcattaaccgtaataggacactcatgcccaacactacccttacctatgacatccagcgcattaatctcttcgatagtttcgaggcatctaggcgggcatgcgaccagttggcgctgggagtggctgccctgtttggtccatcccactcctcctccgtctcggcagtccagagtatttgtaacgcgctcgaggttcctcatattcaaactagatggaaacaccccagtgtggacaataaagatctattttacatcaatctgtatcccgactacgcggctatttccagggcaatcctagacctggtgctttattacaactggaagaccgtgactgtcgtgtatgaggacagcacgggccttatccggcttcaagaattaatcaaggccccaagccggtataacattaagatcaaaattcggcagcttccctctggaaacaaggacgccaagcctctgttgaaggagatgaaaaagggaaaggagttttacgtgatcttcgactgctctcacgagaccgctgcagagatcctaaaacaaatcctgttcatgggcatgatgacagagtactatcactacttcttcactactctggacttgtttgcactggatctggaactgtataggtatagcggggttaacatgacgggttttcgtttgcttaatatagacaacccccatgtctccagtatcattgagaagtggtcaatggaacgcttacaagcacccccaagacctgaaacagggctgctggacggaatgatgaccaccgaagctgccctgatgtatgatgcagtgtacatggtggctattgccagccatcgcgcttcccagctcaccgtaagtagtctgcagtgtcacagacataaaccctggcggctcggtccacgtttcatgaatctgatcaaggaggcccgatgggatggtctcaccggtcacatcactttcaacaaaaccaatgggctgcggaaggacttcgatttagacatcatcagcctaaaggaggaggggaccgaaaaggcagctggcgaagtgtccaaacacttgtacaaggtgtggaagaagatagggatttggaatagcaatagcggactcaatatgaccgattctaataaagacaaatcatccaacatcacagactctcttgccaatagaaccctaatcgtaaccacgattctggaggagccttacgtgatgtaccggaagagcgataagcccctttatggaaatgatcgctttgagggttactgtttggatctcctcaaagagctctccaacatccttggattcatatacgatgttaagctggtgcctgacggcaagtatggagcgcagaacgataaaggcgaatggaatgggatggtaaaagagctgatcgaccacagggccgacctcgccgtcgcacctcttaccattacttatgtgagagagaaggtgatagacttttcaaaaccattcatgaccttaggcatttctatcctctaccgcaagcctaatggaaccaaccctggagtgttctccttccttaatccactctcacccgatatttggatgtacgtactgttagcatgcttgggtgtgtcatgcgtccttttcgtcatagcacgcttcacaccttacgagtggtataacccccatccctgtaaccctgattccgatgtagtagagaacaattttaccctgctcaactctttctggttcggcgtcggggcactgatgcagcagggatcagagcttatgcccaaggccctgagcacgcggatcgtgggcggtatctggtggttcttcaccttgataatcatcagctcttatactgctaatttagccgcttttctcactgttgaacgcatggagtcccccattgactccgccgacgatcttgctaagcagactaagattgagtatggcgctgttagggacggctctactatgactttctttaaaaaatctaaaatttctacctatgagaagatgtgggcctttatgtcctctcggcagcaaactgctctggttaggaactctgacgaggggatccagagggtcctcaccacagactatgcactcctgatggaatctactagtattgagtacgtaacacagcgcaactgcaacctgacgcaaattggaggacttattgatagtaaggggtacggcgttggcaccccaatcggatcaccataccgggataagattacaatcgcaatattgcaactgcaggaagaaggcaaactccacatgatgaaagaaaagtggtggcggggaaacggctgccctgaggaggataataaggaagccagtgccttgggcgtggagaacatcggaggcattttcatcgtcctggccgcaggactggtactttctgtcttcgtggcgatcggcgagtttatctacaaaagcagaaaaaacaacgacattgagcagaagggcaaatcctcccgcatccgcttctatttcagaaacaaggtgagattccacgggcgtaaaaagcaaagccttggtgttgagaagtgcttgagctttaatgctataatggaggagctggggatctccctcaagaaccaaaagaagattaaaaaaaagtcccgaactaagggcaaatctagcttcacaagtattctgacatgccatcagaggaggacccagcgaaaagagactgtggcatag

SEQ ID NO: 224733 - DNA, 2616 bp, synthetic construct
  misc_feature 1..2616: note = Description of Artificial Sequence: Synthetic coding sequence
  source 1..2616: mol_type = other DNA
atggagcacggcacattgctggcccagcccggtctttggacacgcgatactagctgggcccttctctacttcctgtgctatattctgcctcagacggccccacaggtgctcaggatcggcggaatatttgaaactgtggagaatgagcctgtgaacgtggaggagctggccttcaaatttgccgtgacgtctataaatcggaatcgcacactgatgcctaatacgacacttacatacgatatacaacgcatcaatctctttgacagcttcgaagcaagtcgaagagcatgcgatcaactagccttgggtgtggcagccctgtttggaccaagccactcctcctccgtgagtgcagtgcagtccatctgcaatgccttagaggttccccacattcagacccgctggaagcacccctccgtagacaataaggacctcttttatattaacctgtaccccgactacgccgcaatttctcgagcaatcttggacctcgtgctgtattacaactggaagactgtgaccgttgtctacgaagattccaccggcctgatccgactgcaggagctgatcaaagccccttctcgttacaacattaagatcaagatccgccagctgcccagcggaaacaaggacgcaaagccactcctaaaggagatgaagaaaggtaaagaattttatgtgatcttcgattgctcacacgaaaccgctgcggaaatcttgaaacagattctgtttatggggatgatgacggagtattatcattacttttttacaacgctggacttatttgcactagacctcgagttgtatagatattccggagttaacatgacagggtttaggctccttaatatagacaatccacatgttagcagcataatcgaaaagtggtcaatggagcgtctccaggcgccacccagacctgaaaccggactgttggacggaatgatgacaacggaagccgcactgatgtacgatgctgtctacatggtggctatcgccagccaccgggctagccagctcaccgtctcttcactccagtgccacaggcataaaccttggcgccttggaccccgattcatgaacctgattaaggaggccagatgggatggcctgacgggtcacatcaccttcaacaaaacaaacggattgagaaaggactttgatctggatataatcagccttaaagaagagggaactgagaaagcagcaggcgaagtttccaaacatttatacaaggtgtggaagaagatcgggatttggaactccaacagcggtctgaacatgacagatagcaacaaggacaagagttcaaacattaccgactcactggccaacagaactctgatcgttacaaccattctcgaagagccctacgttatgtatcgcaaatcagataagcccctgtacggcaatgaccgcttcgagggttattgtctggatctccttaaggaactgtctaatattctgggtttcatttacgacgttaaactggtgcctgacgggaagtacggggctcagaacgacaaaggtgaatggaatgggatggtgaaagaattgattgatcacagagctgatttggcagtcgcacccctgactattacatatgtgagagagaaagtcatcgacttcagcaagccatttatgaccttggggatatcgattctgtataggaaacccaatggtacaaaccccggtgttttctcgttcctcaatcctctgagtcctgatatctggatgtatgtacttttggcatgtctcggcgtgtcgtgcgtgctgttcgtaattgccaggtttacaccatacgagtggtataatcctcacccctgcaatccagatagtgatgtggtcgagaacaacttcaccctgctaaattcattctggttcggtgtgggagctcttatgcagcagggctccgagcttatgcctaaggcgttatccactcgcattgtcggcggaatctggtggttctttaccctgattattatttctagctataccgccaatctagccgcattcctgacagttgagaggatggaaagtccaatagactctgcagatgatctggccaaacaaaccaagatcgaatatggggctgttagagatgggagtacaatgaccttttttaagaaatcgaaaattagtacatacgaaaagatgtgggcttttatgtcgagcagacagcagaccgcgttagtgaggaatagcgatgaagggatccagcgagttctgactacagattacgcgcttctcatggagtccacgtccattgaatacgtcactcagcgcaattgtaacctaactcagattggcggactgatcgactctaaggggtatggtgtagggacccctattggctctccttacagggataagattacaattgcaattctgcagctgcaggaagaagggaagctgcacatgatgaaggagaagtggtggcgagggaacggctgcccagaggaggataacaaggaggccagcgccctgggcgttgagaacattgggggaatatttattgtgttggcagccggattggtgttgtctgtgttcgtggctatcggcgagttcatctacaaaagccgaaagaacaacgacattgagcagcattactag

SEQ ID NO: 224734 - DNA, 2718 bp, synthetic construct
  misc_feature 1..2718: note = Description of Artificial Sequence: Synthetic coding sequence
  source 1..2718: mol_type = other DNA
atggagcacggaactctgttggcccagcccggtttgtggacccgagacacgtcctgggctttgctctacttcctttgctacatcttgcctcagaccgctccccaggtgcttcggattgggggtatttttgagaccgtcgaaaatgagcctgtgaacgtcgaggagttagcctttaagtttgcggttacgtccatcaatcggaacagaaccctcatgcctaacacaacacttacgtatgatattcagaggatcaaccttttcgattcgttcgaggcctctagacgagcttgcgaccaactggctctgggtgtagcagcgcttttcggaccttcccattcctcctcagtcagcgccgtgcagtccatctgtaatgccctggaagtgccacatatacagaccaggtggaagcatccaagcgtagataacaaggatctgttctatataaacctctacccggactacgctgccatcagtcgcgcaatattggacctggtgttgtattacaactggaagacagttaccgtggtctatgaagactctacgggcttgatccgtctgcaggaattaattaaggcccctagcagatacaatattaaaattaagatcaggcaactccccagtggtaacaaggatgcgaaaccacttctgaaggagatgaagaaaggtaaagagttttatgttatttttgactgtagtcatgaaactgctgccgaaatactgaaacagattctgttcatggggatgatgacagagtattatcattatttttttaccacactggatctgttcgccctggatctcgaactgtacaggtactctggcgtgaatatgacaggctttagactcctgaacatagataatccccacgtttcgagcataatagaaaagtggagcatggaacgcctgcaggctcccccacgtccagaaactggtctcctcgatggaatgatgaccacagaagccgcactcatgtatgacgcagtctacatggtggctatcgcctcacatcgagccagccagttaacggtatctagcctgcaatgtcataggcataaaccctggagactcgggccacggttcatgaacctgataaaagaggccaggtgggatgggctgaccgggcatatcacctttaacaagactaatggtctccgaaaggactttgatcttgatattatcagtttgaaagaagagggaacggagaaaatcggaatttggaattctaattcaggacttaacatgactgacagtaacaaagacaaatccagtaatattaccgattctcttgctaatcggaccctgatagtcacaacgattctggaggaaccttatgttatgtataggaagtccgacaaacccctatacgggaatgacaggttcgaaggatattgcctagatttactgaaggaactctcgaatattttgggctttatctacgatgtcaagctcgtgccagacggtaagtacggagcccagaacgataaaggggagtggaatggcatggtcaaggaactgatcgatcaccgagccgatctggctgtggcaccgttaaccattacttacgtgcgagaaaaagtcatcgatttctctaagcccttcatgacactgggcattagtatcctgtaccggaagcccaatggaacaaatccaggggtattctctttcctcaatcctttaagcccagatatctggatgtacgttctgctcgcttgtctgggcgtttcctgtgtactatttgtcatcgctaggttcaccccctacgaatggtacaacccacatccttgcaacccggatagtgatgtagtcgagaacaactttaccctcctcaacagtttttggttcggggtaggcgctttgatgcaacaaggaagcgaattaatgcccaaggcactatcaactcgaatagttgggggaatttggtggttttttacgttgatcattataagctcctataccgcaaacctggccgcttttttgaccgttgagcgtatggaaagtccaatagatagcgctgacgatctggctaagcagaccaaaatcgaatacggtgcggtgcgtgacggctcaacaatgacgtttttcaaaaagtccaagatttctacttatgagaaaatgtgggctttcatgtctagccgccagcagacggccctggtgaggaattccgacgaggggattcagagggtgctcacaaccgactacgcattgttgatggagagtacttcaatagagtatgtcactcaacgcaactgcaatctgacacagatcggcggtctgatcgattccaaaggctatggtgttggcacaccaatcggttccccctacagggacaaaataaccattgctatactacagttgcaggaggagggaaagctgcacatgatgaaagagaagtggtggcggggaaacggctgtccagaagaggataataaagaggccagcgctttaggcgtggaaaatataggaggtattttcatcgtcctagcggcaggcctggtgctctcggtgtttgtggccatcggtgagttcatctataagagcaggaaaaacaacgatatcgagcagtgtctctcttttaacgccataatggaggagcttgggatcagcctcaagaaccagaagaaaattaaaaaaaagtctcgtactaaaggcaagagctcatttaccagtatactgacgtgccaccagagaagaactcagcggaaagagactgtcgcatag

SEQ ID NO: 224735 - DNA, 2757 bp, synthetic construct
  misc_feature 1..2757: note = Description of Artificial Sequence: Synthetic coding sequence
  source 1..2757: mol_type = other DNA
atggagcacggtacgctgctcgcccagccagggttgtggaccagggatacgagctgggccttgctgtactttttgtgttacatcctcccacagacagctcctcaggtgctgagaatcggcggaattttcgaaacagtagagaacgaacctgtcaacgtggaagagctggcatttaaatttgccgtgaccagcatcaaccgcaacaggaccctcatgcctaacacaacgctgacttatgacatacagaggattaatctgtttgacagcttcgaggctagccgcagagcctgtgatcagcttgccttgggagtcgccgcactgtttggcccttcacactcatcatcagtgtcggcggtccagtcgatctgtaatgccctggaggtcccccatattcaaacaagatggaagcacccgagcgtcgacaataaggacctgttttatatcaacctgtatccagactatgccgctatcagtcgcgctatactcgacttggtgctctactacaattggaaaaccgtcacagtagtctatgaggattctaccggcctcattaggctgcaggaactcattaaggctccttctcgatacaatattaaaataaagattagacaacttccttcgggcaataaggatgccaagcctttattgaaggagatgaagaaaggcaaagaattttacgtgatttttgactgcagccacgagacagccgctgagatcctgaaacaaatcctctttatgggcatgatgacagagtattatcactatttttttacaacgctagacctttttgccctggatctcgaactgtaccggtacagcggggttaatatgaccgggtttagacttttaaatattgataatcctcatgtgtctagcatcatcgagaagtggtcgatggagaggctgcaagcacctccccgtcccgagactggcctcctcgacggcatgatgacaacagaagcggcactgatgtacgatgcggtttacatggtcgcaatcgcttctcaccgtgcctctcaactcacagtttcctccttgcagtgtcatcgccacaaaccatggcgactggggcctagatttatgaatttaattaaggaagcccgatgggacggactaactggtcacattacattcaataaaactaatggtttgaggaaagacttcgatctggacattataagccttaaagaggagggcacagagaaagctgccggagaagtctctaagcacctgtataaagtttggaaaaaaataggaatttggaactcaaattcaggattgaatatgaccgattcaaacaaagacaagagctcaaacattactgactctctggctaatcgcacgttaatcgtgacaaccattctggaggaaccctacgtaatgtataggaagagcgacaagccactttatgggaatgaccggtttgaggggtactgtcttgacctcctgaaagaactgtctaacatcctgggttttatctacgacgttaagctcgttcccgacggcaagtacggcgcacagaatgacaagggagagtggaatggaatggtgaaggaattaatcgatcaccgggcagacttggccgtggccccactgacaatcacttacgtcagggaaaaagtcattgatttctctaagccgtttatgaccctggggatttccattctttacaggaagcccaacggcaccaaccccggtgtattttcttttctgaatccactgagtcccgacatctggatgtacgtgttgcttgcctgtctgggagtgtcttgtgtgctgttcgtaatagctcgattcacgccctacgagtggtataacccacacccttgcaacccagactctgatgttgtagagaacaacttcaccctgttaaattctttctggttcggcgtcggagctctcatgcagcagggctccgaactaatgccaaaagctttgagcactcgcattgtggggggtatttggtggttttttacacttatcatcatttcttcttacactgcaaatttagccgctttcctcaccgtagagaggatggaatcaccgatagacagtgctgatgatttggccaagcagactaagatcgagtacggcgctgtacgggacggaagcactatgactttcttcaaaaagtcgaaaatctcaacctatgaaaaaatgtgggcttttatgtcctcacggcaacagacagcccttgtgcggaatagcgacgaagggattcagcgggtccttaccactgattatgcactgctcatggaatcgacatccatcgaatacgtcacccaacgtaactgtaatctgacacagatcggaggtcttatcgacagcaagggttacggagtcggtacgccaattggctcaccctatagagacaaaattaccatagctatcctgcagcttcaggaggagggaaagctccacatgatgaaggaaaagtggtggagaggtaacggttgccctgaagaggacaataaggaggccagtgccctcggagtggaaaacattggcggaatctttatcgtattggcagcaggtctggtcctgtcggtgttcgtcgccattggcgagttcatctataaaagccggaagaataatgacattgagcaggcattctgtttcttttacggcttacagtgtaaacagacacatcccaccaactctaccagtgggacaactctctccaccgacctcgagtgcggaaaactgatcagagaggaaagagggattcgcaagcagagtagtgttcataccgtgtag

SEQ ID NO: 224736 - DNA, 2712 bp, synthetic construct
  misc_feature 1..2712: note = Description of Artificial Sequence: Synthetic coding sequence
  source 1..2712: mol_type = other DNA
atggaacacggaactcttctggcccagcccggtctgtggacccgagatacttcctgggcgctcctgtacttcttgtgctacatcttacctcagactgcaccacaggtgttgcgcattggcggaatctttgagactgtcgaaaatgagcccgttaacgtagaggaactggccttcaagttcgctgttacgagcattaatagaaacagaaccctgatgccgaacaccaccctgacttatgatatccaacggatcaacctgttcgacagctttgaggcaagtcggagggcctgcgatcagctcgctctgggggtcgccgctctctttggaccctcacatagcagtagcgtgagcgccgtccagtcgatttgtaatgctcttgaagtgccccatatccagacacgctggaaacatcctagcgtggacaataaggaccttttctacatcaacctgtatcctgactacgctgccatttctcgggcaattctggacctggttctgtattataactggaagacagttaccgtggtttatgaagactccacgggcctgatcagactccaggagctcattaaggccccatcacgatacaatatcaaaattaaaatccggcaattgccatctgggaataaggatgcaaagccactcctgaaagagatgaaaaagggaaaggagttctacgtaatcttcgactgctcacacgagacagccgcagagatattgaaacaaatcctgttcatggggatgatgacagaatattatcattatttcttcaccacccttgatctgtttgcgttagaccttgagctttatcggtattcaggggtaaatatgactggattcagactgctcaatatcgacaatccacacgtgtcaagcatcattgagaagtggagcatggagcggcttcaagctccaccaaggcctgagacagggctcctggacggcatgatgaccacagaggcagccctcatgtatgacgctgtgtatatggtggcaattgcctcccatcgggcttcacagctcactgtgtcctctctccagtgccacagacacaaaccttggaggctcggcccaagatttatgaatctgatcaaggaagccagatgggacggactgaccgggcatatcacattcaataagactaacggcctgaggaaagacttcgatctggatattattagcctaaaagaggagggcacagagaaaatcggtatatggaactccaactccgggcttaatatgacagactcgaataaagacaagagttctaacatcactgattccctcgccaatcgcacactcattgttacaacgatcctggaggaaccctacgttatgtataggaagtctgacaaaccactgtatggaaacgaccggttcgagggctattgtcttgatctgctgaaggagctcagcaatatcctggggtttatatatgacgtgaagctggtacccgacggcaaatatggcgctcagaatgacaaaggggaatggaacggcatggtaaaggagctcattgatcatagggcagatctcgcagtcgctcccctcactatcacttatgtccgcgagaaggtcatcgactttagcaagccatttatgacattggggatatctatcttgtatagaaagcctaacggaaccaatcctggggtgttctcgtttctgaatcccttgtctccagacatctggatgtacgtgctgttggcctgccttggcgttagctgcgtccttttcgtgatcgcgagattcactccatacgaatggtacaacccacatccttgtaatccagactcagatgtggtagagaataattttactctactgaactctttttggtttggagttggcgcactcatgcaacaaggttcagagctgatgcctaaagccctctctacacgtatcgtgggcggaatatggtggttctttacactgatcattattagcagctatactgcgaacttagcggcatttctgacagtcgagagaatggagagtcccatcgactccgcagacgacttggctaagcagactaaaatcgaatacggcgcagtcagggacggcagcactatgaccttctttaagaaaagcaagatctcaacctatgaaaagatgtgggcatttatgagttctcgccaacagacagccctcgtcaggaatagcgacgaggggatccaacgtgtcttgactaccgattatgccctgctgatggaatctacctctatcgaatacgttacccaaaggaactgtaatctgacacagatcggcggtcttatcgactcgaagggctatggcgtcggtacgccgatcggctctccttaccgtgacaagatcaccatagcaatcctgcaactgcaggaggaaggcaagctccatatgatgaaggaaaagtggtggagaggtaacgggtgccctgaggaggataacaaagaggcgagtgcgctcggtgttgaaaacattgggggaattttcatagtgctcgccgctggcctggtgctgtccgtgtttgttgcaattggcgagtttatctacaagagtaggaagaacaatgatatcgaacaggcgttttgtttcttctacggattacaatgtaagcagacccaccccactaactccacatccggcacgacgctgtctactgatttggagtgcggcaagttgattagagaggaaagagggatacggaagcaatcgagcgtccacaccgtttag

SEQ ID NO: 224737 - DNA, 2763 bp, synthetic construct
  misc_feature 1..2763: note = Description of Artificial Sequence: Synthetic coding sequence
  source 1..2763: mol_type = other DNA
atggaacacggcaccctcctcgcgcagcctggactctggacgcgcgacacatcatgggctttgctgtattttttgtgctatatcttgccgcagacagcacctcaggtccttaggatcgggggaattttcgagaccgtggaaaatgagcccgtaaacgtggaagagttagcctttaagtttgccgtcactagtataaaccgcaaccggactctgatgccgaatacaacccttacctacgatatccaaagaattaatctcttcgactctttcgaggcaagccggagggcttgtgatcagctagccctgggggttgccgcactgtttggaccctcacattcaagttctgtgtctgcagtacagagcatatgcaacgcactggaggttcctcatattcagaccagatggaaacaccctagtgtggataataaggacttgttctatattaatctatatcccgactatgcagcaatttctagagcaattctcgatttagtcctctactataactggaagaccgttactgtcgtctacgaggacagtactgggttgatacggctccaagaattgattaaagctccttcccggtacaacataaagataaagatccggcagcttcccagcgggaacaaggacgctaagccactcctaaaagaaatgaagaagggaaaggagttctacgttattttcgattgttcccacgaaacggcagcagagatcctgaaacaaatcctctttatgggaatgatgacagagtactaccactatttcttcactacactagacctgtttgctcttgatctcgagctttaccggtactcaggcgttaacatgacggggtttcgcctgttgaatatcgacaatcctcacgtcagctcaataatcgagaagtggtcgatggaaaggctccaggctccgccaagaccagaaacaggactactcgacggaatgatgaccaccgaggctgcactgatgtatgatgccgtctatatggtcgctattgcgtcccaccgtgcttcacaacttacagtgagctctctccaatgccatagacataagccttggagacttgggcctagattcatgaacttgatcaaggaagcaaggtgggacggactgactggacacattaccttcaacaagacaaacggactgcgcaaagattttgatctcgatatcattagtttgaaagaggaaggcaccgagaaggccgctggtgaggtgagcaagcatttgtataaagtctggaagaagatcgggatttggaactccaatagcggactaaacatgaccgatagtaataaggacaaaagctctaacataaccgacagcctggccaaccggaccttaattgtgacaacaatcctggaagaaccatacgtgatgtacaggaagagcgataagccattatacggaaatgaccgattcgaaggctactgtctggacttactaaaggaactctcgaacattctcgggttcatctacgacgtgaaactggtgcccgacggaaagtatggggctcagaacgacaagggcgagtggaatgggatggtgaaggagctcatagaccacagagctgatctggccgtcgcgcctctgacaattacctatgtgagagaaaaagtgatagatttttcaaagccttttatgactttgggcatctctattctgtataggaagccaaacggtacaaatcccggtgtgttttcgttcctgaaccctctttctccagatatctggatgtacgttctgttggcatgcctcggagtgtcctgcgtcctcttcgtcatcgctcgttttaccccttatgagtggtacaacccacacccatgtaaccctgattccgacgtagttgagaataacttcaccctgctgaactccttttggttcggagttggggctttgatgcagcagggcagtgagctcatgccaaaagctctaagcaccagaatagttggaggaatctggtggtttttcacattaataatcatcagttcctatactgcaaacctggctgcttttctgactgtcgagaggatggaaagcccgatcgactctgcggacgatctggcgaaacagacaaaaatagagtacggagccgtgcgcgacggctcaaccatgaccttctttaagaaatcaaagattagcacctatgagaaaatgtgggcttttatgtcctcccggcagcagaccgctctggtaagaaattccgatgaaggaattcagagggtgcttacaacagactatgcccttctgatggagagtacaagcattgagtacgtcactcaaaggaattgtaacttgacccagatagggggtctgatcgactcaaaggggtacggggttgggaccccgattgggtccccatacagagacaaaatcactatcgccatcctgcagctacaggaagagggaaagttacacatgatgaaggagaaatggtggcgtgggaatgggtgccccgaagaggacaacaaggaggcatccgccctgggcgttgagaacatcggcggaatatttatcgtccttgcggcagggctagtcctgtctgtgttcgtggctataggggagttcatttacaaatcccgaaaaaacaacgacatcgaacaatgtttgagctttaacgctattatggaggaacttggtatctctctcaaaaaccagaagaaaattaagaagaaatcacgcaccaagggaaaatcatcttttacaagcatactgacatgccaccagagacgaactcagaggaaggaaaccgtggcatag

SEQ ID NO: 224738 - DNA, 2805 bp, synthetic construct
  misc_feature 1..2805: note = Description of Artificial Sequence: Synthetic coding sequence
  source 1..2805: mol_type = other DNA
atggagcatgggactctgcttgcccagcctgggttgtggacaagggacacctcctgggccttgctctatttcttgtgttacattttgccacaaacagccccacaggttctccggatcggaggtatttttgaaacagttgagaatgagccagttaatgtcgaggagctcgcgtttaaattcgcagtcacatctatcaaccgcaacagaaccctcatgcccaataccacgttaacttacgacatccagcgcatcaacttgtttgattcatttgaggccagccggagagcatgtgatcagctcgccttgggagtcgccgctttatttggtccctcacatagctcgagcgtcagcgcagtgcaatctatttgtaatgccctcgaagtacctcacattcagacacggtggaagcacccaagcgtagataataaggacctattctacatcaacctttatcccgattacgccgctatttcgcgagcaattctggacctagtcctatactacaactggaaaacagtgaccgtggtgtacgaggactctaccggcttgattaggcttcaggagttgattaaagccccaagtcgctacaacattaaaattaagatcaggcagctcccttctggtaataaagacgccaaaccacttctcaaagagatgaagaaaggcaaggagttttatgttatctttgactgctctcacgagactgccgcagagatactgaagcagatactattcatggggatgatgacagaatactaccactatttttttacaacgcttgacttgtttgcgcttgaccttgagctgtacagatacagcggtgtcaatatgacaggcttccgcctgctgaacattgacaacccccacgtctctagcattattgaaaaatggtcaatggagagacttcaagctccccctcgcccagaaactgggttacttgatggtatgatgacaactgaagccgctttaatgtatgatgctgtatatatggtggccattgcatcccacagagccagtcagctgactgtgtctagtctccagtgccaccgccacaagccttggaggctgggcccaaggttcatgaatcttatcaaggaggcgaggtgggacggactgactggtcatatcacctttaataaaactaacggattgcggaaagatttcgacctggatattatcagtctgaaagaggagggcaccgaaaagattggcatctggaattctaactctggactcaacatgacagacagcaataaagacaagagcagcaacattaccgactccctggcgaatcgtacactcatcgttacgacgatactggaggagccgtacgtgatgtaccgaaagagtgacaagccattgtacgggaacgatcgattcgagggctattgcttagacttgctcaaggagctttccaacattctgggttttatctatgatgtaaagttagtgccagatggcaagtatggagcccagaatgacaaaggagagtggaatggtatggtaaaagagttgatcgaccatagggctgacctagctgtcgcccctctcaccatcacttacgtcagggagaaagtcattgactttagtaaacctttcatgacgttaggaatcagcatcctgtaccgaaagccgaatgggacgaaccccggtgttttttctttcctgaacccgctaagcccagatatctggatgtacgttcttctggcctgtctgggcgtaagctgtgttctcttcgtgatcgctcggtttaccccctacgagtggtataacccccacccctgtaatcccgactctgatgtggtggagaacaatttcaccctattaaactctttttggttcggggtgggcgctctgatgcagcaaggatctgagcttatgcctaaggctctgagcacccgaattgtgggagggatttggtggtttttcacgctcattatcatatcttcatacaccgccaacttggcagccttcctgaccgtggaaaggatggagtctccaatcgacagcgcagatgatttagctaagcagactaagattgagtatggcgcagtgagggatggatctacaatgacttttttcaagaagagcaaaatctctacctatgagaagatgtgggcttttatgtcaagccgacagcaaaccgcgctcgttaggaatagtgacgagggaatccaaagagtcctcacaactgattacgccctgctcatggagtcgacctcaattgagtacgtcacccaacgaaactgtaacttaacccagataggagggctgatcgattccaagggctacggagtcggaactcccattggcagcccgtatagggacaagattacgattgcaattctgcaactccaggaagagggaaaactccacatgatgaaggagaagtggtggagggggaatgggtgtcctgaggaagacaacaaggaggctagcgcattgggcgtcgaaaacataggaggtatatttattgttctggctgcagggctcgtgctgagcgtctttgtggcaataggcgagtttatatacaagagcagaaagaataatgatatcgagcagaaaggcaaatcctcccggatcagattctactttcgtaataaggtgcgctttcatggaaggaagaaacaatccctaggtgtggagaaatgcctcagcttcaatgctatcatggaagaactaggaatctccctgaagaatcagaagaagatcaaaaaaaagagccggacaaagggtaagtcctcttttacttcaatactcacttgtcaccagcgaaggacacagcgcaaggaaactgtggcttag

SEQ ID NO: 224739 - DNA, 2769 bp, synthetic construct
  misc_feature 1..2769: note = Description of Artificial Sequence: Synthetic coding sequence
  source 1..2769: mol_type = other DNA
atggaacacggcacgttgcttgcccagccaggtctgtggactcgggacacatcctgggccctgctctatttcctctgttacattcttccccagacggctccacaagtcctcaggatcggcggaattttcgagacggttgaaaatgaaccagttaacgtagaggagttggctttcaagtttgcggtgacaagcattaaccgcaatcggactctcatgccaaataccactcttacatatgatatccaacggatcaacctattcgattcttttgaagcctccaggagggcctgcgatcaattggccctgggagtggctgccctctttggacctagccatagtagtagtgttagcgcggtgcaatccatctgcaatgcactggaggtgccacacattcaaaccaggtggaagcacccatccgtagacaacaaggaccttttttacattaacctgtacccagattacgccgctatatcacgggctatattggatctcgtgctatactacaattggaaaacagtcaccgtggtatatgaggattcaaccggactcataagattgcaagaattgattaaagctccatcccgctacaatatcaaaattaaaataagacagctgccctccggtaacaaggacgccaagccactgctgaaggagatgaagaagggaaaggagttctatgttatcttcgactgtagccatgagacagctgccgaaatcctaaagcaaatcctctttatgggcatgatgaccgagtactaccattacttcttcacaacgttagacctcttcgcgctcgacctggaactttatagatatagtggggtcaatatgaccggcttcaggctccttaatatcgacaaccctcatgtctcatcaatcatagagaagtggagtatggaacggctgcaggcaccccctaggcctgagactggccttctggatgggatgatgacaaccgaggccgctctcatgtacgatgccgtgtacatggtggctatcgcttcccaccgagcctcccagctaactgttagtagtctccagtgccaccggcataaaccttggcgtctgggacctagattcatgaacttaatcaaggaagctacggccaggtgggacggcttgaccgggcacattacattcaacaagactaatggactgcgcaaagattttgatctcgatataattagcctgaaggaggaaggaacagagaaggcggcaggcgaggtctccaagcatttgtataaggtgtggaagaaaatcggtatatggaatagcaatagcgggctcaacatgacggacagcaacaaagacaaaagttccaacattacagattcactcgccaaccgcacactaatcgttacgactatcctagaggagccatacgtgatgtatcggaaatcagacaagcctttgtatggtaacgacagatttgaaggctactgcttggacctactgaaggaactgtcaaatattctcggttttatatacgatgtaaaattagttcccgacggcaagtatggtgctcagaacgacaagggcgagtggaatgggatggtcaaggagctcattgaccacagagctgacctggctgtggcccctttgacgatcacctatgtgagagagaaagtaatagactttagcaagccatttatgaccctcggcatctctatcctgtaccgcaaacctaatgggaccaaccctggtgtcttcagtttcctcaacccactttccccggatatatggatgtatgtgttattggcctgcctgggggtgagttgcgttctatttgtaattgctcggttcacaccatacgaatggtacaacccccacccttgtaaccctgatagcgacgtggtggagaataactttaccctgcttaattcattttggttcggtgtgggcgctctcatgcaacaaggctccgagcttatgcctaaggccctatctacgcgaatagtgggcggaatctggtggttcttcacgctcataataatttcgagctataccgccaacttagcagccttcttgactgtagagcgtatggagagtccaatcgacagcgctgatgaccttgccaagcagaccaaaatcgagtatggagccgtcagggacggcagcactatgacgttctttaagaaatcaaagatctccacgtatgaaaagatgtgggcctttatgagcagtcgccaacagacagcgctggtgcggaactcagacgaggggatccaaagagtacttacgactgattacgccttgctcatggagtccacttctatcgagtatgtcacacagaggaattgtaatctaacccagatcgggggactgatagactcaaagggctatggggtgggaacacctatcggctcaccttacagggacaaaattaccatcgccattctccagctgcaagaggaaggaaagctccacatgatgaaggagaaatggtggcggggtaatgggtgccccgaagaagataacaaggaagcctctgctttaggcgttgagaacatcggaggcatcttcattgtcctggcagccggattggtcttgagtgttttcgtggccatcggggagtttatttacaaatcccgcaaaaataacgatattgagcagtgcctgtcatttaacgccataatggaagagctggggatcagcttgaagaaccagaaaaaaataaaaaagaaaagtcggacaaaggggaagtcctcttttacatccatcctgacctgtcaccagcgcaggacccagcgcaaagaaacggtggcatag

SEQ ID NO: 224740 - DNA, 2247 bp, synthetic construct
  misc_feature 1..2247: note = Description of Artificial Sequence: Synthetic coding sequence
  source 1..2247: mol_type = other DNA
atggagcacggtactctgctggctcaacccggtctgtggacgcgtgacaccagctgggccctgctctacttcttgtgttacatactgccccaaactgcgccacaggtgctgcgcatcgcttgtgaccagctggctctgggagtagcagcacttttcggcccttctcacagcagctctgtgtctgcggttcagagtatttgcaatgccctcgaggtgccacacattcagaccaggtggaagcatccttctgttgacaacaaggacttgttctatataaacctgtatcctgattacgcagccatctctagggctatcctggacctggtattgtattacaattggaagacagtgaccgttgtgtacgaggactccacaggtctgatcaggttgcaggaacttattaaggcgccatctagatacaacattaaaataaaaatacgccagctcccttctgggaataaagacgcgaagccactactgaaggaaatgaaaaaaggcaaagaattctacgtcatcttcgactgctctcacgagacagccgctgagatcctcaaacagattctattcatgggtatgatgacggagtactaccattacttctttacaactctggatttattcgcccttgatctagagctgtaccggtattccggcgtaaacatgacggggttccgactgctgaatatcgacaatccccacgtgagttctatcatcgaaaagtggagtatggaaagactgcaggcacctccgagaccggaaaccggattactggacggtatgatgactaccgaggccgctctgatgtacgatgcggtgtacatggtagcaattgcctcccacagggcaagccagcttaccgtttcatctcttcagtgtcaccgacataaaccatggcggctgggcccacggtttatgaaccttatcaaggaggccagatgggacggactgacagggcacattacctttaataagaccaacgggcttcgaaaagactttgatctagatataattagccttaaagaagaaggaactgaaaagattggaatctggaactcgaactccgggctcaacatgacagacagcaataaagataagagctctaatattactgatagcctcgctaatcgcacccttattgtgaccacaatcctgcgggcagatcttgcagttgctcccctgaccattacctatgttagagagaaggtaattgacttctcaaagcccttcatgaccctcgggatcagcattctgtatagaaagccgaatgggactaatcctggcgtcttctcatttctgaacccactatcacctgacatctggatgtatgttctgttggcctgtctgggcgtgtcttgcgtgctgttcgtcatcgccaggttcaccccatatgaatggtataacccacacccctgcaacccagacagtgatgtggtggaaaacaacttcactttgctgaacagtttttggttcggagtcggagcactgatgcagcaggggtccgaactcatgccaaaggctctgagcacgagaatagtggggggaatatggtggttttttaccctgataattatctcgtcatacacggcaaaccttgctgccttcctcaccgtcgaaaggatggaaagcccaattgatagcgcagatgacctggccaagcagaccaagatcgaatatggcgctgtgcgcgatggaagtactatgacgttctttaagaaatctaaaatctccacatatgagaaaatgtgggccttcatgagttctcgccagcaaacagccttggtccgcaattcggacgagggtattcagcgcgtactcacaactgactacgccctgctcatggagagtactagcattgagtacgtgacacagagaaactgtaacctgacccagattgggggactgattgatagtaaaggctatggcgtggggactccgatagggtccccctatagggacaagatcactattgcaattcttcaactacaggaagagggcaaattgcacatgatgaaggagaagtggtggcggggtaatgggtgccccgaagaggacaacaaggaagcatccgccctcggcgtggagaacatcggcggaatattcatagtactggcagcaggtctcgtgctgtctgtattcgttgctatcggggagtttatctacaaaagtaggaagaacaacgacatagaacagtgtctgagctttaacgcaatcatggaagaactcggaatttcgctgaagaatcaatag

SEQ ID NO: 224741 - DNA, 2610 bp, synthetic construct
  misc_feature 1..2610: note = Description of Artificial Sequence: Synthetic coding sequence
  source 1..2610: mol_type = other DNA
atgaaaatcatttttcccatcctaagtaacccagtcttccgtcgaaccgttaaactgctcctctgcctcctctggataggttattcacaaggcacgacccacgtcttaaggtttggcggaattttcgagtatgttgaaagcggaccgatgggcgctgaagagttggcgttccgctttgcagtgaatacgattaacaggaaccggacgctgctgccgaacaccactctaacttatgatacccagaagatcaatctctacgactcgtttgaagcctcaaagaaggcgtgcgatcaactgtcactgggggtggccgcaattttcggcccaagtcactcctcaagcgctaatgccgtgcagagcatctgcaacgctctgggagtaccccatatccagacaaggtggaaacaccaagtgagtgacaataaggatagtttctatgtaagtctctaccctgactttagcagcctgtcccgcgcaatactggatctcgttcaattcttcaagtggaagactgtgacagtggtgtatgacgattcgaccgggctcatcaggcttcaggagctgatcaaggcaccatctcgatataacctgagattgaagatccgacaactgcccgctgataccaaggacgcaaagccactgctgaaagaaatgaaaaggggtaaagagtttcacgtgatcttcgactgttcccatgagatggctgcagggattttgaagcaagccttagcaatgggtatgatgacagagtattatcactacatattcacaactctggaccttttcgctcttgacgtggagccatatagatattccggggtcaatatgactggattcagaatcctcaacaccgagaacacacaggtcagcagtataatagagaagtggtcgatggagagactgcaagccccacctaagccagattcgggtcttctcgatgggttcatgaccaccgatgccgctttgatgtatgatgccgtccacgtggtgagcgtggcagtgcagcagttccctcagatgacagtctcctctctgcagtgtaatcgtcacaagccctggcgtttcggtacccggttcatgtcgctcataaaggaagctcactgggaaggcctaacagggaggattacatttaataagactaacgggctcagaacggattttgatttggacgtgatcagcctaaaggaagaaggccttgagaagattgggacgtgggatcccgcatccggcttgaacatgaccgagtcccaaaagggtaagcccgctaatataacggatagcctgtctaaccgaagcctgattgtgacgacaatcctggaagaaccttatgtactttttaagaagagtgacaagcctctgtatggaaacgacaggtttgaggggtactgcattgatcttttaagggagctctccactattttaggttttacatacgagatccgcttggtcgaggacggtaagtatggcgcacaggacgacgccaatggccagtggaatggcatggtgagggaactaattgatcacaaagcagacctcgccgttgccccattggcaatcacatacgtgcgcgagaaggtgatcgatttctccaaacccttcatgactttgggcataagcattttgtacagaaaacctaatggcacaaatccaggtgtgttcagttttcttaaccccctatctccagatatctggatgtatattctgttagcttacctgggggtctcctgtgtgctattcgtgatcgcacgtttctcaccctacgagtggtataatcctcacccttgcaatcccgatagcgacgtagtggaaaacaacttcacactgttgaatagtttctggttcggcgtgggggcactaatgcagcagggttctgagctgatgcccaaggcactttcaaccaggatagtcgggggtatctggtggttcttcaccttgatcataatttcttcctacactgccaatctggcagcttttctgactgtggaaaggatggagtcacccattgattccgcagatgatttggcaaaacaaaccaagattgaatatggtgccgtcgaggatggggctacaatgacattttttaagaagtctaagatctccacatatgataagatgtgggccttcatgagtagtcgtaggcagtctgtcttggtaaagagcaacgaggagggaattcagagggtcctgacatctgattacgcatttctcatggagtcaacaactattgaattcgtcacccagcgaaattgtaacctgacacaaattggcggactcatagattctaagggctacggcgtcggcacacccatgggatctccctaccgagacaaaattaccattgcgattttgcaattacaggaagagggtaaactgcacatgatgaaggagaagtggtggcgcggtaacggatgcccggaggaagagtcaaaagaggcctctgcattgggcgtacagaatatcggcggaattttcatcgtactggccgcagggttggtcctgagcgtgtttgtcgctgtcggtgagttcctgtataagagcaagaaaaacgcccaactggagaaggagagctctatctggctggtcccgccataccatccagatactgtttag

SEQ ID NO: 224742 - DNA, 2580 bp, synthetic construct
  misc_feature 1..2580: note = Description of Artificial Sequence: Synthetic coding sequence
  source 1..2580: mol_type = other DNA
atgggagcggaggagttagcatttcggttcgctgtgaatactattaacaggaatagaactctgctgccgaatacgaccctgacatacgacacacagaagatcaacctctacgactctttcgaggccagtaaaaaggcttgcgatcagctctcactgggagtcgctgcaatttttgggccttctcactcttcctccgccaatgccgtgcagagtatctgcaacgcactcggggtaccccacatccagactaggtggaaacaccaggtgtccgataataaggacagtttctatgtttccctctacccagatttcagctccctgagccgtgccattctggaccttgtgcagttctttaaatggaagacagttactgtcgtatatgatgactcaacaggcctgattagacttcaggagctgattaaggcccctagcaggtacaacttgaggctgaaaatcaggcaattaccagctgatacaaaagatgccaagccacttctgaaagagatgaagcgaggcaaagagttccatgtgatctttgattgtagccacgagatggctgctgggattttgaagcaggccctggccatgggcatgatgaccgagtattatcattacatctttacaacacttgatctattcgctcttgatgttgaaccttacaggtactcaggcgtgaacatgacaggcttccgcatcttgaataccgagaatacccaggtatccagtattatagaaaagtggtccatggagcgactgcaggcaccacccaagccagattccggcctgctcgatggcttcatgacgacagacgctgcactcatgtacgatgccgttcacgtcgtgagcgtggcagtgcagcaattcccacagatgaccgtgtccagccttcagtgtaacaggcacaagccttggcgatttggcacccgctttatgagccttatcaaggaggcccattgggagggtctcaccggacgtatcaccttcaacaaaacgaatggactgcggactgacttcgatttagatgtcataagcctaaaagaggagggactggagaagattggcacttgggaccctgcgagtggcttgaacatgaccgaaagccagaagggaaagccagcaaatattactgactccctgagtaaccggagtctgatcgtgactaccatactcgaagaaccctacgttttgtttaagaaatccgacaaaccactctacggaaacgacagattcgagggatactgtatagaccttctgagggagctgagcaccatattgggtttcacgtatgagatcagattggtggaagacggtaagtacggtgcccaagatgacgcaaacgggcagtggaatggcatggttcgggagctgatcgaccacaaagccgatctagccgtagcccctcttgctatcacgtacgtcagagagaaggtcattgacttctctaagccctttatgacgctcggcatctctatcctgtaccgcaagccgaacggcaccaacccaggagttttttcatttctgaatccactgtccccggacatctggatgtatatcctgctcgcttatctcggcgtgagctgtgttctgttcgtgatagcccgatttagcccctacgagtggtacaatccccatccatgtaacccagacagcgacgtcgtggagaataattttacactgctgaacagcttttggtttggcgtaggcgctctgatgcagcaagggagtgaattaatgccgaaagcacttagcacccgcattgtgggagggatttggtggttcttcaccctgattatcattagcagctacactgccaacttggctgctttcctgacagtagaacggatggagtctcccatcgactctgcagacgacctcgccaaacaaaccaaaatcgaatacggggctgtcgaagatggggcaacaatgaccttttttaagaagagcaagatcagcacatatgacaaaatgtgggccttcatgtccagccgtcggcagtcagtgctcgtgaagagcaacgaagagggcatacagagggtgctaaccagtgattacgccttcctgatggagagcaccactatcgagtttgttacacagcgcaattgcaacttgacgcaaatcggaggcctgatcgattctaaagggtatggggtcgggacacccatgggctcaccttatcgcgataagatcaccatcgccattcttcagctgcaggaagaggggaagctgcacatgatgaaggaaaaatggtggaggggaaacggatgccctgaggaagagtcaaaggaggcctccgccttgggagtgcagaatatcggagggatcttcattgttttggccgcaggactggtcctgagtgtatttgtggcggtcggagagttcctttacaagtccaaaaagaacgcccaactggaaaaaagatccttttgttcggcaatggtagaagagctgcgaatgagcctaaagtgtcagcgtaggctaaagcacaagccacaggccccagtgatcgttaaaacagaggaggtgatcaatatgcacacattcaacgaccggaggttacccggtaaagagacaatggcctag

SEQ ID NO: 224743 - DNA, 2499 bp, synthetic construct
  misc_feature 1..2499: note = Description of Artificial Sequence: Synthetic coding sequence
  source 1..2499: mol_type = other DNA
atgaagatcatattccccatcctgtctaatccagttttcagacgcactgtgaaactcctgctatgcctcctgtggatcggatattcccagggtaccactcatgtgctgcgattcggaggaatctttgaatacgtggaaagcgggccaatgggtgcggaggaactggcgttcagatttgctgtgaacaccatcaaccgtaaccggactctcctacctaatacaacccttacttacgacacgcagaagattaatctgtacgactcatttgaggcctcgaagaaggcgtgtgaccagctgtctctgggtgtggccgctatctttggtccctcacactcctcttctgccaacgctgttcagtccatatgcaacgcactgggggtgccgcatattcaaactaggtggaagcaccaggtttcagataacaaggatagcttctacgtatcactttacccagacttttcgtctttatcccgggctattttggatctcgtgcagtttttcaaatggaagacagtaacggtggtttacgacgactccacaggtcttattaggttgcaggagctgatcaaggccccttcgcgctacaatctcaggctcaaaatacggcaattgcccgcagatacaaaggacgcaaagcctctactaaaggaaatgaagcgcggtaaggaattccacgtgatcttcgattgctcacacgaaatggccgcaggaatactgaagcaagctctcgccatgggcatgatgaccgaatactaccattacatcttcacaaccctcgatctctttgccctggatgtggagccataccggtatagcggggtgaatatgactggtttcagaatactcaataccgagaacacacaggtgagttcaataattgaaaagtggtcaatggaaaggctgcaggcacccccaaaacctgactccggtctgttagacggattcatgactacagacgctgctctgatgtacgacgcagtacacgtggtgagcgttgcagtacagcagtttcctcagatgacagtgagcagcctgcagtgtaaccggcataagccttggcgttttggcacaaggttcatgagcctcataaaggaggcacactgggagggtctgactgggagaatcacgttcaataaaactaatgggctgaggaccgacttcgatctcgacgtgatctcgctcaaagaggagggcctcgagaagatcgggacctgggatcctgcttctggcttgaatatgacagagtcccaaaagggaaaacctgccaatatcacagattctctgtccaataggagcctgattgtcacgaccattctcgaagaaccgtatgttttatttaaaaaaagtgacaaacccctgtacggcaacgacaggttcgaagggtattgcattgacttactaagggagttgtccaccatcctgggcttcacttatgagatccggcttgtggaggacggcaagtacggcgcacaggatgacgctaacggtcagtggaacgggatggtgagagagctgatagatcacaaggccgacctcgccgtcgcccctttggctatcacatacgtacgtgagaaggtgattgacttcagtaagcctttcatgactcttgggattagcattttgtacaggaagcctaatggtagtgaacttatgcctaaggccctgtctacccggattgtgggtgggatttggtggtttttcactttaatcatcatatccagctacacggccaatctggctgcatttctgactgtggagaggatggagtctcctatcgatagtgccgatgatctcgccaagcagaccaagattgagtacggagctgtggaagacggggctacgatgacgttcttcaagaaatctaaaatttcaacatatgataagatgtgggccttcatgtcaagtagaaggcagtctgtattggtaaagtcaaatgaagaaggaatccaacgcgtcttaacttcagattacgctttcctgatggaatctacaactatcgagtttgtgacccagcgtaattgcaaccttacccaaatcggaggtcttatagactccaaggggtatggagtagggacaccaatgggcagtccttacagagataaaatcactatcgctattttgcagctgcaggaggaagggaagctccacatgatgaaagagaagtggtggcggggtaatgggtgcccagaggaggaaagcaaggaggcttcggccctcggcgtacaaaatattggtggtatctttatagttttggcagcaggccttgtgctgagcgtctttgtggccgttggcgaatttctctataaaagtaagaaaaacgctcagctggagaagcggtccttctgctccgccatggttgaggaactgcgaatgagtctaaaatgccaacgccgattaaaacacaagccgcaggcccctgtaatcgttaagactgaggaagtcatcaatatgcatacatttaacgatcgcaggcttcccggaaaggagacgatggcctag

SEQ ID NO: 224744 - DNA, 2679 bp, synthetic construct
  misc_feature 1..2679: note = Description of Artificial Sequence: Synthetic coding sequence
  source 1..2679: mol_type = other DNA
atgaaaataatattccctattttgtccaaccctgtgtttaggcgcacagttaaactgcttctttgtctgctttggatcgggtacagccagggtacaacccacgtgttgcgattcgggggtatctttgagtatgtggagtcgggcccaatgggtgccgaggagctggcttttcgatttgccgtgaacacaattaaccggaatagaaccctcctcccaaacacaaccctcacatacgatactcagaagattaatctgtacgattcttttgaggcctccaagaaagcctgcgaccagctttccctgggcgtggcagccatattcggcccttcgcacagcagctccgctaatgccgtacaaagcatttgtaacgctcttggggtgccgcacatccagacacgctggaagcatcaggtttctgataacaaggactccttctatgttagtctctatcctgatttttctagcctctcacgtgctatcttagacctggttcagttttttaaatggaagacggtgacagtcgtctatgacgactccaccggcctcatacggcttcaagagttgataaaggccccttcaagatacaatctacggctgaagatccgacagctacctgcagacacgaaggatgccaagcccctgttaaaggaaatgaaaagaggtaaagagttccatgttatttttgattgtagccacgagatggccgcaggtattctgaagcaggccctcgccatgggcatgatgaccgaatactatcattacatctttacaacactggacctattcgccctcgatgtcgaaccctataggtacagtggtgtgaacatgacaggttttagaattttaaacacagagaacacccaagttagcagcattatcgaaaaatggtcgatggaacggttgcaggcgcctccaaagccagatagcggtctccttgacggctttatgacgaccgacgctgccctgatgtacgatgcagtgcacgtcgtaagcgtcgcagtccagcaattccctcagatgacagtgtcctctttgcagtgtaatagacataagccctggagatttggaacgcgtttcatgtccctaattaaagaggctcattgggaaggtctcaccggccgtattacctttaataaaacaaacggtctgcgcactgactttgatttggacgtgatttccctcaaggaggagggcctggagaagattggaacctgggaccccgcaagcgggctaaacatgaccgaatcacagaaaggtaaacccgctaatatcacagattcgctgtctaacaggagcctcatcgtaaccactatcctggaagaaccctacgttcttttcaaaaaaagcgacaaacctttatacggcaatgataggtttgagggctactgcatcgacctactccgggaattgagtaccattttgggttttacctacgaaatccggctggtggaggatggcaagtacggcgcacaggatgacgcgaacggacagtggaatggtatggtgagagaactcattgaccacaaggcggacctggctgtggcaccacttgccatcacctacgttagggagaaagtcatagacttctctaaaccctttatgactctggggatttccattctctacagaaagcccaacggaacgaatccaggcgtcttctcatttctgaatcccctgtctcctgatatttggatgtatatcctgttggcttacttaggggtaagctgtgtgctattcgtgattgccagatttagtccctatgagtggtataaccctcacccatgtaacccagacagtgatgttgttgaaaataacttcacattactgaatagcttctggtttggtgtgggcgcactcatgcaacaagggagtgaacttatgccaaaagccctttccacacggatagtgggcggaatctggtggtttttcacattaatcatcatttccagctacactgccaacctggccgcattccttaccgtcgagaggatggaatcgcctatagacagcgctgacgacctcgctaagcagacgaagatcgaatatggtgccgttgaggatggagccacgatgaccttcttcaaaaagagcaaaatctctacttacgataaaatgtgggcatttatgtcctcccggagacagagcgtcctggtgaaatcaaacgaggagggaattcaaagggtgctgacttccgattacgcattcttgatggagtcaacgactattgagttcgttacccaaagaaactgtaatctaacacagattggaggattgatagattctaaaggatatggggtgggtacacccatggggagtccatatcgggataagattactattgccattctgcagttacaagaggaaggcaaattacatatgatgaaagaaaaatggtggcgcggaaatggctgccctgaggaggaaagcaaggaggcgagtgcactcggcgtacagaacattggaggcattttcatcgtactggccgctggactcgtattgtcggtcttcgttgccgtgggggaatttctgtacaagtccaaaaagaatgcacagctagaaaagcgagcgaaaactaagctgcctcaagactatgtctttctgcccatcctggaaagtgtgtcaatctcaaccgttttaagctcatctcccagttcgagcagcctgtcatcatgctcctag

SEQ ID NO: 224745 - DNA, 1755 bp, synthetic construct
  misc_feature 1..1755: note = Description of Artificial Sequence: Synthetic coding sequence
  source 1..1755: mol_type = other DNA
atgaagataatctttccgattctgtcaaaccccgtttttcgtcgtaccgtgaagctactgctgtgtctgctgtggataggctacagccagggaacaactcatgtgctacgattcggaggcatcttcgaatacgtggaatccggtcccatgggggcagaggaactggcgttccggtttgctgtcaataccattaaccgtaaccgtaccttgctccctaacacaactcttacgtacgacacccaaaagatcaatctgtacgattcattcgaagcctccaagaaggcctgtgaccaactatcccttggggtggccgcaatctttggccctagccattccagttccgcaaacgccgttcaaagtatctgcaacgctcttggcgttccccacattcaaacccggtggaagcaccaagtaagcgacaacaaagactccttttacgtctccctgtacccggatttcagcagcctctcgcgggcaatcctcgatttggtacaattcttcaaatggaagacagtgactgtcgtttacgatgactccaccgggctcatacgattacaggaattaatcaaagccccaagtagatacaatcttcgcctcaaaattcgccaattgccagcagacacaaaggatgctaagcccctgctgaaggaaatgaagcggggtaaagaatttcatgtgatcttcgattgcagccatgagatggctgcaggtattctcaaacaggccttagccatgggaatgatgaccgagtactaccactacattttcactaccttagatttgttcgccctggacgtcgagccgtatcggtactcaggtgtgaacatgacaggtttccggattctgaacactgagaacacacaggtatcttctattatcgagaagtggagcatggaaaggctgcaagccccacctaaacctgattccggcctgctggatggattcatgacaaccgatgccgcactcatgtacgacgctgtgcatgtggtgtccgtggccgtccaacagtttccccagatgactgtcagctcccttcagtgcaaccgtcacaaaccctggaggttcggtaccagattcatgagcctcataaaggaggcgcactgggaaggcttgaccggcagaataactttcaacaagactaacggcctccggacagacttcgacttggatgtcatctcgctgaaggaagaggggctcgaaaaaattggtacgtgggaccctgcatccggacttaatatgactgagtcacagaaggggaaacctgccaacattacagattcactgtctaaccggagcttgatcgtaaccaccatccttgaggagccttacgtgctgttcaaaaaaagcgacaagcccctgtacggcaatgaccgctttgagggctattgcatcgatctgttaagggagctcagcaccattctcggcttcacctatgagatcagactcgtggaggacgggaagtatggggctcaagacgatgcaaacggccagtggaatggaatggtgagggagttaattgatcacaaggctgaccttgccgtcgcacctctggctatcacatatgtgcgagaaaaagtcatagacttctcaaaaccctttatgactctaggaatttcaattttatacagaaagcctaatggaacaaaccctggagtgtttagctttctgaacccactctcacctgatatctggatgtatatccttctcgcctacctgggtgtttcctgtgtgttattcgtgatcgcgaggttctag

SEQ ID NO: 224746 - DNA, 2610 bp, synthetic construct
  misc_feature 1..2610: note = Description of Artificial Sequence: Synthetic coding sequence
  source 1..2610: mol_type = other DNA
atgaagattatatttcccatcctctccaaccctgtgttcaggcggactgttaaactcctgctgtgccttctatggataggatattcccaaggcacgacgcacgtgctgcgctttggtggaatattcgaatatgtggaaagcgggcctatgggggctgaagaactggcatttagattcgcagtcaatacgattaatcggaatagaaccctactgcctaacacaaccctcacgtacgatacacagaagatcaacctctacgatagtttcgaggcttcaaaaaaggcatgtgaccagttgtcattaggagttgccgcaatattcggcccttctcatagcagcagcgcaaacgcggtacaatctatctgtaatgctttgggcgtgccacacatccaaaccagatggaaacaccaggtatccgataacaaagattccttctatgttagcttgtacccagacttctcttctctgtccagggcgatactggatctggtccagttttttaagtggaagacagtcacagtcgtgtatgatgattcgaccggactgataagactgcaggagttaattaaagcaccctctcggtacaatctccgcctgaagatcaggcagctaccagcggatacaaaggatgctaagcctttgttaaaggaaatgaaacgtggcaaagagttccacgttattttcgattgtagccacgaaatggccgctgggattctgaaacaagctttagctatgggtatgatgacagagtattaccactacatattcaccactctcgacctcttcgctctcgacgttgagccctacagatacagcggtgttaatatgacagggtttaggatcctgaacacagaaaatacccaggtgtccagcataatagaaaagtggtccatggaaaggctacaggcaccaccgaagcctgattcagggctgctggatgggtttatgactactgatgctgcactgatgtacgatgctgtgcacgttgtcagcgtagctgtacagcagttcccccagatgacggtgtcctccctgcaatgtaaccgtcacaaaccctggagatttggaactcgttttatgtctctgatcaaagaggcacactgggaaggtctgaccggaagaatcacctttaataagacaaacggcctgcggacggattttgatctggatgtgatttcccttaaagaggagggactggagaaaatcggaacatgggaccccgcatccggtctgaacatgactgaatcccaaaaggggaagcctgcaaacataaccgacagcttgtccaataggtcactcatcgttaccactattttagaagaaccatatgtcctgttcaaaaagtccgataagccactatacggcaatgaccgcttcgagggatactgcatagatctgcttagggagctcagcacaatcctgggctttacttatgagattagactggtggaagacggaaagtacggggctcaggacgatgccaacggtcaatggaacggcatggtgcgggagctcatcgaccataaagccgatttagccgttgccccattagctattacatatgtccgcgaaaaagtgatcgacttttccaagccatttatgacactgggtatttccatcctctatcggaagccaaatggaaccaaccccggtgtcttctcctttctcaatcctctcagtcccgacatttggatgtatatcctgcttgcatatctcggagtgagttgtgtattgtttgttatcgcacggttctccccctacgagtggtataaccctcatccttgcaatcctgactctgatgtggtggagaacaattttacccttcttaattcattttggttcggcgtaggcgctctgatgcagcaaggtagcgagctgatgcctaaggcgttgtctacaaggatagtgggaggtatctggtggttcttcacactgattataatctcttcttacactgctaacctcgcagcctttttgactgtcgagaggatggaaagcccaatagactcggctgacgacttggcaaaacagactaaaattgagtacggcgcagtggaagacggagctacaatgacgtttttcaagaagtccaagatatctacatacgataagatgtgggcttttatgagttcccgcaggcagtcagttcttgtaaagtcaaacgaggaagggattcagcgcgtcctaacaagcgactacgcctttttaatggaatcaaccacgatagaattcgtcacccagaggaattgcaaccttacacagatcggtggcctgatagattccaaaggttatggcgtgggcacccctatgggctcaccctacagggataaaatcactattgcaatccttcagctgcaggaagagggaaaacttcatatgatgaaggagaaatggtggcgagggaatggttgtcccgaggaagagagtaaggaggctagcgccctcggcgtgcagaacatcggcggaatcttcatcgtcctggccgctggcctggtgctgtcagtctttgttgccgtcggagagttcttgtataagtcgaaaaagaatgctcaactcgaaaaagagtcttctatctggctcgtgccaccttatcatcccgatactgtttag

SEQ ID NO: 224747 - DNA, 2727 bp, synthetic construct
  misc_feature 1..2727: note = Description of Artificial Sequence: Synthetic coding sequence
  source 1..2727: mol_type = other DNA
atgaagatcattttcccaatcctgagtaatccagtgttccgacgaactgtgaagcttctcctgtgcttactttggatcggatactcccaggggacaacacatgtgctgcggtttgggggaatctttgaatacgtcgaatcaggcccaatgggagcggaggaactggcatttagattcgctgtgaacaccatcaatagaaacaggacccttctgcctaacacgacccttacatacgacacgcagaagatcaatctgtacgactcatttgaagcatctaagaaggcctgtgaccagctctctctcggggttgctgctatctttggaccatcgcatagcagctccgctaatgccgtgcaaagtatatgtaatgcactgggcgtgccccatatccaaacccggtggaaacatcaggtgagcgacaataaggattcattctacgtttcgttgtacccagattttagttcgctgtccagggccatcctggatcttgtgcagtttttcaagtggaagaccgtgactgtggtatatgatgattcgacagggctaatcagactgcaagagctgattaaagccccttcgcgctataatcttcgactgaaaattagacagctcccagccgacacaaaggatgctaagcctctgctgaaggagatgaagcgtgggaaagagttccatgtgatcttcgattgtagccacgagatggctgcaggaatactgaaacaagctctggcgatgggaatgatgactgaatattatcattatatcttcacaacgctcgacctgtttgcactcgatgtcgaaccatacaggtactcaggagtgaacatgaccggattccggattctcaatactgaaaacacccaggtgagctccataatagaaaagtggagcatggagagactgcaggctccaccgaagccggacagcgggctcctggacggatttatgacaactgatgccgctttgatgtacgacgccgtgcatgtggtgtctgttgccgtgcagcaattcccccaaatgactgtgtcctctcttcagtgtaatagacataagccttggagattcggaacgaggttcatgagcctgatcaaagaggcgcactgggagggcttaactgggaggattacattcaataaaaccaatgggttgcgaaccgactttgatcttgacgttatcagcctaaaggaggaggggctggagaaaatagggacatgggaccctgccagcggcctgaacatgacagaatcgcagaaaggtaaacctgccaacataactgactcactctctaacagatctctgatagtcaccactatactggaggaaccgtatgtgctgttcaagaaaagtgacaagccgctttacggtaacgacagatttgagggctactgcatcgatcttttgagagagctgtccacgatattagggtttacatatgaaatcaggctggtggaagatggaaagtacggggcacaggatgacgcaaacgggcagtggaacggtatggtccgggaattgattgaccataaagctgatctggccgttgcccctctcgccatcacctatgtgagagaaaaggttattgatttttccaaaccatttatgactctcggcatttcaattctgtaccggaagcctaacggcaccaaccctggcgtttttagctttctgaaccctttgagtcctgacatttggatgtacattttgctcgcttacctaggtgtgagctgtgtattattcgttattgcccgtttctccccatacgaatggtataatccccatccatgtaatcctgacagcgacgtcgtggaaaataacttcacgctcctcaacagtttctggtttggcgtgggtgccctgatgcagcagggctctgagctcatgcctaaagcgctgagtacccgcatcgtaggaggcatttggtggttctttacattgatcattatttccagctacactgccaaccttgccgcttttttgacagtagaaagaatggaatctcctatcgactctgctgatgacctggcaaaacaaacaaagatcgagtatggtgccgtggaagatggcgctaccatgaccttttttaaaaagagtaagatcagtacctacgataaaatgtgggcgttcatgtctagccggcgtcagagcgtgctggtgaagtccaacgaagaagggatacaacgcgttctgacctctgattacgcttttctgatggagtcaactacaatagagttcgtgacccaacggaattgcaacctcacacaaattggcggtctcatcgacagtaaggggtatggcgtgggcacccctatgggatctccctacagggacaaaattaccatcgctatcctccagctgcaggaagagggtaaactacatatgatgaaagaaaagtggtggcgcggaaacggctgccctgaggaagaatccaaggaagcttcagcgttgggagtccagaatataggcggtatcttcatagtgctggcagcagggctagtgctctctgttttcgttgcggtgggcgagtttctctacaaaagcaaaaagaatgcgcagcttgaaaaacgctcattctgttcagccatggttgaggaactcagaatgagcctcaagtgccagaggcggttaaagcataagccccaggcccctgttatcgtgaaaactgaggaagtcattaacatgcacacattcaacgaccggagacttcccggaaaagagactatggcttag

SEQ ID NO: 224748 - DNA, 1935 bp, synthetic construct
  misc_feature 1..1935: note = Description of Artificial Sequence: Synthetic coding sequence
  source 1..1935: mol_type = other DNA
gggggtatcttcgagtacgtagagagcggccctatgggggctgaggagctggcctttcgcttcgctgtgaacaccattaaccggaacagaacactgctcccaaacacaactctgacctacgacacacagaagatcaacctctacgattctttcgaggccagcaaaaaggcctgcgatcaactctccctgggcgtggcagcaatcttcggaccttcccatagctcttccgccaatgccgtgcaaagcatatgcaatgccttgggagtgccccacatccagaccaggtggaagcatcaggtgtccgacaataaggattcgttctatgtttccctttatcccgattttagcagtctgtccagggcaatactcgatctcgttcagttttttaaatggaagacagtgacggtggtatatgacgactctactggcttaattagactccaagagttaatcaaggcccctagtaggtacaatctgaggctgaagattagacagctgccagccgacaccaaggatgccaaaccacttttaaaggaaatgaagagaggaaaggagtttcacgtcatctttgactgctctcatgagatggctgccggtatcctgaaacaggctctcgcaatgggtatgatgactgagtactatcactacatttttacaaccctggatttgttcgccctggatgtcgaaccatataggtatagcggcgtgaacatgacagggttccgtattctgaacacagaaaatacacaggtgtcctcaatcatagagaaatggtcaatggagcggctgcaggcacccccaaagcctgattctgggctcctcgacgggtttatgacgacagacgctgcccttatgtacgacgctgtccatgttgtgagtgtggctgtgcagcagttcccacagatgacggtgtctagtctgcagtgcaatagacacaagccttggagattcggaactagattcatgagtcttatcaaggaagcgcactgggaaggcttgacaggcaggatcaccttcaataagacgaatggacttcggacagactttgatctggacgtgatctccctgaaggaagaaggactggagaagattggcacgtgggatccggcttcaggcctgaatatgaccgaaagtcagaaaggtaaacccgcaaatattaccgatagcctatccaacaggtccttgatcgtcaccactatactcgaagaaccttacgtgctcttcaagaagtcagacaaacctttatacggcaacgatcgattcgaagggtattgcatcgacctgctgagggaactgagcacaattctcgggttcacatatgaaatccgactggtagaggacggaaaatacggggctcaagacgatgcgaatggccagtggaacggaatggtccgcgagctcattgaccacaagtcaaagatttctacctatgacaagatgtgggccttcatgtcctcaagacgccagtcagtgcttgtcaagtccaatgaggagggaatccaacgcgtgctcacgagtgactatgcttttctaatggaaagcacgactattgaattcgtgacccagaggaactgtaatctgacgcaaatagggggactcatcgactctaagggatacggtgtgggtactcccatgggctcaccttacagggataagatcactattgccatactgcagctgcaggaggagggaaagctacacatgatgaaggaaaagtggtggcggggtaacggttgtcctgaggaggagtctaaagaggcctcagccttaggcgtgcaaaatattggcggaatctttattgtcctggcagcaggacttgtcctttccgtgttcgtcgctgtgggggagttcctgtacaaaagcaagaagaatgcccagttggagaaggagtcttctatctggctcgtgcccccataccatcccgacactgtgtag

SEQ ID NO: 224749 - DNA, 2760 bp, synthetic construct
  misc_feature 1..2760: note = Description of Artificial Sequence: Synthetic coding sequence
  source 1..2760: mol_type = other DNA
atgacagcaccatggcgacgactgcggtctttagtgtgggagtattgggctggcctgctcgtttgcgctttctggatccccgattctcgcggaatgccacacgttatccgaatcgggggtatctttgagtatgctgacggaccaaacgcgcaggttatgaacgccgaagaacacgcgttccgtttctctgccaatatcatcaacagaaaccggaccctcctacctaataccaccctgacatacgatatccaacgcattcacttccacgattcttttgaagctaccaaaaaggcttgcgaccagttggcactgggagtggtcgcaatttttgggcctagtcagggctcctgcactaacgccgtccagagcatctgtaatgccctggaggtgccccatatacagctccgctggaaacatcaccctttggataataaagacacgttttatgtgaacctgtatcccgattatgcaagcctgtcgcacgcaattctggatttggttcaatatctgaaatggagatctgctacagtggtgtatgacgatagcaccggtctcattcggttacaagagttaataatggcccctagccggtataatatcaggctaaagatcaggcaactgcccattgactccgacgattctaggccactgttgaaggaaatgaaacggggtagggaattccgcataatattcgactgttcccataccatggcagcccaaattttgaagcaggccatggcaatgggcatgatgaccgagtactaccattttattttcaccactctggacctttacgcccttgatctggagccctacaggtacagcggagttaacttaacaggattcaggatactgaacgtggacaatccacacgttagcgctatcgtggaaaaatggtccatggagagattacaagccgctcccaggtcagagtccggtctgctggacggcgtaatgatgaccgatgcagctcttctttacgatgccgttcacatagtgagcgtctgttatcagagagctccacagatgaccgttaactccctccagtgccaccgtcacaaggcatggcgatttggcggtcgttttatgaacttcatcaaagaggcccaatgggaagggctgacaggcagaatcgtgtttaataaaacaagcgggctacgcaccgacttcgacttagatatcatttcattgaaagaggacggacttgagaaggtcggcgtctggtctcctgcagatgggctgaacatcactgaggttgccaagggcaggggaccaaacgtaaccgatagcttgactaatcgcagccttattgtgacaactgttttggaggagccctttgtcatgttccggaaatctgaccggacactgtacggcaatgatagattcgaggggtactgtatcgacctcctgaaggagttagcacatatattgggctttagctacgaaatccgcctggtggaggatggaaagtacggagcccaagatgataaaggacaatggaatggtatggtcaaggaactcatagatcataaggccgatcttgcggtagccccactgacaattacacacgttcgtgagaaggccatagatttctcaaagccctttatgacccttggggtgtctatcctgtataggaaacccaatggtacaaatccatccgttttctcattcttaaaccctctttcaccagatatctggatgtacgtgctgctggcttatcttggggtctcgtgcgtcctatttgtcatagctagattcagtccttacgagtggtatgacgctcacccatgtaaccctggcagcgaggtggttgagaacaattttaccctgctcaacagcttttggtttgggatgggcagcctaatgcaacaaggctccgaactaatgcctaaggctttaagtacaaggatcattggcggtatctggtggttctttacactcataatcatctcttcctatacagctaatttggctgcttttctgacagttgagagaatggaaagtcccattgactcagcagacgacttggctaaacagactaagatagagtacggggctgtcaaggacggtgccactatgacattcttcaagaaatcaaagatctctacgttcgaaaagatgtgggcattcatgtcaagtaagccctcagcacttgtgaaaaacaatgaggagggaatccagcgcgcacttactgccgactacgctctcttaatggaaagtactactatagagtatgtgactcagagaaactgtaacctgacccagattggcggtctgattgactctaaggggtatgggatcgggacccctatgggctcgccttacagggacaagatcacaatagcaattcttcaactgcaggaagaagacaagctgcatatcatgaaggagaagtggtggcgtggatcaggctgtccagaagaagaaaacaaagaggcgtcggccctgggaattcagaaaattggtggaattttcatcgttctggcggctggcctcgttttgtcagtgctcgtagcagttggagagttcgtatacaagctgcggaagacggcagaaagagaacagcgcagtttctgctcaaccgtagcagacgagatcagatttagtctcacctgccagcgcagggtcaaacataagccccagcccccaatgatggtgaagaccgacgccgtcatcaacatgcacaccttcaatgacaggcgtctcccaggcaaggactctatggcctgtagcacctcactcgctcccgtcttcccatag

SEQ ID NO: 224750 - DNA, 2619 bp, synthetic construct
  misc_feature 1..2619: note = Description of Artificial Sequence: Synthetic coding sequence
  source 1..2619: mol_type = other DNA
atgacggctccatggcgacgcctcaggagcctagtgtgggagtattgggcaggcctactagtgtgcgccttttggatacccgattcacgtggaatgccacacgtcatacgcatcggtggcattttcgagtatgcagatggtccaaacgcccaggtgatgaacgccgaagaacacgcatttagattttctgcaaatattatcaatcgaaatcggactctgctgccaaacactacactaacttatgacatccagcggattcacttccatgatagctttgaagcgaccaaaaaggcctgtgaccaattggccctcggcgttgtggccatattcggaccttcccaagggagttgtacgaatgcggtgcagtccatctgtaatgcactcgaagtcccacacatccagctgagatggaagcaccatcctttggataacaaggacactttctacgtaaacctgtacccagattatgctagcttgagccatgccatactggatcttgttcaatacttaaaatggcgtagtgccacagtggtgtacgacgacagcactggcctgatacgtttacaggaacttattatggccccttctagatacaatattagactcaaaatccggcaactgccaattgatagtgatgattctaggcccctgctcaaagaaatgaaaagaggcagggagttccgaatcatcttcgattgctctcacactatggccgctcagattcttaagcaggcgatggcaatgggaatgatgacagagtactaccattttatttttaccacacttgacctgtatgctctcgatctggagccctaccggtattctggagtgaacctcaccggtttccgtattttgaacgttgacaacccgcatgtgagtgcgattgtcgaaaagtggagcatggagagactgcaggcagccccacgcagcgagtcaggcctgttagatggggtgatgatgactgatgccgcattgctgtacgacgcagtgcacattgtctcagtctgttaccagcgggctcctcagatgactgttaacagtctgcagtgtcacaggcataaggcctggcggttcggaggcaggttcatgaacttcattaaggaggcacagtgggaagggctgacagggcgaattgtcttcaacaaaaccagcggtctgcgcacagattttgacttagacattattagcctcaaggaagatggtctagagaaagtaggtgtgtggtcccccgctgatggcctcaatattaccgaggtcgccaaggggagaggcccaaatgtgacagactccctgactaatcggtccttaatcgtcaccaccgtgctcgaggaaccattcgtcatgttcaggaagagcgatagaacgctgtacggcaacgatagatttgaagggtactgtatagatcttttgaaggagctcgcccatatccttggattcagctatgaaatcagattagttgaggatggcaaatatggagcccaggacgataaggggcagtggaacggtatggttaaggagttgattgaccacaaggccgatctggcggtcgccccattgacaattacacatgtgagggagaaggctattgatttctcaaaacccttcatgacgttaggcgtatcaatcctgtaccgcaaacctaacggcactaatccaagtgttttttcgtttctgaaccctctgtctcctgacatctggatgtacgtgctgctagcttatctgggagtgtcctgtgtgctttttgtgattgcaagattcagcccttacgagtggtacgatgcccacccttgcaatcctggctctgaagtcgtcgaaaacaacttcacactgctgaacagtttttggttcggaatgggtagcttgatgcagcagggcagtgagttaatgcccaaagcccttagtacacgaatcattggcggtatctggtggttcttcactctcataatcatatcgtcctacactgccaatttggccgcattccttaccgttgagcgcatggaatcaccgatcgactccgcggatgatctggcaaagcagacaaaaattgaatacggagctgttaaagatggcgcaactatgacattttttaagaagtccaagatatccaccttcgaaaaaatgtgggcatttatgtcttccaaaccttccgcgctggtgaagaacaatgaggaaggaatccagcgcgcactaaccgcagattacgccctgctcatggaatcaactaccatcgaatacgtgacccagagaaactgtaatttgacccagattggcggactaatagatagtaaaggctatgggatcggaacccctatgggctccccttacagagataagatcacaatcgctatcctgcaacttcaagaggaggataaactccatatcatgaaagaaaagtggtggagaggctctgggtgtcccgaggaggaaaacaaggaggcaagcgcattaggcatacaaaagataggcggaatcttcattgtacttgcagccggtttagtgctgtccgtacttgttgccgttggagagttcgtctacaagctgcgcaaaactgcagagcgggagcaggtgtccttgcgcgcatggtcactccataggatgggcaatggtgactccaggtag

SEQ ID NO: 224751 - DNA, 2871 bp, synthetic construct
  misc_feature 1..2871: note = Description of Artificial Sequence: Synthetic coding sequence
  source 1..2871: mol_type = other DNA
atgccacgggtttccgcacctctcgtcttattgcccgcatggctggtgatggtggcatgttctccacactccctccggatcgcagctatactggatgatccaatggaatgtagtcgcggtgagagactttcaattaccctagccaagaatcgtatcaatagggcccctgagcgtttaggaaaagccaaggtggaggtggacatattcgagcttcttcgggattccgagtatgagacagcagaaaccatgtgtcagattttaccaaaaggcgtggtggccgtgctggggccttccagctcacctgccagctcatccattatcagcaatatctgtggcgagaaagaagtgccgcacttcaaggtggctcctgaagagtttgtgaagttccaattccaaaggtttacgactctcaacctgcaccccagcaatactgacatcagtgtggcagtggcgggtattctaaacttcttcaactgcaccacggcatgcctgatatgtgcaaaagcagagtgcctgctcaacctggagaaactgctgaggcaatttcttatcagcaaggacacgctcagcgtcaggatgttagatgacacccgtgacccaactcccctgttaaaagaaattagggatgacaaaaccgccactatcatcatccatgcgaacgcgagcatgtcacatactattctgctcaaagcagctgagctggggatggtgtctgcctattatacgtacatattcacgaatcttgaattctctctccaacgtatggatagcctcgtcgacgatcgagtgaatatcctcggattctccatatttaaccagagccatgcttttttccaggagttcgcccaatccctgaatcagtcgtggcaggagaattgcgaccacgtgccatttacgggcccagcactgagtagcgcactgcttttcgatgcggtttatgccgttgtcacagccgttcaggaacttaacaggtcacaagaaattggtgtgaaaccactgagctgcgggtctgcccaaatttggcagcatggcacttctcttatgaattacttaaggatggtcgaactggagggcctaacgggacacattgaattcaattctaaaggacagaggtccaattacgcactgaagatcttgcagttcacacgcaatggcttccgacaaattggtcagtggcatgttgctgagggtctcagtatggattcccatctgtacgcaagcaacatctccgatactctgttcaacactacattggtcgttactacaattctggagaacccttatctcatgctgaaagggaaccatcaggagatggagggaaacgatcgttacgaggggttttgcgtggacatgctcaaggagctggctgaaattctgaggtttaattacaagatacggctcgtcggagacggcgtgtacggtgtgcccgaagcaaatggtacctggaccgggatggtaggagaattgatcgcgcgtaaagccgacttagctgtagccggactcacgatcaccgccgagcgagagaaagtgattgactttagtaagccatttatgaccctgggaataagcatactttaccgggttcacatggggagaaagccaggatatttcagctttttggaccctttctctccaggggtctggctgttcatgctcctggcctatctggctgtgtcttgtgttctgtttttagtcgctagactgactccttacgaatggtattcccctcacccgtgcgcccaggggcgatgtaacctgcttgtgaaccaatatagtcttggtaattcattgtggttccctgttggagggtttatgcagcaaggttctaccatcgcccctagagccctgagtactcgctgcgtgagcggtgtctggtgggccttcaccctgattatcatttcttcatatacagcaaatctggcggcattcctgaccgttcagagaatggatgtgccaatcgagtccgtggacgacctggcggaccagaccgctatcgagtacggaacaatccacggcggatcctccatgaccttctttcagaattccagataccagacttaccagagaatgtggaattatatgtactcaaagcaaccgtcagtcttcgtgaagagtactgaggaggggatcgcaagagtgctgaactccaactacgcctttttgctcgaatcgacgatgaatgagtactataggcaacgaaactgtaacctgacccagattggaggtctgctggacacaaagggttacggtatcggtatgccggtcggttcagtgtttagggacgagtttgaccttgcaatcctccagctccaagagaacaaccgtctggagatactgaaacgcaagtggtgggagggaggcaagtgccccaaggaggaggaccacagagctaagggcttaggcatggaaaacattggtggaatctttgtcgtcttgatatgtgggctcatcgtcgctatctttatggctatgctcgaattcctctggactctgaggcattctgaagctaccgaagtgagcgtatgccaagaaatggtgacagaactacgtagcattattctgtgtcaggatagcatccatccacggagaaggcgcgctgccgtgccacctcctcgacctccgatacccgaggagaggaggccacggggaaccgcgaccctgtctaatgggaagctgtgcggagctggggagccggatcagctggctcagagactcgcacaagaggccgcattggtagcaagaggctgcacacatattagagtttgcccagagtgtcgacgattccaggggctccgcgcacggccttcccccgcacggagtgaggaatcattggaatgggagaagacaacaaattcatccgagcccgagtag

SEQ ID NO: 224752 - DNA, 2871 bp, synthetic construct
  misc_feature 1..2871: note = Description of Artificial Sequence: Synthetic coding sequence
  source 1..2871: mol_type = other DNA
atgccgagagtgtcggctcctctagtattgctgcctgcatggctcgttatggtcgcgtgcagcccgcactcactgcggatcgcagctattctggatgaccccatggagtgttctagaggagagcgcctgtccattaccctggccaaaaaccgcataaatagggcaccagagcggcttggaaaggctaaggtggaagtcgacatttttgaactactgcgagacagtgagtatgaaacagcagagacgatgtgccagatcctgcctaaaggtgtggtggccgtgctgggcccatcatcttcaccggcaagcagctcgattatttccaatatttgcggagaaaaggaagttcctcatttcaaggtggcgccagaggaattcgtgaagttccagttccagcgcttcactacattaaaccttcatccttcaaacaccgacatcagcgtcgccgtagccggaatcctgaacttcttcaactgcacaactgcctgtctaatctgcgccaaagctgagtgtttgcttaatctcgaaaaactgctgcgacaatttctgatttctaaggataccctctcggttcggatgctagacgacaccagggaccctacgccactgctgaaagagattagagacgacaaaaccgcgaccataattattcacgccaatgcatcaatgagccacaccatcctgttgaaggcggctgagctgggcatggtgagcgcatactatacgtacatcttcactaatctagagttctctttacagcggatggactctctggtcgatgatagggtaaacatcctaggattcagtatctttaaccaatcccacgctttttttcaagagttcgcacagagcctgaatcagtcatggcaagagaactgtgaccatgtcccatttaccggtcctgcgttaagctccgccttgttgttcgacgccgtgtacgcagttgtgacagctgttcaagaactgaacaggtctcaagaaatcggcgtcaaacctctgtcttgcggctcggctcagatctggcagcacggtaccagtctgatgaattacctgcgaatggtggaacttgaggggctgactggacatatcgagtttaattccaagggacagcgttcaaattacgccttaaagatactgcagttcacaaggaatgggtttagacagataggccagtggcacgtcgctgaggggctgtccatggactcacacctttatgctagcaacatcagcgacaccctgttcaatacaacgctagtcgttaccaccattttggagaacccatatctgatgctcaaaggtaaccaccaggagatggagggtaacgacaggtatgagggattttgtgttgacatgctgaaagaactggctgaaatcctccgcttcaactataagataagactggtgggagatggcgtatatggcgtccctgaggccaatggcacatggaccggtatggtgggggaactgatcgccagaaaggccgatttggccgtggccggacttacaatcacagctgagcgtgagaaggtgatcgattttagtaagccttttatgacgctcgggatctcaatcctgtatcgtgtgcacatggggcgtaagccaggttatttttcattcttggaccccttttcacctggtgtgtggctgtttatgctgctggcatatcttgctgtcagctgtgtgctctttttggtggccagactgacaccatacgagtggtatagcccacacccctgtgcccaagggaggtgtaaccttcttgttaatcagtatagcttaggcaattcactgtggtttcccgtgggcggtttcatgcaacagggaagcactatagccccaagggccctgtcaacaaggtgtgtatccggcgtatggtgggccttcacactgatcataatttcatcctacaccgccaacctggccgcatttttgaccgtgcagcgcatggacgtgcctatcgagtcagtggatgatctcgccgatcagacagcaattgagtacgggacaattcacggtgggtcatccatgaccttcttccagaattcaaggtaccagacctaccaaaggatgtggaattacatgtattctaagcagccatctgtttttgttaagagtacagaagaagggatcgccagggtgttgaattccaactatgccttccttttggaatccactatgaacgagtattatcgtcaacgcaactgcaatctgacacagattgggggactgttggatactaagggctatggaatcggtatgcctgtgggaagtgtgtttcgtgacgaattcgatctagcgatattgcagctgcaggaaaacaaccgcctggagattctgaagcgtaaatggtgggagggcggaaaatgtccgaaggaagaggatcaccgggctaagggcctcggcatggagaacattggcggaattttcgttgttctcatttgtgggctgatcgtggcaatttttatggccatgttagagttcctgtggactttgagacattcagaggctacagaggtatccgtttgtcaggagatggtaactgagttacgtagcatcattttatgtcaggattcaatccaccctaggaggaggagggcagccgtgccaccgccacgaccacccattccagaggagcgtaggcccaggggcactgccacactcagcaacggtaaactttgcggcgctggagagcccgaccagcttgcccagagactcgcacaggaagcagccctggtggcacgagggtgcacccacatacgcgtgtgtcctgaatgcagacggtttcagggcctgcgcgcaagaccatcgcctgcgaggagtgaggaatccctcgagtgggaaaagacaacaaattcctccgaacccgaatag

SEQ ID NO: 224753 - DNA, 2943 bp, synthetic construct
  misc_feature 1..2943: note = Description of Artificial Sequence: Synthetic coding sequence
  source 1..2943: mol_type = other DNA
atgccagctgagttattgctactgctcatcgtggcgttcgcatcaccgagctgccaagtgctatcgagcctacgtatggccgctattctcgacgaccagaccgtgtgtggaagaggggagcggttagcccttgccctggcaagggagcagatcaatggcataatcgaggttccagccaaagccagggtggaagtggacatcttcgaactacagcgtgattcccagtacgagacaaccgacacaatgtgtcaaattttacctaaaggcgttgtgagtgtactaggcccaagttcttcccccgcatcagcatcaacagtaagccatatttgcggagaaaaggagatacctcatatcaaggtcgggcctgaagagactccaaggttgcagtaccttcgcttcgcctcagtaagcctttacccttctaatgaagatgtcagccttgctgtaagcagaatcctaaagtctttcaattaccccagtgcctcactgatttgtgcaaaggctgagtgtctgcttcgattagaagaactcgtacgaggctttctgatcagcaaagaaaccctgtccgtgcggatgcttgacgacagccgtgatccgactcctcttctgaaggagatcagggacgataaggtttccacaatcattattgatgccaacgcgagtatctcgcatttaatccttcgcaaggcatccgaattgggcatgacctccgccttttacaagtacatcctaaccacaatggactttccgattctccacctggatggcattgttgaggactcttccaacattctcggattctccatgttcaatacatcgcaccccttttaccctgagttcgtaagaagcctgaacatgtcttggagggagaattgtgaggcttccacttacctgggacccgcactctctgctgcactgatgttcgatgcagtgcatgtggtcgtcagcgctgtgagagaactcaatcggagccaagagattggggtgaagcctttggcctgcacatccgcaaatatctggccccacgggacgagtctcatgaactatcttcgtatggtggaatatgatggactgaccgggagggtcgagtttaactccaaaggccagcgaaccaattatactctccggatactggagaagtcacgtcaaggccacagggagatcggggtatggtatagcaatcggacacttgcgatgaacgccacaacactcgacattaacctctcccagaccctcgccaataaaacacttgtagtgactaccatactggaaaacccttacgtgatgcgaagaccaaatttccaggctctcagcggcaacgagaggttcgaagggttctgcgtggatatgctccgggagctggccgaactcttaagattccggtatcgcctacggctcgtcgaagacggcttgtacggcgcacctgagcccaatgggtcttggactggcatggtaggagagctcatcaaccgcaaggctgacctggctgtggccgcatttaccattactgctgagcgggagaaggtcattgacttttctaagcccttcatgacactggggatatccattctgtaccgggttcacatgggcaggaagcctggctatttctctttcttggatccatttagccctgccgtttggctgtttatgcttctggcctacctggcagtgtcttgtgtgttattcctggctgccaggctcagcccatatgagtggtataaccctcacccctgtctacgggcaagaccccatatactggaaaatcagtacaccctgggcaattcactctggttccccgtagggggattcatgcagcaggggtcggaaattatgcccagggcccttagtactcgttgcgttagtggggtgtggtgggcttttacactcataattatttcctcctataccgcgaacttggccgctttcctaacagtacaacgaatggaggtgcccgtagaaagcgcagacgacctggcagaccagactaatatcgagtacggcacaatacacgccggaagcactatgaccttttttcagaactcaagataccagacttatcagcggatgtggaactatatgcaatccaagcagcccagtgtgttcgttaagtccaccgaagagggcattgccagagttctgaattctcgatatgcatttctccttgagagtaccatgaatgagtaccataggaggctgaattgtaacctgacccagatcggcggtttgctggacactaaaggatatgggataggcatgcccttgggttcccccttccgcgacgaaatcacattggcgattcttcagctgcaagagaacaatcgtctcgaaatcctgaagagaaagtggtgggagggaggaagatgccccaaagaggaagaccatcgcgctaaagggcttggcatggagaatatcgggggtatctttatcgtgctgatatgcggcctgattattgctgtgtttgtggcggttatggaattcatttggagcacgcggcgaagcgccgaatctgaagaggtgagcgtctgccaggagatgttacaagagctgcgtcacgcagtgtcctgtcgcaagacctccagatctaggaggcggagacgcccaggtgggccatcccgagccctgctctctttgcgggcagtgcgcgaaatgcgactgtcaaatgggaagctttattctgctggcgctggtggtgatgccggttcggcccatgggggtccacaacgtctgctggacgatccaggccctccatcaggagccagacctgccgcaccgaccccttgcactcacgtccgggtgtgtcaagaatgtcggcgtatacaggcccttcgcgcatcaggcgcaggcgctcctccgcgaggactgggagtcccagcggaggctacatcaccgcctagacctcgcccaggaccagctggcccacgcgaactcgctgagcatgagtag

SEQ ID NO: 224754 - DNA, 2946 bp, synthetic construct
  misc_feature 1..2946: note = Description of Artificial Sequence: Synthetic coding sequence
  source 1..2946: mol_type = other DNA
atgcctgcagaactactgctcctgctgatagtagcctttgcctcgcccagttgccaggtcttatccagcctcagaatggccgcaatcctggacgaccagaccgtgtgtggacgcggagagcggctggccttggccctcgctagggaacagattaatggaattatcgaggttcccgcaaaggccagagtcgaggtggacatttttgaactccaacgagattctcagtacgaaacaaccgatactatgtgtcagatcctcccgaagggtgtggtgtccgtcctcggcccatcatcaagcccggcatcagcctctacagtgtcacacatctgtggggaaaaggagataccccacatcaaagtgggccctgaggagacacccagacttcagtacttgcgattcgcatccgtgtcactgtacccttccaatgaggatgtctcactggccgtgagtcgcatcctcaaaagtttcaactacccctctgccagcctgatatgtgcgaaagcagaatgcctactccgtttggaggaactggttcgcggatttcttataagcaaagagaccctgagtgtgcggatgctggatgatagtagggatcccaccccactccttaaggagatcagagacgataaagtgagtactattatcatcgatgcaaatgcgtctataagtcatctaatactcaggaaagcctccgagctcggaatgaccagcgctttttataagtatatcctcactactatggacttccccatcctccacttggacggtattgttgaggacagttccaacatattgggtttctctatgtttaatacaagccaccctttctatcccgaattcgtgcggagtctcaatatgtcctggcgggagaattgcgaggccagcacttacctgggccctgcattatcagcagctctaatgtttgatgcagtgcacgttgtggtctccgccgtccgagagctaaacaggtctcaagagattggagtcaagccactggcctgcacttcagctaatatatggccacatggaacgtcgctgatgaactacctgagaatggtggagtacgatggccttaccggcagggtcgagttcaactctaaaggccagcgtactaattacactctgaggatcttggagaagagtaggcagggacatcgggaaatcggcgtttggtattccaataggactctggccatgaatgccacaaccctcgacatcaatctttcacagactctggccaacaagactctagtcgtgacaaccattctggagaatccttacgttatgcgcaggcctaatttccaggcgttgtctgggaacgaacgcttcgaaggattttgcgtggatatgttacgagaacttgccgagttgttacgctttagatatcgactccgactggtcgaggatggactgtacggagcgcctgagccgaatggctcttggactgggatggtcggtgaactcattaacagaaaggctgacttagccgtggctgcctttacgatcactgctgagcgcgaaaaagtcatcgatttcagcaagccattcatgacccttggaatctctatcctatacagggtacacatggggagaaaaccgggatacttctcttttctggatcccttctccccagctgtctggctttttatgctcttagcctatctagctgtgtcttgcgtccttttccttgccgcaagactgtcgccctatgagtggtataacccccacccttgcctgagagcacgccctcacatactggaaaatcagtacaccctcggaaattcattgtggtttcctgtcgggggattcatgcaacaaggcagcgagatcatgccgagggccttatcaacacgctgtgtatcaggggtgtggtgggccttcacactgattatcatcagcagctacacggctaacctcgcagcttttctgactgtgcagcgaatggaggtccccgtggaatctgccgatgatcttgcagaccagactaatatcgaatatggtactattcacgctggatcaacgatgacattttttcagaactctcggtatcagacgtaccagcggatgtggaactacatgcagtcaaaacagccaagtgttttcgtcaaatccactgaagaaggcatcgcgcgtgtgctgaacagcaggtatgcgttcctgctggaatcgacaatgaacgagtatcatcgaagacttaattgcaacctgacacagatcgggggactgcttgacactaaggggtacggcatcgggatgcctcttggatcacccttcagggatgagatcaccttggcaatacttcagctacaggagaacaacaggctcgaaatcctgaagaggaagtggtgggaagggggtcgctgtcccaaggaggaggatcatcgggctaaggggctcggcatggaaaacataggaggaatcttcatcgtgttaatctgcggcctcatcattgccgtttttgtggcagtgatggaattcatttggagtacgaggcgaagcgccgagtccgaggaaaccccagccttacaccctgctgcgtgtcagtgcagtgcactcggcccacgtacaccactaaaggagccctcaatgctcctcgttaaagtgccctctaccagggtacaggtcgcgttctctaggacaagcttgaggcaggtttgcccatttcttctgcagcatcagctttcttcgctgtactggatacaggcaactaatgtgcaaatctgttgtcatttctcatctctgaagcctagcccggatcttacttttcctccttctcacagaccactgtctagtctattatttactgcgctagcagccgtcggcggactgcctgacgcctccagttttttcttcccgccaatctcgtcttgtccacctctgcagtccggcataggcccatgccacagcaccgaggcaacacttgtgacatcaaattttcatgtttag

SEQ ID NO: 224755 - DNA, 1077 bp, synthetic construct
  misc_feature 1..1077: note = Description of Artificial Sequence: Synthetic coding sequence
  source 1..1077: mol_type = other DNA
tgatgggccttcaccttgataatcattagctcctacaccgccaacctcgccgctttcttaaccgtccagaggatggaagtgcccgtagagtccgctgatgaccttgcagaccagacgaacattgaatatggtactattcatgccggatctactatgacattctttcagaactcgcgctaccagacctatcaaagaatgtggaattacatgcagagcaagcaacctagcgtgttcgtgaagagcacagaagaggggattgcacgggtcttgaatagcaggtatgccttcctgctggaatcaactatgaacgagtaccatcgaaggctcaactgcaatttaacacagatcggtggactgctggacacaaagggttatggcattggaatgccactggggagccccttcagggacgagattaccctggctatcctgcaactgcaggaaaataatcgtctcgaaatcttaaaacgcaaatggtgggaggggggaagatgcccgaaggaagaagaccatcgggctaaaggtttgggaatggaaaacatcggcggtatcttcatcgtgttgatatgcgggctgatcatcgctgtatttgtggctgttatggaatttatttggtccactagacgctccgctgaaagtgaagagacacctgccctccaccctgccgcatgccagtgctccgcactggggcctagaacacccctgaaagagccaagtatgttattggtgaaggtgccctccacgcgggtgcaggtggccttctcacgcacatctcttcgccaggtgtgccccttcctgctgcagcaccagctgtcttcattgtactggatacaggccactaacgtgcagatttgttgccatttcagtagcctgaaacccagccccgacctcacctttcctccaagccaccgacctctgtcttccctactgttcactgcgctggcggctgtggggggactgcccgatgcgagtagtttttttttcccgccaatctcctcgtgcccgcctctccagagtggaattgggccttgccatagtaccgaagctactctggtgactagcaactttcatgtttag

SEQ ID NO: 224756 - DNA, 2769 bp, synthetic construct
  misc_feature 1..2769: note = Description of Artificial Sequence: Synthetic coding sequence
  source 1..2769: mol_type = other DNA
atgtccacaatgaggctcttgaccctggccttactcttttcctgttctgtggcacgcgctgcctgcgatcccaaaatcgtgaacattggagcagtgctttcaactcgtaaacacgagcaaatgttccgggaggccgttaatcaggccaataaacgacatggctcctggaaaatccaactcaatgctacaagtgtcacccacaagcccaacgcaattcagatggccctgagcgtgtgcgaggatctgattagctctcaagtgtacgctatactggtgagtcatccacctacacccaacgaccacttcacccctaccccagtcagttacacagccggtttctaccggatccctgtactgggcttaaccactcgtatgtccatctattccgacaagtcaattcacctgagtttcttacgcaccgtaccaccgtattctcatcagtctagcgtctggtttgagatgatgagagtctattcttggaaccatattatcctgctggtcagtgatgaccatgagggtagggcggcacagaaaaggctggagaccttactcgaggagagagagtccaaagcggaaaaggtcttacagtttgaccctgggaccaaaaatgttacagccctgctgatggaggccaaagaactggaggcacgggtgatcatcctcagcgctagcgaagatgacgccgcaacagtgtatcgggcagcagccatgcttaatatgacgggctccgggtacgtgtggctcgtgggcgaaagagaaatcagcggcaacgccctgcgctatgcaccagatggcattcttgggctgcaactgatcaacggaaaaaacgagagcgctcatattagtgacgcagtcggggtggttgcccaagcagtccacgagcttctggaaaaggagaatattaccgaccccccacgcggatgcgttggaaatacaaatatttggaagaccggtcctctgttcaagcgagtccttatgagtagcaaatatgcagacggcgtgacaggtcgcgtggaatttaatgaggacggggaccggaaattcgcaaactactcgatcatgaatctgcagaatagaaagttggtccaagtcggtatctataacggtactcacgtgatccctaacgaccgaaagataatctggccaggcggagagacagaaaaaccccgaggatatcaaatgtccacacggcttaagatcgtcaccatacatcaagagcccttcgtttacgtgaagccgacattgtcagatggtacctgcaaggaggaattcacagtgaacggggacccagtaaaaaaggtgatttgtaccggaccaaacgatacttcgccagggtcgcctagacacactgttcctcagtgttgttacgggttttgtatagatctactcatcaaactggccagaacgatgaacttcacttacgaagtgcatttggttgcagatggtaagttcggcacgcaggagagggtgaataatagcaacaagaaagagtggaacgggatgatgggagaactgttgagcggccaggccgacatgatcgtggctcctctcacgatcaataacgaacgggctcagtatatcgaattttctaaacctttcaagtatcaggggctgactatcttagtaaagaaggagattcccagatctacacttgactcattcatgcaaccctttcagagtactctgtggctccttgtggggctgagtgtgcacgtggtggccgtaatgctttatctgctggataggtttagccccttcgggagattcaaagttaatagcgaagaagaagaagaggacgctctgacactgtcatctgcgatgtggtttagctggggggttcttttgaatagtggaattggtgaaggtgctcccagatcattcagcgcgaggattctggggatggtatgggctgggtttgcgatgataattgtagcttcatatactgccaacttggcagcgttcttagtgctggatagacctgaggaaagaatcacaggaataaatgatcctaggctcagaaatccaagcgacaagttcatctacgccaccgtgaagcaatcctccgtcgacatctacttccggaggcaagtagagctgtcaaccatgtatcgccatatggaaaaacataactacgaatctgccgcagaggcaatacaggccgtgcgagacaataaactgcacgctttcatctgggactcagcggtgttggaatttgaagcctcacagaagtgtgacttggtcactacaggggagttgttttttagaagtgggttcggcattggcatgagaaaggactcaccatggaaacagaacgtgtccctgagcattctgaagtcacacgagaacggctttatggaagatctggataagacttgggtacgctaccaagagtgtgattcacgatcaaatgcaccagctaccctgacttttgaaaacatggcaggggtgtttatgcttgtcgcaggtggcatagtcgcgggaatcttcctgatctttatcgagatcgcatacaagagacataaggatgccaggagaaagcaaatgcaactggcgttcgccgctgtgaatgtgtggcgtaagaatttgcaagaccgtaaaagcggaagagcggagcccgacccgaagaagaaagccacattccgggctattacctcaacactggccagcagcttcaaaagaaggcgcagttcaaaggatactcagtaccatcctacagatatcaccggccctctgaaccttagcgacccgtctgtgtccaccgtggtctag

SEQ ID NO: 224757 - DNA, 2730 bp, synthetic construct
  misc_feature 1..2730: note = Description of Artificial Sequence: Synthetic coding sequence
  source 1..2730: mol_type = other DNA
atgagtaccatgagactcttgaccttggccctcctgtttagttgtagtgtggccagagctgcctgcgatcccaaaatcgtcaacatcggtgccgtgctcagcacacgcaaacacgagcagatgttccgcgaggcggtcaatcaagcaaacaaacggcatggctcatggaagattcagctgaatgcgaccagtgtgacacataaacccaatgcgatacagatggctttgtccgtgtgcgaagacttgatatccagtcaagtgtacgctatcttagtctcccatccgcctaccccaaacgaccatttcactcctacacccgttagttacactgcaggtttttatcggattcccgtcctaggactaacaacgcggatgtctatctatagtgacaagtctattcatctgtccttcctccgaacagtgcccccttacagccaccagtccagcgtctggttcgagatgatgcgtgtatattcatggaaccacatcatcctgcttgttagcgacgaccatgaaggtcgagctgctcagaagcgactcgagacgctcctagaagagcgcgaatccaaggcagaaaaggtgcttcagttcgatcccggaaccaaaaacgtaaccgctttgctcatggaagctaaagagctcgaagctagagtgattatcctcagtgcttccgaggacgatgctgccactgtttatagagcagccgctatgttaaacatgactgggtccggttacgtctggctggttggcgaaagggaaatatccggcaacgccctgcgctacgccccagatggaatcctgggactgcaactgattaacggtaagaatgaatccgctcatatttctgatgcagtcggtgtggtcgcccaggccgtacacgagctgctcgaaaaggagaacataactgacccacctaggggttgtgtcggcaacaccaatatctggaagacaggccctctttttaaacgggttctgatgagctccaagtatgccgacggcgtcacggggagagtggagtttaacgaggatggggatcgcaagtttgccaactattcaatcatgaatctgcagaatagaaagttagttcaggtgggtatctacaacggcactcacgtaattccaaatgaccgcaagattatctggcccggtggggagactgagaaacctagagggtatcaaatgagtaccaggctcaagatcgttactattcaccaggagccgttcgtgtatgtcaaacccaccctttctgacggcacctgcaaagaagaatttaccgttaacggagatccggtgaagaaggtgatatgtactgggccaaacgacactagcccgggaagtccacgtcacacagtgccacagtgttgttacggcttctgcatcgacctccttattaagttggctcgaactatgaacttcacatacgaagtgcatcttgtagccgatgggaagtttggaacacaggaaagagtgaataactcaaacaagaaggaatggaacggtatgatgggcgaactgctttctggacaggccgacatgattgtagcgcctcttaccatcaataacgagcgggctcaatacatcgagtttagcaagcccttcaagtaccaggggctgaccatcctggtaaaaaaagaaattccacggtccacactggacagtttcatgcaacctttccagtctaccctgtggttgctcgtggggctgagcgtgcacgtcgtggctgttatgctgtacttgctggaccgcttttcaccattcggaagatttaaagtgaatagtgaggaggaggaagaagatgccttaaccctgtccagtgcaatgtggttctcatggggagtgctgctgaacagcggaatcggggaaggagctccgcgatccttctctgccagaatcttgggtatggtctgggccggatttgctatgatcatcgtggcgtcgtacactgccaacctcgccgctttcctcgtcctcgaccgccctgaggaaagaatcaccggcataaacgatcctcggttacggaatccaagcgataaattcatttatgctaccgttaaacagagttctgttgacatctacttcagacgacaggtagagctgagcaccatgtatcgacacatggagaaacataactacgagagcgccgcagaagcaatccaggcagtcagggataacaagctgcatgctttcatctgggacagcgctgtcttagagttcgaagcttcccaaaagtgcgatttagtgacgaccggggaattattttttcgatcaggtttcggcattgggatgcgaaaggactccccctggaagcagaacgtcagcctctccattctgaagagccacgagaatggcttcatggaagatctggataagacatgggtgaggtaccaggaatgtgactctaggagtaatgccccagccacactgacattcgaaaatatggctggggtgttcatgctggtggcaggcggaatcgtggcaggaatctttctcatcttcatcgaaatcgcttataagagacataaggacgctagacgaaagcagatgcaactcgccttcgccgcagttaacgtgtggcggaagaatcttcaggttggccaagcgacattacgtggactggtccccagagcaaggcccggtcatggcccaccgccttccccaaaagccgttgccctcgcacttgcacttgttggtcgaactggtgcaagaagtcatggacagggccagtggtag

SEQ ID NO: 224758 - DNA, 2832 bp, synthetic construct
  misc_feature 1..2832: note = Description of Artificial Sequence: Synthetic coding sequence
  source 1..2832: mol_type = other DNA
atgtctacaatgaggttactgacactggcacttttgttttcctgttctgtggccagggcagcgtgcgatcccaagatcgtcaacatcggtgctgtcctgtcaacacggaagcatgaacagatgtttagagaggctgtgaatcaggctaacaaacgacacgggtcctggaagatacaactcaatgctacatcggttacccacaaaccgaatgctatacagatggccctatcagtgtgtgaggatcttatatcttcacaggtctacgctatactggtctctcatccccctaccccgaacgatcattttaccccaactcccgtcagttataccgccggtttctacaggatacctgtgctaggactcactacgcgcatgagcatttacagtgacaagtccatccacttaagctttctgcggaccgtgccaccttactcccatcaatcctccgtctggttcgagatgatgagggtctacagctggaaccacattatactgttagtgagcgacgatcatgaaggaagagcagcacagaagcggctggaaaccctcctagaggagagagaaagcaagtcaaaaaagagaaactacgaaaacctggatcaactttcatacgacaacaagcgtggaccgaaggcagagaaggttctccaatttgaccctggcactaagaacgttacagcactcctgatggaggcgaaggagctcgaggccagagtgatcattctgtccgcttctgaggacgacgcagccactgtatatcgagcggctgcaatgttaaatatgaccggttccgggtacgtatggctggtaggcgaacgggagatatcagggaacgcgttaaggtacgcccctgacggcatcttaggcctgcagttaatcaatggcaagaatgagtccgcgcatatttcagatgccgtcggcgtggtggctcaggcagttcacgaactactagaaaaggaaaacattaccgaccccccaaggggctgtgttggcaacacgaatatttggaaaactggcccactcttcaaacgtgtcctcatgtcaagtaagtatgcagacggagtgaccggcagggtggagtttaatgaggacggtgacagaaaatttgcaaactactcaatcatgaatctgcagaaccgcaagctggtgcaagtaggcatttacaacggaacccacgtcatccccaacgatcggaaaattatctggcctggtggggaaacagagaagcctcgtgggtaccaaatgtctaccaggttgaagatcgtaactattcaccaggaaccgttcgtctacgtcaagccaactctgtccgatggaacatgtaaggaggagtttactgtgaacggagatcccgtgaaaaaagttatttgtactgggcctaacgatacttcacctggatcacctaggcatactgtgcctcagtgctgttacggcttttgcatcgatctcctgataaaacttgcaaggactatgaactttacctatgaagttcacctggtcgctgatggaaagttcggcactcaggaaagggtgaacaattctaacaagaaggagtggaacggtatgatgggggaactcctgtcaggacaggcagatatgatagtggctcctttgaccatcaacaatgaaagagcccagtatattgagttctctaagccctttaagtaccaggggttgacaatacttgttaaaaaggagattcccaggagcacactcgattctttcatgcaaccctttcagagtaccctttggctgctggtaggattatctgtccatgtggtcgctgttatgctctacctcctggaccgctttagcccattcggccgatttaaggtgaacagtgaggaagaggaagaggatgccttaactctgtcgtcggcaatgtggttttcctggggcgtcctgctcaacagtgggattggcgaaggcgcacccaggagcttctccgcaagaattctcggtatggtgtgggccggatttgccatgatcatagttgcctcctacaccgctaacttggctgcctttcttgtcctcgaccgacctgaggagaggattactggaatcaacgaccctaggctgcggaatccatcagacaagttcatatatgctacagttaaacagtcttccgtcgatatatactttcgccgacaagtggagctgagtaccatgtaccgtcacatggagaagcataactacgagtctgccgcagaagctattcaggccgtgcgcgataataaattacatgcgttcatttgggacagcgcggtgctcgagttcgaggcttcccagaagtgtgacttagtgactaccggggaactattttttcggtccggctttgggatcggaatgcggaaagactcaccttggaaacagaatgtaagtctgtccatcttgaaatctcacgagaacggcttcatggaggacctggataaaacctgggtccgctaccaggagtgcgatagccgctctaacgccccagccactctcacctttgaaaacatggccggagtttttatgctggtggcaggcggtatagtggcaggtatttttctcattttcatcgagatcgcgtataagcggcataaggacgccagacgcaagcagatgcagctcgcattcgccgctgtgaacgtctggcggaaaaatctacaggatcgaaagagcggacgtgccgagcccgaccctaagaaaaaagctacctttagggctattacttctaccctagcgtcatcgtttaagcgcaggcgcagctctaaagacactcagtatcaccccacagacatcaccggaccactcaacctgagtgatcccagtgtctctaccgtcgtgtag

SEQ ID NO: 224759 - DNA, 2769 bp, synthetic construct
  misc_feature 1..2769: note = Description of Artificial Sequence: Synthetic coding sequence
  source 1..2769: mol_type = other DNA
atgagtaccatgagattattaactctcgctctgctcttcagctgtagtgtagccagagcggcttgcgacccgaaaatagtgaacataggggctgtcctgtctacaaggaaacacgaacaaatgttcagagaagccgtaaaccaagcgaataagcgccacgggtcctggaaaatacagctgaatgccacgagcgtgacccataaaccgaacgccatccagatggcgttgagcgtctgtgaagatctgatttcctcccaggtgtacgcaattttagttagccatcccccaacccctaatgaccattttactccaacaccggtatcatacaccgccggtttctatcggatccctgtgctggggttaaccacacgcatgtccatctacagcgataaatcgattcatttaagttttttacgaaccgttccaccatactctcatcagtcctctgtgtggttcgaaatgatgagagtatatagctggaaccatatcattctcctggtatctgatgaccacgagggacgtgctgcacagaagaggctcgagaccctattagaggaaagagaaagcaagagcaagaaaaggaattacgagaacctagatcagctgagctacgataataagagagggcctaaggcagagaaggtgctgcagttcgaccccggaactaagaacgtaaccgcccttctgatggaagcaaaggagctggaagcgagagtgatcatactaagcgcatccgaggatgacgctgctaccgtgtaccgagctgctgctatgctgaacatgaccgggagcggttatgtgtggcttgtaggagagcgggaaattagtggtaatgctcttcgttatgcgcctgatggcattctggggctccagctgatcaatggcaaaaatgagtctgcccacataagtgatgctgtgggcgtagtggcgcaggctgttcatgaactcttagagaaagaaaacattacagatccgcctaggggttgcgtcggtaacaccaatatttggaagacagggccactgttcaaaagagtgctgatgtctagtaagtacgccgacggagtgaccggcagggtcgaattcaacgaagatggagataggaaattcgccaactattcaattatgaacctccagaaccggaaattggtgcaggtaggtatctacaatggaacacacgttattcccaacgatcgtaaaataatctggccaggcggagaaaccgaaaagccacggggataccaaatgtcaactcggctaaagattgtgacaattcatcaagagcctttcgtgtacgtgaagcctacactgtcggatggcacttgtaaggaggagtttactgtcaatggagatccagtgaaaaaggtgatctgcaccggccctaacgatacttcccccggaagcccaagacatactgtgccccagtgctgctatggcttctgtattgatctgctgatcaaactggctaggacgatgaatttcacttacgaggtgcatctggtggccgacggcaagtttggcactcaggagcgagtgaacaattccaataaaaaggagtggaatggaatgatgggagagctcctctctggacaagctgacatgatcgtggcccctctgactatcaacaacgagagagcacaatacatcgagttttccaagcccttcaagtaccagggccttaccatcctggtgaaaaaagaaattccacggagcactctcgactcatttatgcagccgttccaatccaccctttggctcctggttgggcttagcgtacatgtggtggcggtgatgctctacctcctggaccggttctcaccttttggccgattcaaggtgaactctgaagaggaagaagaggacgccctgaccctaagttccgcaatgtggttcagctggggagtgttgctgaactctgggataggcgagggagcacctaggtcatttagtgcccgaatcctcgggatggtgtgggcgggtttcgctatgatcattgtagcgagttataccgcgaatctcgcagcctttcttgtactcgatcggccagaagaacgcataacagggattaacgacccacgcctacgaaatcccagtgacaagtttatatacgcaactgtaaaacaaagcagtgttgatatttacttcagacgccaagtggaattatctaccatgtacagacatatggaaaaacataattatgagtccgctgccgaggcgattcaggccgtgcgggacaataagttgcatgctttcatctgggactcagcggtactggaattcgaggcctcccagaaatgtgatctggtgaccactggcgagctgttcttcagatccgggtttggtatcggtatgcgaaaggactcaccatggaagcagaatgtgagtctgagcatcctcaaaagccatgaaaatgggttcatggaggatctcgacaagacctgggtgcgatatcaggagtgcgacagtaggtccaacgcccctgcgactcttacatttgaaaacatggcaggtgtgtttatgctggtcgctggcggaatcgtagccggaatttttctgatcttcatagagattgcttacaagaggcacaaggatgctcgcaggaaacagatgcaactggcttttgctgcagtaaatgtctggagaaagaatctacagtcgactggtggtggtcgcggagctcttcagaaccagaaggacaccgtcctgccacggagggcaatcgagagagaggaggggcaactgcaactgtgctcaagacatcgtgaatcttag

SEQ ID NO: 224760 - DNA, 2721 bp, synthetic construct
  misc_feature 1..2721: note = Description of Artificial Sequence: Synthetic coding sequence
  source 1..2721: mol_type = other DNA
atgtccaccatgcgactgttaacgctcgctttgctcttttcctgctctgttgccagggcagcctgtgacccaaagatcgttaatatcggggctgtcctgtccactagaaaacacgagcagatgttccgcgaagcagtaaaccaggcgaataaacggcacggctcctggaagatccagttgaacgccacctctgtgacccacaagcccaatgcaatccagatggcactttccgtgtgtgaggatctgatttcatcacaggtttacgctatcctggtttcacacccacccactccaaatgatcacttcacccccacacctgtaagctacaccgcgggtttctacagaattcctgtgctgggactgacaacacgcatgagtatttactctgacaagagtatacatctgtctttcttgagaaccgtgcctccatattctcatcaatcctcagtttggttcgaaatgatgcgcgtgtatagctggaaccacatcatcctgcttgttagcgatgaccacgaagggagggccgcacagaagaggcttgagaccctattggaggagagggagagcaaaagcaaaaagcgtaactacgagaatttagatcagctctcatatgacaataaacgcggacccaaggcagaaaaggtactgcagtttgaccccggaacaaagaacgtaaccgccctgttgatggaagccaaggagctggaagccagagtcatcatactctcggcctccgaggatgacgcggctaccgtgtaccgcgcagcagcgatgctgaacatgactggctccggctacgtgtggctggtgggggagagggaaatctccggaaatgccctcagatacgccccagatgggattctcggacttcaattgatcaacggaaaaaacgagagcgcccacatctcagatgccgtgggagttgtggcccaggccgtgcacgagctactggaaaaggaaaacataaccgaccccccacggggttgcgtgggcaacacaaacatttggaaaaccggacccctgttcaaacgggttcttatgagctctaagtatgcagacggagtcactgggcgtgtggagttcaatgaggatggagaccggaaatttgcaaactactctatcatgaatcttcagaatagaaaactggtgcaggtaggcatctacaacgggactcacgtcatcccaaacgatagaaaaataatttggcccggaggcgaaaccgagaagccccgtggatatcaaatgagtacccggctgaagatcgttaccatccatcaggaacctttcgtctacgtcaaacccaccctaagtgacgggacctgcaaggaggaatttaccgtgaatggtgacccagtgaaaaaagtgatttgcacgggaccaaacgatactagtcccggaagtcccaggcataccgttccacagtgttgttatggattttgtattgaccttcttatcaagctagccaggactatgaacttcacatatgaagtgcatctggtggctgacgggaaatttggaacacaggaacgcgttaacaactccaacaaaaaggaatggaacggaatgatgggggagctcctcagcggtcaagccgatatgattgtggcaccactgaccattaacaacgagcgggctcagtacatcgagttcagtaaaccattcaagtaccagggcttgacaatactggtcaagaaggagattcctagatctactcttgatagcttcatgcaaccctttcagtcgactctgtggctgctcgtgggacttagcgtgcacgtggtagctgttatgctgtatctgcttgaccggttttccccattcggccgattcaaggtaaacagtgaggaagaagaggaggatgccctaacactgtcgagcgctatgtggttttcttggggcgttctgctgaacagcggcataggcgagggagcccctaggtcattctctgctcggattttgggaatggtctgggcaggattcgctatgatcatagtggcatcctatacagccaatctggcggcattcctggtactggatcggccagaagagcgaatcaccggaataaacgatccccgtctccgtaacccctcagacaagttcatttacgcgacagtgaagcagtccagtgttgatatttactttcgccgtcaggtcgagctgagtacaatgtatcgacatatggaaaagcacaattatgagagtgctgccgaggctatccaggccgttcgggataataagcttcacgcatttatctgggattcagcggtcctggagttcgaggcttctcaaaaatgtgatctggtgacaactggggaattattctttaggagcggtttcggaattggaatgagaaaggattcgccttggaaacagaacgtatccctgtccatcttgaagagtcacgagaacggcttcatggaagacttggacaaaacgtgggtgaggtaccaggaatgtgattctagaagcaatgctcccgctacgctcacgtttgagaatatggccggagtcttcatgctggttgctggcggaatcgtggctggcatcttcctgatttttatcgagatcgcctacaagaggcacaaggatgcaaggcgcaaacagatgcagctggctttcgcagctgtgaacgtgtggagaaagaacctacagcagtaccatccgactgatattacgggccctctgaatctctctgaccctagcgtgtcgactgtggtgtag

SEQ ID NO: 224761 - DNA, 2817 bp, synthetic construct
  misc_feature 1..2817: note = Description of Artificial Sequence: Synthetic coding sequence
  source 1..2817: mol_type = other DNA
atgtcaaccatgaggctgcttaccctggccctgttatttagctgctccgttgcgagagccgcttgcgacccaaagatagtcaacattggcgcagtcttgagcacccgcaagcacgagcaaatgtttcgcgaagcggtcaaccaagcaaacaagcgccatggatcttggaaaatacagttaaacgctactagcgtgactcacaagcctaacgccatacagatggcattatctgtgtgtgaagatctgataagttctcaagtgtatgcaattcttgtttctcacccccctacgccgaacgaccactttacgcccacaccagtgtcctacacagccggattctatagaattcccgtgctggggctgaccacaaggatgagcatttattccgataaatctatccatctcagcttcctgcggaccgtgcccccttatagtcatcagagcagcgtgtggtttgagatgatgcgggtgtactcatggaaccacattattctgctggtgtctgacgaccacgagggcagggcggctcagaagcgacttgagacattgttggaggagagagagtccaaagccgagaaggtgctgcagttcgacccaggaaccaaaaacgtgaccgcattattgatggaggcaaaggagcttgaggctcgagtgatcatcctatccgctagcgaggacgatgccgctaccgtgtacagagcagctgccatgctgaacatgaccggcagtggctacgtgtggttggtcggcgagcgggaaatatcaggcaatgccctacggtacgcccctgacgggatcctcggactgcagttaatcaatgggaagaatgagtcagcacacatcagcgacgctgtcggtgtcgtagctcaggccgtgcacgagttgctggagaaggagaatataaccgaccctcctcgaggctgtgtgggcaataccaacatatggaagacaggaccactattcaaacgggtcctaatgtcgagcaaatacgcggacggggtgaccgggagagtagaatttaacgaggatggagatagaaagtttgctaattattccattatgaatcttcagaaccgaaaactggtccaggtgggcatttacaatggcacacatgttatccctaacgataggaagatcatctggccaggtggggagaccgagaaacctagaggttaccagatgagcacccgcctgaagattgtcaccatacatcaggagcctttcgtgtacgtaaagcccacactgagcgatggtacctgcaaagaggaatttactgtgaatggggatcctgtcaagaaagtgatttgcactggcccaaacgataccagccccggaagtccaaggcatactgttccgcagtgttgttacggcttttgtatcgacttgcttatcaagctcgccagaaccatgaacttcacctatgaagtgcatctggtagccgacgggaaattcggtacccaggagcgcgtcaacaattccaataagaaagagtggaatggcatgatgggcgaactgctatccggacaggccgatatgatcgtggctccactgaccattaacaatgagcgcgctcagtatatcgaattcagcaagccgtttaaatatcagggactgactattctcgtcaaaaaggaaatacccagatccacactcgactcttttatgcagccttttcagtcgacactgtggctgctggtgggcctcagtgtccacgtcgttgccgtcatgctctacctcctcgatcggttcagccccttcggacgttttaaagtgaactccgaagaagaagaagaggacgccctgacgttatcaagcgcaatgtggttctcttggggcgtgctcttgaattccggaattggcgagggcgctccacgatccttttctgcccgtatcctgggcatggtgtgggctggtttcgcgatgattattgtcgcgagctacacggctaatcttgcggcatttctggtgctggatcgccctgaggaacgtattacagggatcaacgatccaaggctcaggaatccgagcgacaagttcatatacgcaacagttaagcagagctcagttgatatttatttcagaaggcaggtggagctgagcacgatgtataggcatatggaaaagcacaattacgaatccgccgcagaagcgatccaggcagtgcgagataacaagctgcacgctttcatttgggattccgctgttttagaattcgaggcatctcaaaaatgtgatcttgttactacaggcgaactgttttttcgcagtgggttcggaattggcatgcggaaagactcaccctggaaacaaaatgtaagtctgtcgattttgaaatcccacgaaaatgggtttatggaagatttggacaagacctgggttagatatcaagaatgcgattctaggtctaacgcccctgcaacactgaccttcgaaaatatggccggagtcttcatgcttgtggctggcggaatagtcgcaggcatatttctgatttttatcgagattgcctacaagcgtcataaggacgcccgacggaagcagatgcaattggcctttgctgcagtgaacgtgtggcgaaaaaacctgcaagaccgtaagagcggcagagcagagcctgatccaaagaagaaggccacttttagagctatcacctcaaccctcgcgtcatctttcaagagaagacggtcctcaaaggacacctcaactggcggaggacggggagctctgcagaatcaaaaggacaccgtactccccagaagggcaattgagagagaagagggccagctgcaactgtgctcccgacaccgggaaagctag

SEQ ID NO: 224762 - DNA, 4395 bp, synthetic construct
  misc_feature 1..4395: note = Description of Artificial Sequence: Synthetic coding sequence
  source 1..4395: mol_type = other DNA
atgggaagagtggggtactggactcttctcgtactccctgctttgctggtgtggcggggacccgctccctccgccgctgcagaaaagggacctccagccctcaacatcgctgtgatgctcggccacagccacgacgtgaccgaacgggaactgcggactctctggggacctgaacaagccgcagggctgcctcttgacgtcaacgtggtggccctgttaatgaacaggacggatccaaagtccctgatcactcacgtctgcgacctgatgtcaggcgcaaggattcatggtctggtgttcggggacgataccgaccaggaggctgtagcacagatgctcgacttcatttctagccatactttcgtcccaatactcgggatccatgggggagcatccatgattatggctgacaaggaccccacttcgacgtttttccagttcggggctagcatccaacagcaggctaccgtgatgctcaagataatgcaggactatgattggcatgtgttttctttggtgacgacgatcttcccagggtaccgcgagttcattagcttcgtgaagacgacagtggataatagcttcgtgggctgggacatgcagaatgttatcactctggatacctctttcgaggatgccaagacccaagtccagctgaaaaaaatccactcctcagtcattctattgtactgttctaaggacgaggcggtgctgatcctgtccgaggcacgctccctgggactgacagggtatgattttttctggatcgtgccaagcctcgtgtctggaaacacggaactaatcccgaaggagttcccttctggactcatctccgtaagctacgatgactgggactattccctcgaggccagggtgcgcgatgggatcggcatcttgactaccgctgcctccagtatgttggaaaagttttcttacatcccggaagccaaggccagttgttatggccaaatggagcgccctgaagtgcctatgcacactctgcaccccttcatggttaacgtaacatgggacggcaaggacttatcctttaccgaggaggggtaccaggtgcacccccgtctcgtcgtgatcgtgctgaataaagaccgagaatgggagaaagtgggtaagtgggagaaccatactctatcccttagacatgcggtgtggccaaggtataaatcattctcagattgcgaaccggatgacaatcacctgtccatagtaaccttggaagaagccccttttgttattgtggaggacatagaccccttaacagagacttgcgtcaggaatactgtgccctgcaggaaatttgtcaaaattaacaattccacaaatgaaggcatgaacgtcaagaagtgttgcaaggggttctgcatcgacatcctcaagaagttgagcagaactgttaagttcacttatgacctgtacttagtcactaatggcaagcacgggaagaaggtgaacaacgtgtggaatggaatgattggagaagttgtctatcagagagccgtgatggctgtggggagcttaacaattaatgaggaacgctccgaagtggttgatttctctgtaccatttgtggagaccggcattagtgttatggttagccgatctaatggcaccgtgtctccaagtgcgtttttggagccattttcggcttcagtgtgggtgatgatgtttgtcatgcttctgattgtgtcagccatcgctgtgttcgtgttcgagtattttagcccagtcggctacaatagaaatctcgcaaagggcaaagctccacatgggccttctttcacaattgggaaggctatttggctgttgtggggccttgtattcaacaacagcgtccctgtccagaacccaaaagggactaccagcaagattatggtgagcgtatgggctttttttgcagtgatttttctggcctcctatactgctaacttagctgcatttatgattcaggaggagttcgtggatcaagtcaccggcctctccgataagaagtttcagagacctcatgattactcaccaccctttcggtttgggaccgtgcctaacggctccacagaaagaaacataaggaataactatccgtacatgcaccagtacatgactaagtttaatcagaaaggcgtagaagacgccctggtctctctgaagactggaaagctagacgctttcatctacgatgctgccgtcttgaattacaaagccggacgcgatgaaggatgtaaactggtgacaataggaagcggatacatattcgccacgacagggtatgggattgccctgcagaaaggaagcccatggaaaaggcaaatcgacttggcactcctccagtttgtgggagatggcgagatggaagaactagagaccctgtggctcacaggaatctgtcataacgaaaagaatgaagtgatgagtagccaactggacattgacaatatggcgggagtgttctacatgctcgcagcagctatggccttgtccctgatcacttttatttgggaacatctgttctactggaagctccgcttctgcttcaccggagtgtgctccgatcgacctggtctgctcttctctatcagccgcggtatctattcttgcatccacggtgtacatatcgaggagaaaaagaagagccctgacttcaacttgacagggtcacagagcaacatgctgaaactgttacgcagtgcaaaaaatatctcctccatgagcaatatgaattctagtcgaatggatagccctaaaagggccgcagactttattcagagaggatccctgatcatggatatggtatccgacaagggtaacttaatgtactccgacaatagaagttttcaggggaaggagtccatttttggcgataacatgaatgagctccagacattcgtggccaacagacaaaaggataatctcaataattatgtctttcagggacagcaccccttgaccttgaacgaatcaaaccctaatactgtcgaggtcgccgtttccactgaaagcaaggcaaactcgcgcccacgacagctttggaagaaaagtgtcgattcaattcggcaggattcgctgagccagaaccccgtgtcccagagggacgaggctacagctgaaaatcgtacccactctctgaaatccccccgttatctgcccgaagaaatggcacactctgacatctcggaaacaagtaacagggctacctgccacagggagcccgacaactctaaaaatcacaaaaccaaggataattttaaaaggtccgttgccagtaaatatcctaaggactgttccgaggtggagcgtacttatttgaaaaccaagtcttcctcccccagggacaagatctatacaattgacggagaaaaagagccaggattccatctagacccaccccagtttgtcgagaatgtgactctgccagaaaatgtcgactttcccgacccctaccaagacccttctgaaaacttccgtaaaggagacagcaccctgccgatgaaccgaaatcccttacacaacgaagagggcctcagtaacaacgatcagtataaactatatagcaagcatttcactctgaaggataagggcagtcctcacagtgaaacaagcgaacgctacagacagaactccacccactgtcggtcgtgtctgtcaaatatgccaacctactcaggacacttcaccatgagatccccatttaaatgcgacgcctgtctacgcatgggcaacctatatgacatcgatgaagatcagatgctccaagagaccggaaaccccgctacaggggagcaggtgtaccagcaggactgggctcagaataacgcgctacagctgcagaagaacaagctacgtatcagccgtcagcatagttacgacaatatcgttgataagccaagggagcttgacctctcgcgcccatctcgcagtatctctttgaaagacagagaaagactccttgagggcaatttttacgggtctctcttctccgtccccagctcaaagctctcgggcaaaaagtcgtctctgttcccccagggactggaggattctaagagaagtaagtcgctgctgcccgatcatacaagtgataaccctttccttcattcccaccgggatgaccagcgtctggtgatagggcgatgccctagcgacccctacaaacacagtctgccttcacaagccgttaatgatagttatctgaggagctcacttagatccaccgcctcatactgttccagagactcccgtgggcataatgacgtgtacattagcgagcacgtgatgccctatgctgctaataaaaataacatgtatagcacccctcgcgtcttgaacagttgcagtaacaggcgagtttacaagaaaatgccatctattgaatccgacgtttag

SEQ ID NO: 224763 - DNA, 4394 bp, synthetic construct
  misc_feature 1..4394: note = Description of Artificial Sequence: Synthetic coding sequence
  source 1..4394: mol_type = other DNA
atggggcgagtgggctattggacacttctggtacttccggcactcttagtgtggcggggtcctgcaccaagcgcagcagccgagaaaggccctcctgcattgaatatcgcggtaatgttgggacactcacatgatgtgacagaaagagaactccgaaccctctggggcccagagcaggctgctggtctgcctctggacgtaaatgtggtggctctgcttatgaatcggactgatccaaagagcctaattacacatgtgtgcgacctgatgagtggagccaggatccacggcctggttttcggggacgatacagaccaggaggcagtggcccaaatgctcgatttcatttcgagccatacatttgtgccaattttaggaattcacggaggcgcaagcatgatcatggctgataaggatccaactagcaccttcttccagttcggagcttccatccagcagcaggcaaccgtgatgttaaagatcatgcaagattacgattggcacgtcttctctcttgtgactaccattttccccggatatcgagaattcatctcattcgtgaaaactacagtagataacagcttcgtcgggtgggatatgcagaatgtgattaccctcgacacatcttttgaggacgccaaaacgcaagtgcaattgaagaagatccacagtagtgtaatactcctctattgcagtaaagatgaagcagtgctcatcctgtccgaggcccgttctcttggcctgacggggtacgatttcttttggattgtaccttcactcgtcagtggaaataccgaactgatccccaaggagttcccttcgggactgatatccgtgagctacgatgattgggactattcccttgaagcacgtgttagagatggcatcggcattctgaccaccgccgctagctcaatgctagagaaattcagctacatccccgaggcgaaagcctcttgctacggccagatggaaagacctgaagtgcctatgcataccctgcatccatttatggtgaacgtgacttgggatggaaaagatctgtccttcaccgaagagggctatcaggtgcatccccgtctcgtggtgatagtgctgaacaaggaccgcgaatgggaaaaggttggaaagtgggagaatcatacactgagcctgcgtcacgcagtgtggcccagatataagagcttctccgactgtgagcctgatgacaatcatctcagcatagtgacactggaggaagctccatttgtaattgtggaagacatcgacccattgacagagacatgtgtccgcaacaccgttccatgtcgcaagttcgtgaagattaataattccactaatgaaggcatgaatgtcaaaaagtgttgcaaaggattctgtattgatattctcaagaagttgtcccggaccgtgaaattcacctatgacttatatctcgtgaccaatggaaaacatgggaagaaggtgaataacgtatggaacgggatgatcggagaagttgtgtaccagagggctgttatggccgttggaagcctcactataaatgaggaaagaagcgaagtcgttgatttttccgtcccttttgtggagactggaatctcagttatggtgtcgagatccaatggcacggtaagtcccagcgccttcttggaacctttttccgccagtgtatgggtgatgatgttcgtgatgctcctcattgtatctgccatcgctgtatttgtcttcgagtattttagccccgtcggttacaaccggaacttggccaagggtaaggcaccccatggtccctcattcacaattggtaaagctatctggctactgtggggattagttttcaataattcggtgccggtgcaaaatccaaaggggacaacatccaaaatcatggtctccgtctgggcattttttgctgtcattttcctcgctagttacactgcaaacctcgctgcctttatgatacaggaagaattcgtcgatcaggtgacaggcctgtccgacaaaaagtttcagaggccccatgattattctccacccttccgcttcggtaccgtgcctaacggttccacagaacgcaatatccgcaacaactatccctacatgcaccagtatatgactaaatttaaccagaaaggagtggaagatgcgttggtatctcttaaaaccggaaagttggatgccttcatctatgatgccgctgtgctcaactacaaggcgggaagagatgagggttgcaaactggtcaccatcggttcgggctacatctttgccaccactggctacggaatcgccctgcaaaagggtagtccgtggaagaggcagatcgacttggcccttttacagttcgtgggagatggcgagatggaggagttagagacgctgtggctgactgggatttgccacaatgaaaagaacgaggtaatgtcctcacaacttgacatagataacatggctggcgtgttctacatgctggctgccgctatggctctcagtcttatcacctttatctgggaacatttattctactggaaattgcgtttttgttttactggagtctgcagcgaccgccctgggctactatttagcatatctcgaggaatctacagttgcattcacggagtgcacatcgaggagaagaaaaaaagtccagatttcaatctaactggcagccaaagcaatatgctgaagcttctgcgatcagccaaaaacatctcgtcaatgtctaatatgaactcatcacgcatggatagcccaaagcgcgctgctgactttatccaaagggggagcctaattatggatatggtaagcgataaaggcaatctcatgtatagcgacaatcggtccttccaagggaaagaaagcatctttggggataacatgaatgagcttcagactttcgtggctaatcggcaaaaagataacttgaataactacgtgtttcagggtcagcacccactgactctgaatgagagtaacccgaacactgtcgaggtcgccgtatccacagagtccaaggccaattctcgcccacgccagctgtggaagaaaagcgtggatagcatccggcaggactcactgtcccagaatcccgtgagccagcgggacgaggcgacagccgagaaccgcactcacagcctcaagagcccacgctacttgcctgaggaaatggcccatagcgacatcagcgagacttctaatcgcgcaacctgccaccgcgaacctgataacagtaagaatcacaaaactaaggacaactttaaacggagcgtcgcctctaagtaccccaaggattgctccgaagtggaacggacatacctcaagactaagtcatctagccctcgcgacaaaatctacacaattgacggcgagaaagaaccaggctttcacttggatccaccgcaatttgtggagaatgtgacattgcctgaaaacgtcgactttcccgatccttaccaagacccaagcgaaaactttcgcaagggtgattctaccctgccgatgaaccgcaatcccttacacaacgaggaggggctcagcaacaatgatcaatataagttatattctaaacatttcacactaaaggacaagggcagtccccactctgaaacctccgagagatatcgccagaattcaacccactgtagatcgtgtctaagtaatatgcccacatattccggtcactttaccatgcggtccccttttaagtgcgacgcatgcctccgcatgggcaatctgtatgacattgatgaggatcaaatgctgcaagaaactggcaatcccgcaactggagaacaggtataccagcaagactgggcccagaacaacgccctacagttgcaaaaaaacaagttacggatatctcggcagcattcctatgacaatattgtggataaacctcgggaactcgacctcagccgtccatctagatctatctctctgaaggacagggaaaggctactggaagggaatttctatgggtccctgttcagcgtaccttctagcaagctgtccggcaaaaagagttcactttttccgcagggactcgaggatagtaagcgcagtaaatctctgttgcctgaccacacctctgacaatcctttccttcactcccatcgagacgaccagagactagtcattggaaggtgtcctagcgatccttacaagcacagcctgcctagccaggctgtgaatgattcctacttaaggtcaagtctccggagcaccgcctcctattgttcaagagacagcaggggacacaacgatgtatacatttcagagcatgtgatgccctacgctgcaaacaaaaataatatgtactctacgccacgcgttctcaattcctgctctaataggcgcgtgtacaagaaaatgccttccattgaaagtgacgtcta

SEQ ID NO: 224764 - DNA, 4395 bp, synthetic construct
  misc_feature 1..4395: note = Description of Artificial Sequence: Synthetic coding sequence
  source 1..4395: mol_type = other DNA
atgggacgggtgggatactggaccctgctcgtgctaccagccctgctggtctggcggggtccagccccaagcgccgcagctgagaagggccctccagccctcaacattgccgtgatgttgggccacagccacgatgttaccgaaagggagttaaggaccctgtggggaccggagcaggccgcagggctgcccctggacgtcaatgtcgtcgcactgcttatgaaccggacagatccgaagagtcttattacccacgtctgtgatcttatgagcggggcacggatccatggactcgtatttggcgacgacactgaccaggaggcagtcgctcagatgctcgactttatcagcagccacacattcgtgcccatccttgggattcatgggggagccagtatgatcatggctgacaaagaccctacttccactttctttcaatttggtgcatcgattcagcagcaggccaccgtgatgttgaagattatgcaagactatgactggcacgtgttttctctggtcaccactatttttccaggctatagggagtttatctcctttgtgaagaccactgttgacaattccttcgtgggttgggacatgcagaacgttatcacgcttgataccagcttcgaggatgccaaaacccaagtgcagttgaagaaaatccactcgtcggtcatattgctatactgcagcaaggacgaggccgtcttgatcttaagcgaagcacggagccttggcctaacgggctatgactttttttggatcgtcccatccttagtgagcgggaacacagagttgatccctaaagagtttccttccggccttatctccgtctcgtacgatgactgggactattctcttgaagcgagagtgagagacggtatcggcattctcactactgccgcatccagcatgctggaaaaattttcgtacattccagaggccaaagccagctgctatgggcagatggaacgaccagaagtccctatgcacactcttcaccccttcatggtcaatgttacctgggacgggaaagatttgagtttcaccgaagagggataccaagtccatcctcgtctggtcgtgattgtgttaaacaaggatcgcgagtgggagaaagttggaaaatgggagaatcataccctgagtctgagacacgccgtgtggccaaggtacaaaagcttcagtgattgtgagcccgatgacaaccacctgtctatagtcaccctggaggaagcacctttcgtcatcgttgaggacattgacccgctgaccgagacatgtgtgcggaacaccgttccttgtaggaagtttgtgaaaattaacaatagtactaatgaagggatgaatgtgaagaagtgctgtaaggggttctgtatcgatattttaaagaaattgagcaggacggtcaaattcacatacgacctgtatctggtgaccaacggcaaacacgggaagaaggttaacaacgtatggaatggaatgattggcgaagtcgtgtaccagagagctgtgatggccgttgggagcttaaccattaacgaggaacgatccgaggtcgtggacttttcggtcccctttgtggagacgggcatctctgttatggtctccagaagcaatggcacagtttccccttccgccttcttggaaccattcagtgctagcgtctgggtgatgatgttcgttatgctcctgatagtctctgctatcgccgtgtttgtcttcgaatacttctctcctgtgggatacaataggaaccttgcaaagggaaaagcccctcacggcccatccttcaccatcggcaaggccatctggcttctgtggggactggtgtttaacaacagtgttccggtgcagaatcctaaaggtacgacgtccaaaatcatggtatctgtatgggcatttttcgcggtgatctttctcgcatcatatacagccaatcttgccgctttcatgatacaggaggaatttgttgaccaggtgacaggcctgtccgacaaaaagttccagcgacctcacgactactcccccccattcagatttggtaccgttcccaacggatcaaccgagaggaacatcaggaacaattacccttatatgcatcaatatatgacaaaattcaaccagaaaggcgtggaggacgcccttgttagtctcaaaaccgggaagctggacgcgttcatctacgacgcagctgttctgaattataaagcgggaagggacgagggatgtaaattagttacaatagggtctggctacatctttgcaactactggctacggcattgcactacagaagggctctccttggaagcggcagatcgacctggcattgctccagtttgtgggagacggggagatggaggaacttgagacattgtggcttaccggcatttgtcacaatgagaagaacgaggtgatgtcttctcagctggacatcgacaacatggcgggtgtattctacatgttagccgcagctatggcactgtcactaatcactttcatttgggaacacttattctattggaagctgaggttttgttttacaggtgtgtgcagcgatcgcccaggactcctttttagtattagtcgcggtatttactcatgcatccacggggtgcacattgaggagaagaaaaagagccctgatttcaatctgactgggtcccagtcaaacatgctcaaactgctccgatccgctaagaacatttcatctatgagcaatatgaattcatcgagaatggactcaccaaaacgtgcagccgactttattcaaagggggtcactgattatggacatggtctcggacaaaggcaatttgatgtattcagataaccgcagtttccaagggaaagagtcaatatttggcgacaacatgaatgagctgcagacatttgttgccaaccggcaaaaggacaatctcaacaattatgtcttccagggccagcacccattaactctgaacgaatcaaatcctaacactgtggaagtcgccgtgtctaccgagtccaaggctaactccaggccaaggcagctgtggaaaaaaagcgtcgactctatcaggcaagactccctgagccagaaccccgtgagccagagggacgaggccaccgctgaaaataggacacattcactgaaaagtccccgatacctgcccgaagaaatggcccactctgacatcagcgaaacttcaaaccgtgctacctgtcacagggaaccggataacagcaaaaatcacaagaccaaggataatttcaaacgcagtgtggcctccaagtaccctaaagattgctctgaggtggagcgaacatacctaaaaacgaagtcctcaagcccccgagacaagatatacacgatcgatggtgagaaggagcccggattccacctcgatccccctcaattcgtggaaaatgttactctgccagagaacgtagatttcccagatccgtatcaagatcccagtgaaaactttcggaagggcgattccactctgcccatgaatcgaaaccccctccacaacgaggagggcctgagcaacaacgatcagtacaagttatatagtaagcactttacactcaaagataaagggtcgccacactctgaaaccagtgagcggtacagacagaattccacccattgcaggtcttgtctcagcaacatgcccacctatagcggtcactttaccatgcgcagcccttttaagtgcgacgcctgcctccgaatgggaaatctttacgacattgatgaagatcagatgctccaggaaaccggaaaccccgctactggtgaacaagtgtatcagcaagactgggctcagaataatgctctccagctacaaaagaataagttaagaatatctcggcagcattcctatgataacatagtcgataagccacgagaattggatctgagtcgaccttctcgctccataagcctgaaggatagggagaggctgctcgagggaaatttctatggaagcctgttttcagtgccttcttccaagctgtctgggaagaagagctccctctttccacagggactggaggacagcaagaggtcaaaatccctactccctgatcacactagtgataatccgtttctgcacagtcatcgagacgaccaaaggttggtcattggaaggtgtccgagcgacccctacaaacacagtctgccatcacaggccgttaacgacagttacctgaggagcagcctcagatctacggccagttattgtagccgggattctagggggcacaacgatgtctatattagcgaacatgtcatgccttacgccgcaaacaagaataatatgtactcaacgcctcgcgtgctgaatagctgttctaaccgcagggtttataaaaaaatgccaagcattgagagcgatgtgtag

SEQ ID NO: 224765 - DNA, 3846 bp, synthetic construct
  misc_feature 1..3846: note = Description of Artificial Sequence: Synthetic coding sequence
  source 1..3846: mol_type = other DNA
atgggtcgtgttggatactggaccttgcttgtgctacccgctctcctggtgtggagagggcctgcgccttcagccgctgccgaaaaaggtcccccagctctcaatatcgccgtgatgctgggtcacagccacgatgttaccgagcgggagctgcgcacgctgtggggaccagagcaagccgctgggttgccactggatgttaacgtggttgcactgctgatgaaccgaaccgaccccaaaagcctcataacccacgtttgcgacctgatgagcggcgctagaatccacggcctcgtgttcggcgatgacacggaccaggaggcagtagcgcaaatgctggatttcatttcttcccatacctttgtccccatcctcggcatacacggcggagcctcgatgattatggctgacaaggatcctaccagtacattttttcagttcggagcttcaatccagcagcaagcgacggtgatgcttaaaatcatgcaggattatgattggcacgttttcagcctggttactacaatctttccaggttacagggagttcataagttttgtcaagacgacagtcgataacagttttgtggggtgggatatgcagaacgttatcacgctggacacaagcttcgaggacgccaaaacccaggtgcagctgaaaaaaattcattcaagcgttattttactctactgctccaaagatgaggcggtgctgattctgtctgaggctcggagtctaggcctgacagggtatgattttttctggattgtccccagcctcgtttctggtaacacggaactgatcccaaaggagttcccctctggacttatatccgtgagctacgacgattgggactactccctggaagccagggttagagacggcatcggcatactcacgactgcagcctcctccatgctggaaaagttctcatacattccggaggctaaagcttcctgctacggccaaatggaacgccctgaagtacccatgcacaccctgcatcctttcatggttaacgttacttgggatggaaaggacttatcctttaccgaagaaggctaccaggttcatccgaggctggttgtcatcgtgttgaacaaggacagagaatgggaaaaggtggggaaatgggaaaaccacaccctgagcttgcggcacgccgtgtggcctcgctataaaagcttcagcgattgcgaacccgatgacaatcacctgagtatcgtgacgctggaggaggcccctttcgtgatcgtggaggacatcgacccactgacagagacgtgtgtccgtaataccgtgccatgtcgtaaatttgtcaagattaataattcaaccaacgaaggcatgaacgtaaagaaatgttgcaaaggattttgcattgacattctgaagaagctgagtaggaccgtcaagtttacctatgacttgtacttagtaaccaatggtaagcacggcaaaaaggtcaataatgtgtggaacggcatgattggcgaagttgtctatcagcgcgcagtcatggctgtgggctccttgaccatcaacgaggagcgctcggaggtcgttgatttttccgttcctttcgtcgaaactgggatttccgtaatggtatcgcgtagtaacgggactgtgtcccctagtgcgttcctggagcccttctccgcgagcgtttgggtgatgatgttcgtgatgctcctaattgtatctgcaattgcagttttcgtttttgagtacttctcccctgtgggttataaccggaacctggcaaaggggaaggcgccacacggcccatctttcacaattggtaaagctatatggttgctttggggattagtgtttaacaactctgtgcccgtgcagaacccaaagggaacaacgagtaaaatcatggtcagcgtgtgggcctttttcgccgtcatatttctggcctcttataccgcaaacctggcagcttttatgatccaagaagagtttgtggaccaggtcaccggcctatccgataaaaaattccagaggcctcacgattacagccccccattcaggttcgggacagtgcctaatgggtcaacagagaggaacattagaaacaattatccttacatgcaccagtacatgacaaagttcaaccagaagggagtggaagacgccctggttagcctgaagacaggcaaactcgacgcattcatttatgacgcagcggtcctcaattataaggcaggcagagatgagggatgcaagttagtgacaatcgggtccgggtacattttcgctacaaccggatacgggattgcactgcagaaaggctcaccatggaaaaggcaaattgacctcgcccttctacaattcgtaggagacggcgagatggaggagctggaaaccctgtggctcacagggatttgtcacaatgagaaaaacgaggtgatgtcctcgcagctcgatattgataacatggccggagtattttacatgctggccgcagctatggctttgtcgctgattactttcatttgggagcaccttttttattggaaattgagattttgtttcactggagtatgtagtgatcggcctgggttgctgttcagtattagtcgcggaatctacagctgtatccacggcgtgcacatcgaggagaaaaaaaagtcaccggacttcaacctgacaggctcccaatctaacatgcttaagttgttacgcagcgccaagaatatcagcagtatgagcaacatgaatagtagccgtatggattcaccgaaaagagcggctgatttcatccagcggggtagtctgatcatggacatggtgagcgataaaggaaatctcatgtactccgataatcgcagtttccagggaaaggagagtatcttcggagataatatgaatgaattgcagacctttgtcgccaaccgccagaaagacaacctgaacaattatgtcttccagggtcagcaccctctgaccctaaatgagagcaatcccaataccgtagaagttgccgtgtccacagagtccaaagccaatagccggccacggcagctctggaaaaagtctgtcgacagcatccggcaggattcgttgtctcagaacccagtttctcagcgggacgaggccacagctgaaaacagaacacattcactgaagtctccgcgatacctgccagaagagatggcgcatagcgacatctctgaaactagcaatcgcgctacatgccacagagagcccgataacagcaaaaaccacaaaacgaaggacaactttaaacgaagcgtggctagcaaataccccaaagactgctcagaggtggagagaacatatctaaagaccaagtcctccagcccacgtgacaaaatctacaccatcgacggcgagaaagaacccggattccaccttgatcccccacaatttgtcgagaatgtaacacttcctgagaacgtggactttccagacccctatcaagatcctagcgagaactttcgtaagggtgactccactctgccgatgaaccgcaatcctctgcataacgaagaggggctatctaataacgaccagtataagttgtatagcaaacatttcactctgaaagacaaaggttccccccatagcgagacctctgagcggtacaggcaaaatagtactcattgtagatcgtgcctgagtaacatgccgacctactcaggacactttaccatgagatctcctttcaagtgcgacgcctgcctgagaatgggcaacctctatgacatagatgaggaccaaatgctgcaagaaactggaatgacaaacgcttggctgctcggcgatgctccgagaaccctgactaatacaagatgccaccctaggcggtag

SEQ ID NO: 224766 - DNA, 3375 bp, synthetic construct
  misc_feature 1..3375: note = Description of Artificial Sequence: Synthetic coding sequence
  source 1..3375: mol_type = other DNA
atgctaaagattatgcaggactacgattggcacgtatttagcctcgtgacgacaatattccctggctacagggaatttatcagttttgtgaaaactacagtggacaattcctttgtgggctgggatatgcagaacgtcatcactctcgatacctctttcgaagacgccaaaacccaagtgcaactaaagaagattcattcctccgtgatccttctctactgttcaaaggacgaggccgtcctgatcctcagcgaggcccgtagcctgggcctcactgggtatgactttttttggattgtgccttcgctggtgtctggcaatacagaattgattccaaaagaattcccatccggactcataagtgtttcctatgacgactgggattactctctcgaggcaagggtcagagacgggatcgggatcctgaccaccgctgcttcgtctatgctggaaaaattttcctatattcccgaggcaaaagcatcctgttatggccaaatggagaggcccgaggtgccaatgcataccctgcatccatttatggtgaatgtgacctgggacggtaaagatttgtcctttacagaagagggctatcaggtccacccaaggctggttgtcattgtgctgaataaggaccgcgaatgggaaaaagtgggcaaatgggagaaccataccttgtctctgcggcacgctgtctggccgagatacaaaagctttagcgactgtgagcccgacgataaccatctgtcaatcgtgactctagaggaagctccattcgtaattgttgaggacattgatcccctgacagaaacatgcgttcggaacaccgtaccctgcagaaagtttgtcaagatcaacaactctaccaatgagggtatgaacgtgaaaaagtgctgcaagggattctgtattgatattctgaagaagttatccagaactgtcaagttcacttatgacttgtatctggtgacaaacggcaaacacggcaagaaggtcaataatgtgtggaatggtatgatcggtgaggtcgtataccagcgagcagttatggcggtgggtagcttgaccataaatgaggagagatctgaagtcgtggacttctcagtgccctttgtcgagaccgggatatcagtgatggtttcccgcagtaacggaacagtctccccctccgccttcttggaaccctttagtgcgagcgtttgggtgatgatgttcgtgatgctgctcatcgtgagcgcgatcgccgtgttcgttttcgaatactttagccccgtcggttataatcgtaatctggccaaaggtaaagcacctcacggtccatcttttacgattgggaaggcaatttggcttttatggggtcttgtatttaacaactccgtgcctgtgcagaatcctaagggcaccacaagtaagataatggtcagtgtgtgggcattctttgcggtcatatttctggcttcatataccgcaaacctggccgcatttatgattcaggaagagtttgtagaccaggtgactgggctgagcgacaaaaagttccagcgtccccatgactacagccctccctttagattcggaacggtgcctaacggatcaacagagcggaacattcggaacaactatccatacatgcaccagtacatgacaaagtttaatcaaaagggggtggaggatgcgctcgtgtctcttaagactggtaaactggatgccttcatctacgatgcagctgtgctcaattacaaggctgggcgtgacgaaggttgtaagcttgttactatcgggagcggttatatattcgccaccactggatatggaatagcactccaaaagggcagtccttggaaaagacagatcgacctcgccctgctccagttcgtgggggacggagaaatggaagagttggagacactatggctaacaggtatctgtcataacgagaaaaatgaggtcatgtcttctcagcttgatattgacaacatggccggagtcttctatatgctcgcagctgctatggctctcagcttgattacatttatctgggaacatctattttattggaagttgcgcttctgctttactggggtgtgcagtgaccggccaggactgctcttctctattagtcgaggtatatacagctgtattcacggagtgcacatagaggaaaaaaaaaaaagccctgattttaacctcactggaagccagtccaatatgctgaaattgcttcgctctgccaagaacatttcctcaatgtctaatatgaactcctcacgaatggattcccctaagcgcgctgccgacttcattcagaggggcagtctcattatggatatggtctctgataagggcaatctgatgtatagcgacaaccgtagtttccagggtaaggagtctatcttcggcgacaatatgaacgaacttcagacattcgtggcaaataggcagaaagacaacttaaataattacgtttttcaaggtcagcaccctctgaccttgaatgagtccaaccctaatactgttgaagtcgccgtcagcacggagtcaaaggccaacagccgaccgagacaactctggaagaagtcggttgatagcatccgtcaggatagcctttcacagaacccagtgagtcagcgcgacgaggctacggccgagaaccgtacacatagtctcaaatccccgaggtacttgcccgaagagatggctcactcagacatcagcgaaacctccaaccgcgcaacatgccatcgggaacctgacaatagcaagaaccacaaaacgaaggataacttcaagcgcagcgttgccagcaaatatcctaaggactgttctgaagttgagagaacttacctgaaaactaaaagcagcagccccagagacaagatttatacaattgacggagaaaaagaacccggattccatttagatccccctcagttcgtagaaaatgtcaccctgccagagaatgtggattttcctgacccttatcaggatccgtcggagaacttcagaaagggtgatagtacactccccatgaaccgcaacccacttcataacgaagaggggctctctaacaacgatcaatataaactgtatagcaaacactttacactgaaagacaagggctctcctcactctgaaacgtccgaacgttaccgccagaactccacacactgcaggtcttgtctctctaatatgccaacttactctggtcattttacgatgcgatctcctttcaaatgtgatgcctgcttgaggatgggaaatttgtacgacattgacgaagaccagatgcttcaagaaaccggcatgaccaatgcttggttattaggagacgctccaagaacccttaccaatactcggtgccaccctcgtaggtag

SEQ ID NO: 224767 - DNA, 4455 bp, synthetic construct
  misc_feature 1..4455: note = Description of Artificial Sequence: Synthetic coding sequence
  source 1..4455: mol_type = other DNA
atgaaaccaagggcagaatgttgttctcccaaattttggctggtgctggcggttctggccgtgtccggaagcagggcaaggagccagaagagtcctcccagcattggtatagcagtcatactggttggcacaagcgacgaggtggcaatcaaagacgcccatgagaaagatgacttccaccatctgagcgtggtccctagggtagagctggtggccatgaacgaaaccgaccctaagagtatcattacaagaatctgtgacttgatgtctgataggaaaatccagggagtcgtgtttgccgacgacacagaccaagaggctatcgcgcaaattcttgatttcatatccgcccagactctgacgccaatactgggaattcacggcggatcaagtatgataatggccgacaaagacgagtcttctatgttttttcagttcggcccaagcattgaacagcaggcatccgtcatgctgaatataatggaggaatatgactggtatatattctccatcgtgaccacctatttcccgggataccaagattttgtgaacaaaattcggagtaccatcgaaaattccttcgttggatgggagctcgaggaggtgctcctgttggacatgagccttgacgacggggattctaaaatacagaatcagctcaagaaacttcagtctcctatcatactcctatattgcacaaaggaggaagcaacctatatatttgaagtggctaattcagtcgggcttaccggttacggctatacatggattgtgccatcactcgtcgccggagatactgacacggttcctgctgagttccctaccggactaattagcgtcagctatgatgagtgggattatggcctgcccgctagagtcagggacggtatcgctattatcacaacagcggcttctgatatgctttccgaacacagcttcataccggagccaaagagttcgtgttacaacacacatgaaaagaggatctatcaaagcaacatgctgaaccggtatctgattaatgttaccttcgagggcaggaacctcagtttcagcgaagacggctatcaaatgcacccaaaactggtcattattctgttaaataaagaacggaagtgggaaagagttggaaagtggaaagacaagtcccttcagatgaagtactatgtttggcctcgcatgtgtccagagactgaagaacaggaagacgatcacctgagtattgtgacactcgaagaggccccattcgtcatcgtggagtccgtcgatcccctttcaggtacatgcatgcggaatactgtcccctgtcagaagcgaatcgtaacggagaataagactgacgaagagccagggtatattaaaaaatgctgcaaaggcttctgcatcgacatacttaagaaaatctctaaatctgtcaaatttacttacgacctgtacctggtgacaaacggcaagcatggcaagaagataaacggaacttggaacgggatgattggcgaagttgttatgaaacgagcgtatatggccgtgggatctctcactatcaacgaggagagaagcgaggtcgtggattttagtgtgccttttattgagacgggcatcagtgtgatggttagtcgctccaacggtacagtttcaccatccgcttttctcgagccattcagtgctgacgtctgggtgatgatgtttgtaatgctgttaattgtcagtgcagttgccgtgtttgttttcgagtacttctcacccgtgggctataatagatgtctggccgacggcagggaacccggaggtccatcattcacaattggaaaggcaatctggctcctttgggggcttgtgttcaataatagcgtaccagtgcagaatcctaaaggcactacatctaagatcatggtctcagtctgggcgttcttcgcagttattttcctggcatcctacaccgctaatctggcagcctttatgatccaggaagaatatgtagatcaggtgtctggtttgagcgataagaaattccagcgccctaacgacttcagtcccccttttagatttgggaccgtccctaatggcagtaccgagagaaacattcgaaataattacgctgaaatgcacgcgtatatgggtaagtttaatcaacgcggagtcgacgatgccttgctgtccctgaagacaggaaaactcgatgctttcatctacgacgccgctgtgctgaattacatggcaggcagggacgagggctgcaaactggtgacaattgggtcggggaaagtttttgccagcactggctacggaatcgccattcaaaaggatagcggctggaaaagacaagtggatttggcaatactgcagctcttcggcgatggtgagatggaagaactcgaggcactgtggctcacaggaatctgtcataatgaaaaaaacgaagtgatgtcaagccagctggatatcgataatatggctggcgtcttctatatgctgggagcagctatggctctgtccttgattacattcatctgcgagcatttattttattggcagtttagacactgttttatgggcgtctgctccgggaaaccagggatggtgtttagtatctcacgcggaatatattcctgcatccacggcgtagctatcgaggagaggcagtctgtcatgaattcgcctacagctactatgaacaacactcactccaacatcctgcgcctgctacggaccgctaaaaatatggctaatctatccggggtgaatggaagccctcaaagcgccttggactttatccgcagagaaagctctgtctacgacatcagcgaacacaggcgcagcttcactcattcggattgtaagagttataataaccctccatgcgaggaaaaccttttttccgattatatatctgaggtggagagaacttttggcaatcttcagctgaaagatagcaatgtgtatcaggaccattaccaccaccaccaccgtcctcattctatcggttcagcgtcctcaatcgatggattatacgactgcgacaatcctccttttacaacacagtctagatcaatatcaaagaaaccgctagatatagggctgccctcttcgaagcattcacagctctccgacctctacggcaagttctcttttaaatctgatcgatatagtggacacgacgatcttatccgcagcgacgtgtctgatatttcgacccacaccgtcacatacgggaacatcgaagggaatgctgccaagcggcgaaagcagcagtacaaggacagcctcaagaagcggccagcatctgccaagtcccgcagagaatttgatgagattgagttagcgtatagacgacgacccccaaggagcccagatcacaaaaggtatttccgagacaaggaagggctcagggacttctacttggaccagtttcggacaaaagagaactctcctcactgggagcacgtcgacttaacagatatatacaaggagcgctctgatgatttcaagcgggattcggtgagcgggggtggcccttgcaccaacagatcccacataaaacacgggacaggggataaacacggcgtagtttccggcgtacctgccccttgggaaaagaacctgacaaatgtagaatgggaagaccgctcaggcggtaatttctgcaggagttgcccatctaagttacacaattactcaacgaccgtgaccggccagaactccggcaggcaagcctgtatccgttgcgaggcctgtaaaaaggccggaaacttgtacgacatcagtgaggataactctctgcaagagcttgaccagcccgcagctcctgtggctgtcacttctaatgccagtactactaagtacccccagagcccgactaacagcaaggcccagaagaaaaatcgcaataagctgcgcagacagcatagctacgacaccttcgtcgatttgcagaaggaagaggctgctctggccccacgaagcgttagcctcaaggacaaaggacggttcatggatggcagcccttatgcgcatatgtttgaaatgagcgcaggcgagagcacgttcgcaaacaataaatctagcgtgccaacagccggacatcatcatcataacaaccctggcggaggctacatgctttctaaatctctgtaccctgaccgggtgacccagaatccgtttataccaacctttggcgatgaccagtgtctcctccatggcagcaagagttactttttcaggcagccgacggtcgccggagctagcaaggctcggccagacttcagggctctcgtgaccaacaagccggttgtctccgccctgcacggcgctgtacctgccaggtttcagaaagatatctgtataggcaaccaatcgaacccctgcgttcctaataataagaaccccagggcatttaacggctcaagcaacggccatgtctacgaaaaactgagttctattgagagcgacgtgtag

SEQ ID NO: 224768 - DNA, 3702 bp, synthetic construct
  misc_feature 1..3702: note = Description of Artificial Sequence: Synthetic coding sequence
  source 1..3702: mol_type = other DNA
atggggggagccttaggcccagccttgttgcttaccagcctcttcggagcctgggcaggactggggcctggacagggcgagcaggggatgacagtggccgtagtgttttcctccagcggtcctccccaagctcagttccgggctcgcctgacacctcagtcgttcttagacctgcccctcgaaatccagcccctgacagtgggagtcaacacaactaatccaagctccctcctgacccaaatatgcggcctgctgggagccgctcatgtgcatgggatcgtatttgaggataacgtggatactgaagccgtggcacagatcctcgattttatctcgtctcaaactcatgtccccattttatctatttcaggaggctccgctgttgtgttgacaccgaaggagcctggatcggctttcctccagctcggcgtgagcctggagcagcagttacaggtactttttaaagtgctggaggagtatgactggtctgcatttgctgtgattacgtcactgcacccagggcatgccttgttcctcgaaggcgtccgggcagttgccgatgccagtcacgtttcatggcgcctgttagatgtagtgactctagaactcggcccagggggaccgcgagctcgaacgcagaggctgttgaggcagctcgatgctcccgtcttcgtggcttactgtagccgggaagaggctgaggtgttgttcgccgaagctgcccaagcaggactcgtcggcccaggccatgtgtggttggttcctaatctggcacttggttctactgatgcccctcccgcaacattccctgttgggcttatctcagtggtcacagagagttggagactcagcttgcggcagaaggtgcgtgacggtgtcgcaatattggctctcggagctcatagctattggcgacagcatgggaccctgccagctccggctggcgattgcagagtgcatccgggtcctgtgtcaccagcgagggaggccttctatcgccatctgctgaacgtcacctgggagggtcgggacttttctttcagccccggaggctacctggtccagcccaccatggtggtgatcgcccttaatcgtcaccgcctctgggaaatggtgggtcgatgggagcacggggtgttatacatgaaatatcccgtctggcctaggtattcagccagcctacagcctgtcgtcgacagccgccatctcacggtcgcgacattagaagaaaggccgtttgtcatcgttgagtctccagacccgggaaccggcggttgcgtgccaaacactgtgccatgtcgcagacagtctaatcacacgttctcgtcaggggacgtcgctccctacacaaaactttgctgcaaggggttctgtattgacatactcaaaaagctggcccgagtcgtgaaattttcatacgacctgtaccttgtaactaacggtaagcacggcaagagagtgagaggggtttggaacggaatgattggcgaggtgtattataaacgggctgacatggccattggaagcttgactattaatgaagaacggtctgaaattgtagacttcagcgtccctttcgtcgaaactgggatatccgtcatggtggccaggtctaatgggacagtcagtccttcagcattcttagaaccatactctcctgccgtttgggtaatgatgttcgtgatgtgtctgaccgtggtcgctataacggtgtttatgttcgagtacttttccccggtgtcttataaccagaatctcacaaggggcaaaaagtcggggggaccggcatttactatagggaagagcgtatggctgttgtgggcccttgtgttcaataattcggtgcccatcgagaatcctaggggcaccacatctaaaattatggtgctggtctgggctttttttgcggtgatctttctggccagctataccgcaaaccttgcagcttttatgatccaagaacaatacattgatacagtgtcagggttgtctgacaagaagttccaaaggccccaggaccagtaccccccatttcggtttggcaccgtaccaaatggcagtactgagcggaacattaggtctaattatcgagatatgcacacacatatggtgaagttcaaccagcggtcggtggaagacgccttgacttccttgaaaatgggaaaactggatgccttcatttatgatgctgcagtcctaaactatatggctggtaaagacgaaggctgcaagttagtaaccattggctctggtaaggtcttcgccacaactggatatggcatcgcaatgcagaaagactctcactggaagagggccatcgaccttgcccttctgcagttcctaggtgatggtgaaactcagaagttagagaccgtctggctaagcggcatctgccaaaatgagaagaatgaggtcatgtcctccaagttggacattgataatatggctggagtgttctacatgttgctagtagctatgggcctggcgctcctggtgtttgcgtgggagcatcttgtgtattggaagctgcgccacagcgttccgaatagcagccagctggacttcttgctggcttttagccgtggaatttactcatgcttcagcggcgttcagtccctggcaagcccaccccgacaggcttcgcccgacctcactgcatcaagcgcccaggctagcgtgctgaaaatgttacaggctgcacgggatatggtgaccaccgccggagtgtcatcctcactcgacagggccactcgtacgattgagaattggggaggagggaggcgagcccctccgcctagcccatgtccgacgccgaggagcgggcctagcccgtgtctgccaacccctgatcctccgccagaaccttcacctactggctggggtccacccgacggaggcagggcagccctcgtgcgccgtgccccacagcctcctggtaggcctcctacacctggccctcctctatccgacgtgtcacgcgtgtcccggagacccgcttgggaagccaggtggcctgtgagaaccggccattgtggccgacatttgagtgcctccgagagacctttgtctcccgcaaggtgtcattattcatcttttccccgagccgacaggagtgggcgtccattcttgccactgtttccagagctggaagatctgccactgctcggccctgagcagcttgccaggcgggaggccctgctgcacgctgcctgggccaggggttctcggccacgccacgcttctctgccatcaagcgtcgcagaggcctttgccagaccctccagccttcccgctggctgtacgggtcctgcatgtgcgagaccggatgggcacagcgcatgcaggcgtctagctcaggcacaaagtatgtgcctgcctatctacagggaggcgtgccaagaaggagagcaggccggagcccctgcctggcagcaccggcagcatgtttgtctgcacgctcacgcacatctgcctttctgttggggggcagtatgtccccacctcccaccgtgcgcctcccatgggtcttggctatccggagcctggggaccattgggacatcgcggacgcacgctgggcctgggcacgggttatcgcgactccggcggactagatgagatttcccgggtggcaagaggaacgcagggatttccaggtccatgtacttggcggagaatcagttcactcgagagtgaggtgtag

SEQ ID NO: 224769 - DNA, 2724 bp, synthetic construct
  misc_feature 1..2724: note = Description of Artificial Sequence: Synthetic coding sequence
  source 1..2724: mol_type = other DNA
agaggtcagggcggagatacccgctccaaggggacccgccagcccgagccacctggtgcatcgcgagacccggctagaagttgttgggaccctccagttgacatggggggagcactgggacctgccttgctcctcacaagcttatttggagcttgggctgggttaggtcctggacagggggaacaaggcatgactgtcgcagtggtattttctagcagcggcccaccccaggcccagttcagagctcgcttaaccccccagtcttttctggacctgcccctcgaaatccaaccgttgactgtaggcgtgaacaccacaaacccctcctccctgctcacccagatttgtggactcttgggagctgcacacgtgcacggcatcgtgtttgaggacaacgtagacactgaggctgttgcccaaatactcgatttcatttcgtcccagactcacgtccccatcctgagcattagtggaggtagcgcagttgtgctcacaccgaaggaaccaggtagcgctttcttgcagctgggtgtctctctcgagcaacagctgcaggtgttgtttaaagtgctggaggaatacgattggtctgcatttgccgttattacctccttgcatccgggacatgccctgttcctggaaggtgtcagggctgtggcggacgcatctcatgtcagctggcggctgctggacgtcgtgactctcgagttgggccctggaggcccacgcgctcgtacccagcgtcttctgaggcagcttgatgccccagtgttcgtcgcctattgcagccgcgaggaagccgaggtgctgtttgcggaagctgcccaggcaggcttggtgggcccaggtcacgtgtggcttgtgccaaatttggcattgggatccaccgacgcccctcccgcaaccttccccgttggactgatttccgtcgtcactgagtcctggcggcttagtcttcgacaaaaagtgagagacggagttgcaatcttagcgttgggtgcccatagttactggcggcagcacggaacgctgccagccccagcaggcgactgcagagtccatccaggcccagtctctcccgcaagggaggcgttctacaggcatctgctcaacgtgacgtgggagggcagggacttttctttctcacccggaggatacctggtacagcctactatggtcgtgattgcactgaaccgccatcgtctgtgggaaatggtgggcagatgggaacatggagtcctatacatgaagtaccccgtgtggccccgatattcagcatctctccagcctgtcgtggattcccggcacctgaccgtagccacactcgaagaaaggcctttcgtgatagtggaatctcccgacccgggaacaggcggttgtgtaccgaacacagtaccatgccgtcgccagtctaatcacacattcagctcgggcgacgtggcaccctacaccaagttgtgttgcaagggattttgcatcgatattctgaagaaactggcacgggtggtgaagtttagctatgacttatacctagtcacaaatggcaagcacggtaagcgggtgcgcggtgtttggaacggaatgataggcgaggtgtactacaaacgagcagacatggccatcgggagtctcactattaatgaagagaggtcggagattgtcgatttctctgtgcctttcgtggagactgggatatctgtcatggttgctcgtagtaacggaaccgtttctccctcagcattcctggagccctactcccccgctgtgtgggttatgatgtttgtgatgtgcttgacagtggtggctataactgtgtttatgtttgaatacttttctcccgtatcatacaaccagaacctcactagaggaaaaaagagcggtgggcctgcctttactataggaaagtcagtgtggttgctctgggctttggtatttaataatagcgtgccgatcgagaacccaagaggcacgactagtaagattatggtgttagtgtgggctttctttgcagtgatattcctcgcaagctacacagctaatctcgccgcattcatgatccaagagcagtatattgatacagtgtccgggctatcagacaaaaagttccagcggcctcaagaccagtacccccctttccgttttggcaccgtccctaatggctcaaccgagaggaacattagaagtaactacagagatatgcacacgcacatggtaaagttcaatcagcgtagcgttgaggatgcactgacatcactcaaaatgggcaaactggacgcatttatatacgatgctgcggttctgaactacatggccggaaaggacgaaggttgtaaactcgttaccatcggaagcggcaaggtgttcgccacaacaggatatggcattgcgatgcagaaggactctcattggaaaagagctatcgacctggccctgcttcagtttctaggggacggcgagactcaaaaactggaaacggtctggctgagcggcatttgtcagaacgagaagaatgaggtgatgtcctctaaattggatattgacaacatggccggtgtgttctacatgttattggtggcgatgggcctcgctctgctggtgtttgcctgggaacacctggtctattggaaactgcgccatagtgtgcccaatagctcccaattagacttccttctggccttctcacgggtgggggcacatccctctccccaccggcctaagttctag

SEQ ID NO: 224770 - DNA, 4011 bp, synthetic construct
  misc_feature 1..4011: note = Description of Artificial Sequence: Synthetic coding sequence
  source 1..4011: mol_type = other DNA
atgaggggggcagggggacccaggggtccgcgagggccagcgaagatgctgctcctcctcgcccttgcttgtgcctctcccttccccgaggaggcacctggtcccggtggtgccggaggtcctggagggggtctaggcggtgcacgcccactgaatgtggccctagtcttctcagggccagcttacgcagccgaagctgccagattggggccagccgtcgcggcagccgtcaggtcccccggactcgacgtgcgaccagtggcactggtgcttaacgggtcagacccaaggtccctcgtgctgcagctgtgcgatctgctgagcggcctacgcgtgcacggagtcgtgtttgaagatgactccagagcacctgcagtggccccaattctggacttcctatcggctcagacatcacttcctattgtcgcagttcacggcggagccgcactcgtactgacgccaaaggaaaagggatcgacattcctgcagctgggctcgtctactgagcagcagctccaggtgatcttcgaggttttagaagagtacgactggacctcctttgtagccgtgaccactcgagcgccaggtcacagagccttcttgagctacattgaggtgctgaccgatggctctctcgtgggctgggagcacagaggcgcattgaccctcgacccgggagcaggagaagctgtcctctccgctcagctgagatccgtctcagcccagatcaggctcctgttctgtgccagagaagaggccgaaccagttttccgcgctgcggaagaagccggactaactggctctggatacgtctggtttatggtgggtcctcagctagcaggaggcggtggaagtggcgctccgggtgagcccccactgctccccggtggcgcaccgcttcctgccggtctctttgccgtgcgctccgctgggtggcgcgatgacttggccaggcgggttgctgcaggggtggctgtagtggctaggggcgcacaagcactgctacgagactacggattccttcctgagctggggcatgactgccgggctcaaaacagaacccacaggggcgaaagcctgcaccgctactttatgaatattacatgggataacagggactatagctttaacgaggatgggttcctcgtgaacccttctctggtcgtaatttcactcactcgggatcgaacatgggaggttgttggctcttgggagcagcaaaccctccgcttgaaataccccctatggtctcggtatggccgattccttcagccagttgacgacacccagcatctaaccgtagcgactcttgaggaacgcccatttgttatcgtggaacccgcagatcccataagtggtacctgtatccgggactctgtgccttgccggtcgcagctgaatcggactcacagcccccctccggacgcccctagacccgagaaacgctgctgtaagggattctgcatcgatatcctcaaaaggctagcccacacaattggcttctcttatgacctttacctagtgaccaacggcaaacacggcaaaaaaatagacggcgtctggaatggaatgataggggaggtcttctaccagcgggcagacatggcgatcggctcactgactattaatgaggaacgctccgagatcgtggatttctctgtgccatttgtggaaactgggatatctgttatggtggccagaagcaacggaacggtgtcccccagtgcattcctcgagccatattcccctgccgtgtgggtcatgatgttcgtgatgtgcctgaccgtcgtagccgttacagtgtttattttcgaatacctgtcccctgtaggttataaccggagcttagccacaggcaagcggccaggcggatctacgttcacaatcgggaagtccatctggttgctctgggcccttgtctttaataactccgttcccgttgagaatcctcgtggaaccacatcaaaaattatggtgctggtgtgggcttttttcgcagtgattttcctggccagctatacagccaacttagccgctttcatgatccaggaggagtatgtcgataccgtatcgggcctaagtgaccgaaaattccagagaccgcaagaacaatatcctccactgaagtttggtaccgtccctaacggtagtacagagaagaatataagaagcaactatcccgacatgcattcttacatggtgcgctacaatcagccaagagtggaagaagccctcactcagctgaaggccggtaagctggacgcttttatatatgatgctgctgtactcaattacatggcacgcaaggatgaagggtgcaagctggttaccatcggctcgggaaaggtcttcgcgacgactggctacggaattgcccttcataaaggcagcagatggaaacgcccaatagacctggccctgctgcagtttctgggtgacgatgagatcgagatgctggagaggctttggctgagtgggatttgccataacgataaaatagaggtgatgagcagtaagttggacatcgacaatatggctggcgttttttacatgctactcgtggcaatggggctgtccttactggtgttcgcatgggagcacctggtttattggagactccgacattgcttggggcctacacatcgcatggattttcttctcgctttcagccgcggtatgtacagctgctgctcggctgaagccgcaccgccaccggcaaagccaccacctccaccacagcccctgccctcacccgcttatcctgctcctaggcccgcaccaggccctgccccattcgtgccgcgtgaacgagcctcagtggaccggtggcgtcgaactaagggtgctggcccacctggaggggctgggctggccgacggcttccacagatattacgggcctatcgaaccccagggtttaggcctgggcctaggggaggcaagggccgctccgagaggtgccgcagggagacccctgagcccacctgccgcacagcctcctcagaagccacccccttcatatttcgctattgttcgggacaaagaaccagccgagcccccagctggtgcttttcccggtttcccatccccgccagctcctcctgcggcagccgcaaccgcagttggccctccgctttgccgcctggctttcgaggatgaaagccctcccgctcccgctcgatggcccaggagcgaccctgagtctcagcccctgctgggacccggagcaggcggagccggaggcaccggcggagccggtggaggcgctcctgcggcacctccaccctgccgcgctgcaccacccccttgtccatatctggaccttgaaccatcccctagtgacagtgaggactccgagagtttgggcggagcctctttaggcggactggaaccgtggtggtttgcggacttcccatacccttatgccgagcgactgggtcccccacccggtaggtactggtctgttgacaaattaggcggatggagggcgggatcatgggattacctgccacctcgctcaggtcccgctgcttggcactgtagacattgcgccagcctcgaactactgcctccacctcggcatttaagctgttctcatgacgggctcgacggcggatggtgggccccacccccacctccatgggctgccggtcctctgcctcgccgtagggcgagatgcggctgccctcgctcccatcctcaccgaccgagagcatctcatcgaacccccgctgccgctgctccccaccaccacaggcaccgcagggcggctggaggatgggatctgcctccccctgctccaactagtcgatcactggaagatttatcctcttgcccgagggctgcgccagctaggcgtttaactggaccatccaggcacgcacggaggtgtcctcacgctgcccattgggggcctcctttgcctactgcctcacacagaagacatcgcggaggggacctgggcactagacgagggtctgctcatttttcctcattggaaagtgaggtgtag

SEQ ID NO: 224771 - DNA, 1116 bp, synthetic construct
  misc_feature 1..1116: note = Description of Artificial Sequence: Synthetic coding sequence
  source 1..1116: mol_type = other DNA
atgagtcatgaaaagagtttcctagtgtccggcgacaactatcccccaccaaatccaggctatccaggagggccacaaccacccatgccaccctacgctcagcctccctacccaggcgcaccatatccacaaccccctttccagccctcaccttacggacagcctggctatcctcatggtccctcaccatacccacagggtggctacccccagggcccttaccctcagggaggctatccgcaaggaccctatcctcaagagggatatccacagggcccataccctcagggtggatatcctcaagggccttacccacagtcacccttccctcccaacccgtacggccagcctcaagtgtttccgggacaggaccctgacagcccccagcacgggaactaccaggaggaaggccctccctcgtattatgacaaccaagattttccagctaccaactgggatgacaagtcaatacggcaggcgtttatcagaaaggtgttccttgtgcttacacttcagctgtcagtgacactgtctaccgtcagcgtgtttaccttcgtcgcagaagtgaagggatttgtgcgcgaaaacgtttggacatattatgtaagctacgcagtgttcttcataagtcttatcgtgttgagttgctgcggcgattttcgccgaaagcatccctggaatctcgtagctctatcagtactgaccgcatctctttcgtatatggtgggtatgattgcatctttttacaacaccgaggccgttataatggccgttggaatcactaccgcagtctgttttaccgtggtcattttttccatgcaaactagatatgactttaccagttgcatgggcgtgctgcttgtgtcgatggttgtactttttatttttgcaatcttgtgcatattcattcgcaatcgcatcttggaaatcgtctatgcgagccttggtgctctgctctttacctgtttcctggccgtcgatacacagctgctgctcggcaacaagcagctgtccctgtctcccgaagagtatgtttttgccgctttgaatctgtacactgacatcatcaacatcttcctttacattctgaccattatagggcgagcgaaggagtag

SEQ ID NO: 224772 - DNA, 1116 bp, synthetic construct
  misc_feature 1..1116: note = Description of Artificial Sequence: Synthetic coding sequence
  source 1..1116: mol_type = other DNA
atgtctcacgaaaagagtttcctggtcagtggcgacaattatccaccgccaaatccaggctatcctgggggtccccaaccgcctatgcctccgtatgcacagcccccataccctggagcgccttaccctcaaccccctttccagccctcaccctacgggcagcctggatacccccacgggccttcaccctacccccagggtggttacccccagggcccatatccacagggagggtatccacagggaccttacccccaggagggctatccgcagggtccatatccccagggtggctacccccagggcccatatccacagagcccattccctcctaatccctatgggcagccgcaggtgtttccagggcaggatcctgacagtcctcaacacggaaattatcaggaggagggccctccatcttactacgacaaccaggacttccccgctacgaactgggacgataagtcgattcgtcaggccttcatcagaaaagtcttccttgttctgactctccagctgagcgtgactctcagcaccgtgtcagtttttacttttgtggctgaggtgaagggtttcgtgagagagaatgtttggacctactacgtttcgtatgccgtgttcttcattagtttaatcgttcttagttgttgcggcgactttcgcagaaaacatccctggaacctggtggctctatccgtgctgactgctagtctgtcatacatggtgggaatgatcgctagcttctacaacacggaagccgtcatcatggctgtgggaatcactaccgccgtctgtttcaccgttgttattttttcaatgcagacccggtatgacttcacttcttgtatgggcgtcttgctggtaagtatggtcgtactgttcatatttgcaattctctgcattttcatcaggaatcggatcttggagatagtctacgcttccctgggcgctcttctttttacgtgctttttagcagtcgatacacaattgttgttagggaataagcagctgtccctctcccccgaagaatacgtgtttgctgctttaaatctctacacagatatcattaatattttcctgtacatccttaccatcattggcagggccaaggaatag

SEQ ID NO: 224773 - DNA, 825 bp, synthetic construct
  misc_feature 1..825: note = Description of Artificial Sequence: Synthetic coding sequence
  source 1..825: mol_type = other DNA
atgtctcatgagaagagtttcttggtgagcggagacaattaccccccacctaaccctgggtatccaggcggaccacagccccctatgcctccatacgcacaacctccataccctggtgcaccatatccacaacccccattccaacccagtccgtacggacagccagggtatccgcacggcccatccccataccctcaaggcggatacccacagggcccttacccccagggcggttatccgcaggggccttatccacaggagggatacccccagggaccctatccgcaggggggttatccacaggggccttatccccagagccctttcccgccaaatccgtacggccaaccacaggtgtttcccggacaagatccagacagcccacagcacgggaattatcaggaagaaggccctccttcttactatgacaatcaagacttcccagctactaattgggatgataagtccatccggcaggcttttattagaaaggtgttcctggtcttgactctgcaactgtccgtgacattgtcaaccgtgagtgtgttcaccttcgtcgctgaggtcaagggctttgtgagagaaaacgtctggacttactatgtgagctatgccgtattctttatctctctgattgtactgtcctgctgcggggattttcggaggaagcacccttggaacctggtggctttgtcggtattgactgcaagtctgtcctacatggtcggcatgatcgcgagtttctacaacaccgaggccgtcattatggcggtggggatcaccaccgccgtctgcttcaccgtcgttatcttctccatgcagtag

SEQ ID NO: 224774 - DNA, 306 bp, synthetic construct
  misc_feature 1..306: note = Description of Artificial Sequence: Synthetic coding sequence
  source 1..306: mol_type = other DNA
atgtctcacgagaaatctttcctggtctcgggtgacaactaccctccgcctaaccccggatacccaggtggaccacagccacctatgcctccatatgcccagcccccttatccaggagccccttaccctcagccaccctttcagccgtccccttacggtcaacctggttaccctcacggaccatctccatatccacagggaggatatcctcaggggccttatcctcagggcggatatccccagggcccttatccccaagagggatatccccaggggccttacccgcagggagggtatccacaatag

SEQ ID NO: 224775 - DNA, 1059 bp, synthetic construct
  misc_feature 1..1059: note = Description of Artificial Sequence: Synthetic coding sequence
  source 1..1059: mol_type = other DNA
atgtcacacgaaaaaagctttcttgtgagtggagataattacccccctccatatccaggcgctccctacccacaacctccattccagcccagtccgtatgggcagcccggttatccgcacggtcccagcccttatccacaaggagggtacccgcaagggccttatccacagggcggataccctcagggcccatacccacaggaggggtaccctcaaggaccgtacccgcagggaggctacccccagggaccgtaccctcaaagcccatttcccccaaatccctatggacagccccaggtgttccccggacaggatccagacagtccccagcatgggaactaccaggaggaagggcctccttcttactatgacaatcaggacttcccagcgaccaactgggacgataagtcaatccgtcaggcgttcatccgcaaggttttcttagtgctgaccttacagttaagcgtcacactaagcactgtctccgtgtttacttttgtcgccgaggtcaagggctttgtccgcgagaacgtgtggacatactacgtgtcctacgccgtattttttatctccctcattgttcttagctgctgcggcgatttccgcaggaaacatccttggaatctggtggccctaagtgttctgacagcttcgttgtcctatatggttgggatgatcgcgtccttctacaataccgaagccgtcatcatggccgttggcatcacgacagcagtgtgcttcaccgtcgtgatcttttcaatgcagacgaggtatgactttaccagctgcatgggcgtgctgctggttagcatggtcgttctcttcattttcgcaattttgtgcattttcatccggaatcgcatcctcgagatagtctacgcctctctgggggcattgctcttcacgtgttttttggctgtggacacacagctgctgctgggaaacaaacagttgtcactatcgcccgaagaatatgtattcgccgctcttaacctgtatacagatatcatcaacatcttcctttatatactcacgatcataggcagggccaaagaatag

SEQ ID NO: 224776 - DNA, 3348 bp, synthetic construct
  misc_feature 1..3348: note = Description of Artificial Sequence: Synthetic coding sequence
  source 1..3348: mol_type = other DNA
atgagacgcctctcactctggtggctactctcgcgagtatgcctcctcctgccccctccttgtgcgctcgtgctggctggggttccttcctcctcttcccatccacaaccctgccaaatactgaaacggatcggacacgcagttcgcgtgggagcagtccacctccagccatggaccaccgcccctcgcgcagcctcccgtgcacccgatgattcccgggctggtgcacagagggacgaacctgaacccggtacccggagaagtcctgctccctccccaggggcaagatggcttgggtctacactacatggcagaggtcccccaggcagtaggaaacctggagaaggcgctcgggctgaagccctgtggccaagggacgccctgctgtttgccgtggataaccttaatcgagtggaggggctactgccttataacctgtctctggaggtcgtcatggccatcgaggctggactcggtgatctgcccctgctgcccttcagttccccttcgtcaccgtggtcgagtgatccatttagttttctgcagtcagtttgccacaccgtggtggtgcaaggcgtctctgcactccttgcgttcccacagagccagggagagatgatggaattggatcttgtaagtctcgtgctacatatccccgtgatttcaattgtcagacacgaattcccgagagagagccaaaatccattgcacctgcaattatctcttgaaaattccctaagctcagatgcagatgtgacagtgagtatactgacaatgaataattggtataacttcagcctgcttctttgtcaagaggactggaatattacagattttctgctactaactcagaacaattctaaattccacctggggtcgattattaatatcaccgccaacctgcccagtactcaagatctgttatcgttcctgcagatccagctggaaagcattaagaattccacgccgacggtcgttatgtttggatgtgacatggagagcataaggagaatttttgagatcactactcagtttggggtcatgccacccgagctgaggtgggtccttggagactcacaaaatgtcgaggagctgcggaccgagggcctgcccctggggctgattgctcatgggaagacgactcagagtgtatttgaacattacgtacaggatgccatggagttggtggctcgcgcagtcgccacggcgaccatgattcagcctgaattggcccttattccatcgacaatgaattgtatggaggtggaaactacaaacctgacctccggacagtatctgagccgcttcctcgccaacacaacctttagaggattgagcggctccatcagggtcaaaggcagcaccatcgtgtcttcggaaaataatttctttatctggaaccttcaacacgatcccatggggaaacccatgtggactagactgggctcctggcagggcggaaagatcgtgatggattacggaatctggcctgaacaggcgcaacggcacaaaacccacttccagcatccttccaaattacatttgcgcgtggtaactctcattgagcaccccttcgttttcactagagaggtagacgacgaggggttgtgtcctgctggccagttgtgcctggatccaatgaccaacgactccagcacactcgattcactcttcagctccctgcattcgagcaatgacaccgtaccaattaagttcaaaaagtgttgctacgggtactgcattgaccttctggagaagatagccgaggacatgaacttcgattttgatctgtacatcgtcggggacggcaaatatggcgcatggaaaaatgggcactggacaggcctggtgggggatctgcttaggggaactgcccacatggcagttacgagtttctctatcaacaccgcccgatctcaagttattgattttaccagtccctttttttccacttcactcggaattcttgtgcgcacacgcgacaccgccgcacctattggagcattcatgtggcctctgcattggaccatgtggttagggatcttcgtggccctccatattaccgccgtgttcctgacgttgtatgaatggaaatcaccattcggtctgacacctaaagggaggaaccgcagcaaggtgtttagcttcagcagtgccctgaacatttgttacgctctgctattcggcagaacagttgcaatcaagcctccaaaatgctggaccggtcggttccttatgaacttatgggctattttttgtatgttttgtctgagcacatataccgcaaatttagctgctgtgatggtgggagagaagatctacgaagagctgtccggcattcatgatcctaagctgcatcacccctcgcagggatttaggttcgggacagtgagggagtcgtcagctgaagactatgtgcgtcagtcttttccggagatgcacgagtacatgagaaggtacaatgtgcccgctacccctgacggcgtcgagtatctaaagaacgacccagagaaactagatgcatttatcatggataaggcacttctggattacgaagtttctatcgacgcagattgtaagctacttacagtgggcaagcccttcgcaatcgagggatatgggatcgggctccctcccaactccccactcaccgccaatatctctgagcttataagccagtacaaaagccatggattcatggacatgctccacgataagtggtatcgggtcgtaccttgcggtaaacgcagcttcgctgtgaccgaaaccctgcagatgggtatcaaacacttctccggcctattcgttctgttatgtatcggttttggactgtccatcctgactactatcggcgagcacatcgtgtacaggctgctactacccaggattaagaacaagagcaagctgcagtattggctccacacctcccagcggctgcacagagccattaacaccagctttattgaagagaagcagcaacactttaagaccaaacgagtggaaaagcgaagcaatgttggccctcgacagcttactgtatggaacacaagcaacctgtcccatgacaacagaagaaagtacattttcagcgacgaggagggacaaaaccaactgggcattagaattcatcaggacatcccacttccccctaggcgtcgagaactgcctgcccttcgcaccacaaacggtaaggcagactccctgaatgtatctcgcaacagtgtgatgcaggaactctccgaattggagaaacagattcaggtaattcggcaggagttgcagctggcagtgagcaggaagacagagcttgaagaataccagcgcacttcccgaacatgcgagtcttag

SEQ ID NO: 224777 - DNA, 3585 bp, synthetic construct
  misc_feature 1..3585: note = Description of Artificial Sequence: Synthetic coding sequence
  source 1..3585: mol_type = other DNA
atggtgggcttattgctcttcttctttcctgcaatattcctggaggtaagcctgctgccccgtagtcctggccgtaaggtgctacttgctggcgcatcaagccaacgaagcgtggccaggatggacggcgacgtgatcatcggggctcttttctctgttcaccaccagcccccagcagagaaagtgcccgagaggaaatgcggggagatcagagagcagtacggcatacaacgagtggaagcgatgttccacaccttggataaaatcaacgcagatccagtgttacttccaaatattaccttaggctccgagattcgtgattcgtgctggcattcctccgtcgcattagagcagtccatagaatttattcgggactctcttatctcgatcagagatgagaaggacgggatcaataggtgcctgcctgatggccagagtctgcccccaggcagaaccaaaaaaccgatcgcgggagtcattgggcctggaagttcatctgttgccatccaggttcaaaatcttttgcaactgttcgatattccccaaattgcttactctgcaacatccatcgacctgtcagacaaaactctttataagtatttccttcgagtggtgccttccgacacattgcaggcaagggcgatgttggacatcgtgaaaagatataactggacatatgtctctgccgtgcataccgaaggtaactacggtgaaagtggaatggacgcattcaaagagttagcggcacaggaaggattgtgtatagctcactccgacaagatctacagcaatgccggagagaagtctttcgatcggctgctgcgcaagttgagagagcggctgccaaaggctcgagtagtggtttgtttttgtgaaggcatgacagtgagaggactgctcagtgctatgcgcaggctgggggttgtcggagagttttccctgattggcagtgatggctgggccgatagagatgaagtaatcgaagggtatgaggtggaggcaaacggaggcatcacaataaagctacagagccccgaggtgcgctcatttgacgattacttcctgaaactaaggctcgacactaatactagaaatccctggttccccgagttctggcagcaccgctttcagtgcagactgccaggtcacctgctggaaaaccctaacttcaaaagaatctgcactggaaacgagtcactggaggaaaattacgtacaggatagcaagatggggttcgtcatcaacgctatatacgccatggctcacgggctgcaaaatatgcatcatgcactctgtccaggccatgtgggtttgtgcgacgcaatgaaacccatcgacggctctaagctcctggattttctcattaagtcttcttttataggggtgtcgggcgaggaggtctggtttgacgagaaaggcgacgctcccggtaggtacgatatcatgaacctgcaatacacagaggccaaccgttatgactacgtgcatgtgggaacctggcacgagggtgtgctgaatatcgatgattataagatccagatgaataaatcgggagtcgttcgttcagtctgtagtgaaccctgcttgaaaggacagattaaagtcattaggaagggagaagtctcatgctgttggatctgcaccgcctgcaaggagaacgagtatgtacaggacgagttcacatgcaaagcctgtgacctcggctggtggcccaacgctgatctgacaggctgtgaaccaattccggtaaggtacctggaatggagtaacatcgagtcaattatcgcgatcgcgttctcatgcttggggattctggtgactctgttcgtcactctgatcttcgtgctttaccgggacacaccggtagtaaaatcctccagccgggaactttgctatataattttggctggcatattccttggatacgtctgtcccttcacgctgatcgcgaaaccgacaacaaccagctgctatctgcagagactgctggtaggcctgagttccgccatgtgttactccgcactggtgacaaagactaaccggattgctcgtatcctggctgggtccaagaaaaaaatttgcaccagaaagcctcgcttcatgtccgcctgggcccaagtgatcatcgcaagtatcctgatcagtgtccagttgactctggtcgtgactctcattattatggaaccacccatgcccattctctcctatcccagcataaaggaggtgtacctcatctgtaacactagcaatctaggagtggtggctccactgggttataatggcctgctgattatgtcctgtacgtactatgccttcaaaactcgaaacgtcccggcaaacttcaacgaggccaaatatattgcctttaccatgtacaccacttgcattatttggttggcctttgtccctatctacttcggatctaactataagatcattacaacatgttttgctgtctcactatcagtgactgtggcactgggctgcatgttcacacccaaaatgtatatcataattgccaagcctgagagaaacgtaagatccgcttttactacttcagatgtcgttcgcatgcatgtaggcgatgggaaattgccctgccgctccaacacatttctgaacatcttccgacgtaagaaagctggagccggtaatgccaattcaaacgggaagagtgtcagctggagcgagcctggtggcggacaggtgcctaaagggcagcacatgtggcatcgtctgtccgtccacgtgaagacaaacgagacagcttgtaatcaaaccgctgtcatcaaacccctgactaagtcttatcaaggttcaggaaaatccctcactttttccgatacttctaccaagacactttataatgtcgaggaagaggaggacgcacagcctatcaggttctctccacccggatcccctagtatggttgtacaccgccgtgtcccctcggccgcaaccactccaccactgcccagccacctcaccgccgaggagacacccttgttcttagcagaacccgctcttccgaagggactgccaccccctcttcaacagcaacaacaacctccaccacagcagaagtcccttatggaccaactccagggagtcgtctctaacttttccacagcgatacctgatttccatgccgtccttgcgggacccggtgggcctggcaatggtctcaggagtctctatccgccacctcctcccccacagcacctacaaatgttaccgctccagctgagtacctttggggaagagctagtttctccccctgctgatgacgatgatgatagcgaacggtttaaactgttacaagaatacgtttacgagcacgagagagaggggaacaccgaagaggacgagctagaggaggaagaagaggacttacaagccgcaagcaagcttacgcctgacgattctcccgctctgacgccaccgtctccgtttcgtgacagcgtagcctcgggaagctccgtgccaagtagccctgtgagcgagtccgtcttgtgcacccccccaaatgtttcttatgccagcgtaattcttcgcgattacaagcagagttcctccaccctgtag

SEQ ID NO: 224778 - DNA, 3585 bp, synthetic construct
  misc_feature 1..3585: note = Description of Artificial Sequence: Synthetic coding sequence
  source 1..3585: mol_type = other DNA
atggtcggcctcctcttgtttttcttcccggcaatcttcctggaagtgagtctgttgccaagatccccaggcaggaaagtcctcctcgctggcgcttcgtcccagcgctcagtggcacgcatggacggggacgttattatcggtgccctattcagcgttcatcatcagccccctgcggaaaaggtgccagagaggaaatgcggagaaatcagagaacagtacggaatccaacgagttgaagctatgttccataccctcgataaaattaatgctgatcccgttctcctccccaacatcacactgggcagtgagattagagactcatgttggcactcttcagtggcactcgagcagtccatagagtttatacgggacagccttatcagtatccgagatgagaaggacggcattaataggtgcctgcctgatggccagagcttgccccctggccgtacaaagaagcccatcgcaggcgtgatcggacctggaagttctagcgttgctatccaggtgcaaaatcttcttcagctgtttgacatcccccaaatcgcctactcagcaacaagtatagatctctcagacaagacactctacaagtacttccttcgtgtcgtgccctcggatacactgcaggcccgtgcgatgttggatattgtaaaaagatataactggacctacgtatccgccgtgcataccgaaggcaactacggagagtctggaatggacgcgtttaaggagttagcagcacaggagggtttgtgtatcgcccactccgacaagatttactccaatgcgggtgaaaaaagcttcgatcggctactgagaaaactgagagaacggctgccaaaggccagggtggttgtatgcttctgtgaaggcatgaccgtccgcggactgctgagtgctatgaggcggttaggagtcgttggtgagttttcattgataggttctgatggatgggccgaccgcgacgaagtgatcgagggatatgaagttgaggctaatggtggcattaccatcaaactccagtctcctgaggtgaggagtttcgacgattattttttgaagctccgattggacaccaacacaaggaacccatggtttcccgaattttggcagcaccgattccaatgccgcctgccgggtcacttgctggaaaaccccaactttaagagaatttgtaccggaaacgagtctttggaggagaattatgtgcaagatagtaagatgggattcgtcatcaatgccatttacgctatggcccacggacttcagaatatgcatcacgccttatgccccggtcatgtgggactgtgcgatgctatgaaacccatcgacggaagcaaactgcttgactttctcatcaagagttcattcattggagtctccggcgaagaagtttggttcgatgaaaaaggggacgccccaggaagatacgacatcatgaacctgcagtacaccgaagccaataggtacgactacgtgcacgtcggcacctggcacgagggtgtgctgaacatcgatgactataagattcagatgaataaatcgggggtggttcgttccgtgtgttccgagccctgcctgaaaggtcaaattaaggttatacggaagggcgaagtctcctgctgctggatctgcacagcttgtaaggaaaacgagtacgtccaggatgaatttacgtgcaaagcttgcgatctcggttggtggccgaacgccgacctcacaggctgtgaaccgatccccgtccgctatcttgagtggtccaacatcgaatccatcatagccattgctttctcctgtcttggtatattagtcaccttgttcgtgactctcatttttgtcctctatagggacacgcccgtcgtgaagtcctcctcgagggagctgtgttacataatactggccggtatctttctcgggtatgtttgcccattcacacttatcgcaaagccaactacaacaagttgctatctccagcgcctccttgtggggctgtcatcagcgatgtgctattcggccctcgtcactaagacaaatcggattgcacgcattctcgctgggtcgaagaaaaagatttgtacccgaaaaccaagatttatgtcagcctgggctcaggtcataatagcctctatccttatcagcgtccagctgacacttgtggtgacactgatcatcatggagccacctatgcccattttgagctatccctccattaaagaagtgtacctgatctgcaataccagcaatcttggtgtggtcgcccctctgggctacaacggtcttctaatcatgtcttgtacatattatgcgtttaaaacccgcaatgtgcccgctaactttaacgaagctaagtacatcgctttcacaatgtacaccacttgcatcatctggcttgctttcgtccctatttatttcgggagcaattacaaaattatcaccacatgcttcgctgtaagcttatcagtgacagtggctttaggatgcatgttcacccctaagatgtatattatcatcgccaagccagagcggaacgttaggtcagcgttcactacttcagacgtagttaggatgcacgtcggcgatggtaagctgccttgccggagcaataccttcctaaatatcttcagacgtaaaaaggctggggctgggaacgcaaactccaacggaaagtctgtctcttggtcagagccagggggtggacaggtgccaaagggccaacacatgtggcatcgcctctcagtacatgtgaagaccaacgaaaccgcttgcaatcagaccgccgtcatcaaacccttaaccaaatcttaccaggggagtggtaaatccctgactttttcagatacgtcaacaaagacactgtacaacgttgaggaagaggaggacgctcagccaatccgctttagtccacctggctcaccatcgatggttgtgcaccgtcgcgtcccaagtgctgccacaaccccgccactgccatcccacttaaccgctgaggagaccccgctcttccttgccgaacctgctttgccaaagggattgcccccaccactccaacaacagcagcaacctccaccccagcagaagagtctgatggatcagctgcagggcgtagtgtctaacttctccaccgctattcctgacttccacgcagtcctggctggcccaggagggccaggtaatggccttagatctttgtatccacccccacccccacctcagcatctgcagatgctacctctgcagctgtccacgttcggagaagagcttgtctcccctcctgctgacgacgacgacgattcagagcgcttcaagctgttgcaggaatatgtttacgaacacgagagagagggcaacactgaggaagacgagttagaggaggaggaggaagaccttcaggctgccagtaagttaacacctgatgactcaccggcactcactccgccatcacctttccgcgattcagtggcctcaggctcaagcgttccttcgtcccccgtctcggagtctgtgttgtgtacaccacccaatgtaagctacgccagcgtaattttgcgagactacaagcaatcaagctccacgctatag

SEQ ID NO: 224779 - DNA, 2721 bp, synthetic construct
  misc_feature 1..2721: note = Description of Artificial Sequence: Synthetic coding sequence
  source 1..2721: mol_type = other DNA
atggttggtttgctgctgttttttttcccagccatctttttggaagtctcactgctgccacggtcacccggaaggaaagttcttttggccggagctagtagccagcgctccgtcgcgaggatggatggcgacgttataatcggcgctctgttttccgtacaccaccagcccccagccgagaaagtacctgaaaggaagtgcggtgaaatccgtgagcaatatggaatacaaagggtcgaggccatgttccatacccttgacaagataaatgcagaccctgtattgctacccaatattaccctgggctccgagattagggactcatgttggcactcctccgtagctctggagcagtccatagagttcattagagacagtctgatctctattcgggatgagaaggacgggataaatcggtgtttaccggatggacagagcctgcctcctggcaggacgaagaaaccaattgcaggagtgataggcccaggtagcagcagcgtggctattcaggttcagaacctgctgcagttgtttgacatcccacaaatagcttacagtgctacttccattgacttgagcgacaaaaccctgtacaaatattttctgcgggtcgtgccttcagatactttgcaggccagagccatgctggacattgtgaaaagatataattggacctatgtctccgctgtgcatacggaagggaactacggcgagtccggaatggatgcattcaaggaactagcagcacaagaaggactgtgcattgcccattcagacaagatctactctaatgccggtgagaagtctttcgacagattgttgcgaaagctcagggagagactgcccaaggcgagggtagtggtgtgcttctgcgaaggaatgactgtccgtggcctgttgagcgcgatgcgtcgcctcggcgtggtcggcgagtttagccttatcggcagtgatggctgggccgatagggatgaggtaatagaagggtatgaagtggaagccaacgggggaattactatcaagctgcaaagtcccgaggtgagatctttcgacgattatttcctgaagctgagactcgacacaaacactagaaacccgtggttccctgagttttggcagcacagatttcagtgtaggctacccggtcacctacttgagaaccctaattttaaaaggatttgtactggcaatgagtctctggaagagaattacgtacaagacagtaagatgggatttgtcatcaacgccatttacgcaatggcacacggtctgcagaacatgcatcatgctctttgtcccggacacgtgggcctgtgcgatgcaatgaaacctatcgatggctcaaaactgcttgactttctgattaaatcttccttcattggtgtctcgggcgaggaagtgtggttcgatgaaaaaggcgacgcccctggccgatatgatatcatgaacctgcagtatactgaggcgaatcgctatgattacgtacacgtgggtacatggcacgagggagtgctgaatatcgacgactacaagatacagatgaacaagtcaggggtagtgcgatctgtgtgcagcgagccatgtctcaagggccagatcaaagtgatacgaaaaggcgaggtgtcatgttgctggatttgcactgcgtgtaaggagaacgagtatgtgcaggatgaatttacttgtaaagcgtgtgacctcggttggtggcctaacgccgatctcacaggatgtgagcctattccggtcaggtaccttgagtggagcaatatcgagtctatcatagctatcgcattcagttgtctcggcatactcgtgacgttgtttgtaacactgatctttgttttgtatagagatacacctgttgtgaaatcgtcatcccgcgagttgtgctacatcattctggctggaatttttcttgggtacgtttgcccgtttaccctgatagccaagcccacaactacgagttgctatctccagaggttactggtgggactctcatccgccatgtgctactcggctctggtcaccaaaacaaataggattgccaggatcctggcgggatctaagaagaagatatgcaccaggaaaccaaggttcatgtcagcatgggcccaagtcattattgcatctattttaatcagtgtacaactgaccctggtggttaccctcatcattatggagccgcctatgcccatcctctcttatccatctattaaggaggtatacctcatctgcaacactagcaatcttggagtggtggccccactcggctataatggattgctgatcatgtcttgtacttactacgccttcaaaacacgcaacgtaccagcaaacttcaacgaggctaagtacattgcctttactatgtacaccacttgcattatttggctggcattcgtgccaatttatttcggctctaactataaaatcattacgacatgctttgcagtgagcctgtccgtcactgtagcgctggggtgtatgttcaccccaaagatgtatataataatcgctaagccagaacggaatgttaggagcgcttttaccactagcgacgtggtacggatgcacgttggcgacggaaagttgccttgcagaagtaatactttccttaacatctttcggcgtaaaaaagccggtgctggcaacgccaagaaaagacagcctgagttctcccccactagtcagtgtccaagcgcccatgtgcagctgtag

SEQ ID NO: 224780 - DNA, 2721 bp, synthetic construct
  misc_feature 1..2721: note = Description of Artificial Sequence: Synthetic coding sequence
  source 1..2721: mol_type = other DNA
atggtaggattgctgctttttttcttccccgctatctttctggaggtgtctctactccccagatctcctggacgtaaggtgctgctggcaggagctagctctcagcgatcagttgctcggatggacggcgatgtaatcatcggggcattattctctgtgcatcatcagccccctgccgagaaggttcccgagaggaagtgcggcgagattagagagcagtacgggatacagcgagtggaggcaatgttccacacattggacaagattaacgctgatccagtgctgctacccaacataactctcggttctgagatcagagactcttgttggcacagtagtgtggccctggagcagagcatcgagttcattagagattcacttattagcatccgtgatgaaaaggacggaattaaccgatgcctgccagatggccaaagtcttcccccaggcaggaccaaaaagcccatagccggagtgattgggcctgggagtagctcggtcgcaatacaagttcaaaacctgctgcagttgttcgacataccacagatagcatactccgctacatctatcgatctgtcagacaaaaccctctataagtacttcctcagggtggtacctagcgacaccttacaggccagggcgatgcttgacatcgttaagaggtataactggacttatgtgagcgcagtgcacacagagggcaactacggtgaatcaggcatggatgcttttaaagagttggcggctcaggagggtctgtgtatcgcccattcagataaaatctacagcaacgcaggcgaaaaaagctttgatagactattgcggaaactgcgcgagaggctccccaaagcgcgtgtagtcgtgtgtttttgtgaggggatgaccgttcgcggactgctgtccgctatgcgtaggctgggagtcgtaggcgagtttagtttgatcggttctgatgggtgggccgatcgtgacgaggtgatcgagggatacgaagtagaagctaacggcggaatcaccattaagctgcagtcgccagaggtgaggtcatttgatgattattttctgaagttacggctggacactaacacccggaacccttggttcccggaattctggcaacaccggttccagtgtaggctaccagggcatcttctggaaaatccaaacttcaaacggatctgcacaggtaacgagtcactagaagagaactacgtgcaggatagcaagatgggatttgtcatcaacgctatttacgcaatggcccacggcctgcagaatatgcatcacgcactctgcccgggtcatgttggactgtgcgatgcaatgaaaccaatcgacggatctaaattgctggatttcctgatcaagtcgtcttttattggtgtgagcggcgaggaggtctggttcgatgaaaaaggagacgcacccggacggtacgatatcatgaacctgcagtacacagaggctaatcggtacgattatgtacacgtgggaacctggcatgagggtgtactaaacatagatgactataagatccaaatgaacaaaagcggcgttgtgagatctgtgtgctcagagccatgtcttaaaggacagatcaaggtcattaggaaaggcgaggtcagctgttgttggatttgcactgcctgtaaagagaacgagtacgttcaagatgaatttacatgcaaggcctgcgatctcgggtggtggcctaacgccgatctgactgggtgcgagccaatcccagtgaggtatcttgaatggagcaacatcgagagtataatagctatcgcgttttcatgcctgggcattctggttacccttttcgtaacccttatcttcgtgctctaccgtgacacccctgtggtgaagagtagtagtcgcgagctgtgttacatcattcttgccggaatattcctgggatatgtctgccccttcaccttaattgctaagcccacgaccacttcctgctatttgcagaggctgctagtgggtctgtcttctgcgatgtgttacagcgcattagtgaccaaaacgaatcgtatagctcgtattctggccggttctaagaagaaaatctgcacacgcaaaccacggttcatgtccgcatgggcccaggttatcatcgcgagtatcctcatttccgtgcagttgacattggttgtgaccttgattatcatggaacccccaatgccaatcctcagctacccatctatcaaagaagtgtacctcatttgcaatacgagcaatcttggtgtggttgccccactgggctacaacgggcttttgatcatgtcctgtacctattacgctttcaaaacacgcaacgttcccgctaatttcaatgaggcaaagtatattgctttcacaatgtatactacctgcatcatctggctggcttttgtgcctatatatttcggcagtaactataagatcatcacaacatgctttgcagtgtccttgagcgtcaccgtcgctctcgggtgtatgttcacccccaagatgtacattatcatagctaagccggagagaaatgtccggagtgctttcaccacaagcgatgtcgtgaggatgcatgtgggagacgggaaattgccgtgtcgatcaaacacttttctgaacatctttagacggaagaaagcgggtgctggcaatgccaaaaagcgtcagcctgaattctcaccaacatctcagtgcccttctgcacacgtgcagctgtag

SEQ ID NO: 224781 - DNA, 2721 bp, synthetic construct
  misc_feature 1..2721: note = Description of Artificial Sequence: Synthetic coding sequence
  source 1..2721: mol_type = other DNA
atggttggcctcctgctgttcttttttccagctatttttttggaggtatctctgctccctcgctccccgggaaggaaggtcctgctcgctggagcatcctctcagcgctcggtggctcgcatggatggagacgttatcatcggagcacttttttccgtgcaccatcagccccctgcagagaaagtaccagaaaggaagtgcggagagatccgagagcagtacgggatccaacgggttgaggccatgtttcacacactggataaaattaatgcggatccagtcctgctgccaaacatcacactgggcagcgaaatccgagattcctgctggcattcctctgtggccctggaacaatctatcgaattcatcagggactccttaatcagcattagagacgagaaagacggaataaatcgttgtctcccagatggacagagtctgccccctggcagaaccaaaaagcccatcgccggtgtgattggcccaggttcatctagtgtggctatccaagtgcaaaaccttctgcaactgtttgatattccccagatcgcctactccgctacatcaattgacctctccgataaaactttatataagtattttttacgggttgttccgtcagacacacttcaagccagagccatgctggatatcgtgaagagatataactggacctacgtgagcgcagtccataccgagggcaactacggagagagcgggatggacgccttcaaagagctggccgcacaagaagggctgtgcattgcgcattctgataaaatatatagcaatgccggagaaaagtcattcgaccggctcctgaggaaactgcgtgaacggctacccaaagcaagagtggttgtatgcttctgtgagggaatgacggtgagaggattgctctctgccatgagacggcttggggtggtgggcgagttcagtctgatcggatctgacgggtgggcagaccgagacgaagtcatagaagggtatgaggttgaagcgaacggaggtatcacaatcaagttgcagagccctgaagttaggagcttcgatgattatttcctgaaactccgcttggatactaacaccaggaacccatggttccccgaattttggcaacacaggttccagtgtcggctccctggacacctgttggaaaatccaaattttaagagaatctgcaccggcaatgagtctctcgaggagaattacgtacaggattccaagatgggctttgtcattaacgcaatatacgctatggcgcacggactgcagaatatgcaccatgctttgtgccctggccacgtcggtttgtgcgacgccatgaagccaatagacggcagcaagctcctggactttctcatcaagagtagcttcatcggggtctccggagaggaggtgtggttcgatgagaagggcgacgcaccaggaaggtatgatatcatgaacttacagtacaccgaggcaaacagatacgattacgttcacgtggggacatggcatgagggcgtcttaaacattgacgattacaaaatacagatgaacaagtcaggagtggtgaggtccgtgtgctctgagccatgcttaaagggccagattaaggtgatacggaagggcgaagtaagctgctgttggatttgtaccgcttgtaaggaaaacgagtatgtgcaagatgagtttacatgcaaggcttgcgaccttggctggtggccaaacgccgacctcacaggctgtgagcccatccccgtgcggtacctggaatggagcaacatagaaagcattatagccattgccttttcttgcctcggcatcctcgttaccctgttcgtgacactgatcttcgtgctttatagggacaccccggtagtcaaatccagcagtcgggaactatgctatatcatactcgccggaatttttcttggctatgtgtgcccctttactctgattgctaaaccgaccaccacctcgtgttacctgcagcggttactggtcggtctctcatccgccatgtgttatagtgccctcgttacgaagaccaacagaattgccaggattctggccggatccaaaaaaaagatctgcacaaggaaacccaggtttatgagtgcttgggcgcaggtgattattgccagcatcctgattagcgtgcagctcactttagtcgtgaccctgattattatggaaccgccaatgcctatcctcagctatccaagtatcaaagaagtgtacttgatttgcaacaccagtaatctgggggtcgtggctcctctggggtacaatggcctgcttatcatgagttgtacgtactacgccttcaagacccgtaatgtccctgccaacttcaacgaagccaagtacattgcttttactatgtataccacatgtatcatttggcttgccttcgtaccaatttactttggatcaaattacaaaatcattactacttgctttgccgtcagcctttcagtcaccgttgcgctgggttgtatgttcacccccaagatgtacatcatcattgccaagcctgagcggaacgtgcgaagcgcattcaccacaagtgacgtggtgagaatgcacgtcggagatggcaagctgccatgtagaagtaacacattcttaaatattttccgccgtaagaaggcgggtgccggaaatgctaaaaagcggcagcctgaattctcaccaacctcacagtgtccgagtgcacacgtccagctgtag

SEQ ID NO: 224782 - DNA, 2619 bp, synthetic construct
  misc_feature 1..2619: note = Description of Artificial Sequence: Synthetic coding sequence
  source 1..2619: mol_type = other DNA
atgggatctctgctggcccttctagctctgttgctactttggggcgctgtggctgagggaccagcaaaaaaggtgctcactctcgagggggacctggtcttggggggactgtttccagtgcatcagaaaggcggacctgccgaagattgcggcccagtaaacgagcacaggggaattcagcgcctcgaggctatgttgtttgccttagaccgtattaatagggacccccatctcctgcctggcgttcgcctgggagcacatatactggatagctgttcaaaggacactcatgccctcgaacaggccctggatttcgttagagcttctctgtcacgaggcgctgatggcagcagacatatctgtccagatggatcgtacgccacccacggggacgctcctaccgccatcaccggggtcataggtgggtcgtactcagatgtatccattcaagtggcaaatctgctgaggctgtttcaaattcctcagatttcttacgcaagtaccagtgccaagctctctgataagtctaggtatgactactttgctcgcacagtcccacccgacttctttcaggccaaggcaatggccgagattctcaggttcttcaactggacatacgtgtcaaccgtggcttctgaaggcgattacggagagactggtattgaagcttttgagttggaagcaagagcgcgaaatatttgtgtggccacttctgagaaggtgggcagggccatgagcagggcagccttcgaaggagtggtgcgggctctccttcagaaaccctcagcccgagtagccgtcctcttcactaggtccgaggatgcacgagagttgctagctgcttcccagagacttaatgcgagcttcacctgggttgccagcgatgggtggggggctttggaatctgtggttgccggatctgaaggcgcagctgagggggcaataaccatagaacttgctagctatcctatcagtgatttcgcctcttactttcagagtttggatccctggaacaattccagaaacccatggtttcgcgagttttgggagcaacggtttagatgctcttttcgacagagggactgcgcagcacactccttacgagctgtgccattcgaacaggaaagcaaaatcatgtttgtagttaacgccgtgtatgcaatggcccatgccttgcacaacatgcacagggcactatgccctaataccacccggttgtgcgatgctatgcgcccagtgaacggcaggcggctgtacaaagactttgtgctgaacgttaagtttgatgccccttttcgccctgcagatacccataatgaggtgaggtttgaccgctttggcgacggaatcggaagatataacatttttacgtatctgcgggctgggtcagggagataccggtaccagaaagtaggatactgggcagaaggcctaaccttagacacctccctcatcccttgggcgtcgccaagtgccggaccgctgcccgcttctcggtgtagcgaaccatgcttgcagaacgaagtgaaatcagtacagccaggcgaagtctgttgctggttgtgcataccttgccagccatatgaatataggctggatgaattcacttgcgcagattgcgggctgggttactggcccaatgcttccctgacaggatgtttcgagctgcctcaagagtacatccggtggggagatgcatgggccgtggggccagtcactatcgcctgcctgggcgcactagcaactcttttcgtcttgggcgtgtttgtgagacacaatgccacgcctgttgtaaaggcaagcgggagggagctctgctacatcctccttggaggggtgttcctctgttattgtatgacattcatcttcatcgccaagccttcaactgccgtgtgcaccctgagaagactaggactgggcacagctttctccgtttgctattcagccttgttgacaaagactaatagaatcgcaaggatcttcgggggagctagggaaggagcacagcgccctaggtttataagtcctgcctcgcaggttgcaatttgtcttgccctgatctcaggccagctattgattgtggttgcctggcttgtggtggaggcccctggtacaggcaaggagacagccccagagaggagagaagtggtgactcttagatgtaatcaccgcgacgccagcatgctgggctctctggcttacaacgtcttgttaatcgcactgtgcactctctatgcttttaaaactcgcaagtgccccgagaattttaacgaagccaaatttataggcttcacaatgtacactacctgtatcatttggctggccttcctgccgatcttctacgtaactagttcagattatagggtgcaaactacaacgatgtgcgtatcggtgtccttgtcgggctccgtcgtgctgggctgtctcttcgcacctaaactacacatcatcctcttccagcctcagaagaacgtcgtatcacacagggcacccacatcaaggttcggaagtgcagccgctcgagccagtagtagcctgggtcaggggtccggatcccagttcgttcctacagtctgtaacggcagagaggtggttgacagcaccacaagctctctgtag

SEQ ID NO: 224783 - DNA, 213 bp, synthetic construct
  misc_feature 1..213: note = Description of Artificial Sequence: Synthetic coding sequence
  source 1..213: mol_type = other DNA
atggggtccctgttggcacttttggcactgctgctcttatggggtgctgttgctgagggtccagctaagaaggtcctcacccttgagggtgatctcgtcctggggggattatttcccgtccatcagaaaggtggccctgccgaggattgtgggcctgtgaacgagcataggggaattcagcggctggaggctatgttattcgcactggactag

SEQ ID NO: 224784 - DNA, 2640 bp, synthetic construct
  misc_feature 1..2640: note = Description of Artificial Sequence: Synthetic coding sequence
  source 1..2640: mol_type = other DNA
atgaagatgctgaccaggctgcaggttctcacgctggcattattctcgaaggggttcctgttaagtctcggcgatcacaatttcctgcgacgcgaaattaagattgagggcgatcttgtcttgggtggcctgttcccaatcaatgagaagggcaccggcaccgaagagtgtgggcgaattaacgaagaccgcggaatacaaaggttagaggcgatgctgtttgcgatcgatgagatcaataaggacgactacctgctgcccggagtaaaacttggcgttcacatcctggatacgtgttctagagacacttacgcgctggagcagagcttagagtttgttagagcctcgctgactaaggtagatgaggctgaatacatgtgcccagatggatcttacgccattcaggaaaacattcctttactgatcgctggtgtgataggaggctcctacagtagcgtcagtatccaggtcgcaaatctcctccgcctgtttcagatacctcagataagctatgcctccactagcgcaaaattaagcgataaatctcgctatgattattttgcaagaacggtgcccccagacttctaccaggcaaaagccatggccgagatccttcgattcttcaactggacatacgtcagtaccgtggcttccgagggcgactacggcgagaccggaattgaggcatttgagcaggaagctcgcctgcgaaacatatgcattgcaaccgccgaaaaggtgggcaggtctaacattcgcaagagttacgacagtgtaatcagggaattattgcagaagcccaacgcgagagtagtagtcctgtttatgaggtctgatgattcccgcgaactgattgccgctgcctcgagggccaatgcatcctttacctgggtggctagtgatggatggggggcacaagaaagcatcataaagggtagcgagcatgtggcatatggagcaataacgctggagctcgccagtcagccagtgcgccagtttgacagatactttcagagtctgaacccgtacaataatcaccgcaacccctggttcagggatttttgggagcaaaaattccagtgcagcttgcagaataaacgcaaccaccggagggtctgcgataagcatctggccatcgattccagcaattacgaacaagagtctaaaatcatgttcgtcgtgaatgccgtgtatgccatggcccatgccctgcacaaaatgcagcgcacgttgtgtcccaatacaacaaagctatgcgacgccatgaaaatactggacggaaagaaactgtataaagactacttgttgaagattaattttaccgcgccatttaacccaaacaaagacgcagacagtatcgtcaaattcgacacctttggggatggcatggggagatacaacgtattcaatttccagaacgtcggtggcaagtactcatacctgaaggtcgggcactgggcagaaacactgtctctggatgttaacagtatacattggagccggaacagcgtccctacttctcagtgtagtgacccctgcgcaccgaatgagatgaaaaatatgcagcccggagatgtgtgctgctggatttgcatcccatgcgaaccctacgaatacctggccgacgagtttacctgcatggactgtgggtctgggcaatggcccactgctgacctcacagggtgttatgacttgcctgaggattacatccggtgggaagacgcatgggccatcggacccgtgaccatcgcttgcctgggcttcatgtgtacctgcatggttgtgacagtgttcatcaaacacaataataccccgctcgtaaaggcctccggtagagagttgtgctacattctgttatttggggttgggttgagctattgcatgacttttttcttcatcgccaagccctccccagtcatctgcgccctgcgtagactgggactgggatcatcattcgctatttgctacagcgcactccttacaaagaccaactgcatagctagaatctttgacggggtgaaaaacggcgctcagcgtcctaagttcatctcaccttccagccaagtttttatctgtctgggcttaattctagtccaaatcgtgatggtgagtgtttggctcattctggaggctccgggtacacggaggtacacccttgcggagaagagggagacagtgatcctgaaatgtaacgttaaagacagcagtatgctgatctctttaacttatgatgtaatcttagttatactatgtaccgtgtatgcgttcaaaacccggaaatgccccgaaaactttaacgaggcaaagtttatagggtttaccatgtacacgacatgtatcatctggttagcctttctgccaattttctacgtgacgagcagcgattatagggtacagaccacgacaatgtgtatctctgtttccctctcaggttttgttgttctggggtgcctgttcgcacccaaagtgcacatcatactgtttcaacctcagaaaaacgtcgtcactcaccggctgcacctgaatagattttccgtgagtggaacaggaaccacgtactcccagagcagtgcaagcacctacgttcccactgtatgcaacggcagggaagtgttggattccaccacctcatctctgtag

SEQ ID NO: 224785 - DNA, 1608 bp, synthetic construct
  misc_feature 1..1608: note = Description of Artificial Sequence: Synthetic coding sequence
  source 1..1608: mol_type = other DNA
atgctgaccagactccaagtgctgacactcgccctgtttagcaagggatttcttttaagtctgggggaccataacttcctccggcgagaaattaagatagaaggtgacctcgtgcttggaggccttttccccatcaacgagaaggggactggaacagaagagtgcgggaggatcaatgaggatagggggatccagcgtctggaggctatgctgtttgctatagacgaaattaataaagacgattaccttcttccaggcgtgaaactcggtgtgcatattcttgacacttgttccagagatacatacgccctcgagcagtcgcttgagtttgtaagggccagtttaacaaaagtggatgaagcagagtatatgtgccctgatggatcatacgcaatacaggaaaatatcccattactgatagctggggtgattggaggctcctattcaagtgtttccattcaggtcgccaacttgttgaggctttttcaaatcccgcagatctcgtacgcatcaacttctgccaaactgtctgataagagtaggtatgattatttcgccaggaccgtgccacctgatttctaccaggcaaaggcgatggctgagatactaagattcttcaactggacctacgtctctactgtggcttctgaaggagactatggagaaactggaatagaagcctttgaacaggaggctaggttgagaaacatttgcatcgctaccgctgagaaggtgggaagaagcaacatccgaaagagttatgactcagttattagagagctgctgcaaaagcctaacgccagagtggtggttttattcatgcggtccgacgactccagagagctcattgccgctgcttcaagggcaaacgcttcattcacgtgggtggcctctgacggatggggggctcaggagtccatcattaagggctccgaacacgttgcttatggggctataaccttggagctggccagtcagccagtgcgacagttcgatcggtacttccagtcactcaacccatataacaaccacaggaatccgtggtttcgcgacttctgggagcagaaatttcagtgctccttgcagaataaaaggaatcatcgccgagtgtgcgacaagcatctcgccattgacagtagcaattacgaacaggaatccaagattatgttcgtggtgaacgctgtctacgccatggcacacgcgctccacaagatgcagaggactttgtgcccaaacaccaccaagttgtgcgacgctatgaagatcttggatggaaaaaagctttataaagattatctgttaaagattaatttcactggcgctgatgacaaccatgttcacctgtgccagccagagtggctgtgcggactcgggttattcgtttgtacccaggggagtcatcatcccgtttctacccccgaggagtgttgccatacacagacggcaccgcagcaggtgcagtgccagtggaactgggaccatatcctgtctgttctgtgtaagcacgtatgcgccaatggagtgcagtgggctggaagtcccagattgcaccatctaatctctgttatagtgaattgtagtagcgtgctggtcttcttggattgctag

SEQ ID NO: 224786 - DNA, 264 bp, synthetic construct
  misc_feature 1..264: note = Description of Artificial Sequence: Synthetic coding sequence
  source 1..264: mol_type = other DNA
atgaagatgttgactagactgcaagttcttactctggccctgttcagcaagggctttttgctcagcttgggagatcataatttcttaaggagggagataaagatcgaaggcgacttggttctggggggtctctttccgattaacgagaagggcactggtactgaagagtgcgggcgtattaatgaggaccgcggaattcaacgactcgaggctatgcttttcgccatagacgaaataaataaagatgactacctcctcccttag

SEQ ID NO: 224787 - DNA, 1614 bp, synthetic construct
  misc_feature 1..1614: note = Description of Artificial Sequence: Synthetic coding sequence
  source 1..1614: mol_type = other DNA
atgaagatgctgaccaggctccaggtcctcactttagcgctgttcagtaaaggctttttgctttctcttggtgatcacaattttctgcggagagaaatcaagatcgaaggtgatctggtcctggggggtcttttccccattaatgaaaaaggtacaggtacagaagagtgcggtcggataaatgaggaccgcggaatccagcgcctggaagccatgctgttcgcaattgatgagatcaataaagacgactacttactgcctggggtaaagttgggcgtgcacatcctagatacctgtagccgggatacctacgctctggagcagtcattggaatttgtgagggcgtcgctgactaaggtggatgaagcggaatacatgtgccccgacgggagttacgcaattcaagagaacattcccttgctcatcgccggagtgatcggaggctcttactcttccgtttccatccaagtggcgaacctgctgagactgtttcaaatcccacagatcagctacgcatcaaccagtgccaaattgtccgataagtctaggtacgactacttcgctcgcacagttccaccagatttttatcaggccaaggctatggctgagatactgcgcttcttcaactggacttatgtcagtacagtggccagcgagggtgactacggagagaccggcattgaggcttttgagcaggaggctaggctgcgtaatatctgtattgctaccgccgaaaaagtagggcgatccaacatccggaagtcctacgattccgtgattcgggagctgctgcagaagcctaatgccagagtggttgtgttattcatgcgctctgacgactccagagagcttatagctgctgcaagcagggctaatgcatccttcacttgggtagcatccgacggctggggggcacaagaatcaatcatcaaaggcagcgaacacgtggcatatggcgcaatcacactggagctggcctcgcagccggttcgtcagtttgaccgatactttcagtcattgaacccgtacaataaccacagaaacccctggttccgagatttctgggagcagaaatttcagtgttccttgcaaaataaaagaaaccaccggcgtgtgtgtgacaaacatctggcaatcgactcttcaaactacgagcaagagtcaaaaattatgtttgttgtgaacgccgtgtatgcaatggcccacgccttgcataaaatgcagaggacattgtgtccaaatactacaaaactctgcgacgcaatgaaaatcctagacggtaagaaactgtataaagactacctgttgaagattaattttacaggggctgatgacaatcacgtgcatctgtgtcagcctgaatggctgtgtgggttgggcctcttcgtctgtacccaaggctcccatcacccagtgtctactccggaggagtgttgtcacacccagacagccccacagcaagtacagtgccagtggaattgggaccacattctgtcggtgttgtgtaagcatgtatgtgccaatggggtgcaatgggcgggttccccgaggttgcatcatctcatctctgtgattgtcaactgtagttccgtccttgtgttcctcgattgctag

SEQ ID NO: 224788 - DNA, 246 bp, synthetic construct
  misc_feature 1..246: note = Description of Artificial Sequence: Synthetic coding sequence
  source 1..246: mol_type = other DNA
atgaaaatgctgactagactccaggttctcactttagctttattctctaagggctttctcctgagtctgggggaccataattttctgcgccgtgagatcaagatcgagggagacttagttctggggggtctgttccccattaatgagaaggggacggggacggaggagtgtggtagaatcaacgaagatagaggtattcagaggctcgaagcgatgcttttcgcaattgacgagataaacaaatag

SEQ ID NO: 224789 - DNA, 2256 bp, synthetic construct
  misc_feature 1..2256: note = Description of Artificial Sequence: Synthetic coding sequence
  source 1..2256: mol_type = other DNA
atgagccagtctcctggggcaggcagcccccctccgctgccaccaaggtctgcgccagtgccggctaggagctgcaggtgtgaagtcgcaaaccttctcaggctctttcaaatcccccagatctcatacgctagcacaagtgccaagctgtccgataagagcagatacgactactttgcaagaaccgttcccccagatttctatcaggccaaggctatggcagagatacttcgattctttaattggacttatgtctcaaccgtagcttcagaaggggattatggagagacagggattgaggctttcgagcaggaggcgagactccgcaatatttgcatcgcaactgctgagaaggtgggtcggagcaatatccgcaagtcttacgactcagtgattcgtgaattgctgcagaaacctaatgcgagggtggttgtgttatttatgaggtctgatgacagccgagaactgattgcagccgcaagtagggcgaatgcctctttcacgtgggttgctagcgacggatggggggctcaagagtcaataattaaggggtctgagcatgttgcttatggagctataaccctggagcttgcatcccagccggtgcgccagtttgatcgctatttccaaagcctgaatccctataacaatcatcgtaacccctggtttagagacttttgggagcaaaaatttcagtgctctctccagaataagaggaatcatcgccgagtgtgcgacaagcacctggccatcgatagcagtaactacgaacaggagagtaagataatgttcgtagttaacgcagtatatgctatggcccatgcattacataagatgcaaaggactctgtgccccaacactaccaaactgtgtgatgctatgaagattctcgatggaaagaaactttacaaggactacttgctcaagatcaactttactgctccttttaacccaaacaaggatgctgatagcattgtgaaattcgatacatttggcgatgggatgggcagatacaacgtgtttaattttcagaatgttggcggaaagtactcttatctcaaggtgggccattgggcagagactctctcactcgatgtgaattccatccattggagtcgaaatagtgttcccacatctcaatgcagtgacccctgtgctccaaacgaaatgaaaaacatgcagcccggagatgtgtgctgttggatctgtattccatgcgagccttacgagtacttagcggatgaattcacctgcatggactgtggctccggccagtggcccactgccgatctcacaggttgttacgacctgccggaagactatattcggtgggaagatgcatgggctattggcccagtaacgatcgcctgtctgggcttcatgtgcacttgcatggtagttactgtgttcattaagcacaataatactcctctggtaaaagcttccggccgagaactctgctacatcctgctctttggtgttggactgtcatactgtatgacttttttcttcatagcgaagcccagtcctgtcatctgcgccctccggaggctcgggttgggaagttcattcgcgatctgttactcagccctcttgaccaagaccaactgcattgctcggatattcgatggtgttaagaacggggcacagagacccaagttcattagcccttccagccaggtttttatctgcctcggcttgatcctggtacagatcgtcatggtcagtgtgtggctgattttagaggcgccaggaaccagacgctacactctggccgaaaaacgcgaaacagtgattctcaagtgcaatgttaaagactccagtatgctgatctctttgacctacgatgtgatcttggtcatactctgtaccgtgtacgcctttaaaactcgcaagtgcccagagaattttaatgaagctaagttcatcggcttcaccatgtatactacttgtattatatggttagccttcctgccaatcttctatgttacatcgtcggactatcgcgtgcagacgactacaatgtgtatcagtgtgtctctatccggctttgtcgtccttggatgtcttttcgcgccaaaggttcatatcatcttattccagccccagaagaacgttgtgacacataggctccacctgaaccgcttcagtgtttccggcactggcaccacctactcacaatcatccgcctccacatacgttcccactgtgtgcaacggacgggaggtgctggatagcactaccagttcattatag

SEQ ID NO: 224790 - DNA, 1416 bp, synthetic construct
  misc_feature 1..1416: note = Description of Artificial Sequence: Synthetic coding sequence
  source 1..1416: mol_type = other DNA
atgcgacgcacaaaccacgaaccagagccgggatgtagattgacagcggctgctgcaacagcagttagcagctccagttgccaagagctgtctgtccgcgctcccttcaacccaaataaagacgccgactcgattgtgaaatttgacacattcggagacggaatggggaggtacaacgtattcaattttcaaaacgtaggcggtaagtactcatacctcaaggtcgggcactgggctgaaaccctctctctagacgtcaattcaatccattggtctcgcaattcagttccaactagccagtgcagcgacccctgtgcacccaatgagatgaagaatatgcagcccggtgacgtgtgttgctggatttgtatcccttgtgagccgtacgagtatttggccgacgaattcacatgtatggattgcggaagcggccagtggccaactgctgatctgacagggtgctacgatcttcctgaagattacatccgctgggaggacgcttgggccattgggccagtcaccatcgcctgtctcggcttcatgtgcacatgtatggttgttaccgtgttcattaaacataataacacgccactagtgaaggcatcaggtagggaattgtgctatatcctgctgttcggtgttgggctctcatattgtatgacattctttttcatcgcaaagccttctccagtgatttgcgccttgcgccgtcttggcctgggctcatctttcgcgatatgttattcagccctgctgactaagacaaactgcatagccagaatttttgatggagttaagaacggagctcagcggcctaaatttataagtccttcctcccaggtctttatatgcttaggcctgatccttgtccagatcgttatggtctctgtttggttgattttagaggcacccggtacccgaagatacaccctggccgagaagcgggagacagtgatcctaaaatgcaatgtaaaggattcctcaatgctgatctcactgacttatgatgtgatcttggtcatcctgtgcactgtttatgccttcaagactcggaaatgtccggaaaacttcaatgaagctaagttcatcggcttcaccatgtacaccacctgcataatatggctggcgtttcttccaattttttatgtaacgtcctcagactacagagtgcaaaccacaaccatgtgcatcagcgtgtccttaagtgggtttgtggtgctggggtgcctttttgcgcctaaagtgcacattatcctcttccagccacaaaagaatgtagtgacacataggctccatcttaatcggttctccgtgtccgggactggcactacatatagtcaatcctccgcctccacctacgttcccacagtatgcaatggcagggaggttcttgacagtaccacatcatctttatag

SEQ ID NO: 224791 - DNA, 2391 bp, synthetic construct
  misc_feature 1..2391: note = Description of Artificial Sequence: Synthetic coding sequence
  source 1..2391: mol_type = other DNA
atgcccgcttgggagcccggagtggccgcaagctgcggatggagagcgccaccttgcagccccctgaggctctgcattgcaccccatccttgcactccgccaagctcccaccagggaaacctcacttgccggcttcctcctcggagtttcggcttttgtcggtgcgtgtgggtgaggacacggggaccatccctccctggcgagcaggtctcactggccgctcacgaaagtgagggcgcagccgctcaactcggaagctcccctgagatcgacccccgtcggcctagatgcttgctgcccgagagtgcacagattccccaaattagctacgcgtctaccgcccctgatctctccgataattcccgctacgactttttctctagggtggtacctagcgatacttatcaggcacaggcaatggtcgatatcgttagggcccttaagtggaactatgtctccaccgttgcctctgagggctcatatggagagtccggtgtggaagcttttattcagaagagtagggaggatggaggcgtttgcatcgcacagagcgtaaagattccacgggagcccaaagcaggagaattcgacaagattattcgcaggctgctagagactagtaacgccagggcagttatcattttcgctaacgaagatgacattcgtcgagtccttgaggctgcgaggagggcaaaccaaacaggccatttcttttggatgggcagtgacagttggggaagcaagattgcgcctgtacttcatctggaggaggttgccgagggagcagttactatcctgccgaaaagaatgtcggttagggatcgagagcggattggccaggacagtgcctacgagcaggaggggaaggtgcagttcgttatagacgcggtttacgcaatgggccacgccctgcacgccatgcatcgcgatttatgtcccggacgggttggactgtgtccccgaatggaccctgtggatggaactcagttgctcaaatatatcaggaacgttaacttctctgggatagctggaaatccagtgactttcaatgagaatggcgatgccccaggaagatatgacatctaccaataccagctgcgtaacgacagtgcagagtataaagtgatcggcagctggactgatcatctgcatctgcgcatcgagcggatgcattggcctgggtcaggacaacagctgcctaggagtatctgcagtttaccctgccagccgggagaaagaaagaaaactgtcaagggaatgccctgttgctggcattgtgagccctgcaccggttaccagtatcaggttgatcgctacacatgtaagacctgcccttatgatatgcggcctacagagaatcgtactggatgtcgtccgattccgattatcaaactggaatggggctccccatgggccgtgctccctctgttcttagcagttgtggggatagcagcaacacttttcgtggtcattacgttcgttcgttacaacgacacgccaatcgtaaaggctagcgggagggagctgtcctatgtgttgctagccggaatttttctatgctatgcaacaacattcttaatgatcgccgagccggacctgggaacctgctcgctgcggaggatttttctcgggctcggtatgagcatctcgtatgccgctctcctcactaagacaaataggatttaccggatcttcgagcagggcaaacggagtgtgtcagccccaagattcatttctcccgcaagccagttagccattaccttttctctgatcagtcttcagctgctggggatatgcgtttggttcgtggttgatccttcccactccgtggtagattttcaagaccagcgcactcttgatcctagatttgccagaggggtgctgaaatgtgatatctctgacctctctctgatctgcctgctgggatactcaatgctccttatggttacctgtacagtctatgccattaagactagaggcgttccagaaacttttaacgaggcaaagcccatcggctttaccatgtacactacatgcatagtgtggctggcatttataccaatcttcttcggaacttcccagtctgccgacaaactttatatccagacgactacacttactgtgtccgtatccttatccgcatccgtgagcctggggatgctgtatatgccaaaggtgtatattatcctatttcaccccgaacaaaatgtaccaaagcgcaaacggagcctcaaagctgtggttacagcagccacaatgtccaataaattcacgcagaaaggaaatttccggcctaatggcgaagccaaatcagagttgtgtgaaaaccttgaggctcctgcgttggctacaaagcagacctacgtgacatatacaaaccacgctatctag

SEQ ID NO: 224792 - DNA, 2739 bp, synthetic construct
  misc_feature 1..2739: note = Description of Artificial Sequence: Synthetic coding sequence
  source 1..2739: mol_type = other DNA
atgcccggaaaacgaggcctcgggtggtggtgggcacggcttcccctttgcctcctgctatcactgtacggcccatggatgccttcatcactaggaaaaccaaaagggcatcctcatatgaactctatcagaatcgatggcgacatcactctgggaggcctgtttcccgttcatggccgtggcagcgagggaaaaccttgtggcgagctgaaaaaggagaaaggaatacatcggttggaggccatgctatttgccctggacaggataaataacgacccagacctattacccaacataactttgggagctaggatcctcgacacttgctctagggacacccatgccctggaacaaagcctgacatttgtacaggctctaatagaaaaggacggtactgaggtgaggtgcggtagcggtggccctcccatcatcaccaagcccgaacgggtcgttggggtgattggcgcatcagggagctcagttagcatcatggtcgcgaacattttaaggctattcaaaatccctcagatttcttacgcatcaaccgcccctgatctttccgataatagccggtacgactttttttcgagggtggttccttcagacacgtaccaagctcaggccatggtggacattgtccgcgctctgaagtggaattatgtgtctacagtcgcctcggaaggatcatacggggagtccggagtggaggcatttatccaaaaaagccgggaagatggtggtgtttgtatcgcccagtcggtcaaaattccacgcgaaccaaaggccggagagtttgataagatcattagacgtctgctggaaactagcaacgccagagcagtcattatcttcgcaaacgaagatgacattagaagggtcttggaagctgcgagacgcgcaaaccaaaccggccacttcttctggatgggctcagacagctggggctccaaaatcgcacccgtgctgcacctggaagaggtcgctgagggagccgttaccatactaccgaaaaggatgagtgttcgcggtttcgatcggtatttttccagtcgtaccttagataataacaggaggaacatctggtttgccgaattctgggaggacaactttcactgcaagttgagccggcacgctctaaaaaagggaagccatgtgaagaaatgcactaatcgagagaggataggacaggactcagcgtacgagcaggagggaaaggtgcagtttgtcatcgatgcagtttacgctatgggacacgcgctgcacgctatgcatagagatttgtgccccggacgggtcgggctatgtcccagaatggacccggtggacgggacccagctcctgaagtacatacgcaacgtgaacttctctggcatcgctggaaaccctgtcacattcaatgaaaatggcgatgctcctggtcggtacgatatctatcagtaccagctgagaaatgatagcgccgagtataaagttatcggatcttggaccgatcatctgcacctccgaatcgaaagaatgcactggcccggttccggacagcagctgccccgttctatttgtagtctaccttgccagcccggagagaggaaaaagactgtgaaggggatgccttgttgctggcattgtgagccatgtaccggttaccagtatcaggtggacagatacacgtgtaaaacgtgcccatacgacatgcgtcccaccgagaatagaactggctgccgacccataccgattatcaaactggagtggggcagcccatgggcggttctaccattattcctcgctgtcgtcggtattgcagccaccctgtttgtagtcattacctttgtgagatataatgatacacctattgtgaaagcaagcggccgagaactgagctatgtcctcctggccggaatttttttgtgttatgccacaacctttctcatgatagcagaacctgacctcgggacgtgttcactgcgccgtatctttcttggtttgggcatgtccatcagctacgccgctctcctgactaaaactaatcgcatctatagaatatttgagcagggcaaacgttctgtatctgcccctagattcatctcgcctgcttcccaactagctattaccttttcccttatctcactacagctcctggggatctgcgtgtggtttgtggtcgatccaagccacagcgtggtagatttccaggatcagagaacgttggatcctagatttgcacgtggtgtgctcaagtgcgacatatccgatttgagcctcatttgcctgctcggctatagcatgctgcttatggtgacttgtacggtgtatgccattaaaaccaggggggttccggagacctttaatgaggccaagcctattggtttcacgatgtatacgacttgtattgtgtggctggctttcataccaattttctttgggacgtcgcagtccgccgacaagctctatatccagacaacaaccctaacagtgagtgtgtctctgtctgcttcagtatcccttgggatgctgtacatgcctaaggtgtatatcattttatttcaccccgagcagaacgttccgaagagaaagcggagcctgaaagccgtcgtgaccgcggcaactatgtccaacaaatttactcagaaaggcaattttcgcccaaacggagaagccaagtctgaattgtgcgagaatttagaagcccctgcactggccaccaagcagacctacgtgacctatacgaatcacgccatctag

SEQ ID NO: 224793 - DNA, 2319 bp, synthetic construct
  misc_feature 1..2319: note = Description of Artificial Sequence: Synthetic coding sequence
  source 1..2319: mol_type = other DNA
atggtgcagactctgccaaagctcttcccgcacgatggcgctaagcggaagaagcgaacgcttcggacgagcgggccttgtttcggtgggggtggccaaatcccacagattagctacgcctctacagcccctgacttgtctgataattcaaggtacgacttcttcagccgggtggtcccctcagacacgtatcaggctcaggccatggtggatattgtccgtgccctgaaatggaactatgtctctaccgtcgcgtctgagggatcatacggagagtccggagtcgaagcatttattcagaaaagccgcgaggatggcggagtgtgtattgctcagagtgtcaaaatcccgagggaacccaaagccggagaattcgacaagatcatcaggcgattactggaaacatctaacgcccgagccgtgatcatttttgcaaatgaagacgacatacgcagagtgctcgaggccgctcgacgtgctaatcagacaggacactttttctggatgggaagcgacagttggggctctaagattgcccctgtcttacatctggaagaagtggctgaaggagcagtgacgatcctgccaaagagaatgagtgtccggggttttgaccgctatttcagctctcgcactttagacaacaaccggaggaacatttggtttgcagagttttgggaagataactttcattgcaagctgagtagacacgccctgaagaagggaagtcacgtcaagaagtgtacaaaccgagaacggataggtcaggattccgcctatgagcaggagggcaaagtccagttcgtgattgatgccgtttatgcaatgggccatgcactgcacgctatgcatagggatctgtgtcccggaagggtgggactgtgcccacgcatggaccccgtggatggcactcagctgctgaaatatattcgcaacgttaacttcagcggaatcgccggtaatccagtcacattcaatgaaaatggggacgcccctggcaggtacgacatatatcagtatcagctgagaaatgactctgccgaatacaaggtcatcggttcgtggacggaccatctgcacttgcgaatcgagcggatgcactggcccggaagtgggcagcaactgccgaggtccatttgctcactaccttgccagcctggcgaacgcaaaaagactgtgaagggcatgccctgctgttggcattgcgagccttgtaccggttaccagtatcaagtagatcgttacacttgcaaaacatgcccatacgatatgcgaccaactgaaaataggactggctgcagacctattccaattattaagcttgagtggggaagcccgtgggcggttttgcctttgttccttgccgtggtcggtattgcagccacattgttcgtagttattacatttgtgagatacaacgatacccctattgtgaaggcctctggcagggaattaagctacgtgttactcgccggtatttttctgtgttacgcaactacctttctgatgatcgctgaacccgatctgggaacatgctccttgagacgcatattcctgggcctcggcatgtccatctcctacgctgccctcctgacaaagaccaacagaatctatagaatctttgaacaaggaaagcggtccgtgtctgcccctcggttcatctccccggctagccagctggccattactttttctctcatttccctgcagttgttggggatatgcgtgtggtttgtcgtggacccttcccacagcgtggttgatttccaagaccagaggacacttgatcctcggttcgctcgcggtgtactgaaatgtgacatcagcgatctttctctaatatgtctgttagggtatagtatgcttctgatggtcacctgcacagtgtacgcaatcaagacccgaggagttccagagacattcaatgaggctaaaccaattgggtttactatgtacaccacatgtatcgtgtggctggccttcatcccaatattctttggcacaagccaatcggcagacaagctctacatacaaacgacaacccttacagtgtccgtcagtttgtctgcatctgtcagtttaggaatgttgtatatgccgaaagtttacattatcttgtttcaccctgaacaaaatgtgcccaaacggaaaagatcactgaaggctgtagtgactgcggcaacaatgtccaataaatttactcagaaggggaactttcggccaaatggagaagcgaagagcgagctttgcgaaaacctagaggccccagcattggcgactaaacagacgtacgtgacttacaccaatcacgccatctag

SEQ ID NO: 224794 - DNA, 2340 bp, synthetic construct
  misc_feature 1..2340: note = Description of Artificial Sequence: Synthetic coding sequence
  source 1..2340: mol_type = other DNA
atggcagtcccactgggtgccccatgctgggccagcgcattgccagcatgggcaccacctggcctgccacacagaagtctgctgacaaggctccttagccagcacgtgaagcctgcaaaaattccccagataagctatgccagtaccgcccctgaccttagtgacaactctaggtacgatttcttctctagggtagtgccttccgacacctatcaggcccaggccatggtggatatagtacgagcccttaagtggaactacgtatccaccgtcgcctccgaaggaagttatggcgaaagtggagtggaggcctttatacagaagtctcgggaagacgggggtgtgtgtatcgcccagtccgtgaagatacctcgggagccgaaagctggggagtttgacaaaattatacgaagacttctggagaccagtaatgcacgcgcagtgatcatctttgccaacgaagacgacataagacgcgtcctagaggctgctagaagggcaaaccagaccggccactttttttggatggggtccgactcctgggggtctaaaattgcccctgtgctgcacctggaggaagtggccgagggcgctgtcaccatcctacctaaaaggatgagcgtgcggggattcgaccgatacttttcgagcaggacactggataacaaccggcgtaacatctggttcgctgagttctgggaggataactttcattgtaaactgtctaggcatgctctgaaaaaaggttcacacgtcaagaaatgtaccaatagagaacggatcgggcaagactcggcatacgagcaggagggaaaagtacagtttgtgattgacgcagtgtatgccatggggcatgctttacatgctatgcacagggacctttgcccagggcgagtgggtctctgccccagaatggaccctgtggacggtacccagctattaaagtacatccgaaacgtcaattttagcggtatcgctgggaaccccgtgacatttaacgagaacggcgacgcaccaggcaggtatgacatctatcagtaccagttgcgcaatgacagcgctgagtacaaggtcatcggttcttggaccgatcatttacacctccgcattgagaggatgcattggcccggatcaggacaacagctccctcggtcaatatgctccttgccttgccagcctggggaacgcaagaaaacagtgaaggggatgccctgctgttggcactgtgagccgtgcacgggctaccagtaccaggtggatcgctacacctgcaagacttgtccttatgatatgcgacctactgaaaacagaaccggctgccggcctatccccatcattaaactggaatgggggtccccctgggcggtattaccactctttctcgccgtagtggggatcgccgctaccctgttcgtcgtcatcacgttcgtccgctacaatgatactcctatagtgaaggcctccggcagggagctgagctatgttcttctcgccggtatattcttatgttatgcgacaacatttctgatgattgccgagcccgatctgggaacatgcagcctccggagaatatttctcgggctgggaatgtccatctcatacgctgcgctgttaaccaagactaaccgcatttaccgcatttttgagcagggcaagcgctccgtatccgccccacggttcatatctcctgcttcccaactcgctattaccttttccttaattagcctgcaactgctgggaatatgcgtttggtttgttgtggatccctcgcactctgtggtggactttcaggatcagcggaccctcgacccgagattcgctagaggggtgctgaaatgtgacatttctgacctatccttgatttgcctcctcgggtactctatgttgctgatggtgacctgcaccgtctacgctatcaaaactcgaggtgtaccggagacgttcaatgaagccaagcccatcgggttcacgatgtatacaacctgtatagtgtggttggcatttattccgattttctttggcacatcccagagtgcagataaactgtatatccaaaccaccacccttaccgtgagcgtgtctctgtccgcgagtgtgtctctggggatgttgtatatgcctaaggtctacatcattttgttccacccggagcagaatgtccccaagcgcaaacggtctcttaaggctgtggttacagcggctactatgagtaacaagtttacccagaagggaaacttccgccctaacggcgaagctaaatcagaactctgcgaaaacctcgaggccccagcgcttgccactaagcaaacatatgtcacctacacaaatcacgctatttag
